(19) United States
(12) Patent Application Publication
(10) Pub. No.: US 2002/0132237 A1
(43) Pub. Date: Sep. 19, 2002

(54) Compositions and methods for the therapy and diagnosis of ovarian cancer

(75) Inventors: Paul A. Algate, Issaquah, WA (US); Robert Jones, Seattle, WA (US); Susan L. Harlocker, Seattle, WA (US)

Correspondence Address: SEED INTELLECTUAL PROPERTY LAW GROUP PLLC, 701 FIFTH AVE, SUITE 6300, SEATTLE, WA, 98104-7092, US

(73) Assignee: Corixa Corporation, Seattle, WA (US)

(21) Appl. No.: 09/867,701

(22) Filed: May 29, 2001

Related U.S. Application Data
(60) Provisional application No. 60/207,484, filed on May 26, 2000.

(51) Int. Cl. C12Q 1/68; C12P 19/34

(52) U.S. Cl. 435/6; 435/91.2

(57) ABSTRACT

Compositions and methods for the therapy and diagnosis of cancer, particularly ovarian cancer, are disclosed. Illustrative compositions comprise one or more ovarian tumor polypeptides, immunogenic portions thereof, polynucleotides that encode such polypeptides, antigen presenting cell that expresses such polypeptides, and T cells that are specific for cells expressing such polypeptides. The disclosed compositions are useful, for example, in the diagnosis, prevention and/or treatment of diseases, particularly ovarian cancer.

### CROSS REFERENCE TO RELATED APPLICATIONS

[0001] This application is related to U.S. Provisional Application No. 60/207,484 filed on May 26, 2000, which is incorporated in its entirety herein by reference.

### STATEMENT REGARDING SEQUENCE LISTING

[0002] The Sequence Listing associated with this application is provided on CD-ROM in lieu of a paper copy, and is hereby incorporated by reference into the specification. Three CD-ROMs are provided containing identical copies of the sequence listing: CD-ROM No. 1 is labeled Copy No. 1, contains the file 597.app.txt which is 6.0 MB and created on May 29, 2001; CD-ROM No. 2 is labeled Copy No. 2, contains the file 497.app.txt which is 6.0 MB and created on May 29, 2001; CD-ROM No. 3 is labeled Computer Readable Form, contains the file 497.app.txt which is 6.0 MD and created on May 29, 2001.

### TECHNICAL FIELD OF THE INVENTION

[0003] The present invention relates generally to therapy and diagnosis of cancer, such as ovarian cancer. The invention is more specifically related to polypeptides, comprising at least a portion of an ovarian tumor protein, and to polynucleotides encoding such polypeptides. Such polypeptides and polynucleotides are useful in pharmaceutical compositions, e.g., vaccines, and other compositions for the diagnosis and treatment of ovarian cancer.

### BACKGROUND OF THE INVENTION

[0004] Cancer is a significant health problem throughout the world. Although advances have been made in detection and therapy of cancer, no vaccine or other universally successful method for prevention and/or treatment is currently available. Current therapies, which are generally based on a combination of chemotherapy or surgery and radiation, continue to prove inadequate in many patients.

[0005] Ovarian cancer is a significant health problem for women in the United States and throughout the world. Although advances have been made in detection and therapy of this cancer, no vaccine or other universally successful method for prevention or treatment is currently available. Management of the disease currently relies on a combination of early diagnosis and aggressive treatment, which may include one or more of a variety of treatments such as surgery, radiotherapy, chemotherapy and hormone therapy. The course of treatment for a particular cancer is often selected based on a variety of prognostic parameters, including an analysis of specific tumor markers. However, the use of established markers often leads to a result that is difficult to interpret, and high mortality continues to be observed in many cancer patients.

[0006] Immunotherapies have the potential to substantially improve cancer treatment and survival. Such therapies may involve the generation or enhancement of an immune response to an ovarian carcinoma antigen. However, to date, relatively few ovarian carcinoma antigens are known and the generation of an immune response against such antigens has not been shown to be therapeutically beneficial.

[0007] Accordingly, there is a need in the art for improved methods for identifying ovarian tumor antigens and for using such antigens in the therapy of ovarian cancer. The present invention fulfills these needs and further provides other related advantages.

[0008] In spite of considerable research into therapies for these and other cancers, ovarian cancer remains difficult to diagnose and treat effectively. Accordingly, there is a need in the art for improved methods for detecting and treating such cancers. The present invention fulfills these needs and further provides other related advantages.

### SUMMARY OF THE INVENTION

[0009] In one aspect, the present invention provides polynucleotide compositions comprising a sequence selected from the group consisting of:

[0010] (a) sequences provided in SEQ ID NO: 1-10,912;

[0011] (b) complements of the sequences provided in SEQ ID NO: 1-10,912;

[0012] (c) sequences consisting of at least 20, 25, 30, 35, 40, 45, 50, 75 and 100 contiguous residues of a sequence provided in SEQ ID NO: 1-10,912;

[0013] (d) sequences that hybridize to a sequence provided in SEQ ID NO: 1-10,912, under moderate or highly stringent conditions;

[0014] (e) sequences having at least 75%, 80%, 85%, 90%, 95%, 96%, 97%, 98% or 99% identity to a sequence of SEQ ID NO: 1-10,912;

[0015] (f) degenerate variants of a sequence provided in SEQ ID NO: 1-10,912.

[0016] In one preferred embodiment, the polynucleotide compositions of the invention are expressed in at least about 20%, more preferably in at least about 30%, and most preferably in at least about 50% of ovarian tumors samples tested, at a level that is at least about 2-fold, preferably at least about 5-fold, and most preferably at least about 10-fold higher than that for normal tissues.

[0017] The present invention, in another aspect, provides polypeptide compositions comprising an amino acid sequence that is encoded by a polynucleotide sequence described above.

[0018] In certain preferred embodiments, the polypeptides and/or polynucleotides of the present invention are immunogenic, i.e., they are capable of eliciting an immune response, particularly a humoral and/or cellular immune response, as further described herein.

[0019] The present invention further provides fragments, variants and/or derivatives of the disclosed polypeptide and/or polynucleotide sequences, wherein the fragments, variants and/or derivatives preferably have a level of immunogenic activity of at least about 50%, preferably at least about 70% and more preferably at least about 90% of the level of immunogenic activity of a polypeptide sequence encoded by a polynucleotide sequence set forth in SEQ ID NO: 1-10,912.

[0020] The present invention further provides polynucleotides that encode a polypeptide described above, expression vectors comprising such polynucleotides and host cells transformed or transfected with such expression vectors.

[0021] Within other aspects, the present invention provides pharmaceutical compositions comprising a polypeptide or polynucleotide as described above and a physiologically acceptable carrier.

[0022] Within a related aspect of the present invention, the pharmaceutical compositions, e.g., vaccine compositions, are provided for prophylactic or therapeutic applications. Such compositions generally comprise an immunogenic polypeptide or polynucleotide of the invention and an immunostimulant, such as an adjuvant.

[0023] The present invention further provides pharmaceutical compositions that comprise: (a) an antibody or antigen-binding fragment thereof that specifically binds to a polypeptide of the present invention, or a fragment thereof; and (b) a physiologically acceptable carrier.

[0024] Within further aspects, the present invention provides pharmaceutical compositions comprising: (a) an antigen presenting cell that expresses a polypeptide as described above and (b) a pharmaceutically acceptable carrier or excipient. Illustrative antigen presenting cells include dendritic cells, macrophages, monocytes, fibroblasts and B cells.

[0025] Within related aspects, pharmaceutical compositions are provided that comprise: (a) an antigen presenting cell that expresses a polypeptide as described above and (b) an immunostimulant.

[0026] The present invention further provides, in other aspects, fusion proteins that comprise at least one polypeptide as described above, as well as polynucleotides encoding such fusion proteins, typically in the form of pharmaceutical compositions, e.g., vaccine compositions, comprising a physiologically acceptable carrier and/or an immunostimulant. The fusions proteins may comprise multiple immunogenic polypeptides or portions/variants thereof, as described herein, and may further comprise one or more polypeptide segments for facilitating the expression, purification and/or immunogenicity of the polypeptide(s).

[0027] Within further aspects, the present invention provides methods for stimulating an immune response in a patient, preferably a T cell response in a human patient, comprising administering a pharmaceutical composition described herein. The patient may be afflicted with ovarian cancer, in which case the methods provide treatment for the disease, or patient considered at risk for such a disease may be treated prophylactically.

[0028] Within further aspects, the present invention provides methods for inhibiting the development of a cancer in a patient, comprising administering to a patient a pharmaceutical composition as recited above. The patient may be afflicted with ovarian cancer, in which case the methods provide treatment for the disease, or patient considered at risk for such a disease may be treated prophylactically.

[0029] The present invention further provides, within other aspects, methods for removing tumor cells from a biological sample, comprising contacting a biological sample with T cells that specifically react with a polypeptide of the present invention, wherein the step of contacting is performed under conditions and for a time sufficient to permit the removal of cells expressing the protein from the sample.

[0030] Within related aspects, methods are provided for inhibiting the development of a cancer in a patient, comprising administering to a patient a biological sample treated as described above.

[0031] Methods are further provided, within other aspects, for stimulating and/or expanding T cells specific for a polypeptide of the present invention, comprising contacting T cells with one or more of: (i) a polypeptide as described above; (ii) a polynucleotide encoding such a polypeptide; and/or (iii) an antigen presenting cell that expresses such a polypeptide; under conditions and for a time sufficient to permit the stimulation and/or expansion of T cells. Isolated T cell populations comprising T cells prepared as described above are also provided.

[0032] Within further aspects, the present invention provides methods for inhibiting the development of a cancer in a patient, comprising administering to a patient an effective amount of a T cell population as described above.

[0033] The present invention further provides methods for inhibiting the development of a cancer in a patient, comprising the steps of: (a) incubating CD4⁺ and/or CD8⁺ T cells isolated from a patient with one or more of: (i) a polypeptide comprising at least an immunogenic portion of polypeptide disclosed herein; (ii) a polynucleotide encoding such a polypeptide; and (iii) an antigen-presenting cell that expressed such a polypeptide; and (b) administering to the patient an effective amount of the proliferated T cells, and thereby inhibiting the development of a cancer in the patient. Proliferated cells may, but need not, be cloned prior to administration to the patient.

[0034] Within further aspects, the present invention provides methods for determining the presence or absence of a cancer, preferably an ovarian cancer, in a patient comprising: (a) contacting a biological sample obtained from a patient with a binding agent that binds to a polypeptide as recited above; (b) detecting in the sample an amount of polypeptide that binds to the binding agent; and (c) comparing the amount of polypeptide with a predetermined cut-off value, and therefrom determining the presence or absence of a cancer in the patient. Within preferred embodiments, the binding agent is an antibody, more preferably a monoclonal antibody.

[0035] The present invention also provides, within other aspects, methods for monitoring the progression of a cancer in a patient. Such methods comprise the steps of: (a) contacting a biological sample obtained from a patient at a first point in time with a binding agent that binds to a polypeptide as recited above; (b) detecting in the sample an amount of polypeptide that binds to the binding agent; (c) repeating steps (a) and (b) using a biological sample obtained from the patient at a subsequent point in time; and (d) comparing the amount of polypeptide detected in step (c) with the amount detected in step (b) and therefrom monitoring the progression of the cancer in the patient.

[0036] The present invention further provides, within other aspects, methods for determining the presence or absence of a cancer in a patient, comprising the steps of: (a) contacting a biological sample, e.g., tumor sample, serum sample, etc., obtained from a patient with an oligonucleotide that hybridizes to a polynucleotide that encodes a polypeptide of the present invention; (b) detecting in the sample a level of a polynucleotide, preferably mRNA, that hybridizes to the oligonucleotide; and (c) comparing the level of polynucleotide that hybridizes to the oligonucleotide with a predetermined cut-off value, and therefrom determining the presence or absence of a cancer in the patient. Within certain embodiments, the amount of mRNA is detected via polymerase chain reaction using, for example, at least one oligonucleotide primer that hybridizes to a polynucleotide encoding a polypeptide as recited above, or a complement of such a polynucleotide. Within other embodiments, the amount of mRNA is detected using a hybridization technique, employing an oligonucleotide probe that hybridizes to a polynucleotide that encodes a polypeptide as recited above, or a complement of such a polynucleotide.

[0037] In related aspects, methods are provided for monitoring the progression of a cancer in a patient, comprising the steps of: (a) contacting a biological sample obtained from a patient with an oligonucleotide that hybridizes to a polynucleotide that encodes a polypeptide of the present invention; (b) detecting in the sample an amount of a polynucleotide that hybridizes to the oligonucleotide; (c) repeating steps (a) and (b) using a biological sample obtained from the patient at a subsequent point in time; and (d) comparing the amount of polynucleotide detected in step (c) with the amount detected in step (b) and therefrom monitoring the progression of the cancer in the patient.

[0038] Within further aspects, the present invention provides antibodies, such as monoclonal antibodies, that bind to a polypeptide as described above, as well as diagnostic kits comprising such antibodies. Diagnostic kits comprising one or more oligonucleotide probes or primers as described above are also provided.

[0039] These and other aspects of the present invention will become apparent upon reference to the following detailed description. All references disclosed herein are hereby incorporated by reference in their entirety as if each was incorporated individually.

### BRIEF DESCRIPTION OF THE SEQUENCE IDENTIFIERS

[0040] SEQ ID NO: 1 represents the cDNA sequence for clone T29202.

[0041] SEQ ID NO: 2 represents the cDNA sequence for clone T29204.

[0042] SEQ ID NO: 3 represents the cDNA sequence for clone T29205.

[0043] SEQ ID NO: 4 represents the cDNA sequence for clone T29208.

[0044] SEQ ID NO: 5 represents the cDNA sequence for clone T29210.

[0045] SEQ ID NO: 6 represents the cDNA sequence for clone T29221.

[0046] SEQ ID NO: 7 represents the cDNA sequence for clone T29223.

[0047] SEQ ID NO: 8 represents the cDNA sequence for clone T34666.

[0048] SEQ ID NO: 9 represents the cDNA sequence for clone T34668.

[0049] SEQ ID NO: 10 represents the cDNA sequence for clone T34674.

[0050] SEQ ID NO: 11 represents the cDNA sequence for clone T34677.

[0051] SEQ ID NO: 12 represents the cDNA sequence for clone T34681.

[0052] SEQ ID NO: 13 represents the cDNA sequence for clone T34684.

[0053] SEQ ID NO: 14 represents the cDNA sequence for clone T34698.

[0054] SEQ ID NO: 15 represents the cDNA sequence for clone T34699.

[0055] SEQ ID NO: 16 represents the cDNA sequence for clone T34703.

[0056] SEQ ID NO: 17 represents the cDNA sequence for clone T40200.

[0057] SEQ ID NO: 18 represents the cDNA sequence for clone T40207.

[0058] SEQ ID NO: 19 represents the cDNA sequence for clone T40208.

[0059] SEQ ID NO: 20 represents the cDNA sequence for clone T40210.

[0060] SEQ ID NO: 21 represents the cDNA sequence for clone T40217.

[0061] SEQ ID NO: 22 represents the cDNA sequence for clone T40224.

[0062] SEQ ID NO: 23 represents the cDNA sequence for clone T40226.

[0063] SEQ ID NO: 24 represents the cDNA sequence for clone T40227.

[0064] SEQ ID NO: 25 represents the cDNA sequence for clone T40228.

[0065] SEQ ID NO: 26 represents the cDNA sequence for clone T40231.

[0066] SEQ ID NO: 27 represents the cDNA sequence for clone T40232.

[0067] SEQ ID NO: 28 represents the cDNA sequence for clone T40237.

[0068] SEQ ID NO: 29 represents the cDNA sequence for clone T40241.

[0069] SEQ ID NO: 30 represents the cDNA sequence for clone T40243.

[0070] SEQ ID NO: 31 represents the cDNA sequence for clone T40245.

[0071] SEQ ID NO: 32 represents the cDNA sequence for clone T40246.

[0072] SEQ ID NO: 33 represents the cDNA sequence for clone T40247.

[0073] SEQ ID NO: 34 represents the cDNA sequence for clone T40251.

[0074] SEQ ID NO: 35 represents the cDNA sequence for clone T40258.

[0075] SEQ ID NO: 36 represents the cDNA sequence for clone T40259.

[0076] SEQ ID NO: 37 represents the cDNA sequence for clone T40260.

[0077] SEQ ID NO: 38 represents the cDNA sequence for clone T40264.

[0078] SEQ ID NO: 39 represents the cDNA sequence for clone T40265.

[0079] SEQ ID NO: 40 represents the cDNA sequence for clone T40273.

[0080] SEQ ID NO: 41 represents the cDNA sequence for clone T40274.

[0081] SEQ ID NO: 42 represents the cDNA sequence for clone T40283.

[0082] SEQ ID NO: 43 represents the cDNA sequence for clone T40284.

[0083] SEQ ID NO: 44 represents the cDNA sequence for clone T40287.

[0084] SEQ ID NO: 45 represents the cDNA sequence for clone T40288.

[0085] SEQ ID NO: 46 represents the cDNA sequence for clone T40289.

[0086] SEQ ID NO: 47 represents the cDNA sequence for clone T40291.

[0087] SEQ ID NO: 48 represents the cDNA sequence for clone T40292.

[0088] SEQ ID NO: 49 represents the cDNA sequence for clone T40293.

[0089] SEQ ID NO: 50 represents the cDNA sequence for clone T40295.

[0090] SEQ ID NO: 51 represents the cDNA sequence for clone T40296.

[0091] SEQ ID NO: 52 represents the cDNA sequence for clone T40299.

[0092] SEQ ID NO: 53 represents the cDNA sequence for clone T40300.

[0093] SEQ ID NO: 54 represents the cDNA sequence for clone T40305.

[0094] SEQ ID NO: 55 represents the cDNA sequence for clone T40306.

[0095] SEQ ID NO: 56 represents the cDNA sequence for clone T40311.

[0096] SEQ ID NO: 57 represents the cDNA sequence for clone T40319.

[0097] SEQ ID NO: 58 represents the cDNA sequence for clone T40320.

[0098] SEQ ID NO: 59 represents the cDNA sequence for clone T40321.

[0099] SEQ ID NO: 60 represents the cDNA sequence for clone T40326.

[0100] SEQ ID NO: 61 represents the cDNA sequence for clone T40329.

[0101] SEQ ID NO: 62 represents the cDNA sequence for clone T40342.

[0102] SEQ ID NO: 63 represents the cDNA sequence for clone T40344.

[0103] SEQ ID NO: 64 represents the cDNA sequence for clone T40348.

[0104] SEQ ID NO: 65 represents the cDNA sequence for clone T40354.

[0105] SEQ ID NO: 66 represents the cDNA sequence for clone T40359.

[0106] SEQ ID NO: 67 represents the cDNA sequence for clone T40361.

[0107] SEQ ID NO: 68 represents the cDNA sequence for clone T40366.

[0108] SEQ ID NO: 69 represents the cDNA sequence for clone T40368.

[0109] SEQ ID NO: 70 represents the cDNA sequence for clone T40369.

[0110] SEQ ID NO: 71 represents the cDNA sequence for clone T40374.

[0111] SEQ ID NO: 72 represents the cDNA sequence for clone T40381.

[0112] SEQ ID NO: 73 represents the cDNA sequence for clone T40383.

[0113] SEQ ID NO: 74 represents the cDNA sequence for clone T40386.

[0114] SEQ ID NO: 75 represents the cDNA sequence for clone T40389.

[0115] SEQ ID NO: 76 represents the cDNA sequence for clone T40390.

[0116] SEQ ID NO: 77 represents the cDNA sequence for clone T40397.

[0117] SEQ ID NO: 78 represents the cDNA sequence for clone T40403.

[0118] SEQ ID NO: 79 represents the cDNA sequence for clone T40411.

[0119] SEQ ID NO: 80 represents the cDNA sequence for clone T40412.

[0120] SEQ ID NO: 81 represents the cDNA sequence for clone T40413.

[0121] SEQ ID NO: 82 represents the cDNA sequence for clone T40414.

[0122] SEQ ID NO: 83 represents the cDNA sequence for clone T40417.

[0123] SEQ ID NO: 84 represents the cDNA sequence for clone T40420.

[0124] SEQ ID NO: 85 represents the cDNA sequence for clone T40424.

[0125] SEQ ID NO: 86 represents the cDNA sequence for clone T41068.

[0126] SEQ ID NO: 87 represents the cDNA sequence for clone T41069.

[0127] SEQ ID NO: 88 represents the cDNA sequence for clone T41074.

[0128] SEQ ID NO: 89 represents the cDNA sequence for clone T41075.

[0129] SEQ ID NO: 90 represents the cDNA sequence for clone T41080.

[0130] SEQ ID NO: 91 represents the cDNA sequence for clone T41090.

[0131] SEQ ID NO: 92 represents the cDNA sequence for clone T41092.

[0132] SEQ ID NO: 93 represents the cDNA sequence for clone T41093.

[0133] SEQ ID NO: 94 represents the cDNA sequence for clone T41094.

[0134] SEQ ID NO: 95 represents the cDNA sequence for clone T41097.

[0135] SEQ ID NO: 96 represents the cDNA sequence for clone T41106.

[0136] SEQ ID NO: 97 represents the cDNA sequence for clone T41108.

[0137] SEQ ID NO: 98 represents the cDNA sequence for clone T41112.

[0138] SEQ ID NO: 99 represents the cDNA sequence for clone T41116.

[0139] SEQ ID NO: 100 represents the cDNA sequence for clone T41117.

[0140] SEQ ID NO: 101 represents the cDNA sequence for clone T41120.

[0141] SEQ ID NO: 102 represents the cDNA sequence for clone T41121.

[0142] SEQ ID NO: 103 represents the cDNA sequence for clone T41122.

[0143] SEQ ID NO: 104 represents the cDNA sequence for clone T41123.

[0144] SEQ ID NO: 105 represents the cDNA sequence for clone T41124.

[0145] SEQ ID NO: 106 represents the cDNA sequence for clone T41126.

[0146] SEQ ID NO: 107 represents the cDNA sequence for clone T41127.

[0147] SEQ ID NO: 108 represents the cDNA sequence for clone T41128.

[0148] SEQ ID NO: 109 represents the cDNA sequence for clone T41129.

[0149] SEQ ID NO: 110 represents the cDNA sequence for clone T41132.

[0150] SEQ ID NO: 111 represents the cDNA sequence for clone T41134.

[0151] SEQ ID NO: 112 represents the cDNA sequence for clone T41139.

[0152] SEQ ID NO: 113 represents the cDNA sequence for clone T41141.

[0153] SEQ ID NO: 114 represents the cDNA sequence for clone T41145.

[0154] SEQ ID NO: 115 represents the cDNA sequence for clone T41148.

[0155] SEQ ID NO: 116 represents the cDNA sequence for clone T41149.

[0156] SEQ ID NO: 117 represents the cDNA sequence for clone T41151.

[0157] SEQ ID NO: 118 represents the cDNA sequence for clone T41152.

[0158] SEQ ID NO: 119 represents the cDNA sequence for clone T41153.

[0159] SEQ ID NO: 120 represents the cDNA sequence for clone T41154.

[0160] SEQ ID NO: 121 represents the cDNA sequence for clone T41155.

[0161] SEQ ID NO: 122 represents the cDNA sequence for clone T41157.

[0162] SEQ ID NO: 123 represents the cDNA sequence for clone T41159.

[0163] SEQ ID NO: 124 represents the cDNA sequence for clone T41160.

[0164] SEQ ID NO: 125 represents the cDNA sequence for clone T41161.

[0165] SEQ ID NO: 126 represents the cDNA sequence for clone T41164.

[0166] SEQ ID NO: 127 represents the cDNA sequence for clone T41169.

[0167] SEQ ID NO: 128 represents the cDNA sequence for clone T41174.

[0168] SEQ ID NO: 129 represents the cDNA sequence for clone T41177.

[0169] SEQ ID NO: 130 represents the cDNA sequence for clone T41185.

[0170] SEQ ID NO: 131 represents the cDNA sequence for clone T41189.

[0171] SEQ ID NO: 132 represents the cDNA sequence for clone T41190.

[0172] SEQ ID NO: 133 represents the cDNA sequence for clone T41191.

[0173] SEQ ID NO: 134 represents the cDNA sequence for clone T41201.

[0174] SEQ ID NO: 135 represents the cDNA sequence for clone T41203.

[0175] SEQ ID NO: 136 represents the cDNA sequence for clone T41207.

[0176] SEQ ID NO: 137 represents the cDNA sequence for clone T41216.

[0177] SEQ ID NO: 138 represents the cDNA sequence for clone T41220.

[0178] SEQ ID NO: 139 represents the cDNA sequence for clone T41223.

[0179] SEQ ID NO: 140 represents the cDNA sequence for clone T41226.

[0180] SEQ ID NO: 141 represents the cDNA sequence for clone T41232.

[0181] SEQ ID NO: 142 represents the cDNA sequence for clone T41234.

[0182] SEQ ID NO: 143 represents the cDNA sequence for clone T41236.

[0183] SEQ ID NO: 144 represents the cDNA sequence for clone T41238.

[0184] SEQ ID NO: 145 represents the cDNA sequence for clone T41244.

[0185] SEQ ID NO: 146 represents the cDNA sequence for clone T41250.

[0186] SEQ ID NO: 147 represents the cDNA sequence for clone T41257.

[0187] SEQ ID NO: 148 represents the cDNA sequence for clone T41258.

[0188] SEQ ID NO: 149 represents the cDNA sequence for clone T41260.

[0189] SEQ ID NO: 150 represents the cDNA sequence for clone T41262.

[0190] SEQ ID NO: 151 represents the cDNA sequence for clone T41264.

[0191] SEQ ID NO: 152 represents the cDNA sequence for clone T41267.

[0192] SEQ ID NO: 153 represents the cDNA sequence for clone T47075.

[0193] SEQ ID NO: 154 represents the cDNA sequence for clone T47077.

[0194] SEQ ID NO: 155 represents the cDNA sequence for clone T47079.

[0195] SEQ ID NO: 156 represents the cDNA sequence for clone T47083.

[0196] SEQ ID NO: 157 represents the cDNA sequence for clone T47092.

[0197] SEQ ID NO: 158 represents the cDNA sequence for clone T47093.

[0198] SEQ ID NO: 159 represents the cDNA sequence for clone T47096.

[0199] SEQ ID NO: 160 represents the cDNA sequence for clone T47097.

[0200] SEQ ID NO: 161 represents the cDNA sequence for clone T47098.

[0201] SEQ ID NO: 162 represents the cDNA sequence for clone T47099.

[0202] SEQ ID NO: 163 represents the cDNA sequence for clone T47100.

[0203] SEQ ID NO: 164 represents the cDNA sequence for clone T47101.

[0204] SEQ ID NO: 165 represents the cDNA sequence for clone T47102.

[0205] SEQ ID NO: 166 represents the cDNA sequence for clone T47103.

[0206] SEQ ID NO: 167 represents the cDNA sequence for clone T47106.

[0207] SEQ ID NO: 168 represents the cDNA sequence for clone T47112.

[0208] SEQ ID NO: 169 represents the cDNA sequence for clone T47113.

[0209] SEQ ID NO: 170 represents the cDNA sequence for clone T47114.

[0210] SEQ ID NO: 171 represents the cDNA sequence for clone T47124.

[0211] SEQ ID NO: 172 represents the cDNA sequence for clone T47125.

[0212] SEQ ID NO: 173 represents the cDNA sequence for clone T47128.

[0213] SEQ ID NO: 174 represents the cDNA sequence for clone T47129.

[0214] SEQ ID NO: 175 represents the cDNA sequence for clone T47130.

[0215] SEQ ID NO: 176 represents the cDNA sequence for clone T47139.

[0216] SEQ ID NO: 177 represents the cDNA sequence for clone T47140.

[0217] SEQ ID NO: 178 represents the cDNA sequence for clone T47141.

[0218] SEQ ID NO: 179 represents the cDNA sequence for clone T47142.

[0219] SEQ ID NO: 180 represents the cDNA sequence for clone T47148.

[0220] SEQ ID NO: 181 represents the cDNA sequence for clone T47149.

[0221] SEQ ID NO: 182 represents the cDNA sequence for clone T47150.

[0222] SEQ ID NO: 183 represents the cDNA sequence for clone T47151.

[0223] SEQ ID NO: 184 represents the cDNA sequence for clone T47156.

[0224] SEQ ID NO: 185 represents the cDNA sequence for clone T47157.

[0225] SEQ ID NO: 186 represents the cDNA sequence for clone T47160.

[0226] SEQ ID NO: 187 represents the cDNA sequence for clone T47162.

[0227] SEQ ID NO: 188 represents the cDNA sequence for clone T47163.

[0228] SEQ ID NO: 189 represents the cDNA sequence for clone T47164.

[0229] SEQ ID NO: 190 represents the cDNA sequence for clone T47168.

[0230] SEQ ID NO: 191 represents the cDNA sequence for clone T47171.

[0231] SEQ ID NO: 192 represents the cDNA sequence for clone T47172.

[0232] SEQ ID NO: 193 represents the cDNA sequence for clone T47176.

[0233] SEQ ID NO: 194 represents the cDNA sequence for clone T47177.

[0234] SEQ ID NO: 195 represents the cDNA sequence for clone T47180.

[0235] SEQ ID NO: 196 represents the cDNA sequence for clone T47181.

[0236] SEQ ID NO: 197 represents the cDNA sequence for clone T47185.

[0237] SEQ ID NO: 198 represents the cDNA sequence for clone T47187.

[0238] SEQ ID NO: 199 represents the cDNA sequence for clone T47188.

[0239] SEQ ID NO: 200 represents the cDNA sequence for clone T47194.

[0240] SEQ ID NO: 201 represents the cDNA sequence for clone T47195.

[0241] SEQ ID NO: 202 represents the cDNA sequence for clone T47197.

[0242] SEQ ID NO: 203 represents the cDNA sequence for clone T47205.

[0243] SEQ ID NO: 204 represents the cDNA sequence for clone T47206.

[0244] SEQ ID NO: 205 represents the cDNA sequence for clone T47208.

[0245] SEQ ID NO: 206 represents the cDNA sequence for clone T47209.

[0246] SEQ ID NO: 207 represents the cDNA sequence for clone T47214.

[0247] SEQ ID NO: 208 represents the cDNA sequence for clone T47215.

[0248] SEQ ID NO: 209 represents the cDNA sequence for clone T47218.

[0249] SEQ ID NO: 210 represents the cDNA sequence for clone T47219.

[0250] SEQ ID NO: 211 represents the cDNA sequence for clone T47220.

[0251] SEQ ID NO: 212 represents the cDNA sequence for clone T47221.

[0252] SEQ ID NO: 213 represents the cDNA sequence for clone T47222.

[0253] SEQ ID NO: 214 represents the cDNA sequence for clone T47223.

[0254] SEQ ID NO: 215 represents the cDNA sequence for clone T47224.

[0255] SEQ ID NO: 216 represents the cDNA sequence for clone T47231.

[0256] SEQ ID NO: 217 represents the cDNA sequence for clone T47232.

[0257] SEQ ID NO: 218 represents the cDNA sequence for clone T47235.

[0258] SEQ ID NO: 219 represents the cDNA sequence for clone T47236.

[0259] SEQ ID NO: 220 represents the cDNA sequence for clone T47247.

[0260] SEQ ID NO: 221 represents the cDNA sequence for clone T47248.

[0261] SEQ ID NO: 222 represents the cDNA sequence for clone T47253.

[0262] SEQ ID NO: 223 represents the cDNA sequence for clone T47254.

[0263] SEQ ID NO: 224 represents the cDNA sequence for clone T47255.

[0264] SEQ ID NO: 225 represents the cDNA sequence for clone T47256.

[0265] SEQ ID NO: 226 represents the cDNA sequence for clone T47259.

[0266] SEQ ID NO: 227 represents the cDNA sequence for clone T47260.

[0267] SEQ ID NO: 228 represents the cDNA sequence for clone T47261.

[0268] SEQ ID NO: 229 represents the cDNA sequence for clone T47262.

[0269] SEQ ID NO: 230 represents the cDNA sequence for clone T47273.

[0270] SEQ ID NO: 231 represents the cDNA sequence for clone T47274.

[0271] SEQ ID NO: 232 represents the cDNA sequence for clone T47279.

[0272] SEQ ID NO: 233 represents the cDNA sequence for clone T47280.

[0273] SEQ ID NO: 234 represents the cDNA sequence for clone T47284.

[0274] SEQ ID NO: 235 represents the cDNA sequence for clone T47285.

[0275] SEQ ID NO: 236 represents the cDNA sequence for clone T47286.

[0276] SEQ ID NO: 237 represents the cDNA sequence for clone T47289.

[0277] SEQ ID NO: 238 represents the cDNA sequence for clone T47290.

[0278] SEQ ID NO: 239 represents the cDNA sequence for clone T47291.

[0279] SEQ ID NO: 240 represents the cDNA sequence for clone T49706.

[0280] SEQ ID NO: 241 represents the cDNA sequence for clone T49707.

[0281] SEQ ID NO: 242 represents the cDNA sequence for clone T49723.

[0282] SEQ ID NO: 243 represents the cDNA sequence for clone T49724.

[0283] SEQ ID NO: 244 represents the cDNA sequence for clone T49730.

[0284] SEQ ID NO: 245 represents the cDNA sequence for clone T49744.

[0285] SEQ ID NO: 246 represents the cDNA sequence for clone T49747.

[0286] SEQ ID NO: 247 represents the cDNA sequence for clone T49748.

[0287] SEQ ID NO: 248 represents the cDNA sequence for clone T49751.

[0288] SEQ ID NO: 249 represents the cDNA sequence for clone T49752.

[0289] SEQ ID NO: 250 represents the cDNA sequence for clone T49759.

[0290] SEQ ID NO: 251 represents the cDNA sequence for clone T49760.

[0291] SEQ ID NO: 252 represents the cDNA sequence for clone T49765.

[0292] SEQ ID NO: 253 represents the cDNA sequence for clone T49766.

[0293] SEQ ID NO: 254 represents the cDNA sequence for clone T49769.

[0294] SEQ ID NO: 255 represents the cDNA sequence for clone T49770.

[0295] SEQ ID NO: 256 represents the cDNA sequence for clone T49775.

[0296] SEQ ID NO: 257 represents the cDNA sequence for clone T49782.

[0297] SEQ ID NO: 258 represents the cDNA sequence for clone T49783.

[0298] SEQ ID NO: 259 represents the cDNA sequence for clone T49785.

[0299] SEQ ID NO: 260 represents the cDNA sequence for clone T49786.

[0300] SEQ ID NO: 261 represents the cDNA sequence for clone T49787.

[0301] SEQ ID NO: 262 represents the cDNA sequence for clone T49788.

[0302] SEQ ID NO: 263 represents the cDNA sequence for clone T49789.

[0303] SEQ ID NO: 264 represents the cDNA sequence for clone T50099.

[0304] SEQ ID NO: 265 represents the cDNA sequence for clone T50103.

[0305] SEQ ID NO: 266 represents the cDNA sequence for clone T50105.

[0306] SEQ ID NO: 267 represents the cDNA sequence for clone T50111.

[0307] SEQ ID NO: 268 represents the cDNA sequence for clone T50112.

[0308] SEQ ID NO: 269 represents the cDNA sequence for clone T50113.

[0309] SEQ ID NO: 270 represents the cDNA sequence for clone T50116.

[0310] SEQ ID NO: 271 represents the cDNA sequence for clone T50118.

[0311] SEQ ID NO: 272 represents the cDNA sequence for clone T50121.

[0312] SEQ ID NO: 273 represents the cDNA sequence for clone T50122.

[0313] SEQ ID NO: 274 represents the cDNA sequence for clone T50123.

[0314] SEQ ID NO: 275 represents the cDNA sequence for clone T50125.

[0315] SEQ ID NO: 276 represents the cDNA sequence for clone T50126.

[0316] SEQ ID NO: 277 represents the cDNA sequence for clone T50127.

[0317] SEQ ID NO: 278 represents the cDNA sequence for clone T50128.

[0318] SEQ ID NO: 279 represents the cDNA sequence for clone T50131.

[0319] SEQ ID NO: 280 represents the cDNA sequence for clone T50132.

[0320] SEQ ID NO: 281 represents the cDNA sequence for clone T50137.

[0321] SEQ ID NO: 282 represents the cDNA sequence for clone T50138.

[0322] SEQ ID NO: 283 represents the cDNA sequence for clone T50141.

[0323] SEQ ID NO: 284 represents the cDNA sequence for clone T50143.

[0324] SEQ ID NO: 285 represents the cDNA sequence for clone T50151.

[0325] SEQ ID NO: 286 represents the cDNA sequence for clone T50152.

[0326] SEQ ID NO: 287 represents the cDNA sequence for clone T50157.

[0327] SEQ ID NO: 288 represents the cDNA sequence for clone T50163.

[0328] SEQ ID NO: 289 represents the cDNA sequence for clone T50164.

[0329] SEQ ID NO: 290 represents the cDNA sequence for clone T50165.

[0330] SEQ ID NO: 291 represents the cDNA sequence for clone T50169.

[0331] SEQ ID NO: 292 represents the cDNA sequence for clone T50172.

[0332] SEQ ID NO: 293 represents the cDNA sequence for clone T50173.

[0333] SEQ ID NO: 294 represents the cDNA sequence for clone T50174.

[0334] SEQ ID NO: 295 represents the cDNA sequence for clone T50176.

[0335] SEQ ID NO: 296 represents the cDNA sequence for clone T50177.

[0336] SEQ ID NO: 297 represents the cDNA sequence for clone T50178.

[0337] SEQ ID NO: 298 represents the cDNA sequence for clone T50179.

[0338] SEQ ID NO: 299 represents the cDNA sequence for clone T50181.

[0339] SEQ ID NO: 300 represents the cDNA sequence for clone T50184.

[0340] SEQ ID NO: 301 represents the cDNA sequence for clone T50185.

[0341] SEQ ID NO: 302 represents the cDNA sequence for clone T50191.

[0342] SEQ ID NO: 303 represents the cDNA sequence for clone T50192.

[0343] SEQ ID NO: 304 represents the cDNA sequence for clone T50193.

[0344] SEQ ID NO: 305 represents the cDNA sequence for clone T50197.

[0345] SEQ ID NO: 306 represents the cDNA sequence for clone T50205.

[0346] SEQ ID NO: 307 represents the cDNA sequence for clone T50207.

[0347] SEQ ID NO: 308 represents the cDNA sequence for clone T50209.

[0348] SEQ ID NO: 309 represents the cDNA sequence for clone T50211.

[0349] SEQ ID NO: 310 represents the cDNA sequence for clone T50212.

[0350] SEQ ID NO: 311 represents the cDNA sequence for clone T50213.

[0351] SEQ ID NO: 312 represents the cDNA sequence for clone T50218.

[0352] SEQ ID NO: 313 represents the cDNA sequence for clone T50225.

[0353] SEQ ID NO: 314 represents the cDNA sequence for clone T50226.

[0354] SEQ ID NO: 315 represents the cDNA sequence for clone T50229.

[0355] SEQ ID NO: 316 represents the cDNA sequence for clone T50231.

[0356] SEQ ID NO: 317 represents the cDNA sequence for clone T50232.

[0357] SEQ ID NO: 318 represents the cDNA sequence for clone T50235.

[0358] SEQ ID NO: 319 represents the cDNA sequence for clone T50238.

[0359] SEQ ID NO: 320 represents the cDNA sequence for clone T50240.

[0360] SEQ ID NO: 321 represents the cDNA sequence for clone T50244.

[0361] SEQ ID NO: 322 represents the cDNA sequence for clone T50247.

[0362] SEQ ID NO: 323 represents the cDNA sequence for clone T50248.

[0363] SEQ ID NO: 324 represents the cDNA sequence for clone T50251.

[0364] SEQ ID NO: 325 represents the cDNA sequence for clone T50255.

[0365] SEQ ID NO: 326 represents the cDNA sequence for clone T50256.

[0366] SEQ ID NO: 327 represents the cDNA sequence for clone T50261.

[0367] SEQ ID NO: 328 represents the cDNA sequence for clone T50266.

[0368] SEQ ID NO: 329 represents the cDNA sequence for clone T50273.

[0369] SEQ ID NO: 330 represents the cDNA sequence for clone T50276.

[0370] SEQ ID NO: 331 represents the cDNA sequence for clone T50277.

[0371] SEQ ID NO: 332 represents the cDNA sequence for clone T50352.

[0372] SEQ ID NO: 333 represents the cDNA sequence for clone T50355.

[0373] SEQ ID NO: 334 represents the cDNA sequence for clone T50357.

[0374] SEQ ID NO: 335 represents the cDNA sequence for clone T50358.

[0375] SEQ ID NO: 336 represents the cDNA sequence for clone T50360.

[0376] SEQ ID NO: 337 represents the cDNA sequence for clone T50370.

[0377] SEQ ID NO: 338 represents the cDNA sequence for clone T50376.

[0378] SEQ ID NO: 339 represents the cDNA sequence for clone T50377.

[0379] SEQ ID NO: 340 represents the cDNA sequence for clone T50424.

[0380] SEQ ID NO: 341 represents the cDNA sequence for clone T50425.

[0381] SEQ ID NO: 342 represents the cDNA sequence for clone T50426.

[0382] SEQ ID NO: 343 represents the cDNA sequence for clone T50432.

[0383] SEQ ID NO: 344 represents the cDNA sequence for clone T50438.

[0384] SEQ ID NO: 345 represents the cDNA sequence for clone T50439.

[0385] SEQ ID NO: 346 represents the cDNA sequence for clone T50440.

[0386] SEQ ID NO: 347 represents the cDNA sequence for clone T50442.

[0387] SEQ ID NO: 348 represents the cDNA sequence for clone T50443.

[0388] SEQ ID NO: 349 represents the cDNA sequence for clone T50444.

[0389] SEQ ID NO: 350 represents the cDNA sequence for clone T50448.

[0390] SEQ ID NO: 351 represents the cDNA sequence for clone T50488.

[0391] SEQ ID NO: 352 represents the cDNA sequence for clone T50489.

[0392] SEQ ID NO: 353 represents the cDNA sequence for clone T50492.

[0393] SEQ ID NO: 354 represents the cDNA sequence for clone T50505.

[0394] SEQ ID NO: 355 represents the cDNA sequence for clone T50506.

[0395] SEQ ID NO: 356 represents the cDNA sequence for clone T50509.

[0396] SEQ ID NO: 357 represents the cDNA sequence for clone T50513.

[0397] SEQ ID NO: 358 represents the cDNA sequence for clone T50514.

[0398] SEQ ID NO: 359 represents the cDNA sequence for clone T50555.

[0399] SEQ ID NO: 360 represents the cDNA sequence for clone T50556.

[0400] SEQ ID NO: 361 represents the cDNA sequence for clone T50557.

[0401] SEQ ID NO: 362 represents the cDNA sequence for clone T50560.

[0402] SEQ ID NO: 363 represents the cDNA sequence for clone T50568.

[0403] SEQ ID NO: 364 represents the cDNA sequence for clone T50570.

[0404] SEQ ID NO: 365 represents the cDNA sequence for clone T50571.

[0405] SEQ ID NO: 366 represents the cDNA sequence for clone T50572.

[0406] SEQ ID NO: 367 represents the cDNA sequence for clone T50576.

[0407] SEQ ID NO: 368 represents the cDNA sequence for clone T50577.

[0408] SEQ ID NO: 369 represents the cDNA sequence for clone T50578.

[0409] SEQ ID NO: 370 represents the cDNA sequence for clone T50582.

[0410] SEQ ID NO: 371 represents the cDNA sequence for clone T50622.

[0411] SEQ ID NO: 372 represents the cDNA sequence for clone T50623.

[0412] SEQ ID NO: 373 represents the cDNA sequence for clone T50627.

[0413] SEQ ID NO: 374 represents the cDNA sequence for clone T50632.

[0414] SEQ ID NO: 375 represents the cDNA sequence for clone T50637.

[0415] SEQ ID NO: 376 represents the cDNA sequence for clone T50641.

[0416] SEQ ID NO: 377 represents the cDNA sequence for clone T50642.

[0417] SEQ ID NO: 378 represents the cDNA sequence for clone T50644.

[0418] SEQ ID NO: 379 represents the cDNA sequence for clone T50648.

[0419] SEQ ID NO: 380 represents the cDNA sequence for clone T50649.

[0420] SEQ ID NO: 381 represents the cDNA sequence for clone T50971.

[0421] SEQ ID NO: 382 represents the cDNA sequence for clone T50973.

[0422] SEQ ID NO: 383 represents the cDNA sequence for clone T50974.

[0423] SEQ ID NO: 384 represents the cDNA sequence for clone T50982.

[0424] SEQ ID NO: 385 represents the cDNA sequence for clone T50984.

[0425] SEQ ID NO: 386 represents the cDNA sequence for clone T50986.

[0426] SEQ ID NO: 387 represents the cDNA sequence for clone T50989.

[0427] SEQ ID NO: 388 represents the cDNA sequence for clone T50991.

[0428] SEQ ID NO: 389 represents the cDNA sequence for clone T50992.

[0429] SEQ ID NO: 390 represents the cDNA sequence for clone T50994.

[0430] SEQ ID NO: 391 represents the cDNA sequence for clone T50995.

[0431] SEQ ID NO: 392 represents the cDNA sequence for clone T50996.

[0432] SEQ ID NO: 393 represents the cDNA sequence for clone T50998.

[0433] SEQ ID NO: 394 represents the cDNA sequence for clone T51002.

[0434] SEQ ID NO: 395 represents the cDNA sequence for clone T51004.

[0435] SEQ ID NO: 396 represents the cDNA sequence for clone T51008.

[0436] SEQ ID NO: 397 represents the cDNA sequence for clone T51009.

[0437] SEQ ID NO: 398 represents the cDNA sequence for clone T51021.

[0438] SEQ ID NO: 399 represents the cDNA sequence for clone T51026.

[0439] SEQ ID NO: 400 represents the cDNA sequence for clone T51028.

[0440] SEQ ID NO: 401 represents the cDNA sequence for clone T51030.

[0441] SEQ ID NO: 402 represents the cDNA sequence for clone T51031.

[0442] SEQ ID NO: 403 represents the cDNA sequence for clone T51034.

[0443] SEQ ID NO: 404 represents the cDNA sequence for clone T51037.

[0444] SEQ ID NO: 405 represents the cDNA sequence for clone T51045.

[0445] SEQ ID NO: 406 represents the cDNA sequence for clone T51046.

[0446] SEQ ID NO: 407 represents the cDNA sequence for clone T51049.

[0447] SEQ ID NO: 408 represents the cDNA sequence for clone T51052.

[0448] SEQ ID NO: 409 represents the cDNA sequence for clone T51067.

[0449] SEQ ID NO: 410 represents the cDNA sequence for clone T51068.

[0450] SEQ ID NO: 411 represents the cDNA sequence for clone T51080.

[0451] SEQ ID NO: 412 represents the cDNA sequence for clone T51082.

[0452] SEQ ID NO: 413 represents the cDNA sequence for clone T51083.

[0453] SEQ ID NO: 414 represents the cDNA sequence for clone T51086.

[0454] SEQ ID NO: 415 represents the cDNA sequence for clone T51094.

[0455] SEQ ID NO: 416 represents the cDNA sequence for clone T51099.

[0456] SEQ ID NO: 417 represents the cDNA sequence for clone T51106.

[0457] SEQ ID NO: 418 represents the cDNA sequence for clone T51113.

[0458] SEQ ID NO: 419 represents the cDNA sequence for clone T51114.

[0459] SEQ ID NO: 420 represents the cDNA sequence for clone T51120.

[0460] SEQ ID NO: 421 represents the cDNA sequence for clone T51817.

[0461] SEQ ID NO: 422 represents the cDNA sequence for clone T51818.

[0462] SEQ ID NO: 423 represents the cDNA sequence for clone T51819.

[0463] SEQ ID NO: 424 represents the cDNA sequence for clone T51822.

[0464] SEQ ID NO: 425 represents the cDNA sequence for clone T51823.

[0465] SEQ ID NO: 426 represents the cDNA sequence for clone T51825.

[0466] SEQ ID NO: 427 represents the cDNA sequence for clone T51826.

[0467] SEQ ID NO: 428 represents the cDNA sequence for clone T51829.

[0468] SEQ ID NO: 429 represents the cDNA sequence for clone T51832.

[0469] SEQ ID NO: 430 represents the cDNA sequence for clone T51842.

[0470] SEQ ID NO: 431 represents the cDNA sequence for clone T51843.

[0471] SEQ ID NO: 432 represents the cDNA sequence for clone T51848.

[0472] SEQ ID NO: 433 represents the cDNA sequence for clone T51850.

[0473] SEQ ID NO: 434 represents the cDNA sequence for clone T51851.

[0474] SEQ ID NO: 435 represents the cDNA sequence for clone T51854.

[0475] SEQ ID NO: 436 represents the cDNA sequence for clone T51857.

[0476] SEQ ID NO: 437 represents the cDNA sequence for clone T51861.

[0477] SEQ ID NO: 438 represents the cDNA sequence for clone T51867.

[0478] SEQ ID NO: 439 represents the cDNA sequence for clone T51870.

[0479] SEQ ID NO: 440 represents the cDNA sequence for clone T51871.

[0480] SEQ ID NO: 441 represents the cDNA sequence for clone T51874.

[0481] SEQ ID NO: 442 represents the cDNA sequence for clone T51877.

[0482] SEQ ID NO: 443 represents the cDNA sequence for clone T51883.

[0483] SEQ ID NO: 444 represents the cDNA sequence for clone T51888.

[0484] SEQ ID NO: 445 represents the cDNA sequence for clone T51897.

[0485] SEQ ID NO: 446 represents the cDNA sequence for clone T51898.

[0486] SEQ ID NO: 447 represents the cDNA sequence for clone T51902.

[0487] SEQ ID NO: 448 represents the cDNA sequence for clone T51905.

[0488] SEQ ID NO: 449 represents the cDNA sequence for clone T52744.

[0489] SEQ ID NO: 450 represents the cDNA sequence for clone T52745.

[0490] SEQ ID NO: 451 represents the cDNA sequence for clone T52747.

[0491] SEQ ID NO: 452 represents the cDNA sequence for clone T52748.

[0492] SEQ ID NO: 453 represents the cDNA sequence for clone T52749.

[0493] SEQ ID NO: 454 represents the cDNA sequence for clone T52750.

[0494] SEQ ID NO: 455 represents the cDNA sequence for clone T52752.

[0495] SEQ ID NO: 456 represents the cDNA sequence for clone T52753.

[0496] SEQ ID NO: 457 represents the cDNA sequence for clone T52754.

[0497] SEQ ID NO: 458 represents the cDNA sequence for clone T52755.

[0498] SEQ ID NO: 459 represents the cDNA sequence for clone T52760.

[0499] SEQ ID NO: 460 represents the cDNA sequence for clone T52761.

[0500] SEQ ID NO: 461 represents the cDNA sequence for clone T52764.

[0501] SEQ ID NO: 462 represents the cDNA sequence for clone T52767.

[0502] SEQ ID NO: 463 represents the cDNA sequence for clone T52774.

[0503] SEQ ID NO: 464 represents the cDNA sequence for clone T52776.

[0504] SEQ ID NO: 465 represents the cDNA sequence for clone T52782.

[0505] SEQ ID NO: 466 represents the cDNA sequence for clone T52783.

[0506] SEQ ID NO: 467 represents the cDNA sequence for clone T52787.

[0507] SEQ ID NO: 468 represents the cDNA sequence for clone T52788.

[0508] SEQ ID NO: 469 represents the cDNA sequence for clone T52789.

[0509] SEQ ID NO: 470 represents the cDNA sequence for clone T52796.

[0510] SEQ ID NO: 471 represents the cDNA sequence for clone T52799.

[0511] SEQ ID NO: 472 represents the cDNA sequence for clone T52800.

[0512] SEQ ID NO: 473 represents the cDNA sequence for clone T52802.

[0513] SEQ ID NO: 474 represents the cDNA sequence for clone T52803.

[0514] SEQ ID NO: 475 represents the cDNA sequence for clone T52807.

[0515] SEQ ID NO: 476 represents the cDNA sequence for clone T52808.

[0516] SEQ ID NO: 477 represents the cDNA sequence for clone T52809.

[0517] SEQ ID NO: 478 represents the cDNA sequence for clone T52810.

[0518] SEQ ID NO: 479 represents the cDNA sequence for clone T52812.

[0519] SEQ ID NO: 480 represents the cDNA sequence for clone T52815.

[0520] SEQ ID NO: 481 represents the cDNA sequence for clone T52816.

[0521] SEQ ID NO: 482 represents the cDNA sequence for clone T52819.

[0522] SEQ ID NO: 483 represents the cDNA sequence for clone T52820.

[0523] SEQ ID NO: 484 represents the cDNA sequence for clone T52821.

[0524] SEQ ID NO: 485 represents the cDNA sequence for clone T52828.

[0525] SEQ ID NO: 486 represents the cDNA sequence for clone T52832.

[0526] SEQ ID NO: 487 represents the cDNA sequence for clone T52837.

[0527] SEQ ID NO: 488 represents the cDNA sequence for clone T52838.

[0528] SEQ ID NO: 489 represents the cDNA sequence for clone T52842.

[0529] SEQ ID NO: 490 represents the cDNA sequence for clone T52843.

[0530] SEQ ID NO: 491 represents the cDNA sequence for clone T52844.

[0531] SEQ ID NO: 492 represents the cDNA sequence for clone T52847.

[0532] SEQ ID NO: 493 represents the cDNA sequence for clone T52848.

[0533] SEQ ID NO: 494 represents the cDNA sequence for clone T52849.

[0534] SEQ ID NO: 495 represents the cDNA sequence for clone T52851.

[0535] SEQ ID NO: 496 represents the cDNA sequence for clone T52862.

[0536] SEQ ID NO: 497 represents the cDNA sequence for clone T52863.

[0537] SEQ ID NO: 498 represents the cDNA sequence for clone T52868.

[0538] SEQ ID NO: 499 represents the cDNA sequence for clone T52869.

[0539] SEQ ID NO: 500 represents the cDNA sequence for clone T52873.

[0540] SEQ ID NO: 501 represents the cDNA sequence for clone T52878.

[0541] SEQ ID NO: 502 represents the cDNA sequence for clone T52886.

[0542] SEQ ID NO: 503 represents the cDNA sequence for clone T52887.

[0543] SEQ ID NO: 504 represents the cDNA sequence for clone T52890.

[0544] SEQ ID NO: 505 represents the cDNA sequence for clone T52892.

[0545] SEQ ID NO: 506 represents the cDNA sequence for clone T52900.

[0546] SEQ ID NO: 507 represents the cDNA sequence for clone T52906.

[0547] SEQ ID NO: 508 represents the cDNA sequence for clone T52907.

[0548] SEQ ID NO: 509 represents the cDNA sequence for clone T52916.

[0549] SEQ ID NO: 510 represents the cDNA sequence for clone T52917.

[0550] SEQ ID NO: 511 represents the cDNA sequence for clone T52920.

[0551] SEQ ID NO: 512 represents the cDNA sequence for clone T52922.

[0552] SEQ ID NO: 513 represents the cDNA sequence for clone T52923.

[0553] SEQ ID NO: 514 represents the cDNA sequence for clone T52924.

[0554] SEQ ID NO: 515 represents the cDNA sequence for clone T52925.

[0555] SEQ ID NO: 516 represents the cDNA sequence for clone T52926.

[0556] SEQ ID NO: 517 represents the cDNA sequence for clone T52932.

[0557] SEQ ID NO: 518 represents the cDNA sequence for clone T52933.

[0558] SEQ ID NO: 519 represents the cDNA sequence for clone T52934.

[0559] SEQ ID NO: 520 represents the cDNA sequence for clone T52935.

[0560] SEQ ID NO: 521 represents the cDNA sequence for clone T52944.

[0561] SEQ ID NO: 522 represents the cDNA sequence for clone T52945.

[0562] SEQ ID NO: 523 represents the cDNA sequence for clone T52954.

[0563] SEQ ID NO: 524 represents the cDNA sequence for clone T52955.

[0564] SEQ ID NO: 525 represents the cDNA sequence for clone T52957.

[0565] SEQ ID NO: 526 represents the cDNA sequence for clone T52958.

[0566] SEQ ID NO: 527 represents the cDNA sequence for clone T52959.

[0567] SEQ ID NO: 528 represents the cDNA sequence for clone T52960.

[0568] SEQ ID NO: 529 represents the cDNA sequence for clone T52961.

[0569] SEQ ID NO: 530 represents the cDNA sequence for clone T52966.

[0570] SEQ ID NO: 531 represents the cDNA sequence for clone T52967.

[0571] SEQ ID NO: 532 represents the cDNA sequence for clone T52968.

[0572] SEQ ID NO: 533 represents the cDNA sequence for clone T52970.

[0573] SEQ ID NO: 534 represents the cDNA sequence for clone T52971.

[0574] SEQ ID NO: 535 represents the cDNA sequence for clone T52978.

[0575] SEQ ID NO: 536 represents the cDNA sequence for clone T52982.

[0576] SEQ ID NO: 537 represents the cDNA sequence for clone T52983.

[0577] SEQ ID NO: 538 represents the cDNA sequence for clone T52984.

[0578] SEQ ID NO: 539 represents the cDNA sequence for clone T52985.

[0579] SEQ ID NO: 540 represents the cDNA sequence for clone T52992.

[0580] SEQ ID NO: 541 represents the cDNA sequence for clone T52993.

[0581] SEQ ID NO: 542 represents the cDNA sequence for clone T52996.

[0582] SEQ ID NO: 543 represents the cDNA sequence for clone T52997.

[0583] SEQ ID NO: 544 represents the cDNA sequence for clone T52999.

[0584] SEQ ID NO: 545 represents the cDNA sequence for clone T53000.

[0585] SEQ ID NO: 546 represents the cDNA sequence for clone T53001.

[0586] SEQ ID NO: 547 represents the cDNA sequence for clone T53002.

[0587] SEQ ID NO: 548 represents the cDNA sequence for clone T53003.

[0588] SEQ ID NO: 549 represents the cDNA sequence for clone T53006.

[0589] SEQ ID NO: 550 represents the cDNA sequence for clone T53007.

[0590] SEQ ID NO: 551 represents the cDNA sequence for clone T53015.

[0591] SEQ ID NO: 552 represents the cDNA sequence for clone T53016.

[0592] SEQ ID NO: 553 represents the cDNA sequence for clone T53018.

[0593] SEQ ID NO: 554 represents the cDNA sequence for clone T53021.

[0594] SEQ ID NO: 555 represents the cDNA sequence for clone T53022.

[0595] SEQ ID NO: 556 represents the cDNA sequence for clone T53023.

[0596] SEQ ID NO: 557 represents the cDNA sequence for clone T53024.

[0597] SEQ ID NO: 558 represents the cDNA sequence for clone T53027.

[0598] SEQ ID NO: 559 represents the cDNA sequence for clone T47159.

[0599] SEQ ID NO: 560 represents the cDNA sequence for clone T55330.

[0600] SEQ ID NO: 561 represents the cDNA sequence for clone T55335.

[0601] SEQ ID NO: 562 represents the cDNA sequence for clone T55340.

[0602] SEQ ID NO: 563 represents the cDNA sequence for clone T55342.

[0603] SEQ ID NO: 564 represents the cDNA sequence for clone T55343.

[0604] SEQ ID NO: 565 represents the cDNA sequence for clone T55349.

[0605] SEQ ID NO: 566 represents the cDNA sequence for clone T55351.

[0606] SEQ ID NO: 567 represents the cDNA sequence for clone T55353.

[0607] SEQ ID NO: 568 represents the cDNA sequence for clone T55355.

[0608] SEQ ID NO: 569 represents the cDNA sequence for clone T56172.

[0609] SEQ ID NO: 570 represents the cDNA sequence for clone T56175.

[0610] SEQ ID NO: 571 represents the cDNA sequence for clone T56179.

[0611] SEQ ID NO: 572 represents the cDNA sequence for clone T56182.

[0612] SEQ ID NO: 573 represents the cDNA sequence for clone T56183.

[0613] SEQ ID NO: 574 represents the cDNA sequence for clone T56189.

[0614] SEQ ID NO: 575 represents the cDNA sequence for clone T56193.

[0615] SEQ ID NO: 576 represents the cDNA sequence for clone T57460.

[0616] SEQ ID NO: 577 represents the cDNA sequence for clone T57465.

[0617] SEQ ID NO: 578 represents the cDNA sequence for clone T57466.

[0618] SEQ ID NO: 579 represents the cDNA sequence for clone T57469.

[0619] SEQ ID NO: 580 represents the cDNA sequence for clone T57470.

[0620] SEQ ID NO: 581 represents the cDNA sequence for clone T57472.

[0621] SEQ ID NO: 582 represents the cDNA sequence for clone T57477.

[0622] SEQ ID NO: 583 represents the cDNA sequence for clone T57481.

[0623] SEQ ID NO: 584 represents the cDNA sequence for clone T57484.

[0624] SEQ ID NO: 585 represents the cDNA sequence for clone T57490.

[0625] SEQ ID NO: 586 represents the cDNA sequence for clone T57493.

[0626] SEQ ID NO: 587 represents the cDNA sequence for clone T57495.

[0627] SEQ ID NO: 588 represents the cDNA sequence for clone T57497.

[0628] SEQ ID NO: 589 represents the cDNA sequence for clone T57498.

[0629] SEQ ID NO: 590 represents the cDNA sequence for clone T57500.

[0630] SEQ ID NO: 591 represents the cDNA sequence for clone T57509.

[0631] SEQ ID NO: 592 represents the cDNA sequence for clone T57510.

[0632] SEQ ID NO: 593 represents the cDNA sequence for clone T57511.

[0633] SEQ ID NO: 594 represents the cDNA sequence for clone T57513.

[0634] SEQ ID NO: 595 represents the cDNA sequence for clone T57514.

[0635] SEQ ID NO: 596 represents the cDNA sequence for clone T57518.

[0636] SEQ ID NO: 597 represents the cDNA sequence for clone T57520.

[0637] SEQ ID NO: 598 represents the cDNA sequence for clone T57525.

[0638] SEQ ID NO: 599 represents the cDNA sequence for clone T57527.

[0639] SEQ ID NO: 600 represents the cDNA sequence for clone T57532.

[0640] SEQ ID NO: 601 represents the cDNA sequence for clone T57540.

[0641] SEQ ID NO: 602 represents the cDNA sequence for clone T57545.

[0642] SEQ ID NO: 603 represents the cDNA sequence for clone T57551.

[0643] SEQ ID NO: 604 represents the cDNA sequence for clone T57557.

[0644] SEQ ID NO: 605 represents the cDNA sequence for clone T57558.

[0645] SEQ ID NO: 606 represents the cDNA sequence for clone T57559.

[0646] SEQ ID NO: 607 represents the cDNA sequence for clone T57560.

[0647] SEQ ID NO: 608 represents the cDNA sequence for clone T57564.

[0648] SEQ ID NO: 609 represents the cDNA sequence for clone T57566.

[0649] SEQ ID NO: 610 represents the cDNA sequence for clone T57571.

[0650] SEQ ID NO: 611 represents the cDNA sequence for clone T57572.

[0651] SEQ ID NO: 612 represents the cDNA sequence for clone T57574.

[0652] SEQ ID NO: 613 represents the cDNA sequence for clone T57575.

[0653] SEQ ID NO: 614 represents the cDNA sequence for clone T57581.

[0654] SEQ ID NO: 615 represents the cDNA sequence for clone T57585.

[0655] SEQ ID NO: 616 represents the cDNA sequence for clone T57586.

[0656] SEQ ID NO: 617 represents the cDNA sequence for clone T57589.

[0657] SEQ ID NO: 618 represents the cDNA sequence for clone T57595.

[0658] SEQ ID NO: 619 represents the cDNA sequence for clone T57597.

[0659] SEQ ID NO: 620 represents the cDNA sequence for clone T57605.

[0660] SEQ ID NO: 621 represents the cDNA sequence for clone T57608.

[0661] SEQ ID NO: 622 represents the cDNA sequence for clone T57611.

[0662] SEQ ID NO: 623 represents the cDNA sequence for clone T57612.

[0663] SEQ ID NO: 624 represents the cDNA sequence for clone T57613.

[0664] SEQ ID NO: 625 represents the cDNA sequence for clone T57616.

[0665] SEQ ID NO: 626 represents the cDNA sequence for clone T57623.

[0666] SEQ ID NO: 627 represents the cDNA sequence for clone T57631.

[0667] SEQ ID NO: 628 represents the cDNA sequence for clone T57635.

[0668] SEQ ID NO: 629 represents the cDNA sequence for clone T57636.

[0669] SEQ ID NO: 630 represents the cDNA sequence for clone T57640.

[0670] SEQ ID NO: 631 represents the cDNA sequence for clone T57641.

[0671] SEQ ID NO: 632 represents the cDNA sequence for clone T57642.

[0672] SEQ ID NO: 633 represents the cDNA sequence for clone T57650.

[0673] SEQ ID NO: 634 represents the cDNA sequence for clone T57655.

[0674] SEQ ID NO: 635 represents the cDNA sequence for clone T57656.

[0675] SEQ ID NO: 636 represents the cDNA sequence for clone T57659.

[0676] SEQ ID NO: 637 represents the cDNA sequence for clone T58334.

[0677] SEQ ID NO: 638 represents the cDNA sequence for clone T58335.

[0678] SEQ ID NO: 639 represents the cDNA sequence for clone T58337.

[0679] SEQ ID NO: 640 represents the cDNA sequence for clone T58344.

[0680] SEQ ID NO: 641 represents the cDNA sequence for clone T58347.

[0681] SEQ ID NO: 642 represents the cDNA sequence for clone T58348.

[0682] SEQ ID NO: 643 represents the cDNA sequence for clone T58351.

[0683] SEQ ID NO: 644 represents the cDNA sequence for clone T58353.

[0684] SEQ ID NO: 645 represents the cDNA sequence for clone T58354.

[0685] SEQ ID NO: 646 represents the cDNA sequence for clone T58357.

[0686] SEQ ID NO: 647 represents the cDNA sequence for clone T58358.

[0687] SEQ ID NO: 648 represents the cDNA sequence for clone T58362.

[0688] SEQ ID NO: 649 represents the cDNA sequence for clone T58366.

[0689] SEQ ID NO: 650 represents the cDNA sequence for clone T58367.

[0690] SEQ ID NO: 651 represents the cDNA sequence for clone T58368.

[0691] SEQ ID NO: 652 represents the cDNA sequence for clone T58371.

[0692] SEQ ID NO: 653 represents the cDNA sequence for clone T58375.

[0693] SEQ ID NO: 654 represents the cDNA sequence for clone T58378.

[0694] SEQ ID NO: 655 represents the cDNA sequence for clone T58379.

[0695] SEQ ID NO: 656 represents the cDNA sequence for clone T58385.

[0696] SEQ ID NO: 657 represents the cDNA sequence for clone T58386.

[0697] SEQ ID NO: 658 represents the cDNA sequence for clone T58388.

[0698] SEQ ID NO: 659 represents the cDNA sequence for clone T58391.

[0699] SEQ ID NO: 660 represents the cDNA sequence for clone T58392.

[0700] SEQ ID NO: 661 represents the cDNA sequence for clone T58396.

[0701] SEQ ID NO: 662 represents the cDNA sequence for clone T58399.

[0702] SEQ ID NO: 663 represents the cDNA sequence for clone T58402.

[0703] SEQ ID NO: 664 represents the cDNA sequence for clone T58403.

[0704] SEQ ID NO: 665 represents the cDNA sequence for clone T58407.

[0705] SEQ ID NO: 666 represents the cDNA sequence for clone T58408.

[0706] SEQ ID NO: 667 represents the cDNA sequence for clone T58415.

[0707] SEQ ID NO: 668 represents the cDNA sequence for clone T58416.

[0708] SEQ ID NO: 669 represents the cDNA sequence for clone T58417.

[0709] SEQ ID NO: 670 represents the cDNA sequence for clone T58421.

[0710] SEQ ID NO: 671 represents the cDNA sequence for clone T58424.

[0711] SEQ ID NO: 672 represents the cDNA sequence for clone T58425.

[0712] SEQ ID NO: 673 represents the cDNA sequence for clone T58428.

[0713] SEQ ID NO: 674 represents the cDNA sequence for clone T58429.

[0714] SEQ ID NO: 675 represents the cDNA sequence for clone T58434.

[0715] SEQ ID NO: 676 represents the cDNA sequence for clone T58436.

[0716] SEQ ID NO: 677 represents the cDNA sequence for clone T58438.

[0717] SEQ ID NO: 678 represents the cDNA sequence for clone T58440.

[0718] SEQ ID NO: 679 represents the cDNA sequence for clone T58444.

[0719] SEQ ID NO: 680 represents the cDNA sequence for clone T58449.

[0720] SEQ ID NO: 681 represents the cDNA sequence for clone T58450.

[0721] SEQ ID NO: 682 represents the cDNA sequence for clone T58452.

[0722] SEQ ID NO: 683 represents the cDNA sequence for clone T58456.

[0723] SEQ ID NO: 684 represents the cDNA sequence for clone T58457.

[0724] SEQ ID NO: 685 represents the cDNA sequence for clone T58459.

[0725] SEQ ID NO: 686 represents the cDNA sequence for clone T58460.

[0726] SEQ ID NO: 687 represents the cDNA sequence for clone T58461.

[0727] SEQ ID NO: 688 represents the cDNA sequence for clone T58466.

[0728] SEQ ID NO: 689 represents the cDNA sequence for clone T58468.

[0729] SEQ ID NO: 690 represents the cDNA sequence for clone T58472.

[0730] SEQ ID NO: 691 represents the cDNA sequence for clone T58474.

[0731] SEQ ID NO: 692 represents the cDNA sequence for clone T58480.

[0732] SEQ ID NO: 693 represents the cDNA sequence for clone T58484.

[0733] SEQ ID NO: 694 represents the cDNA sequence for clone T58486.

[0734] SEQ ID NO: 695 represents the cDNA sequence for clone T58490.

[0735] SEQ ID NO: 696 represents the cDNA sequence for clone T58491.

[0736] SEQ ID NO: 697 represents the cDNA sequence for clone T58492.

[0737] SEQ ID NO: 698 represents the cDNA sequence for clone T58494.

[0738] SEQ ID NO: 699 represents the cDNA sequence for clone T58495.

[0739] SEQ ID NO: 700 represents the cDNA sequence for clone T58500.

[0740] SEQ ID NO: 701 represents the cDNA sequence for clone T58501.

[0741] SEQ ID NO: 702 represents the cDNA sequence for clone T58505.

[0742] SEQ ID NO: 703 represents the cDNA sequence for clone T58506.

[0743] SEQ ID NO: 704 represents the cDNA sequence for clone T58507.

[0744] SEQ ID NO: 705 represents the cDNA sequence for clone T58510.

[0745] SEQ ID NO: 706 represents the cDNA sequence for clone T58513.

[0746] SEQ ID NO: 707 represents the cDNA sequence for clone T58514.

[0747] SEQ ID NO: 708 represents the cDNA sequence for clone T58521.

[0748] SEQ ID NO: 709 represents the cDNA sequence for clone T58522.

[0749] SEQ ID NO: 710 represents the cDNA sequence for clone T58524.

[0750] SEQ ID NO: 711 represents the cDNA sequence for clone T58526.

[0751] SEQ ID NO: 712 represents the cDNA sequence for clone T58527.

[0752] SEQ ID NO: 713 represents the cDNA sequence for clone T58528.

[0753] SEQ ID NO: 714 represents the cDNA sequence for clone T58531.

[0754] SEQ ID NO: 715 represents the cDNA sequence for clone T58533.

[0755] SEQ ID NO: 716 represents the cDNA sequence for clone T58534.

[0756] SEQ ID NO: 717 represents the cDNA sequence for clone T58538.

[0757] SEQ ID NO: 718 represents the cDNA sequence for clone T58541.

[0758] SEQ ID NO: 719 represents the cDNA sequence for clone T58542.

[0759] SEQ ID NO: 720 represents the cDNA sequence for clone T58543.

[0760] SEQ ID NO: 721 represents the cDNA sequence for clone T58550.

[0761] SEQ ID NO: 722 represents the cDNA sequence for clone T58551.

[0762] SEQ ID NO: 723 represents the cDNA sequence for clone T58555.

[0763] SEQ ID NO: 724 represents the cDNA sequence for clone T58557.

[0764] SEQ ID NO: 725 represents the cDNA sequence for clone T58559.

[0765] SEQ ID NO: 726 represents the cDNA sequence for clone T58563.

[0766] SEQ ID NO: 727 represents the cDNA sequence for clone T58566.

[0767] SEQ ID NO: 728 represents the cDNA sequence for clone T58570.

[0768] SEQ ID NO: 729 represents the cDNA sequence for clone T58572.

[0769] SEQ ID NO: 730 represents the cDNA sequence for clone T58573.

[0770] SEQ ID NO: 731 represents the cDNA sequence for clone T58577.

[0771] SEQ ID NO: 732 represents the cDNA sequence for clone T58585.

[0772] SEQ ID NO: 733 represents the cDNA sequence for clone T58588.

[0773] SEQ ID NO: 734 represents the cDNA sequence for clone T58590.

[0774] SEQ ID NO: 735 represents the cDNA sequence for clone T58591.

[0775] SEQ ID NO: 736 represents the cDNA sequence for clone T58594.

[0776] SEQ ID NO: 737 represents the cDNA sequence for clone T58598.

[0777] SEQ ID NO: 738 represents the cDNA sequence for clone T58599.

[0778] SEQ ID NO: 739 represents the cDNA sequence for clone T58968.

[0779] SEQ ID NO: 740 represents the cDNA sequence for clone T58969.

[0780] SEQ ID NO: 741 represents the cDNA sequence for clone T58976.

[0781] SEQ ID NO: 742 represents the cDNA sequence for clone T58977.

[0782] SEQ ID NO: 743 represents the cDNA sequence for clone T58983.

[0783] SEQ ID NO: 744 represents the cDNA sequence for clone T58985.

[0784] SEQ ID NO: 745 represents the cDNA sequence for clone T58989.

[0785] SEQ ID NO: 746 represents the cDNA sequence for clone T58990.

[0786] SEQ ID NO: 747 represents the cDNA sequence for clone T59305.

[0787] SEQ ID NO: 748 represents the cDNA sequence for clone T59309.

[0788] SEQ ID NO: 749 represents the cDNA sequence for clone T59315.

[0789] SEQ ID NO: 750 represents the cDNA sequence for clone T59319.

[0790] SEQ ID NO: 751 represents the cDNA sequence for clone T59321.

[0791] SEQ ID NO: 752 represents the cDNA sequence for clone T59324.

[0792] SEQ ID NO: 753 represents the cDNA sequence for clone T59325.

[0793] SEQ ID NO: 754 represents the cDNA sequence for clone T59326.

[0794] SEQ ID NO: 755 represents the cDNA sequence for clone T59330.

[0795] SEQ ID NO: 756 represents the cDNA sequence for clone T59337.

[0796] SEQ ID NO: 757 represents the cDNA sequence for clone T59338.

[0797] SEQ ID NO: 758 represents the cDNA sequence for clone T59344.

[0798] SEQ ID NO: 759 represents the cDNA sequence for clone T59345.

[0799] SEQ ID NO: 760 represents the cDNA sequence for clone T59347.

[0800] SEQ ID NO: 761 represents the cDNA sequence for clone T59349.

[0801] SEQ ID NO: 762 represents the cDNA sequence for clone T59353.

[0802] SEQ ID NO: 763 represents the cDNA sequence for clone T59354.

[0803] SEQ ID NO: 764 represents the cDNA sequence for clone T59355.

[0804] SEQ ID NO: 765 represents the cDNA sequence for clone T59361.

[0805] SEQ ID NO: 766 represents the cDNA sequence for clone T59362.

[0806] SEQ ID NO: 767 represents the cDNA sequence for clone T59363.

[0807] SEQ ID NO: 768 represents the cDNA sequence for clone T59368.

[0808] SEQ ID NO: 769 represents the cDNA sequence for clone T59370.

[0809] SEQ ID NO: 770 represents the cDNA sequence for clone T59371.

[0810] SEQ ID NO: 771 represents the cDNA sequence for clone T59373.

[0811] SEQ ID NO: 772 represents the cDNA sequence for clone T59374.

[0812] SEQ ID NO: 773 represents the cDNA sequence for clone T59375.

[0813] SEQ ID NO: 774 represents the cDNA sequence for clone T59376.

[0814] SEQ ID NO: 775 represents the cDNA sequence for clone T59377.

[0815] SEQ ID NO: 776 represents the cDNA sequence for clone T59379.

[0816] SEQ ID NO: 777 represents the cDNA sequence for clone T59380.

[0817] SEQ ID NO: 778 represents the cDNA sequence for clone T59383.

[0818] SEQ ID NO: 779 represents the cDNA sequence for clone T59389.

[0819] SEQ ID NO: 780 represents the cDNA sequence for clone T59390.

[0820] SEQ ID NO: 781 represents the cDNA sequence for clone T59391.

[0821] SEQ ID NO: 782 represents the cDNA sequence for clone T59392.

[0822] SEQ ID NO: 783 represents the cDNA sequence for clone T59407.

[0823] SEQ ID NO: 784 represents the cDNA sequence for clone T59410.

[0824] SEQ ID NO: 785 represents the cDNA sequence for clone T59420.

[0825] SEQ ID NO: 786 represents the cDNA sequence for clone T59423.

[0826] SEQ ID NO: 787 represents the cDNA sequence for clone T59427.

[0827] SEQ ID NO: 788 represents the cDNA sequence for clone T59431.

[0828] SEQ ID NO: 789 represents the cDNA sequence for clone T59432.

[0829] SEQ ID NO: 790 represents the cDNA sequence for clone T59433.

[0830] SEQ ID NO: 791 represents the cDNA sequence for clone T59436.

[0831] SEQ ID NO: 792 represents the cDNA sequence for clone T59439.

[0832] SEQ ID NO: 793 represents the cDNA sequence for clone T59442.

[0833] SEQ ID NO: 794 represents the cDNA sequence for clone T59443.

[0834] SEQ ID NO: 795 represents the cDNA sequence for clone T59444.

[0835] SEQ ID NO: 796 represents the cDNA sequence for clone T59451.

[0836] SEQ ID NO: 797 represents the cDNA sequence for clone T59455.

[0837] SEQ ID NO: 798 represents the cDNA sequence for clone T59459.

[0838] SEQ ID NO: 799 represents the cDNA sequence for clone T59460.

[0839] SEQ ID NO: 800 represents the cDNA sequence for clone T59461.

[0840] SEQ ID NO: 801 represents the cDNA sequence for clone T59464.

[0841] SEQ ID NO: 802 represents the cDNA sequence for clone T59470.

[0842] SEQ ID NO: 803 represents the cDNA sequence for clone T59471.

[0843] SEQ ID NO: 804 represents the cDNA sequence for clone T59472.

[0844] SEQ ID NO: 805 represents the cDNA sequence for clone T59475.

[0845] SEQ ID NO: 806 represents the cDNA sequence for clone T59476.

[0846] SEQ ID NO: 807 represents the cDNA sequence for clone T59479.

[0847] SEQ ID NO: 808 represents the cDNA sequence for clone T59481.

[0848] SEQ ID NO: 809 represents the cDNA sequence for clone T59483.

[0849] SEQ ID NO: 810 represents the cDNA sequence for clone T59486.

[0850] SEQ ID NO: 811 represents the cDNA sequence for clone T59487.

[0851] SEQ ID NO: 812 represents the cDNA sequence for clone T59488.

[0852] SEQ ID NO: 813 represents the cDNA sequence for clone T59491.

[0853] SEQ ID NO: 814 represents the cDNA sequence for clone T59493.

[0854] SEQ ID NO: 815 represents the cDNA sequence for clone T59494.

[0855] SEQ ID NO: 816 represents the cDNA sequence for clone T59498.

[0856] SEQ ID NO: 817 represents the cDNA sequence for clone T59499.

[0857] SEQ ID NO: 818 represents the cDNA sequence for clone T59505.

[0858] SEQ ID NO: 819 represents the cDNA sequence for clone T59509.

[0859] SEQ ID NO: 820 represents the cDNA sequence for clone T59513.

[0860] SEQ ID NO: 821 represents the cDNA sequence for clone T59517.

[0861] SEQ ID NO: 822 represents the cDNA sequence for clone T59525.

[0862] SEQ ID NO: 823 represents the cDNA sequence for clone T59528.

[0863] SEQ ID NO: 824 represents the cDNA sequence for clone T59529.

[0864] SEQ ID NO: 825 represents the cDNA sequence for clone T59531.

[0865] SEQ ID NO: 826 represents the cDNA sequence for clone T59534.

[0866] SEQ ID NO: 827 represents the cDNA sequence for clone T59536.

[0867] SEQ ID NO: 828 represents the cDNA sequence for clone T59537.

[0868] SEQ ID NO: 829 represents the cDNA sequence for clone T59538.

[0869] SEQ ID NO: 830 represents the cDNA sequence for clone T59540.

[0870] SEQ ID NO: 831 represents the cDNA sequence for clone T59541.

[0871] SEQ ID NO: 832 represents the cDNA sequence for clone T59542.

[0872] SEQ ID NO: 833 represents the cDNA sequence for clone T59543.

[0873] SEQ ID NO: 834 represents the cDNA sequence for clone T59546.

[0874] SEQ ID NO: 835 represents the cDNA sequence for clone T59550.

[0875] SEQ ID NO: 836 represents the cDNA sequence for clone T59551.

[0876] SEQ ID NO: 837 represents the cDNA sequence for clone T59555.

[0877] SEQ ID NO: 838 represents the cDNA sequence for clone T59557.

[0878] SEQ ID NO: 839 represents the cDNA sequence for clone T59559.

[0879] SEQ ID NO: 840 represents the cDNA sequence for clone T59561.

[0880] SEQ ID NO: 841 represents the cDNA sequence for clone T59563.

[0881] SEQ ID NO: 842 represents the cDNA sequence for clone T59566.

[0882] SEQ ID NO: 843 represents the cDNA sequence for clone T59567.

[0883] SEQ ID NO: 844 represents the cDNA sequence for clone T59570.

[0884] SEQ ID NO: 845 represents the cDNA sequence for clone T59572.

[0885] SEQ ID NO: 846 represents the cDNA sequence for clone T59575.

[0886] SEQ ID NO: 847 represents the cDNA sequence for clone T59578.

[0887] SEQ ID NO: 848 represents the cDNA sequence for clone T59581.

[0888] SEQ ID NO: 849 represents the cDNA sequence for clone T59584.

[0889] SEQ ID NO: 850 represents the cDNA sequence for clone T59585.

[0890] SEQ ID NO: 851 represents the cDNA sequence for clone T59588.

[0891] SEQ ID NO: 852 represents the cDNA sequence for clone T59589.

[0892] SEQ ID NO: 853 represents the cDNA sequence for clone T59590.

[0893] SEQ ID NO: 854 represents the cDNA sequence for clone T59593.

[0894] SEQ ID NO: 855 represents the cDNA sequence for clone T59595.

[0895] SEQ ID NO: 856 represents the cDNA sequence for clone T59596.

[0896] SEQ ID NO: 857 represents the cDNA sequence for clone T59597.

[0897] SEQ ID NO: 858 represents the cDNA sequence for clone T59598.

[0898] SEQ ID NO: 859 represents the cDNA sequence for clone T59600.

[0899] SEQ ID NO: 860 represents the cDNA sequence for clone T59602.

[0900] SEQ ID NO: 861 represents the cDNA sequence for clone T59604.

[0901] SEQ ID NO: 862 represents the cDNA sequence for clone T59605.

[0902] SEQ ID NO: 863 represents the cDNA sequence for clone T59607.

[0903] SEQ ID NO: 864 represents the cDNA sequence for clone T59608.

[0904] SEQ ID NO: 865 represents the cDNA sequence for clone T59610.

[0905] SEQ ID NO: 866 represents the cDNA sequence for clone T59621.

[0906] SEQ ID NO: 867 represents the cDNA sequence for clone T59650.

[0907] SEQ ID NO: 868 represents the cDNA sequence for clone T59651.

[0908] SEQ ID NO: 869 represents the cDNA sequence for clone T59652.

[0909] SEQ ID NO: 870 represents the cDNA sequence for clone T59654.

[0910] SEQ ID NO: 871 represents the cDNA sequence for clone T59655.

[0911] SEQ ID NO: 872 represents the cDNA sequence for clone T59660.

[0912] SEQ ID NO: 873 represents the cDNA sequence for clone T59662.

[0913] SEQ ID NO: 874 represents the cDNA sequence for clone T59663.

[0914] SEQ ID NO: 875 represents the cDNA sequence for clone T59666.

[0915] SEQ ID NO: 876 represents the cDNA sequence for clone T59669.

[0916] SEQ ID NO: 877 represents the cDNA sequence for clone T59670.

[0917] SEQ ID NO: 878 represents the cDNA sequence for clone T59672.

[0918] SEQ ID NO: 879 represents the cDNA sequence for clone T59714.

[0919] SEQ ID NO: 880 represents the cDNA sequence for clone T59717.

[0920] SEQ ID NO: 881 represents the cDNA sequence for clone T59718.

[0921] SEQ ID NO: 882 represents the cDNA sequence for clone T59730.

[0922] SEQ ID NO: 883 represents the cDNA sequence for clone T59782.

[0923] SEQ ID NO: 884 represents the cDNA sequence for clone T59783.

[0924] SEQ ID NO: 885 represents the cDNA sequence for clone T59784.

[0925] SEQ ID NO: 886 represents the cDNA sequence for clone T59786.

[0926] SEQ ID NO: 887 represents the cDNA sequence for clone T59787.

[0927] SEQ ID NO: 888 represents the cDNA sequence for clone T59788.

[0928] SEQ ID NO: 889 represents the cDNA sequence for clone T59790.

[0929] SEQ ID NO: 890 represents the cDNA sequence for clone T59791.

[0930] SEQ ID NO: 891 represents the cDNA sequence for clone T59792.

[0931] SEQ ID NO: 892 represents the cDNA sequence for clone T59793.

[0932] SEQ ID NO: 893 represents the cDNA sequence for clone T59795.

[0933] SEQ ID NO: 894 represents the cDNA sequence for clone T59796.

[0934] SEQ ID NO: 895 represents the cDNA sequence for clone T59799.

[0935] SEQ ID NO: 896 represents the cDNA sequence for clone T59803.

[0936] SEQ ID NO: 897 represents the cDNA sequence for clone T59804.

[0937] SEQ ID NO: 898 represents the cDNA sequence for clone T59806.

[0938] SEQ ID NO: 899 represents the cDNA sequence for clone T59849.

[0939] SEQ ID NO: 900 represents the cDNA sequence for clone T59850.

[0940] SEQ ID NO: 901 represents the cDNA sequence for clone T59853.

[0941] SEQ ID NO: 902 represents the cDNA sequence for clone T59856.

[0942] SEQ ID NO: 903 represents the cDNA sequence for clone T59858.

[0943] SEQ ID NO: 904 represents the cDNA sequence for clone T59866.

[0944] SEQ ID NO: 905 represents the cDNA sequence for clone T59871.

[0945] SEQ ID NO: 906 represents the cDNA sequence for clone T59881.

[0946] SEQ ID NO: 907 represents the cDNA sequence for clone T59887.

[0947] SEQ ID NO: 908 represents the cDNA sequence for clone T59888.

[0948] SEQ ID NO: 909 represents the cDNA sequence for clone T59896.

[0949] SEQ ID NO: 910 represents the cDNA sequence for clone T59897.

[0950] SEQ ID NO: 911 represents the cDNA sequence for clone T59898.

[0951] SEQ ID NO: 912 represents the cDNA sequence for clone T59901.

[0952] SEQ ID NO: 913 represents the cDNA sequence for clone T59906.

[0953] SEQ ID NO: 914 represents the cDNA sequence for clone T59909.

[0954] SEQ ID NO: 915 represents the cDNA sequence for clone T59912.

[0955] SEQ ID NO: 916 represents the cDNA sequence for clone T59913.

[0956] SEQ ID NO: 917 represents the cDNA sequence for clone T59914.

[0957] SEQ ID NO: 918 represents the cDNA sequence for clone T59922.

[0958] SEQ ID NO: 919 represents the cDNA sequence for clone T59928.

[0959] SEQ ID NO: 920 represents the cDNA sequence for clone T59972.

[0960] SEQ ID NO: 921 represents the cDNA sequence for clone T59976.

[0961] SEQ ID NO: 922 represents the cDNA sequence for clone T59979.

[0962] SEQ ID NO: 923 represents the cDNA sequence for clone T59980.

[0963] SEQ ID NO: 924 represents the cDNA sequence for clone T59987.

[0964] SEQ ID NO: 925 represents the cDNA sequence for clone T59988.

[0965] SEQ ID NO: 926 represents the cDNA sequence for clone T59991.

[0966] SEQ ID NO: 927 represents the cDNA sequence for clone T59992.

[0967] SEQ ID NO: 928 represents the cDNA sequence for clone T59993.

[0968] SEQ ID NO: 929 represents the cDNA sequence for clone T60078.

[0969] SEQ ID NO: 930 represents the cDNA sequence for clone T60079.

[0970] SEQ ID NO: 931 represents the cDNA sequence for clone T60081.

[0971] SEQ ID NO: 932 represents the cDNA sequence for clone T60083.

[0972] SEQ ID NO: 933 represents the cDNA sequence for clone T60084.

[0973] SEQ ID NO: 934 represents the cDNA sequence for clone T60090.

[0974] SEQ ID NO: 935 represents the cDNA sequence for clone T60092.

[0975] SEQ ID NO: 936 represents the cDNA sequence for clone T60093.

[0976] SEQ ID NO: 937 represents the cDNA sequence for clone T60115.

[0977] SEQ ID NO: 938 represents the cDNA sequence for clone T60120.

[0978] SEQ ID NO: 939 represents the cDNA sequence for clone T60121.

[0979] SEQ ID NO: 940 represents the cDNA sequence for clone T60123.

[0980] SEQ ID NO: 941 represents the cDNA sequence for clone T60126.

[0981] SEQ ID NO: 942 represents the cDNA sequence for clone T60171.

[0982] SEQ ID NO: 943 represents the cDNA sequence for clone T60172.

[0983] SEQ ID NO: 944 represents the cDNA sequence for clone T60175.

[0984] SEQ ID NO: 945 represents the cDNA sequence for clone T60176.

[0985] SEQ ID NO: 946 represents the cDNA sequence for clone T60177.

[0986] SEQ ID NO: 947 represents the cDNA sequence for clone T60178.

[0987] SEQ ID NO: 948 represents the cDNA sequence for clone T60182.

[0988] SEQ ID NO: 949 represents the cDNA sequence for clone T60183.

[0989] SEQ ID NO: 950 represents the cDNA sequence for clone T60184.

[0990] SEQ ID NO: 951 represents the cDNA sequence for clone T60185.

[0991] SEQ ID NO: 952 represents the cDNA sequence for clone T60233.

[0992] SEQ ID NO: 953 represents the cDNA sequence for clone T60238.

[0993] SEQ ID NO: 954 represents the cDNA sequence for clone T60239.

[0994] SEQ ID NO: 955 represents the cDNA sequence for clone T60241.

[0995] SEQ ID NO: 956 represents the cDNA sequence for clone T60244.

[0996] SEQ ID NO: 957 represents the cDNA sequence for clone T60680.

[0997] SEQ ID NO: 958 represents the cDNA sequence for clone T60687.

[0998] SEQ ID NO: 959 represents the cDNA sequence for clone T60688.

[0999] SEQ ID NO: 960 represents the cDNA sequence for clone T60689.

[1000] SEQ ID NO: 961 represents the cDNA sequence for clone T60694.

[1001] SEQ ID NO: 962 represents the cDNA sequence for clone T60696.

[1002] SEQ ID NO: 963 represents the cDNA sequence for clone T60700.

[1003] SEQ ID NO: 964 represents the cDNA sequence for clone T60704.

[1004] SEQ ID NO: 965 represents the cDNA sequence for clone T60706.

[1005] SEQ ID NO: 966 represents the cDNA sequence for clone T60707.

[1006] SEQ ID NO: 967 represents the cDNA sequence for clone T60708.

[1007] SEQ ID NO: 968 represents the cDNA sequence for clone T60716.

[1008] SEQ ID NO: 969 represents the cDNA sequence for clone T60717.

[1009] SEQ ID NO: 970 represents the cDNA sequence for clone T60721.

[1010] SEQ ID NO: 971 represents the cDNA sequence for clone T60727.

[1011] SEQ ID NO: 972 represents the cDNA sequence for clone T60730.

[1012] SEQ ID NO: 973 represents the cDNA sequence for clone T60731.

[1013] SEQ ID NO: 974 represents the cDNA sequence for clone T60732.

[1014] SEQ ID NO: 975 represents the cDNA sequence for clone T60733.

[1015] SEQ ID NO: 976 represents the cDNA sequence for clone T60744.

[1016] SEQ ID NO: 977 represents the cDNA sequence for clone T60748.

[1017] SEQ ID NO: 978 represents the cDNA sequence for clone T60749.

[1018] SEQ ID NO: 979 represents the cDNA sequence for clone T60750.

[1019] SEQ ID NO: 980 represents the cDNA sequence for clone T60751.

[1020] SEQ ID NO: 981 represents the cDNA sequence for clone T60758.

[1021] SEQ ID NO: 982 represents the cDNA sequence for clone T60759.

[1022] SEQ ID NO: 983 represents the cDNA sequence for clone T60762.

[1023] SEQ ID NO: 984 represents the cDNA sequence for clone T60765.

[1024] SEQ ID NO: 985 represents the cDNA sequence for clone T60771.

[1025] SEQ ID NO: 986 represents the cDNA sequence for clone T60777.

[1026] SEQ ID NO: 987 represents the cDNA sequence for clone T60779.

[1027] SEQ ID NO: 988 represents the cDNA sequence for clone T60781.

[1028] SEQ ID NO: 989 represents the cDNA sequence for clone T60783.

[1029] SEQ ID NO: 990 represents the cDNA sequence for clone T60786.

[1030] SEQ ID NO: 991 represents the cDNA sequence for clone T60788.

[1031] SEQ ID NO: 992 represents the cDNA sequence for clone T60789.

[1032] SEQ ID NO: 993 represents the cDNA sequence for clone T60791.

[1033] SEQ ID NO: 994 represents the cDNA sequence for clone T60796.

[1034] SEQ ID NO: 995 represents the cDNA sequence for clone T60797.

[1035] SEQ ID NO: 996 represents the cDNA sequence for clone T60800.

[1036] SEQ ID NO: 997 represents the cDNA sequence for clone T60801.

[1037] SEQ ID NO: 998 represents the cDNA sequence for clone T60804.

[1038] SEQ ID NO: 999 represents the cDNA sequence for clone T60806.

[1039] SEQ ID NO: 1000 represents the cDNA sequence for clone T60812.

[1040] SEQ ID NO: 1001 represents the cDNA sequence for clone T60815.

[1041] SEQ ID NO: 1002 represents the cDNA sequence for clone T60816.

[1042] SEQ ID NO: 1003 represents the cDNA sequence for clone T60817.

[1043] SEQ ID NO: 1004 represents the cDNA sequence for clone T60818.

[1044] SEQ ID NO: 1005 represents the cDNA sequence for clone T60820.

[1045] SEQ ID NO: 1006 represents the cDNA sequence for clone T60822.

[1046] SEQ ID NO: 1007 represents the cDNA sequence for clone T60827.

[1047] SEQ ID NO: 1008 represents the cDNA sequence for clone T60829.

[1048] SEQ ID NO: 1009 represents the cDNA sequence for clone T60832.

[1049] SEQ ID NO: 1010 represents the cDNA sequence for clone T60834.

[1050] SEQ ID NO: 1011 represents the cDNA sequence for clone T60840.

[1051] SEQ ID NO: 1012 represents the cDNA sequence for clone T60843.

[1052] SEQ ID NO: 1013 represents the cDNA sequence for clone T60847.

[1053] SEQ ID NO: 1014 represents the cDNA sequence for clone T60848.

[1054] SEQ ID NO: 1015 represents the cDNA sequence for clone T60856.

[1055] SEQ ID NO: 1016 represents the cDNA sequence for clone T60858.

[1056] SEQ ID NO: 1017 represents the cDNA sequence for clone T60859.

[1057] SEQ ID NO: 1018 represents the cDNA sequence for clone T60860.

[1058] SEQ ID NO: 1019 represents the cDNA sequence for clone T60861.

[1059] SEQ ID NO: 1020 represents the cDNA sequence for clone T60862.

[1060] SEQ ID NO: 1021 represents the cDNA sequence for clone T60863.

[1061] SEQ ID NO: 1022 represents the cDNA sequence for clone T60864.

[1062] SEQ ID NO: 1023 represents the cDNA sequence for clone T60873.

[1063] SEQ ID NO: 1024 represents the cDNA sequence for clone T60874.

[1064] SEQ ID NO: 1025 represents the cDNA sequence for clone T60875.

[1065] SEQ ID NO: 1026 represents the cDNA sequence for clone T60885.

[1066] SEQ ID NO: 1027 represents the cDNA sequence for clone T60886.

[1067] SEQ ID NO: 1028 represents the cDNA sequence for clone T60887.

[1068] SEQ ID NO: 1029 represents the cDNA sequence for clone T60889.

[1069] SEQ ID NO: 1030 represents the cDNA sequence for clone T60891.

[1070] SEQ ID NO: 1031 represents the cDNA sequence for clone T60892.

[1071] SEQ ID NO: 1032 represents the cDNA sequence for clone T60893.

[1072] SEQ ID NO: 1033 represents the cDNA sequence for clone T60894.

[1073] SEQ ID NO: 1034 represents the cDNA sequence for clone T60896.

[1074] SEQ ID NO: 1035 represents the cDNA sequence for clone T60899.

[1075] SEQ ID NO: 1036 represents the cDNA sequence for clone T60903.

[1076] SEQ ID NO: 1037 represents the cDNA sequence for clone T61014.

[1077] SEQ ID NO: 1038 represents the cDNA sequence for clone T61016.

[1078] SEQ ID NO: 1039 represents the cDNA sequence for clone T61024.

[1079] SEQ ID NO: 1040 represents the cDNA sequence for clone T61026.

[1080] SEQ ID NO: 1041 represents the cDNA sequence for clone T61027.

[1081] SEQ ID NO: 1042 represents the cDNA sequence for clone T61030.

[1082] SEQ ID NO: 1043 represents the cDNA sequence for clone T61031.

[1083] SEQ ID NO: 1044 represents the cDNA sequence for clone T61033.

[1084] SEQ ID NO: 1045 represents the cDNA sequence for clone T61035.

[1085] SEQ ID NO: 1046 represents the cDNA sequence for clone T61036.

[1086] SEQ ID NO: 1047 represents the cDNA sequence for clone T61042.

[1087] SEQ ID NO: 1048 represents the cDNA sequence for clone T61043.

[1088] SEQ ID NO: 1049 represents the cDNA sequence for clone T61044.

[1089] SEQ ID NO: 1050 represents the cDNA sequence for clone T61047.

[1090] SEQ ID NO: 1051 represents the cDNA sequence for clone T61049.

[1091] SEQ ID NO: 1052 represents the cDNA sequence for clone T61050.

[1092] SEQ ID NO: 1053 represents the cDNA sequence for clone T61051.

[1093] SEQ ID NO: 1054 represents the cDNA sequence for clone T61053.

[1094] SEQ ID NO: 1055 represents the cDNA sequence for clone T61055.

[1095] SEQ ID NO: 1056 represents the cDNA sequence for clone T61057.

[1096] SEQ ID NO: 1057 represents the cDNA sequence for clone T61058.

[1097] SEQ ID NO: 1058 represents the cDNA sequence for clone T61063.

[1098] SEQ ID NO: 1059 represents the cDNA sequence for clone T61097.

[1099] SEQ ID NO: 1060 represents the cDNA sequence for clone T61099.

[1100] SEQ ID NO: 1061 represents the cDNA sequence for clone T61139.

[1101] SEQ ID NO: 1062 represents the cDNA sequence for clone T61141.

[1102] SEQ ID NO: 1063 represents the cDNA sequence for clone T61142.

[1103] SEQ ID NO: 1064 represents the cDNA sequence for clone T61144.

[1104] SEQ ID NO: 1065 represents the cDNA sequence for clone T61147.

[1105] SEQ ID NO: 1066 represents the cDNA sequence for clone T61152.

[1106] SEQ ID NO: 1067 represents the cDNA sequence for clone T61155.

[1107] SEQ ID NO: 1068 represents the cDNA sequence for clone T61157.

[1108] SEQ ID NO: 1069 represents the cDNA sequence for clone T61159.

[1109] SEQ ID NO: 1070 represents the cDNA sequence for clone T61160.

[1110] SEQ ID NO: 1071 represents the cDNA sequence for clone T61162.

[1111] SEQ ID NO: 1072 represents the cDNA sequence for clone T61165.

[1112] SEQ ID NO: 1073 represents the cDNA sequence for clone T61492.

[1113] SEQ ID NO: 1074 represents the cDNA sequence for clone T61493.

[1114] SEQ ID NO: 1075 represents the cDNA sequence for clone T61496.

[1115] SEQ ID NO: 1076 represents the cDNA sequence for clone T61501.

[1116] SEQ ID NO: 1077 represents the cDNA sequence for clone T61502.

[1117] SEQ ID NO: 1078 represents the cDNA sequence for clone T61503.

[1118] SEQ ID NO: 1079 represents the cDNA sequence for clone T61504.

[1119] SEQ ID NO: 1080 represents the cDNA sequence for clone T61505.

[1120] SEQ ID NO: 1081 represents the cDNA sequence for clone T61507.

[1121] SEQ ID NO: 1082 represents the cDNA sequence for clone T61511.

[1122] SEQ ID NO: 1083 represents the cDNA sequence for clone T61512.

[1123] SEQ ID NO: 1084 represents the cDNA sequence for clone T61515.

[1124] SEQ ID NO: 1085 represents the cDNA sequence for clone T61518.

[1125] SEQ ID NO: 1086 represents the cDNA sequence for clone T61519.

[1126] SEQ ID NO: 1087 represents the cDNA sequence for clone T61521.

[1127] SEQ ID NO: 1088 represents the cDNA sequence for clone T61525.

[1128] SEQ ID NO: 1089 represents the cDNA sequence for clone T61526.

[1129] SEQ ID NO: 1090 represents the cDNA sequence for clone T61527.

[1130] SEQ ID NO: 1091 represents the cDNA sequence for clone T61530.

[1131] SEQ ID NO: 1092 represents the cDNA sequence for clone T61536.

[1132] SEQ ID NO: 1093 represents the cDNA sequence for clone T61540.

[1133] SEQ ID NO: 1094 represents the cDNA sequence for clone T61542.

[1134] SEQ ID NO: 1095 represents the cDNA sequence for clone T61544.

[1135] SEQ ID NO: 1096 represents the cDNA sequence for clone T61545.

[1136] SEQ ID NO: 1097 represents the cDNA sequence for clone T61548.

[1137] SEQ ID NO: 1098 represents the cDNA sequence for clone T61549.

[1138] SEQ ID NO: 1099 represents the cDNA sequence for clone T61550.

[1139] SEQ ID NO: 1100 represents the cDNA sequence for clone T61551.

[1140] SEQ ID NO: 1101 represents the cDNA sequence for clone T61555.

[1141] SEQ ID NO: 1102 represents the cDNA sequence for clone T61556.

[1142] SEQ ID NO: 1103 represents the cDNA sequence for clone T61560.

[1143] SEQ ID NO: 1104 represents the cDNA sequence for clone T61563.

[1144] SEQ ID NO: 1105 represents the cDNA sequence for clone T61565.

[1145] SEQ ID NO: 1106 represents the cDNA sequence for clone T61570.

[1146] SEQ ID NO: 1107 represents the cDNA sequence for clone T61572.

[1147] SEQ ID NO: 1108 represents the cDNA sequence for clone T61573.

[1148] SEQ ID NO: 1109 represents the cDNA sequence for clone T61576.

[1149] SEQ ID NO: 1110 represents the cDNA sequence for clone T61578.

[1150] SEQ ID NO: 1111 represents the cDNA sequence for clone T61579.

[1151] SEQ ID NO: 1112 represents the cDNA sequence for clone T61582.

[1152] SEQ ID NO: 1113 represents the cDNA sequence for clone T61583.

[1153] SEQ ID NO: 1114 represents the cDNA sequence for clone T61584.

[1154] SEQ ID NO: 1115 represents the cDNA sequence for clone T61587.

[1155] SEQ ID NO: 1116 represents the cDNA sequence for clone T61593.

[1156] SEQ ID NO: 1117 represents the cDNA sequence for clone T61594.

[1157] SEQ ID NO: 1118 represents the cDNA sequence for clone T61598.

[1158] SEQ ID NO: 1119 represents the cDNA sequence for clone R95983.

[1159] SEQ ID NO: 1120 represents the cDNA sequence for clone R96098.

[1160] SEQ ID NO: 1121 represents the cDNA sequence for clone H52225.

[1161] SEQ ID NO: 1122 represents the cDNA sequence for clone H52226.

[1162] SEQ ID NO: 1123 represents the cDNA sequence for clone H52235.

[1163] SEQ ID NO: 1124 represents the cDNA sequence for clone H52239.

[1164] SEQ ID NO: 1125 represents the cDNA sequence for clone H52240.

[1165] SEQ ID NO: 1126 represents the cDNA sequence for clone H52253.

[1166] SEQ ID NO: 1127 represents the cDNA sequence for clone H52258.

[1167] SEQ ID NO: 1128 represents the cDNA sequence for clone H52261.

[1168] SEQ ID NO: 1129 represents the cDNA sequence for clone H52314.

[1169] SEQ ID NO: 1130 represents the cDNA sequence for clone H52316.

[1170] SEQ ID NO: 1131 represents the cDNA sequence for clone H52317.

[1171] SEQ ID NO: 1132 represents the cDNA sequence for clone H52319.

[1172] SEQ ID NO: 1133 represents the cDNA sequence for clone H52323.

[1173] SEQ ID NO: 1134 represents the cDNA sequence for clone H52326.

[1174] SEQ ID NO: 1135 represents the cDNA sequence for clone H52331.

[1175] SEQ ID NO: 1136 represents the cDNA sequence for clone H52337.

[1176] SEQ ID NO: 1137 represents the cDNA sequence for clone H52344.

[1177] SEQ ID NO: 1138 represents the cDNA sequence for clone H52351.

[1178] SEQ ID NO: 1139 represents the cDNA sequence for clone H52353.

[1179] SEQ ID NO: 1140 represents the cDNA sequence for clone H52354.

[1180] SEQ ID NO: 1141 represents the cDNA sequence for clone H52356.

[1181] SEQ ID NO: 1142 represents the cDNA sequence for clone H52358.

[1182] SEQ ID NO: 1143 represents the cDNA sequence for clone H52649.

[1183] SEQ ID NO: 1144 represents the cDNA sequence for clone H52650.

[1184] SEQ ID NO: 1145 represents the cDNA sequence for clone H52654.

[1185] SEQ ID NO: 1146 represents the cDNA sequence for clone H52667.

[1186] SEQ ID NO: 1147 represents the cDNA sequence for clone H52672.

[1187] SEQ ID NO: 1148 represents the cDNA sequence for clone H52681.

[1188] SEQ ID NO: 1149 represents the cDNA sequence for clone H52683.

[1189] SEQ ID NO: 1150 represents the cDNA sequence for clone H53619.

[1190] SEQ ID NO: 1151 represents the cDNA sequence for clone H53632.

[1191] SEQ ID NO: 1152 represents the cDNA sequence for clone H53634.

[1192] SEQ ID NO: 1153 represents the cDNA sequence for clone H53651.

[1193] SEQ ID NO: 1154 represents the cDNA sequence for clone H53674.

[1194] SEQ ID NO: 1155 represents the cDNA sequence for clone H53676.

[1195] SEQ ID NO: 1156 represents the cDNA sequence for clone H53686.

[1196] SEQ ID NO: 1157 represents the cDNA sequence for clone H53687.

[1197] SEQ ID NO: 1158 represents the cDNA sequence for clone H53691.

[1198] SEQ ID NO: 1159 represents the cDNA sequence for clone H53694.

[1199] SEQ ID NO: 1160 represents the cDNA sequence for clone H53701.

[1200] SEQ ID NO: 1161 represents the cDNA sequence for clone H53702.

[1201] SEQ ID NO: 1162 represents the cDNA sequence for clone H53703.

[1202] SEQ ID NO: 1163 represents the cDNA sequence for clone H53712.

[1203] SEQ ID NO: 1164 represents the cDNA sequence for clone H53718.

[1204] SEQ ID NO: 1165 represents the cDNA sequence for clone H53722.

[1205] SEQ ID NO: 1166 represents the cDNA sequence for clone H53723.

[1206] SEQ ID NO: 1167 represents the cDNA sequence for clone H53727.

[1207] SEQ ID NO: 1168 represents the cDNA sequence for clone H53728.

[1208] SEQ ID NO: 1169 represents the cDNA sequence for clone H53730.

[1209] SEQ ID NO: 1170 represents the cDNA sequence for clone H53731.

[1210] SEQ ID NO: 1171 represents the cDNA sequence for clone H53736.

[1211] SEQ ID NO: 1172 represents the cDNA sequence for clone H53737.

[1212] SEQ ID NO: 1173 represents the cDNA sequence for clone H53739.

[1213] SEQ ID NO: 1174 represents the cDNA sequence for clone H61135.

[1214] SEQ ID NO: 1175 represents the cDNA sequence for clone H61142.

[1215] SEQ ID NO: 1176 represents the cDNA sequence for clone H61144.

[1216] SEQ ID NO: 1177 represents the cDNA sequence for clone H61145.

[1217] SEQ ID NO: 1178 represents the cDNA sequence for clone H61150.

[1218] SEQ ID NO: 1179 represents the cDNA sequence for clone H61155.

[1219] SEQ ID NO: 1180 represents the cDNA sequence for clone H61158.

[1220] SEQ ID NO: 1181 represents the cDNA sequence for clone H61161.

[1221] SEQ ID NO: 1182 represents the cDNA sequence for clone H61170.

[1222] SEQ ID NO: 1183 represents the cDNA sequence for clone H61171.

[1223] SEQ ID NO: 1184 represents the cDNA sequence for clone H61179.

[1224] SEQ ID NO: 1185 represents the cDNA sequence for clone H61192.

[1225] SEQ ID NO: 1186 represents the cDNA sequence for clone H61201.

[1226] SEQ ID NO: 1187 represents the cDNA sequence for clone H61206.

[1227] SEQ ID NO: 1188 represents the cDNA sequence for clone H61222.

[1228] SEQ ID NO: 1189 represents the cDNA sequence for clone H61223.

[1229] SEQ ID NO: 1190 represents the cDNA sequence for clone H61225.

[1230] SEQ ID NO: 1191 represents the cDNA sequence for clone H61241.

[1231] SEQ ID NO: 1192 represents the cDNA sequence for clone H61255.

[1232] SEQ ID NO: 1193 represents the cDNA sequence for clone H61259.

[1233] SEQ ID NO: 1194 represents the cDNA sequence for clone H61261.

[1234] SEQ ID NO: 1195 represents the cDNA sequence for clone H61262.

[1235] SEQ ID NO: 1196 represents the cDNA sequence for clone H61263.

[1236] SEQ ID NO: 1197 represents the cDNA sequence for clone H61266.

[1237] SEQ ID NO: 1198 represents the cDNA sequence for clone H61269.

[1238] SEQ ID NO: 1199 represents the cDNA sequence for clone H61271.

[1239] SEQ ID NO: 1200 represents the cDNA sequence for clone H61276.

[1240] SEQ ID NO: 1201 represents the cDNA sequence for clone H61279.

[1241] SEQ ID NO: 1202 represents the cDNA sequence for clone H61280.

[1242] SEQ ID NO: 1203 represents the cDNA sequence for clone H61282.

[1243] SEQ ID NO: 1204 represents the cDNA sequence for clone H61285.

[1244] SEQ ID NO: 1205 represents the cDNA sequence for clone H61294.

[1245] SEQ ID NO: 1206 represents the cDNA sequence for clone H61302.

[1246] SEQ ID NO: 1207 represents the cDNA sequence for clone H61303.

[1247] SEQ ID NO: 1208 represents the cDNA sequence for clone H61305.

[1248] SEQ ID NO: 1209 represents the cDNA sequence for clone H61312.

[1249] SEQ ID NO: 1210 represents the cDNA sequence for clone H61313.

[1250] SEQ ID NO: 1211 represents the cDNA sequence for clone H61320.

[1251] SEQ ID NO: 1212 represents the cDNA sequence for clone H61322.

[1252] SEQ ID NO: 1213 represents the cDNA sequence for clone H61324.

[1253] SEQ ID NO: 1214 represents the cDNA sequence for clone H61325.

[1254] SEQ ID NO: 1215 represents the cDNA sequence for clone H61327.

[1255] SEQ ID NO: 1216 represents the cDNA sequence for clone H61328.

[1256] SEQ ID NO: 1217 represents the cDNA sequence for clone H61337.

[1257] SEQ ID NO: 1218 represents the cDNA sequence for clone H61342.

[1258] SEQ ID NO: 1219 represents the cDNA sequence for clone H61343.

[1259] SEQ ID NO: 1220 represents the cDNA sequence for clone H61351.

[1260] SEQ ID NO: 1221 represents the cDNA sequence for clone H61356.

[1261] SEQ ID NO: 1222 represents the cDNA sequence for clone H61357.

[1262] SEQ ID NO: 1223 represents the cDNA sequence for clone H61358.

[1263] SEQ ID NO: 1224 represents the cDNA sequence for clone H61360.

[1264] SEQ ID NO: 1225 represents the cDNA sequence for clone H61374.

[1265] SEQ ID NO: 1226 represents the cDNA sequence for clone H61379.

[1266] SEQ ID NO: 1227 represents the cDNA sequence for clone H61383.

[1267] SEQ ID NO: 1228 represents the cDNA sequence for clone H61384.

[1268] SEQ ID NO: 1229 represents the cDNA sequence for clone H61385.

[1269] SEQ ID NO: 1230 represents the cDNA sequence for clone H61386.

[1270] SEQ ID NO: 1231 represents the cDNA sequence for clone H61387.

[1271] SEQ ID NO: 1232 represents the cDNA sequence for clone H61390.

[1272] SEQ ID NO: 1233 represents the cDNA sequence for clone H61398.

[1273] SEQ ID NO: 1234 represents the cDNA sequence for clone H61404.

[1274] SEQ ID NO: 1235 represents the cDNA sequence for clone H61753.

[1275] SEQ ID NO: 1236 represents the cDNA sequence for clone H61758.

[1276] SEQ ID NO: 1237 represents the cDNA sequence for clone H61768.

[1277] SEQ ID NO: 1238 represents the cDNA sequence for clone H61773.

[1278] SEQ ID NO: 1239 represents the cDNA sequence for clone H61775.

[1279] SEQ ID NO: 1240 represents the cDNA sequence for clone H61776.

[1280] SEQ ID NO: 1241 represents the cDNA sequence for clone H61783.

[1281] SEQ ID NO: 1242 represents the cDNA sequence for clone H61784.

[1282] SEQ ID NO: 1243 represents the cDNA sequence for clone H61796.

[1283] SEQ ID NO: 1244 represents the cDNA sequence for clone H61797.

[1284] SEQ ID NO: 1245 represents the cDNA sequence for clone H61799.

[1285] SEQ ID NO: 1246 represents the cDNA sequence for clone H61810.

[1286] SEQ ID NO: 1247 represents the cDNA sequence for clone H61811.

[1287] SEQ ID NO: 1248 represents the cDNA sequence for clone H61814.

[1288] SEQ ID NO: 1249 represents the cDNA sequence for clone H61820.

[1289] SEQ ID NO: 1250 represents the cDNA sequence for clone H61824.

[1290] SEQ ID NO: 1251 represents the cDNA sequence for clone H61830.

[1291] SEQ ID NO: 1252 represents the cDNA sequence for clone H61831.

[1292] SEQ ID NO: 1253 represents the cDNA sequence for clone H61832.

[1293] SEQ ID NO: 1254 represents the cDNA sequence for clone H61838.

[1294] SEQ ID NO: 1255 represents the cDNA sequence for clone H62048.

[1295] SEQ ID NO: 1256 represents the cDNA sequence for clone H62052.

[1296] SEQ ID NO: 1257 represents the cDNA sequence for clone H62057.

[1297] SEQ ID NO: 1258 represents the cDNA sequence for clone H62064.

[1298] SEQ ID NO: 1259 represents the cDNA sequence for clone H62068.

[1299] SEQ ID NO: 1260 represents the cDNA sequence for clone H62073.

[1300] SEQ ID NO: 1261 represents the cDNA sequence for clone H62074.

[1301] SEQ ID NO: 1262 represents the cDNA sequence for clone H62079.

[1302] SEQ ID NO: 1263 represents the cDNA sequence for clone H62097.

[1303] SEQ ID NO: 1264 represents the cDNA sequence for clone H62105.

[1304] SEQ ID NO: 1265 represents the cDNA sequence for clone H62107.

[1305] SEQ ID NO: 1266 represents the cDNA sequence for clone H62111.

[1306] SEQ ID NO: 1267 represents the cDNA sequence for clone H62113.

[1307] SEQ ID NO: 1268 represents the cDNA sequence for clone H62116.

[1308] SEQ ID NO: 1269 represents the cDNA sequence for clone H62343.

[1309] SEQ ID NO: 1270 represents the cDNA sequence for clone H62344.

[1310] SEQ ID NO: 1271 represents the cDNA sequence for clone H62351.

[1311] SEQ ID NO: 1272 represents the cDNA sequence for clone H62352.

[1312] SEQ ID NO: 1273 represents the cDNA sequence for clone H62358.

[1313] SEQ ID NO: 1274 represents the cDNA sequence for clone H62362.

[1314] SEQ ID NO: 1275 represents the cDNA sequence for clone H62383.

[1315] SEQ ID NO: 1276 represents the cDNA sequence for clone H62385.

[1316] SEQ ID NO: 1277 represents the cDNA sequence for clone H62396.

[1317] SEQ ID NO: 1278 represents the cDNA sequence for clone H62400.

[1318] SEQ ID NO: 1279 represents the cDNA sequence for clone H62404.

[1319] SEQ ID NO: 1280 represents the cDNA sequence for clone H62405.

[1320] SEQ ID NO: 1281 represents the cDNA sequence for clone H62421.

[1321] SEQ ID NO: 1282 represents the cDNA sequence for clone AA074711.

[1322] SEQ ID NO: 1283 represents the cDNA sequence for clone AA074714.

[1323] SEQ ID NO: 1284 represents the cDNA sequence for clone AA074721.

[1324] SEQ ID NO: 1285 represents the cDNA sequence for clone AA074590.

[1325] SEQ ID NO: 1286 represents the cDNA sequence for clone AA074591.

[1326] SEQ ID NO: 1287 represents the cDNA sequence for clone AA074677.

[1327] SEQ ID NO: 1288 represents the cDNA sequence for clone AA074665.

[1328] SEQ ID NO: 1289 represents the cDNA sequence for clone AA074668.

[1329] SEQ ID NO: 1290 represents the cDNA sequence for clone AA074732.

[1330] SEQ ID NO: 1291 represents the cDNA sequence for clone AA074737.

[1331] SEQ ID NO: 1292 represents the cDNA sequence for clone AA074751.

[1332] SEQ ID NO: 1293 represents the cDNA sequence for clone AA074763.

[1333] SEQ ID NO: 1294 represents the cDNA sequence for clone AA074765.

[1334] SEQ ID NO: 1295 represents the cDNA sequence for clone AA074767.

[1335] SEQ ID NO: 1296 represents the cDNA sequence for clone AA074768.

[1336] SEQ ID NO: 1297 represents the cDNA sequence for clone AA074771.

[1337] SEQ ID NO: 1298 represents the cDNA sequence for clone AA074774.

[1338] SEQ ID NO: 1299 represents the cDNA sequence for clone AA074778.

[1339] SEQ ID NO: 1300 represents the cDNA sequence for clone AA074789.

[1340] SEQ ID NO: 1301 represents the cDNA sequence for clone AA074790.

[1341] SEQ ID NO: 1302 represents the cDNA sequence for clone AA074610.

[1342] SEQ ID NO: 1303 represents the cDNA sequence for clone AA074612.

[1343] SEQ ID NO: 1304 represents the cDNA sequence for clone AA074793.

[1344] SEQ ID NO: 1305 represents the cDNA sequence for clone AA074794.

[1345] SEQ ID NO: 1306 represents the cDNA sequence for clone AA074818.

[1346] SEQ ID NO: 1307 represents the cDNA sequence for clone AA074822.

[1347] SEQ ID NO: 1308 represents the cDNA sequence for clone AA074801.

[1348] SEQ ID NO: 1309 represents the cDNA sequence for clone AA074803.

[1349] SEQ ID NO: 1310 represents the cDNA sequence for clone AA074846.

[1350] SEQ ID NO: 1311 represents the cDNA sequence for clone AA074809.

[1351] SEQ ID NO: 1312 represents the cDNA sequence for clone AA074812.

[1352] SEQ ID NO: 1313 represents the cDNA sequence for clone AA074813.

[1353] SEQ ID NO: 1314 represents the cDNA sequence for clone AA074814.

[1354] SEQ ID NO: 1315 represents the cDNA sequence for clone AA074723.

[1355] SEQ ID NO: 1316 represents the cDNA sequence for clone AA074724.

[1356] SEQ ID NO: 1317 represents the cDNA sequence for clone AA074851.

[1357] SEQ ID NO: 1318 represents the cDNA sequence for clone AA074857.

[1358] SEQ ID NO: 1319 represents the cDNA sequence for clone AA074863.

[1359] SEQ ID NO: 1320 represents the cDNA sequence for clone AA074867.

[1360] SEQ ID NO: 1321 represents the cDNA sequence for clone AA074888.

[1361] SEQ ID NO: 1322 represents the cDNA sequence for clone AA074889.

[1362] SEQ ID NO: 1323 represents the cDNA sequence for clone AA074871.

[1363] SEQ ID NO: 1324 represents the cDNA sequence for clone AA074873.

[1364] SEQ ID NO: 1325 represents the cDNA sequence for clone AA074907.

[1365] SEQ ID NO: 1326 represents the cDNA sequence for clone AA074912.

[1366] SEQ ID NO: 1327 represents the cDNA sequence for clone AA074915.

[1367] SEQ ID NO: 1328 represents the cDNA sequence for clone AA074920.

[1368] SEQ ID NO: 1329 represents the cDNA sequence for clone AA074923.

[1369] SEQ ID NO: 1330 represents the cDNA sequence for clone AA074897.

[1370] SEQ ID NO: 1331 represents the cDNA sequence for clone AA074899.

[1371] SEQ ID NO: 1332 represents the cDNA sequence for clone AA074904.

[1372] SEQ ID NO: 1333 represents the cDNA sequence for clone AA074932.

[1373] SEQ ID NO: 1334 represents the cDNA sequence for clone AA074934.

[1374] SEQ ID NO: 1335 represents the cDNA sequence for clone AA074935.

[1375] SEQ ID NO: 1336 represents the cDNA sequence for clone AA074939.

[1376] SEQ ID NO: 1337 represents the cDNA sequence for clone AA074959.

[1377] SEQ ID NO: 1338 represents the cDNA sequence for clone AA074971.

[1378] SEQ ID NO: 1339 represents the cDNA sequence for clone AA074974.

[1379] SEQ ID NO: 1340 represents the cDNA sequence for clone AA074976.

[1380] SEQ ID NO: 1341 represents the cDNA sequence for clone AA074981.

[1381] SEQ ID NO: 1342 represents the cDNA sequence for clone AA074987.

[1382] SEQ ID NO: 1343 represents the cDNA sequence for clone AA074996.

[1383] SEQ ID NO: 1344 represents the cDNA sequence for clone AA074997.

[1384] SEQ ID NO: 1345 represents the cDNA sequence for clone AA075000.

[1385] SEQ ID NO: 1346 represents the cDNA sequence for clone AA074949.

[1386] SEQ ID NO: 1347 represents the cDNA sequence for clone AA074950.

[1387] SEQ ID NO: 1348 represents the cDNA sequence for clone AA074951.

[1388] SEQ ID NO: 1349 represents the cDNA sequence for clone AA074952.

[1389] SEQ ID NO: 1350 represents the cDNA sequence for clone AA075007.

[1390] SEQ ID NO: 1351 represents the cDNA sequence for clone AA075010.

[1391] SEQ ID NO: 1352 represents the cDNA sequence for clone AA075027.

[1392] SEQ ID NO: 1353 represents the cDNA sequence for clone AA075030.

[1393] SEQ ID NO: 1354 represents the cDNA sequence for clone AA075031.

[1394] SEQ ID NO: 1355 represents the cDNA sequence for clone AA075041.

[1395] SEQ ID NO: 1356 represents the cDNA sequence for clone AA075042.

[1396] SEQ ID NO: 1357 represents the cDNA sequence for clone AA075047.

[1397] SEQ ID NO: 1358 represents the cDNA sequence for clone AA075048.

[1398] SEQ ID NO: 1359 represents the cDNA sequence for clone AA075056.

[1399] SEQ ID NO: 1360 represents the cDNA sequence for clone AA075058.

[1400] SEQ ID NO: 1361 represents the cDNA sequence for clone AA075061.

[1401] SEQ ID NO: 1362 represents the cDNA sequence for clone AA075062.

[1402] SEQ ID NO: 1363 represents the cDNA sequence for clone AA075064.

[1403] SEQ ID NO: 1364 represents the cDNA sequence for clone AA074882.

[1404] SEQ ID NO: 1365 represents the cDNA sequence for clone AA075025.

[1405] SEQ ID NO: 1366 represents the cDNA sequence for clone AA075013.

[1406] SEQ ID NO: 1367 represents the cDNA sequence for clone AA075078.

[1407] SEQ ID NO: 1368 represents the cDNA sequence for clone AA075079.

[1408] SEQ ID NO: 1369 represents the cDNA sequence for clone AA075082.

[1409] SEQ ID NO: 1370 represents the cDNA sequence for clone AA075103.

[1410] SEQ ID NO: 1371 represents the cDNA sequence for clone AA075104.

[1411] SEQ ID NO: 1372 represents the cDNA sequence for clone AA075105.

[1412] SEQ ID NO: 1373 represents the cDNA sequence for clone AA075107.

[1413] SEQ ID NO: 1374 represents the cDNA sequence for clone AA075118.

[1414] SEQ ID NO: 1375 represents the cDNA sequence for clone AA075120.

[1415] SEQ ID NO: 1376 represents the cDNA sequence for clone AA075124.

[1416] SEQ ID NO: 1377 represents the cDNA sequence for clone AA075126.

[1417] SEQ ID NO: 1378 represents the cDNA sequence for clone AA075128.

[1418] SEQ ID NO: 1379 represents the cDNA sequence for clone AA075129.

[1419] SEQ ID NO: 1380 represents the cDNA sequence for clone AA075069.

[1420] SEQ ID NO: 1381 represents the cDNA sequence for clone AA075070.

[1421] SEQ ID NO: 1382 represents the cDNA sequence for clone AA075072.

[1422] SEQ ID NO: 1383 represents the cDNA sequence for clone AA075077.

[1423] SEQ ID NO: 1384 represents the cDNA sequence for clone AA074943.

[1424] SEQ ID NO: 1385 represents the cDNA sequence for clone AA074944.

[1425] SEQ ID NO: 1386 represents the cDNA sequence for clone AA075140.

[1426] SEQ ID NO: 1387 represents the cDNA sequence for clone AA075145.

[1427] SEQ ID NO: 1388 represents the cDNA sequence for clone AA075164.

[1428] SEQ ID NO: 1389 represents the cDNA sequence for clone AA075168.

[1429] SEQ ID NO: 1390 represents the cDNA sequence for clone AA075169.

[1430] SEQ ID NO: 1391 represents the cDNA sequence for clone AA075149.

[1431] SEQ ID NO: 1392 represents the cDNA sequence for clone AA075188.

[1432] SEQ ID NO: 1393 represents the cDNA sequence for clone AA075198.

[1433] SEQ ID NO: 1394 represents the cDNA sequence for clone AA075202.

[1434] SEQ ID NO: 1395 represents the cDNA sequence for clone AA075203.

[1435] SEQ ID NO: 1396 represents the cDNA sequence for clone AA075204.

[1436] SEQ ID NO: 1397 represents the cDNA sequence for clone AA075092.

[1437] SEQ ID NO: 1398 represents the cDNA sequence for clone AA075093.

[1438] SEQ ID NO: 1399 represents the cDNA sequence for clone AA075173.

[1439] SEQ ID NO: 1400 represents the cDNA sequence for clone AA075177.

[1440] SEQ ID NO: 1401 represents the cDNA sequence for clone AA075178.

[1441] SEQ ID NO: 1402 represents the cDNA sequence for clone AA075208.

[1442] SEQ ID NO: 1403 represents the cDNA sequence for clone AA075210.

[1443] SEQ ID NO: 1404 represents the cDNA sequence for clone AA075211.

[1444] SEQ ID NO: 1405 represents the cDNA sequence for clone AA075213.

[1445] SEQ ID NO: 1406 represents the cDNA sequence for clone AA075232.

[1446] SEQ ID NO: 1407 represents the cDNA sequence for clone AA075233.

[1447] SEQ ID NO: 1408 represents the cDNA sequence for clone AA075234.

[1448] SEQ ID NO: 1409 represents the cDNA sequence for clone AA075239.

[1449] SEQ ID NO: 1410 represents the cDNA sequence for clone AA075243.

[1450] SEQ ID NO: 1411 represents the cDNA sequence for clone AA075245.

[1451] SEQ ID NO: 1412 represents the cDNA sequence for clone AA075251.

[1452] SEQ ID NO: 1413 represents the cDNA sequence for clone AA075255.

[1453] SEQ ID NO: 1414 represents the cDNA sequence for clone AA075259.

[1454] SEQ ID NO: 1415 represents the cDNA sequence for clone AA075260.

[1455] SEQ ID NO: 1416 represents the cDNA sequence for clone AA075131.

[1456] SEQ ID NO: 1417 represents the cDNA sequence for clone AA075132.

[1457] SEQ ID NO: 1418 represents the cDNA sequence for clone AA075267.

[1458] SEQ ID NO: 1419 represents the cDNA sequence for clone AA075268.

[1459] SEQ ID NO: 1420 represents the cDNA sequence for clone AA075299.

[1460] SEQ ID NO: 1421 represents the cDNA sequence for clone AA075306.

[1461] SEQ ID NO: 1422 represents the cDNA sequence for clone AA075309.

[1462] SEQ ID NO: 1423 represents the cDNA sequence for clone AA075310.

[1463] SEQ ID NO: 1424 represents the cDNA sequence for clone AA075313.

[1464] SEQ ID NO: 1425 represents the cDNA sequence for clone AA075318.

[1465] SEQ ID NO: 1426 represents the cDNA sequence for clone AA075324.

[1466] SEQ ID NO: 1427 represents the cDNA sequence for clone AA075326.

[1467] SEQ ID NO: 1428 represents the cDNA sequence for clone AA075327.

[1468] SEQ ID NO: 1429 represents the cDNA sequence for clone AA075363.

[1469] SEQ ID NO: 1430 represents the cDNA sequence for clone AA075364.

[1470] SEQ ID NO: 1431 represents the cDNA sequence for clone AA075365.

[1471] SEQ ID NO: 1432 represents the cDNA sequence for clone AA075366.

[1472] SEQ ID NO: 1433 represents the cDNA sequence for clone AA075368.

[1473] SEQ ID NO: 1434 represents the cDNA sequence for clone AA075369.

[1474] SEQ ID NO: 1435 represents the cDNA sequence for clone AA075370.

[1475] SEQ ID NO: 1436 represents the cDNA sequence for clone AA075372.

[1476] SEQ ID NO: 1437 represents the cDNA sequence for clone AA075373.

[1477] SEQ ID NO: 1438 represents the cDNA sequence for clone AA075374.

[1478] SEQ ID NO: 1439 represents the cDNA sequence for clone AA075375.

[1479] SEQ ID NO: 1440 represents the cDNA sequence for clone AA075376.

[1480] SEQ ID NO: 1441 represents the cDNA sequence for clone AA075395.

[1481] SEQ ID NO: 1442 represents the cDNA sequence for clone AA075400.

[1482] SEQ ID NO: 1443 represents the cDNA sequence for clone AA075217.

[1483] SEQ ID NO: 1444 represents the cDNA sequence for clone AA075222.

[1484] SEQ ID NO: 1445 represents the cDNA sequence for clone AA075350.

[1485] SEQ ID NO: 1446 represents the cDNA sequence for clone AA075354.

[1486] SEQ ID NO: 1447 represents the cDNA sequence for clone AA075406.

[1487] SEQ ID NO: 1448 represents the cDNA sequence for clone AA075407.

[1488] SEQ ID NO: 1449 represents the cDNA sequence for clone AA075408.

[1489] SEQ ID NO: 1450 represents the cDNA sequence for clone AA075430.

[1490] SEQ ID NO: 1451 represents the cDNA sequence for clone AA075444.

[1491] SEQ ID NO: 1452 represents the cDNA sequence for clone AA075450.

[1492] SEQ ID NO: 1453 represents the cDNA sequence for clone AA075453.

[1493] SEQ ID NO: 1454 represents the cDNA sequence for clone AA075462.

[1494] SEQ ID NO: 1455 represents the cDNA sequence for clone AA075464.

[1495] SEQ ID NO: 1456 represents the cDNA sequence for clone AA075466.

[1496] SEQ ID NO: 1457 represents the cDNA sequence for clone AA075285.

[1497] SEQ ID NO: 1458 represents the cDNA sequence for clone AA075419.

[1498] SEQ ID NO: 1459 represents the cDNA sequence for clone AA075420.

[1499] SEQ ID NO: 1460 represents the cDNA sequence for clone AA075502.

[1500] SEQ ID NO: 1461 represents the cDNA sequence for clone AA075516.

[1501] SEQ ID NO: 1462 represents the cDNA sequence for clone AA075517.

[1502] SEQ ID NO: 1463 represents the cDNA sequence for clone AA075518.

[1503] SEQ ID NO: 1464 represents the cDNA sequence for clone AA075519.

[1504] SEQ ID NO: 1465 represents the cDNA sequence for clone AA075522.

[1505] SEQ ID NO: 1466 represents the cDNA sequence for clone AA075523.

[1506] SEQ ID NO: 1467 represents the cDNA sequence for clone AA075524.

[1507] SEQ ID NO: 1468 represents the cDNA sequence for clone AA075533.

[1508] SEQ ID NO: 1469 represents the cDNA sequence for clone AA075535.

[1509] SEQ ID NO: 1470 represents the cDNA sequence for clone AA075340.

[1510] SEQ ID NO: 1471 represents the cDNA sequence for clone AA075487.

[1511] SEQ ID NO: 1472 represents the cDNA sequence for clone AA075488.

[1512] SEQ ID NO: 1473 represents the cDNA sequence for clone AA075491.

[1513] SEQ ID NO: 1474 represents the cDNA sequence for clone AA075492.

[1514] SEQ ID NO: 1475 represents the cDNA sequence for clone AA075537.

[1515] SEQ ID NO: 1476 represents the cDNA sequence for clone AA075538.

[1516] SEQ ID NO: 1477 represents the cDNA sequence for clone AA075539.

[1517] SEQ ID NO: 1478 represents the cDNA sequence for clone AA075565.

[1518] SEQ ID NO: 1479 represents the cDNA sequence for clone AA075574.

[1519] SEQ ID NO: 1480 represents the cDNA sequence for clone AA075575.

[1520] SEQ ID NO: 1481 represents the cDNA sequence for clone AA075578.

[1521] SEQ ID NO: 1482 represents the cDNA sequence for clone AA075579.

[1522] SEQ ID NO: 1483 represents the cDNA sequence for clone AA075590.

[1523] SEQ ID NO: 1484 represents the cDNA sequence for clone AA075592.

[1524] SEQ ID NO: 1485 represents the cDNA sequence for clone AA075593.

[1525] SEQ ID NO: 1486 represents the cDNA sequence for clone AA075602.

[1526] SEQ ID NO: 1487 represents the cDNA sequence for clone AA075603.

[1527] SEQ ID NO: 1488 represents the cDNA sequence for clone AA075412.

[1528] SEQ ID NO: 1489 represents the cDNA sequence for clone AA075413.

[1529] SEQ ID NO: 1490 represents the cDNA sequence for clone AA075414.

[1530] SEQ ID NO: 1491 represents the cDNA sequence for clone AA075416.

[1531] SEQ ID NO: 1492 represents the cDNA sequence for clone AA075417.

[1532] SEQ ID NO: 1493 represents the cDNA sequence for clone AA075418.

[1533] SEQ ID NO: 1494 represents the cDNA sequence for clone AA075560.

[1534] SEQ ID NO: 1495 represents the cDNA sequence for clone AA075611.

[1535] SEQ ID NO: 1496 represents the cDNA sequence for clone AA075612.

[1536] SEQ ID NO: 1497 represents the cDNA sequence for clone AA075631.

[1537] SEQ ID NO: 1498 represents the cDNA sequence for clone AA075632.

[1538] SEQ ID NO: 1499 represents the cDNA sequence for clone AA075639.

[1539] SEQ ID NO: 1500 represents the cDNA sequence for clone AA075640.

[1540] SEQ ID NO: 1501 represents the cDNA sequence for clone AA075651.

[1541] SEQ ID NO: 1502 represents the cDNA sequence for clone AA075652.

[1542] SEQ ID NO: 1503 represents the cDNA sequence for clone AA075659.

[1543] SEQ ID NO: 1504 represents the cDNA sequence for clone AA075660.

[1544] SEQ ID NO: 1505 represents the cDNA sequence for clone AA075668.

[1545] SEQ ID NO: 1506 represents the cDNA sequence for clone AA075669.

[1546] SEQ ID NO: 1507 represents the cDNA sequence for clone AA075670.

[1547] SEQ ID NO: 1508 represents the cDNA sequence for clone AA075674.

[1548] SEQ ID NO: 1509 represents the cDNA sequence for clone AA075676.

[1549] SEQ ID NO: 1510 represents the cDNA sequence for clone AA075677.

[1550] SEQ ID NO: 1511 represents the cDNA sequence for clone AA075678.

[1551] SEQ ID NO: 1512 represents the cDNA sequence for clone AA075699.

[1552] SEQ ID NO: 1513 represents the cDNA sequence for clone AA075703.

[1553] SEQ ID NO: 1514 represents the cDNA sequence for clone AA075704.

[1554] SEQ ID NO: 1515 represents the cDNA sequence for clone AA075708.

[1555] SEQ ID NO: 1516 represents the cDNA sequence for clone AA075710.

[1556] SEQ ID NO: 1517 represents the cDNA sequence for clone AA075715.

[1557] SEQ ID NO: 1518 represents the cDNA sequence for clone AA075720.

[1558] SEQ ID NO: 1519 represents the cDNA sequence for clone AA075730.

[1559] SEQ ID NO: 1520 represents the cDNA sequence for clone AA075731.

[1560] SEQ ID NO: 1521 represents the cDNA sequence for clone AA075732.

[1561] SEQ ID NO: 1522 represents the cDNA sequence for clone AA075738.

[1562] SEQ ID NO: 1523 represents the cDNA sequence for clone AA075545.

[1563] SEQ ID NO: 1524 represents the cDNA sequence for clone AA075547.

[1564] SEQ ID NO: 1525 represents the cDNA sequence for clone AA075548.

[1565] SEQ ID NO: 1526 represents the cDNA sequence for clone AA075549.

[1566] SEQ ID NO: 1527 represents the cDNA sequence for clone AA075689.

[1567] SEQ ID NO: 1528 represents the cDNA sequence for clone AA075691.

[1568] SEQ ID NO: 1529 represents the cDNA sequence for clone AA075693.

[1569] SEQ ID NO: 1530 represents the cDNA sequence for clone AA075694.

[1570] SEQ ID NO: 1531 represents the cDNA sequence for clone AA075741.

[1571] SEQ ID NO: 1532 represents the cDNA sequence for clone AA075743.

[1572] SEQ ID NO: 1533 represents the cDNA sequence for clone AA075747.

[1573] SEQ ID NO: 1534 represents the cDNA sequence for clone AA075748.

[1574] SEQ ID NO: 1535 represents the cDNA sequence for clone AA075767.

[1575] SEQ ID NO: 1536 represents the cDNA sequence for clone AA075770.

[1576] SEQ ID NO: 1537 represents the cDNA sequence for clone AA075771.

[1577] SEQ ID NO: 1538 represents the cDNA sequence for clone AA075782.

[1578] SEQ ID NO: 1539 represents the cDNA sequence for clone AA075783.

[1579] SEQ ID NO: 1540 represents the cDNA sequence for clone AA075784.

[1580] SEQ ID NO: 1541 represents the cDNA sequence for clone AA075788.

[1581] SEQ ID NO: 1542 represents the cDNA sequence for clone AA075994.

[1582] SEQ ID NO: 1543 represents the cDNA sequence for clone AA075995.

[1583] SEQ ID NO: 1544 represents the cDNA sequence for clone AA076003.

[1584] SEQ ID NO: 1545 represents the cDNA sequence for clone AA076004.

[1585] SEQ ID NO: 1546 represents the cDNA sequence for clone AA075955.

[1586] SEQ ID NO: 1547 represents the cDNA sequence for clone AA075960.

[1587] SEQ ID NO: 1548 represents the cDNA sequence for clone AA075961.

[1588] SEQ ID NO: 1549 represents the cDNA sequence for clone AA075826.

[1589] SEQ ID NO: 1550 represents the cDNA sequence for clone AA075827.

[1590] SEQ ID NO: 1551 represents the cDNA sequence for clone AA075828.

[1591] SEQ ID NO: 1552 represents the cDNA sequence for clone AA075831.

[1592] SEQ ID NO: 1553 represents the cDNA sequence for clone AA075832.

[1593] SEQ ID NO: 1554 represents the cDNA sequence for clone AA076005.

[1594] SEQ ID NO: 1555 represents the cDNA sequence for clone AA076009.

[1595] SEQ ID NO: 1556 represents the cDNA sequence for clone AA076010.

[1596] SEQ ID NO: 1557 represents the cDNA sequence for clone AA076021.

[1597] SEQ ID NO: 1558 represents the cDNA sequence for clone AA076041.

[1598] SEQ ID NO: 1559 represents the cDNA sequence for clone AA076042.

[1599] SEQ ID NO: 1560 represents the cDNA sequence for clone AA076045.

[1600] SEQ ID NO: 1561 represents the cDNA sequence for clone AA076049.

[1601] SEQ ID NO: 1562 represents the cDNA sequence for clone AA076056.

[1602] SEQ ID NO: 1563 represents the cDNA sequence for clone AA076061.

[1603] SEQ ID NO: 1564 represents the cDNA sequence for clone AA076070.

[1604] SEQ ID NO: 1565 represents the cDNA sequence for clone AA076079.

[1605] SEQ ID NO: 1566 represents the cDNA sequence for clone AA076081.

[1606] SEQ ID NO: 1567 represents the cDNA sequence for clone AA076084.

[1607] SEQ ID NO: 1568 represents the cDNA sequence for clone AA075895.

[1608] SEQ ID NO: 1569 represents the cDNA sequence for clone AA076139.

[1609] SEQ ID NO: 1570 represents the cDNA sequence for clone AA076143.

[1610] SEQ ID NO: 1571 represents the cDNA sequence for clone AA076151.

[1611] SEQ ID NO: 1572 represents the cDNA sequence for clone AA076154.

[1612] SEQ ID NO: 1573 represents the cDNA sequence for clone AA076155.

[1613] SEQ ID NO: 1574 represents the cDNA sequence for clone AA076096.

[1614] SEQ ID NO: 1575 represents the cDNA sequence for clone AA076098.

[1615] SEQ ID NO: 1576 represents the cDNA sequence for clone AA076101.

[1616] SEQ ID NO: 1577 represents the cDNA sequence for clone AA076102.

[1617] SEQ ID NO: 1578 represents the cDNA sequence for clone AA076027.

[1618] SEQ ID NO: 1579 represents the cDNA sequence for clone AA076030.

[1619] SEQ ID NO: 1580 represents the cDNA sequence for clone AA076161.

[1620] SEQ ID NO: 1581 represents the cDNA sequence for clone AA076162.

[1621] SEQ ID NO: 1582 represents the cDNA sequence for clone AA076163.

[1622] SEQ ID NO: 1583 represents the cDNA sequence for clone AA076164.

[1623] SEQ ID NO: 1584 represents the cDNA sequence for clone AA076165.

[1624] SEQ ID NO: 1585 represents the cDNA sequence for clone AA076182.

[1625] SEQ ID NO: 1586 represents the cDNA sequence for clone AA076187.

[1626] SEQ ID NO: 1587 represents the cDNA sequence for clone AA076228.

[1627] SEQ ID NO: 1588 represents the cDNA sequence for clone AA076258.

[1628] SEQ ID NO: 1589 represents the cDNA sequence for clone AA076259.

[1629] SEQ ID NO: 1590 represents the cDNA sequence for clone AA076264.

[1630] SEQ ID NO: 1591 represents the cDNA sequence for clone AA076265.

[1631] SEQ ID NO: 1592 represents the cDNA sequence for clone AA076268.

[1632] SEQ ID NO: 1593 represents the cDNA sequence for clone AA076269.

[1633] SEQ ID NO: 1594 represents the cDNA sequence for clone AA076270.

[1634] SEQ ID NO: 1595 represents the cDNA sequence for clone AA076275.

[1635] SEQ ID NO: 1596 represents the cDNA sequence for clone AA076277.

[1636] SEQ ID NO: 1597 represents the cDNA sequence for clone AA076278.

[1637] SEQ ID NO: 1598 represents the cDNA sequence for clone AA076290.

[1638] SEQ ID NO: 1599 represents the cDNA sequence for clone AA076349.

[1639] SEQ ID NO: 1600 represents the cDNA sequence for clone AA076350.

[1640] SEQ ID NO: 1601 represents the cDNA sequence for clone AA076351.

[1641] SEQ ID NO: 1602 represents the cDNA sequence for clone AA076356.

[1642] SEQ ID NO: 1603 represents the cDNA sequence for clone AA076359.

[1643] SEQ ID NO: 1604 represents the cDNA sequence for clone AA076362.

[1644] SEQ ID NO: 1605 represents the cDNA sequence for clone AA076365.

[1645] SEQ ID NO: 1606 represents the cDNA sequence for clone AA076167.

[1646] SEQ ID NO: 1607 represents the cDNA sequence for clone AA076170.

[1647] SEQ ID NO: 1608 represents the cDNA sequence for clone AA076172.

[1648] SEQ ID NO: 1609 represents the cDNA sequence for clone AA076173.

[1649] SEQ ID NO: 1610 represents the cDNA sequence for clone AA076367.

[1650] SEQ ID NO: 1611 represents the cDNA sequence for clone AA076373.

[1651] SEQ ID NO: 1612 represents the cDNA sequence for clone AA076382.

[1652] SEQ ID NO: 1613 represents the cDNA sequence for clone AA076401.

[1653] SEQ ID NO: 1614 represents the cDNA sequence for clone AA076402.

[1654] SEQ ID NO: 1615 represents the cDNA sequence for clone AA076442.

[1655] SEQ ID NO: 1616 represents the cDNA sequence for clone AA076443.

[1656] SEQ ID NO: 1617 represents the cDNA sequence for clone AA076462.

[1657] SEQ ID NO: 1618 represents the cDNA sequence for clone AA076467.

[1658] SEQ ID NO: 1619 represents the cDNA sequence for clone AA076470.

[1659] SEQ ID NO: 1620 represents the cDNA sequence for clone AA076472.

[1660] SEQ ID NO: 1621 represents the cDNA sequence for clone AA076476.

[1661] SEQ ID NO: 1622 represents the cDNA sequence for clone AA076484.

[1662] SEQ ID NO: 1623 represents the cDNA sequence for clone AA076485.

[1663] SEQ ID NO: 1624 represents the cDNA sequence for clone AA076492.

[1664] SEQ ID NO: 1625 represents the cDNA sequence for clone AA076494.

[1665] SEQ ID NO: 1626 represents the cDNA sequence for clone AA076496.

[1666] SEQ ID NO: 1627 represents the cDNA sequence for clone AA076498.

[1667] SEQ ID NO: 1628 represents the cDNA sequence for clone AA076502.

[1668] SEQ ID NO: 1629 represents the cDNA sequence for clone AA076311.

[1669] SEQ ID NO: 1630 represents the cDNA sequence for clone AA076313.

[1670] SEQ ID NO: 1631 represents the cDNA sequence for clone AA076453.

[1671] SEQ ID NO: 1632 represents the cDNA sequence for clone AA076457.

[1672] SEQ ID NO: 1633 represents the cDNA sequence for clone AA076458.

[1673] SEQ ID NO: 1634 represents the cDNA sequence for clone AA076529.

[1674] SEQ ID NO: 1635 represents the cDNA sequence for clone AA076392.

[1675] SEQ ID NO: 1636 represents the cDNA sequence for clone AA076448.

[1676] SEQ ID NO: 1637 represents the cDNA sequence for clone AA076449.

[1677] SEQ ID NO: 1638 represents the cDNA sequence for clone AA076450.

[1678] SEQ ID NO: 1639 represents the cDNA sequence for clone AA076451.

[1679] SEQ ID NO: 1640 represents the cDNA sequence for clone AA076571.

[1680] SEQ ID NO: 1641 represents the cDNA sequence for clone AA076581.

[1681] SEQ ID NO: 1642 represents the cDNA sequence for clone AA076582.

[1682] SEQ ID NO: 1643 represents the cDNA sequence for clone AA076589.

[1683] SEQ ID NO: 1644 represents the cDNA sequence for clone AA076591.

[1684] SEQ ID NO: 1645 represents the cDNA sequence for clone AA076592.

[1685] SEQ ID NO: 1646 represents the cDNA sequence for clone AA076593.

[1686] SEQ ID NO: 1647 represents the cDNA sequence for clone AA076594.

[1687] SEQ ID NO: 1648 represents the cDNA sequence for clone AA078957.

[1688] SEQ ID NO: 1649 represents the cDNA sequence for clone AA078966.

[1689] SEQ ID NO: 1650 represents the cDNA sequence for clone AA078970.

[1690] SEQ ID NO: 1651 represents the cDNA sequence for clone AA078980.

[1691] SEQ ID NO: 1652 represents the cDNA sequence for clone AA078981.

[1692] SEQ ID NO: 1653 represents the cDNA sequence for clone AA078983.

[1693] SEQ ID NO: 1654 represents the cDNA sequence for clone AA078984.

[1694] SEQ ID NO: 1655 represents the cDNA sequence for clone AA078986.

[1695] SEQ ID NO: 1656 represents the cDNA sequence for clone AA078799.

[1696] SEQ ID NO: 1657 represents the cDNA sequence for clone AA079038.

[1697] SEQ ID NO: 1658 represents the cDNA sequence for clone AA079045.

[1698] SEQ ID NO: 1659 represents the cDNA sequence for clone AA079048.

[1699] SEQ ID NO: 1660 represents the cDNA sequence for clone AA079050.

[1700] SEQ ID NO: 1661 represents the cDNA sequence for clone AA078859.

[1701] SEQ ID NO: 1662 represents the cDNA sequence for clone AA078864.

[1702] SEQ ID NO: 1663 represents the cDNA sequence for clone AA079009.

[1703] SEQ ID NO: 1664 represents the cDNA sequence for clone AA079011.

[1704] SEQ ID NO: 1665 represents the cDNA sequence for clone AA079063.

[1705] SEQ ID NO: 1666 represents the cDNA sequence for clone AA079064.

[1706] SEQ ID NO: 1667 represents the cDNA sequence for clone AA079084.

[1707] SEQ ID NO: 1668 represents the cDNA sequence for clone AA079085.

[1708] SEQ ID NO: 1669 represents the cDNA sequence for clone AA079087.

[1709] SEQ ID NO: 1670 represents the cDNA sequence for clone AA079095.

[1710] SEQ ID NO: 1671 represents the cDNA sequence for clone AA079096.

[1711] SEQ ID NO: 1672 represents the cDNA sequence for clone AA079097.

[1712] SEQ ID NO: 1673 represents the cDNA sequence for clone AA079098.

[1713] SEQ ID NO: 1674 represents the cDNA sequence for clone AA079127.

[1714] SEQ ID NO: 1675 represents the cDNA sequence for clone AA079128.

[1715] SEQ ID NO: 1676 represents the cDNA sequence for clone AA079160.

[1716] SEQ ID NO: 1677 represents the cDNA sequence for clone AA079161.

[1717] SEQ ID NO: 1678 represents the cDNA sequence for clone AA079165.

[1718] SEQ ID NO: 1679 represents the cDNA sequence for clone AA079166.

[1719] SEQ ID NO: 1680 represents the cDNA sequence for clone AA079177.

[1720] SEQ ID NO: 1681 represents the cDNA sequence for clone AA079178.

[1721] SEQ ID NO: 1682 represents the cDNA sequence for clone AA079179.

[1722] SEQ ID NO: 1683 represents the cDNA sequence for clone AA079180.

[1723] SEQ ID NO: 1684 represents the cDNA sequence for clone AA079183.

[1724] SEQ ID NO: 1685 represents the cDNA sequence for clone AA079184.

[1725] SEQ ID NO: 1686 represents the cDNA sequence for clone AA079189.

[1726] SEQ ID NO: 1687 represents the cDNA sequence for clone AA079192.

[1727] SEQ ID NO: 1688 represents the cDNA sequence for clone AA079193.

[1728] SEQ ID NO: 1689 represents the cDNA sequence for clone AA079649.

[1729] SEQ ID NO: 1690 represents the cDNA sequence for clone AA079655.

[1730] SEQ ID NO: 1691 represents the cDNA sequence for clone AA079656.

[1731] SEQ ID NO: 1692 represents the cDNA sequence for clone AA079659.

[1732] SEQ ID NO: 1693 represents the cDNA sequence for clone AA079667.

[1733] SEQ ID NO: 1694 represents the cDNA sequence for clone AA079492.

[1734] SEQ ID NO: 1695 represents the cDNA sequence for clone AA079495.

[1735] SEQ ID NO: 1696 represents the cDNA sequence for clone AA079497.

[1736] SEQ ID NO: 1697 represents the cDNA sequence for clone AA079631.

[1737] SEQ ID NO: 1698 represents the cDNA sequence for clone AA079682.

[1738] SEQ ID NO: 1699 represents the cDNA sequence for clone AA079555.

[1739] SEQ ID NO: 1700 represents the cDNA sequence for clone AA079620.

[1740] SEQ ID NO: 1701 represents the cDNA sequence for clone AA079621.

[1741] SEQ ID NO: 1702 represents the cDNA sequence for clone AA079623.

[1742] SEQ ID NO: 1703 represents the cDNA sequence for clone AA079771.

[1743] SEQ ID NO: 1704 represents the cDNA sequence for clone AA079774.

[1744] SEQ ID NO: 1705 represents the cDNA sequence for clone AA079786.

[1745] SEQ ID NO: 1706 represents the cDNA sequence for clone AA079797.

[1746] SEQ ID NO: 1707 represents the cDNA sequence for clone AA079799.

[1747] SEQ ID NO: 1708 represents the cDNA sequence for clone AA079805.

[1748] SEQ ID NO: 1709 represents the cDNA sequence for clone AA079808.

[1749] SEQ ID NO: 1710 represents the cDNA sequence for clone AA079811.

[1750] SEQ ID NO: 1711 represents the cDNA sequence for clone AA079812.

[1751] SEQ ID NO: 1712 represents the cDNA sequence for clone AA079864.

[1752] SEQ ID NO: 1713 represents the cDNA sequence for clone AA079873.

[1753] SEQ ID NO: 1714 represents the cDNA sequence for clone AA079874.

[1754] SEQ ID NO: 1715 represents the cDNA sequence for clone AA079877.

[1755] SEQ ID NO: 1716 represents the cDNA sequence for clone AA079878.

[1756] SEQ ID NO: 1717 represents the cDNA sequence for clone AA079883.

[1757] SEQ ID NO: 1718 represents the cDNA sequence for clone AA079884.

[1758] SEQ ID NO: 1719 represents the cDNA sequence for clone AA079885.

[1759] SEQ ID NO: 1720 represents the cDNA sequence for clone AA079697.

[1760] SEQ ID NO: 1721 represents the cDNA sequence for clone AA079698.

[1761] SEQ ID NO: 1722 represents the cDNA sequence for clone AA079703.

[1762] SEQ ID NO: 1723 represents the cDNA sequence for clone AA079704.

[1763] SEQ ID NO: 1724 represents the cDNA sequence for clone AA079705.

[1764] SEQ ID NO: 1725 represents the cDNA sequence for clone AA079838.

[1765] SEQ ID NO: 1726 represents the cDNA sequence for clone AA079891.

[1766] SEQ ID NO: 1727 represents the cDNA sequence for clone AA159632.

[1767] SEQ ID NO: 1728 represents the cDNA sequence for clone AA159645.

[1768] SEQ ID NO: 1729 represents the cDNA sequence for clone AA159630.

[1769] SEQ ID NO: 1730 represents the cDNA sequence for clone AA159690.

[1770] SEQ ID NO: 1731 represents the cDNA sequence for clone AA159660.

[1771] SEQ ID NO: 1732 represents the cDNA sequence for clone AA159799.

[1772] SEQ ID NO: 1733 represents the cDNA sequence for clone AA159824.

[1773] SEQ ID NO: 1734 represents the cDNA sequence for clone AA159899.

[1774] SEQ ID NO: 1735 represents the cDNA sequence for clone AA159900.

[1775] SEQ ID NO: 1736 represents the cDNA sequence for clone AA159903.

[1776] SEQ ID NO: 1737 represents the cDNA sequence for clone AA159804.

[1777] SEQ ID NO: 1738 represents the cDNA sequence for clone AA159810.

[1778] SEQ ID NO: 1739 represents the cDNA sequence for clone AA159919.

[1779] SEQ ID NO: 1740 represents the cDNA sequence for clone AA159920.

[1780] SEQ ID NO: 1741 represents the cDNA sequence for clone AA159921.

[1781] SEQ ID NO: 1742 represents the cDNA sequence for clone AA159928.

[1782] SEQ ID NO: 1743 represents the cDNA sequence for clone AA160045.

[1783] SEQ ID NO: 1744 represents the cDNA sequence for clone AA160046.

[1784] SEQ ID NO: 1745 represents the cDNA sequence for clone AA160048.

[1785] SEQ ID NO: 1746 represents the cDNA sequence for clone AA160049.

[1786] SEQ ID NO: 1747 represents the cDNA sequence for clone AA160052.

[1787] SEQ ID NO: 1748 represents the cDNA sequence for clone AA160079.

[1788] SEQ ID NO: 1749 represents the cDNA sequence for clone AA160080.

[1789] SEQ ID NO: 1750 represents the cDNA sequence for clone AA160081.

[1790] SEQ ID NO: 1751 represents the cDNA sequence for clone AA160141.

[1791] SEQ ID NO: 1752 represents the cDNA sequence for clone AA160142.

[1792] SEQ ID NO: 1753 represents the cDNA sequence for clone AA160143.

[1793] SEQ ID NO: 1754 represents the cDNA sequence for clone AA160150.

[1794] SEQ ID NO: 1755 represents the cDNA sequence for clone AA159679.

[1795] SEQ ID NO: 1756 represents the cDNA sequence for clone AA159681.

[1796] SEQ ID NO: 1757 represents the cDNA sequence for clone AA159734.

[1797] SEQ ID NO: 1758 represents the cDNA sequence for clone AA159735.

[1798] SEQ ID NO: 1759 represents the cDNA sequence for clone AA159761.

[1799] SEQ ID NO: 1760 represents the cDNA sequence for clone AA159658.

[1800] SEQ ID NO: 1761 represents the cDNA sequence for clone AA159723.

[1801] SEQ ID NO: 1762 represents the cDNA sequence for clone AA159726.

[1802] SEQ ID NO: 1763 represents the cDNA sequence for clone AA159727.

[1803] SEQ ID NO: 1764 represents the cDNA sequence for clone AA159728.

[1804] SEQ ID NO: 1765 represents the cDNA sequence for clone AA159729.

[1805] SEQ ID NO: 1766 represents the cDNA sequence for clone AA159634.

[1806] SEQ ID NO: 1767 represents the cDNA sequence for clone AA159639.

[1807] SEQ ID NO: 1768 represents the cDNA sequence for clone AA159780.

[1808] SEQ ID NO: 1769 represents the cDNA sequence for clone AA159706.

[1809] SEQ ID NO: 1770 represents the cDNA sequence for clone AA159708.

[1810] SEQ ID NO: 1771 represents the cDNA sequence for clone AA159709.

[1811] SEQ ID NO: 1772 represents the cDNA sequence for clone AA160128.

[1812] SEQ ID NO: 1773 represents the cDNA sequence for clone AA160155.

[1813] SEQ ID NO: 1774 represents the cDNA sequence for clone AA160156.

[1814] SEQ ID NO: 1775 represents the cDNA sequence for clone AA160180.

[1815] SEQ ID NO: 1776 represents the cDNA sequence for clone AA160198.

[1816] SEQ ID NO: 1777 represents the cDNA sequence for clone AA160199.

[1817] SEQ ID NO: 1778 represents the cDNA sequence for clone AA160207.

[1818] SEQ ID NO: 1779 represents the cDNA sequence for clone AA159757.

[1819] SEQ ID NO: 1780 represents the cDNA sequence for clone AA160171.

[1820] SEQ ID NO: 1781 represents the cDNA sequence for clone AA160172.

[1821] SEQ ID NO: 1782 represents the cDNA sequence for clone AA160177.

[1822] SEQ ID NO: 1783 represents the cDNA sequence for clone AA160252.

[1823] SEQ ID NO: 1784 represents the cDNA sequence for clone AA160256.

[1824] SEQ ID NO: 1785 represents the cDNA sequence for clone AA160258.

[1825] SEQ ID NO: 1786 represents the cDNA sequence for clone AA160259.

[1826] SEQ ID NO: 1787 represents the cDNA sequence for clone AA160266.

[1827] SEQ ID NO: 1788 represents the cDNA sequence for clone AA160290.

[1828] SEQ ID NO: 1789 represents the cDNA sequence for clone AA160291.

[1829] SEQ ID NO: 1790 represents the cDNA sequence for clone AA160006.

[1830] SEQ ID NO: 1791 represents the cDNA sequence for clone AA160008.

[1831] SEQ ID NO: 1792 represents the cDNA sequence for clone AA164991.

[1832] SEQ ID NO: 1793 represents the cDNA sequence for clone AA164996.

[1833] SEQ ID NO: 1794 represents the cDNA sequence for clone AA165006.

[1834] SEQ ID NO: 1795 represents the cDNA sequence for clone AA165007.

[1835] SEQ ID NO: 1796 represents the cDNA sequence for clone AA165008.

[1836] SEQ ID NO: 1797 represents the cDNA sequence for clone AA165012.

[1837] SEQ ID NO: 1798 represents the cDNA sequence for clone AA165018.

[1838] SEQ ID NO: 1799 represents the cDNA sequence for clone AA165024.

[1839] SEQ ID NO: 1800 represents the cDNA sequence for clone AA165026.

[1840] SEQ ID NO: 1801 represents the cDNA sequence for clone AA165030.

[1841] SEQ ID NO: 1802 represents the cDNA sequence for clone AA165031.

[1842] SEQ ID NO: 1803 represents the cDNA sequence for clone AA165039.

[1843] SEQ ID NO: 1804 represents the cDNA sequence for clone AA165041.

[1844] SEQ ID NO: 1805 represents the cDNA sequence for clone AA165073.

[1845] SEQ ID NO: 1806 represents the cDNA sequence for clone AA165079.

[1846] SEQ ID NO: 1807 represents the cDNA sequence for clone AA165085.

[1847] SEQ ID NO: 1808 represents the cDNA sequence for clone AA165090.

[1848] SEQ ID NO: 1809 represents the cDNA sequence for clone AA165093.

[1849] SEQ ID NO: 1810 represents the cDNA sequence for clone AA165094.

[1850] SEQ ID NO: 1811 represents the cDNA sequence for clone AA165103.

[1851] SEQ ID NO: 1812 represents the cDNA sequence for clone AA165106.

[1852] SEQ ID NO: 1813 represents the cDNA sequence for clone AA164973.

[1853] SEQ ID NO: 1814 represents the cDNA sequence for clone AA164978.

[1854] SEQ ID NO: 1815 represents the cDNA sequence for clone AA164979.

[1855] SEQ ID NO: 1816 represents the cDNA sequence for clone AA164981.

[1856] SEQ ID NO: 1817 represents the cDNA sequence for clone AA165109.

[1857] SEQ ID NO: 1818 represents the cDNA sequence for clone AA165116.

[1858] SEQ ID NO: 1819 represents the cDNA sequence for clone AA165136.

[1859] SEQ ID NO: 1820 represents the cDNA sequence for clone AA165140.

[1860] SEQ ID NO: 1821 represents the cDNA sequence for clone AA165117.

[1861] SEQ ID NO: 1822 represents the cDNA sequence for clone AA165160.

[1862] SEQ ID NO: 1823 represents the cDNA sequence for clone AA165161.

[1863] SEQ ID NO: 1824 represents the cDNA sequence for clone AA165164.

[1864] SEQ ID NO: 1825 represents the cDNA sequence for clone AA165165.

[1865] SEQ ID NO: 1826 represents the cDNA sequence for clone AA165166.

[1866] SEQ ID NO: 1827 represents the cDNA sequence for clone AA165178.

[1867] SEQ ID NO: 1828 represents the cDNA sequence for clone AA165179.

[1868] SEQ ID NO: 1829 represents the cDNA sequence for clone AA165146.

[1869] SEQ ID NO: 1830 represents the cDNA sequence for clone AA165150.

[1870] SEQ ID NO: 1831 represents the cDNA sequence for clone AA165207.

[1871] SEQ ID NO: 1832 represents the cDNA sequence for clone AA165208.

[1872] SEQ ID NO: 1833 represents the cDNA sequence for clone AA165211.

[1873] SEQ ID NO: 1834 represents the cDNA sequence for clone AA165212.

[1874] SEQ ID NO: 1835 represents the cDNA sequence for clone AA165232.

[1875] SEQ ID NO: 1836 represents the cDNA sequence for clone AA165233.

[1876] SEQ ID NO: 1837 represents the cDNA sequence for clone AA165243.

[1877] SEQ ID NO: 1838 represents the cDNA sequence for clone AA165244.

[1878] SEQ ID NO: 1839 represents the cDNA sequence for clone AA165050.

[1879] SEQ ID NO: 1840 represents the cDNA sequence for clone AA165202.

[1880] SEQ ID NO: 1841 represents the cDNA sequence for clone AA165203.

[1881] SEQ ID NO: 1842 represents the cDNA sequence for clone AA165204.

[1882] SEQ ID NO: 1843 represents the cDNA sequence for clone AA165258.

[1883] SEQ ID NO: 1844 represents the cDNA sequence for clone AA165261.

[1884] SEQ ID NO: 1845 represents the cDNA sequence for clone AA165286.

[1885] SEQ ID NO: 1846 represents the cDNA sequence for clone AA165288.

[1886] SEQ ID NO: 1847 represents the cDNA sequence for clone AA165297.

[1887] SEQ ID NO: 1848 represents the cDNA sequence for clone AA165301.

[1888] SEQ ID NO: 1849 represents the cDNA sequence for clone AA165302.

[1889] SEQ ID NO: 1850 represents the cDNA sequence for clone AA165312.

[1890] SEQ ID NO: 1851 represents the cDNA sequence for clone AA165324.

[1891] SEQ ID NO: 1852 represents the cDNA sequence for clone AA165126.

[1892] SEQ ID NO: 1853 represents the cDNA sequence for clone AA165127.

[1893] SEQ ID NO: 1854 represents the cDNA sequence for clone AA165128.

[1894] SEQ ID NO: 1855 represents the cDNA sequence for clone AA165130.

[1895] SEQ ID NO: 1856 represents the cDNA sequence for clone AA165280.

[1896] SEQ ID NO: 1857 represents the cDNA sequence for clone AA164424.

[1897] SEQ ID NO: 1858 represents the cDNA sequence for clone AA164427.

[1898] SEQ ID NO: 1859 represents the cDNA sequence for clone AA164429.

[1899] SEQ ID NO: 1860 represents the cDNA sequence for clone AA164435.

[1900] SEQ ID NO: 1861 represents the cDNA sequence for clone AA164436.

[1901] SEQ ID NO: 1862 represents the cDNA sequence for clone AA164439.

[1902] SEQ ID NO: 1863 represents the cDNA sequence for clone AA164440.

[1903] SEQ ID NO: 1864 represents the cDNA sequence for clone AA164452.

[1904] SEQ ID NO: 1865 represents the cDNA sequence for clone AA164454.

[1905] SEQ ID NO: 1866 represents the cDNA sequence for clone AA164455.

[1906] SEQ ID NO: 1867 represents the cDNA sequence for clone AA164457.

[1907] SEQ ID NO: 1868 represents the cDNA sequence for clone AA164462.

[1908] SEQ ID NO: 1869 represents the cDNA sequence for clone AA164463.

[1909] SEQ ID NO: 1870 represents the cDNA sequence for clone AA165193.

[1910] SEQ ID NO: 1871 represents the cDNA sequence for clone AA164413.

[1911] SEQ ID NO: 1872 represents the cDNA sequence for clone AA164468.

[1912] SEQ ID NO: 1873 represents the cDNA sequence for clone AA164472.

[1913] SEQ ID NO: 1874 represents the cDNA sequence for clone AA164473.

[1914] SEQ ID NO: 1875 represents the cDNA sequence for clone AA164499.

[1915] SEQ ID NO: 1876 represents the cDNA sequence for clone AA164511.

[1916] SEQ ID NO: 1877 represents the cDNA sequence for clone AA164512.

[1917] SEQ ID NO: 1878 represents the cDNA sequence for clone AA164514.

[1918] SEQ ID NO: 1879 represents the cDNA sequence for clone AA164516.

[1919] SEQ ID NO: 1880 represents the cDNA sequence for clone AA164523.

[1920] SEQ ID NO: 1881 represents the cDNA sequence for clone AA164524.

[1921] SEQ ID NO: 1882 represents the cDNA sequence for clone AA164529.

[1922] SEQ ID NO: 1883 represents the cDNA sequence for clone AA164475.

[1923] SEQ ID NO: 1884 represents the cDNA sequence for clone AA164476.

[1924] SEQ ID NO: 1885 represents the cDNA sequence for clone AA165267.

[1925] SEQ ID NO: 1886 represents the cDNA sequence for clone AA165268.

[1926] SEQ ID NO: 1887 represents the cDNA sequence for clone AA165269.

[1927] SEQ ID NO: 1888 represents the cDNA sequence for clone AA165271.

[1928] SEQ ID NO: 1889 represents the cDNA sequence for clone AA164412.

[1929] SEQ ID NO: 1890 represents the cDNA sequence for clone AA164546.

[1930] SEQ ID NO: 1891 represents the cDNA sequence for clone AA164547.

[1931] SEQ ID NO: 1892 represents the cDNA sequence for clone AA164551.

[1932] SEQ ID NO: 1893 represents the cDNA sequence for clone AA164553.

[1933] SEQ ID NO: 1894 represents the cDNA sequence for clone AA164566.

[1934] SEQ ID NO: 1895 represents the cDNA sequence for clone AA164567.

[1935] SEQ ID NO: 1896 represents the cDNA sequence for clone AA164568.

[1936] SEQ ID NO: 1897 represents the cDNA sequence for clone AA164569.

[1937] SEQ ID NO: 1898 represents the cDNA sequence for clone AA164570.

[1938] SEQ ID NO: 1899 represents the cDNA sequence for clone AA164574.

[1939] SEQ ID NO: 1900 represents the cDNA sequence for clone AA164575.

[1940] SEQ ID NO: 1901 represents the cDNA sequence for clone AA164594.

[1941] SEQ ID NO: 1902 represents the cDNA sequence for clone AA164597.

[1942] SEQ ID NO: 1903 represents the cDNA sequence for clone AA164603.

[1943] SEQ ID NO: 1904 represents the cDNA sequence for clone AA164604.

[1944] SEQ ID NO: 1905 represents the cDNA sequence for clone AA164607.

[1945] SEQ ID NO: 1906 represents the cDNA sequence for clone AA164639.

[1946] SEQ ID NO: 1907 represents the cDNA sequence for clone AA164643.

[1947] SEQ ID NO: 1908 represents the cDNA sequence for clone AA164644.

[1948] SEQ ID NO: 1909 represents the cDNA sequence for clone AA164645.

[1949] SEQ ID NO: 1910 represents the cDNA sequence for clone AA164654.

[1950] SEQ ID NO: 1911 represents the cDNA sequence for clone AA164655.

[1951] SEQ ID NO: 1912 represents the cDNA sequence for clone AA164660.

[1952] SEQ ID NO: 1913 represents the cDNA sequence for clone AA164661.

[1953] SEQ ID NO: 1914 represents the cDNA sequence for clone AA164664.

[1954] SEQ ID NO: 1915 represents the cDNA sequence for clone AA164665.

[1955] SEQ ID NO: 1916 represents the cDNA sequence for clone AA164666.

[1956] SEQ ID NO: 1917 represents the cDNA sequence for clone AA164676.

[1957] SEQ ID NO: 1918 represents the cDNA sequence for clone AA164537.

[1958] SEQ ID NO: 1919 represents the cDNA sequence for clone AA164543.

[1959] SEQ ID NO: 1920 represents the cDNA sequence for clone AA164632.

[1960] SEQ ID NO: 1921 represents the cDNA sequence for clone AA164687.

[1961] SEQ ID NO: 1922 represents the cDNA sequence for clone AA164716.

[1962] SEQ ID NO: 1923 represents the cDNA sequence for clone AA164720.

[1963] SEQ ID NO: 1924 represents the cDNA sequence for clone AA164691.

[1964] SEQ ID NO: 1925 represents the cDNA sequence for clone AA164697.

[1965] SEQ ID NO: 1926 represents the cDNA sequence for clone AA164563.

[1966] SEQ ID NO: 1927 represents the cDNA sequence for clone AA164744.

[1967] SEQ ID NO: 1928 represents the cDNA sequence for clone AA164745.

[1968] SEQ ID NO: 1929 represents the cDNA sequence for clone AA164751.

[1969] SEQ ID NO: 1930 represents the cDNA sequence for clone AA164756.

[1970] SEQ ID NO: 1931 represents the cDNA sequence for clone AA164760.

[1971] SEQ ID NO: 1932 represents the cDNA sequence for clone AA164781.

[1972] SEQ ID NO: 1933 represents the cDNA sequence for clone AA164782.

[1973] SEQ ID NO: 1934 represents the cDNA sequence for clone AA164619.

[1974] SEQ ID NO: 1935 represents the cDNA sequence for clone AA164872.

[1975] SEQ ID NO: 1936 represents the cDNA sequence for clone AA164880.

[1976] SEQ ID NO: 1937 represents the cDNA sequence for clone AA164881.

[1977] SEQ ID NO: 1938 represents the cDNA sequence for clone AA164891.

[1978] SEQ ID NO: 1939 represents the cDNA sequence for clone AA164895.

[1979] SEQ ID NO: 1940 represents the cDNA sequence for clone AA164896.

[1980] SEQ ID NO: 1941 represents the cDNA sequence for clone AA164835.

[1981] SEQ ID NO: 1942 represents the cDNA sequence for clone AA164836.

[1982] SEQ ID NO: 1943 represents the cDNA sequence for clone AA164841.

[1983] SEQ ID NO: 1944 represents the cDNA sequence for clone AA164761.

[1984] SEQ ID NO: 1945 represents the cDNA sequence for clone AA164765.

[1985] SEQ ID NO: 1946 represents the cDNA sequence for clone AA164706.

[1986] SEQ ID NO: 1947 represents the cDNA sequence for clone AA164846.

[1987] SEQ ID NO: 1948 represents the cDNA sequence for clone AA164847.

[1988] SEQ ID NO: 1949 represents the cDNA sequence for clone AA164850.

[1989] SEQ ID NO: 1950 represents the cDNA sequence for clone AA164851.

[1990] SEQ ID NO: 1951 represents the cDNA sequence for clone AA164183.

[1991] SEQ ID NO: 1952 represents the cDNA sequence for clone AA164184.

[1992] SEQ ID NO: 1953 represents the cDNA sequence for clone AA164185.

[1993] SEQ ID NO: 1954 represents the cDNA sequence for clone AA164188.

[1994] SEQ ID NO: 1955 represents the cDNA sequence for clone AA164189.

[1995] SEQ ID NO: 1956 represents the cDNA sequence for clone AA164215.

[1996] SEQ ID NO: 1957 represents the cDNA sequence for clone AA164216.

[1997] SEQ ID NO: 1958 represents the cDNA sequence for clone AA164219.

[1998] SEQ ID NO: 1959 represents the cDNA sequence for clone AA164223.

[1999] SEQ ID NO: 1960 represents the cDNA sequence for clone AA164228.

[2000] SEQ ID NO: 1961 represents the cDNA sequence for clone AA164229.

[2001] SEQ ID NO: 1962 represents the cDNA sequence for clone AA164230.

[2002] SEQ ID NO: 1963 represents the cDNA sequence for clone AA164231.

[2003] SEQ ID NO: 1964 represents the cDNA sequence for clone AA164284.

[2004] SEQ ID NO: 1965 represents the cDNA sequence for clone AA164288.

[2005] SEQ ID NO: 1966 represents the cDNA sequence for clone AA164292.

[2006] SEQ ID NO: 1967 represents the cDNA sequence for clone AA164293.

[2007] SEQ ID NO: 1968 represents the cDNA sequence for clone AA164295.

[2008] SEQ ID NO: 1969 represents the cDNA sequence for clone AA164299.

[2009] SEQ ID NO: 1970 represents the cDNA sequence for clone AA164300.

[2010] SEQ ID NO: 1971 represents the cDNA sequence for clone AA164301.

[2011] SEQ ID NO: 1972 represents the cDNA sequence for clone AA164304.

[2012] SEQ ID NO: 1973 represents the cDNA sequence for clone AA164317.

[2013] SEQ ID NO: 1974 represents the cDNA sequence for clone AA164323.

[2014] SEQ ID NO: 1975 represents the cDNA sequence for clone AA164921.

[2015] SEQ ID NO: 1976 represents the cDNA sequence for clone AA164922.

[2016] SEQ ID NO: 1977 represents the cDNA sequence for clone AA164923.

[2017] SEQ ID NO: 1978 represents the cDNA sequence for clone AA164270.

[2018] SEQ ID NO: 1979 represents the cDNA sequence for clone AA164371.

[2019] SEQ ID NO: 1980 represents the cDNA sequence for clone AA164376.

[2020] SEQ ID NO: 1981 represents the cDNA sequence for clone AA164377.

[2021] SEQ ID NO: 1982 represents the cDNA sequence for clone AA164382.

[2022] SEQ ID NO: 1983 represents the cDNA sequence for clone AA164383.

[2023] SEQ ID NO: 1984 represents the cDNA sequence for clone AA164386.

[2024] SEQ ID NO: 1985 represents the cDNA sequence for clone AA164387.

[2025] SEQ ID NO: 1986 represents the cDNA sequence for clone AA164393.

[2026] SEQ ID NO: 1987 represents the cDNA sequence for clone AA164190.

[2027] SEQ ID NO: 1988 represents the cDNA sequence for clone AA164197.

[2028] SEQ ID NO: 1989 represents the cDNA sequence for clone AA164198.

[2029] SEQ ID NO: 1990 represents the cDNA sequence for clone AA164341.

[2030] SEQ ID NO: 1991 represents the cDNA sequence for clone AA164342.

[2031] SEQ ID NO: 1992 represents the cDNA sequence for clone AA164347.

[2032] SEQ ID NO: 1993 represents the cDNA sequence for clone AA165328.

[2033] SEQ ID NO: 1994 represents the cDNA sequence for clone AA165330.

[2034] SEQ ID NO: 1995 represents the cDNA sequence for clone AA165331.

[2035] SEQ ID NO: 1996 represents the cDNA sequence for clone AA165332.

[2036] SEQ ID NO: 1997 represents the cDNA sequence for clone AA164269.

[2037] SEQ ID NO: 1998 represents the cDNA sequence for clone AA165346.

[2038] SEQ ID NO: 1999 represents the cDNA sequence for clone AA165399.

[2039] SEQ ID NO: 2000 represents the cDNA sequence for clone AA165400.

[2040] SEQ ID NO: 2001 represents the cDNA sequence for clone AA165427.

[2041] SEQ ID NO: 2002 represents the cDNA sequence for clone AA165428.

[2042] SEQ ID NO: 2003 represents the cDNA sequence for clone AA165430.

[2043] SEQ ID NO: 2004 represents the cDNA sequence for clone AA165409.

[2044] SEQ ID NO: 2005 represents the cDNA sequence for clone AA165410.

[2045] SEQ ID NO: 2006 represents the cDNA sequence for clone AA165512.

[2046] SEQ ID NO: 2007 represents the cDNA sequence for clone AA165518.

[2047] SEQ ID NO: 2008 represents the cDNA sequence for clone AA165524.

[2048] SEQ ID NO: 2009 represents the cDNA sequence for clone AA165528.

[2049] SEQ ID NO: 2010 represents the cDNA sequence for clone AA165418.

[2050] SEQ ID NO: 2011 represents the cDNA sequence for clone AA165554.

[2051] SEQ ID NO: 2012 represents the cDNA sequence for clone AA165563.

[2052] SEQ ID NO: 2013 represents the cDNA sequence for clone AA165566.

[2053] SEQ ID NO: 2014 represents the cDNA sequence for clone AA165568.

[2054] SEQ ID NO: 2015 represents the cDNA sequence for clone AA165575.

[2055] SEQ ID NO: 2016 represents the cDNA sequence for clone AA165579.

[2056] SEQ ID NO: 2017 represents the cDNA sequence for clone AA165546.

[2057] SEQ ID NO: 2018 represents the cDNA sequence for clone AA165597.

[2058] SEQ ID NO: 2019 represents the cDNA sequence for clone AA165617.

[2059] SEQ ID NO: 2020 represents the cDNA sequence for clone AA165621.

[2060] SEQ ID NO: 2021 represents the cDNA sequence for clone AA165634.

[2061] SEQ ID NO: 2022 represents the cDNA sequence for clone AA165648.

[2062] SEQ ID NO: 2023 represents the cDNA sequence for clone AA165655.

[2063] SEQ ID NO: 2024 represents the cDNA sequence for clone AA165478.

[2064] SEQ ID NO: 2025 represents the cDNA sequence for clone AA165607.

[2065] SEQ ID NO: 2026 represents the cDNA sequence for clone AA165610.

[2066] SEQ ID NO: 2027 represents the cDNA sequence for clone AA165672.

[2067] SEQ ID NO: 2028 represents the cDNA sequence for clone AA165676.

[2068] SEQ ID NO: 2029 represents the cDNA sequence for clone AA165677.

[2069] SEQ ID NO: 2030 represents the cDNA sequence for clone AA159673.

[2070] SEQ ID NO: 2031 represents the cDNA sequence for clone AA159675.

[2071] SEQ ID NO: 2032 represents the cDNA sequence for clone AA159696.

[2072] SEQ ID NO: 2033 represents the cDNA sequence for clone AA159701.

[2073] SEQ ID NO: 2034 represents the cDNA sequence for clone AA159702.

[2074] SEQ ID NO: 2035 represents the cDNA sequence for clone AA159688.

[2075] SEQ ID NO: 2036 represents the cDNA sequence for clone AA159689.

[2076] SEQ ID NO: 2037 represents the cDNA sequence for clone AA159740.

[2077] SEQ ID NO: 2038 represents the cDNA sequence for clone AA159743.

[2078] SEQ ID NO: 2039 represents the cDNA sequence for clone AA159744.

[2079] SEQ ID NO: 2040 represents the cDNA sequence for clone AA159746.

[2080] SEQ ID NO: 2041 represents the cDNA sequence for clone AA159769.

[2081] SEQ ID NO: 2042 represents the cDNA sequence for clone AA159772.

[2082] SEQ ID NO: 2043 represents the cDNA sequence for clone AA159775.

[2083] SEQ ID NO: 2044 represents the cDNA sequence for clone AA159600.

[2084] SEQ ID NO: 2045 represents the cDNA sequence for clone AA159605.

[2085] SEQ ID NO: 2046 represents the cDNA sequence for clone AA159613.

[2086] SEQ ID NO: 2047 represents the cDNA sequence for clone AA159614.

[2087] SEQ ID NO: 2048 represents the cDNA sequence for clone AA159665.

[2088] SEQ ID NO: 2049 represents the cDNA sequence for clone AA159667.

[2089] SEQ ID NO: 2050 represents the cDNA sequence for clone AA166695.

[2090] SEQ ID NO: 2051 represents the cDNA sequence for clone AA166715.

[2091] SEQ ID NO: 2052 represents the cDNA sequence for clone AA166721.

[2092] SEQ ID NO: 2053 represents the cDNA sequence for clone AA166727.

[2093] SEQ ID NO: 2054 represents the cDNA sequence for clone AA166729.

[2094] SEQ ID NO: 2055 represents the cDNA sequence for clone AA166734.

[2095] SEQ ID NO: 2056 represents the cDNA sequence for clone AA166739.

[2096] SEQ ID NO: 2057 represents the cDNA sequence for clone AA166697.

[2097] SEQ ID NO: 2058 represents the cDNA sequence for clone AA166699.

[2098] SEQ ID NO: 2059 represents the cDNA sequence for clone AA166700.

[2099] SEQ ID NO: 2060 represents the cDNA sequence for clone AA166701.

[2100] SEQ ID NO: 2061 represents the cDNA sequence for clone AA166753.

[2101] SEQ ID NO: 2062 represents the cDNA sequence for clone AA166756.

[2102] SEQ ID NO: 2063 represents the cDNA sequence for clone AA166620.

[2103] SEQ ID NO: 2064 represents the cDNA sequence for clone AA166743.

[2104] SEQ ID NO: 2065 represents the cDNA sequence for clone AA166746.

[2105] SEQ ID NO: 2066 represents the cDNA sequence for clone AA166757.

[2106] SEQ ID NO: 2067 represents the cDNA sequence for clone AA166763.

[2107] SEQ ID NO: 2068 represents the cDNA sequence for clone AA166765.

[2108] SEQ ID NO: 2069 represents the cDNA sequence for clone AA166785.

[2109] SEQ ID NO: 2070 represents the cDNA sequence for clone AA166786.

[2110] SEQ ID NO: 2071 represents the cDNA sequence for clone AA166791.

[2111] SEQ ID NO: 2072 represents the cDNA sequence for clone AA166797.

[2112] SEQ ID NO: 2073 represents the cDNA sequence for clone AA166798.

[2113] SEQ ID NO: 2074 represents the cDNA sequence for clone AA166799.

[2114] SEQ ID NO: 2075 represents the cDNA sequence for clone AA166800.

[2115] SEQ ID NO: 2076 represents the cDNA sequence for clone AA166803.

[2116] SEQ ID NO: 2077 represents the cDNA sequence for clone AA166805.

[2117] SEQ ID NO: 2078 represents the cDNA sequence for clone AA166808.

[2118] SEQ ID NO: 2079 represents the cDNA sequence for clone AA166817.

[2119] SEQ ID NO: 2080 represents the cDNA sequence for clone AA166819.

[2120] SEQ ID NO: 2081 represents the cDNA sequence for clone AA166821.

[2121] SEQ ID NO: 2082 represents the cDNA sequence for clone AA166639.

[2122] SEQ ID NO: 2083 represents the cDNA sequence for clone AA166898.

[2123] SEQ ID NO: 2084 represents the cDNA sequence for clone AA166934.

[2124] SEQ ID NO: 2085 represents the cDNA sequence for clone AA166937.

[2125] SEQ ID NO: 2086 represents the cDNA sequence for clone AA166938.

[2126] SEQ ID NO: 2087 represents the cDNA sequence for clone AA166944.

[2127] SEQ ID NO: 2088 represents the cDNA sequence for clone AA166946.

[2128] SEQ ID NO: 2089 represents the cDNA sequence for clone AA166948.

[2129] SEQ ID NO: 2090 represents the cDNA sequence for clone AA166951.

[2130] SEQ ID NO: 2091 represents the cDNA sequence for clone AA166952.

[2131] SEQ ID NO: 2092 represents the cDNA sequence for clone AA166963.

[2132] SEQ ID NO: 2093 represents the cDNA sequence for clone AA166965.

[2133] SEQ ID NO: 2094 represents the cDNA sequence for clone AA166966.

[2134] SEQ ID NO: 2095 represents the cDNA sequence for clone AA166709.

[2135] SEQ ID NO: 2096 represents the cDNA sequence for clone AA166710.

[2136] SEQ ID NO: 2097 represents the cDNA sequence for clone AA166919.

[2137] SEQ ID NO: 2098 represents the cDNA sequence for clone AA166970.

[2138] SEQ ID NO: 2099 represents the cDNA sequence for clone AA166971.

[2139] SEQ ID NO: 2100 represents the cDNA sequence for clone AA166972.

[2140] SEQ ID NO: 2101 represents the cDNA sequence for clone AA166974.

[2141] SEQ ID NO: 2102 represents the cDNA sequence for clone AA167006.

[2142] SEQ ID NO: 2103 represents the cDNA sequence for clone AA167008.

[2143] SEQ ID NO: 2104 represents the cDNA sequence for clone AA167020.

[2144] SEQ ID NO: 2105 represents the cDNA sequence for clone AA167023.

[2145] SEQ ID NO: 2106 represents the cDNA sequence for clone AA167029.

[2146] SEQ ID NO: 2107 represents the cDNA sequence for clone AA166911.

[2147] SEQ ID NO: 2108 represents the cDNA sequence for clone AA167041.

[2148] SEQ ID NO: 2109 represents the cDNA sequence for clone AA167044.

[2149] SEQ ID NO: 2110 represents the cDNA sequence for clone AA167067.

[2150] SEQ ID NO: 2111 represents the cDNA sequence for clone AA167068.

[2151] SEQ ID NO: 2112 represents the cDNA sequence for clone AA167078.

[2152] SEQ ID NO: 2113 represents the cDNA sequence for clone AA167080.

[2153] SEQ ID NO: 2114 represents the cDNA sequence for clone AA167082.

[2154] SEQ ID NO: 2115 represents the cDNA sequence for clone AA167084.

[2155] SEQ ID NO: 2116 represents the cDNA sequence for clone AA167088.

[2156] SEQ ID NO: 2117 represents the cDNA sequence for clone AA167098.

[2157] SEQ ID NO: 2118 represents the cDNA sequence for clone AA167099.

[2158] SEQ ID NO: 2119 represents the cDNA sequence for clone AA167102.

[2159] SEQ ID NO: 2120 represents the cDNA sequence for clone AA167103.

[2160] SEQ ID NO: 2121 represents the cDNA sequence for clone AA167104.

[2161] SEQ ID NO: 2122 represents the cDNA sequence for clone AA166980.

[2162] SEQ ID NO: 2123 represents the cDNA sequence for clone AA166982.

[2163] SEQ ID NO: 2124 represents the cDNA sequence for clone AA166986.

[2164] SEQ ID NO: 2125 represents the cDNA sequence for clone AA167062.

[2165] SEQ ID NO: 2126 represents the cDNA sequence for clone AA167065.

[2166] SEQ ID NO: 2127 represents the cDNA sequence for clone AA167114.

[2167] SEQ ID NO: 2128 represents the cDNA sequence for clone AA167144.

[2168] SEQ ID NO: 2129 represents the cDNA sequence for clone AA167145.

[2169] SEQ ID NO: 2130 represents the cDNA sequence for clone AA167149.

[2170] SEQ ID NO: 2131 represents the cDNA sequence for clone AA167150.

[2171] SEQ ID NO: 2132 represents the cDNA sequence for clone AA167155.

[2172] SEQ ID NO: 2133 represents the cDNA sequence for clone AA167156.

[2173] SEQ ID NO: 2134 represents the cDNA sequence for clone AA167157.

[2174] SEQ ID NO: 2135 represents the cDNA sequence for clone AA167162.

[2175] SEQ ID NO: 2136 represents the cDNA sequence for clone AA167163.

[2176] SEQ ID NO: 2137 represents the cDNA sequence for clone AA167316.

[2177] SEQ ID NO: 2138 represents the cDNA sequence for clone AA167320.

[2178] SEQ ID NO: 2139 represents the cDNA sequence for clone AA167191.

[2179] SEQ ID NO: 2140 represents the cDNA sequence for clone AA167195.

[2180] SEQ ID NO: 2141 represents the cDNA sequence for clone AA167269.

[2181] SEQ ID NO: 2142 represents the cDNA sequence for clone AA167270.

[2182] SEQ ID NO: 2143 represents the cDNA sequence for clone AA167323.

[2183] SEQ ID NO: 2144 represents the cDNA sequence for clone AA167324.

[2184] SEQ ID NO: 2145 represents the cDNA sequence for clone AA167329.

[2185] SEQ ID NO: 2146 represents the cDNA sequence for clone AA167333.

[2186] SEQ ID NO: 2147 represents the cDNA sequence for clone AA167338.

[2187] SEQ ID NO: 2148 represents the cDNA sequence for clone AA167370.

[2188] SEQ ID NO: 2149 represents the cDNA sequence for clone AA167374.

[2189] SEQ ID NO: 2150 represents the cDNA sequence for clone AA167377.

[2190] SEQ ID NO: 2151 represents the cDNA sequence for clone AA167378.

[2191] SEQ ID NO: 2152 represents the cDNA sequence for clone AA167381.

[2192] SEQ ID NO: 2153 represents the cDNA sequence for clone AA167382.

[2193] SEQ ID NO: 2154 represents the cDNA sequence for clone AA167199.

[2194] SEQ ID NO: 2155 represents the cDNA sequence for clone AA167204.

[2195] SEQ ID NO: 2156 represents the cDNA sequence for clone AA167205.

[2196] SEQ ID NO: 2157 represents the cDNA sequence for clone AA167394.

[2197] SEQ ID NO: 2158 represents the cDNA sequence for clone AA167406.

[2198] SEQ ID NO: 2159 represents the cDNA sequence for clone AA167431.

[2199] SEQ ID NO: 2160 represents the cDNA sequence for clone AA167432.

[2200] SEQ ID NO: 2161 represents the cDNA sequence for clone AA167437.

[2201] SEQ ID NO: 2162 represents the cDNA sequence for clone AA169469.

[2202] SEQ ID NO: 2163 represents the cDNA sequence for clone AA169470.

[2203] SEQ ID NO: 2164 represents the cDNA sequence for clone AA169474.

[2204] SEQ ID NO: 2165 represents the cDNA sequence for clone AA169475.

[2205] SEQ ID NO: 2166 represents the cDNA sequence for clone AA169329.

[2206] SEQ ID NO: 2167 represents the cDNA sequence for clone AA169336.

[2207] SEQ ID NO: 2168 represents the cDNA sequence for clone AA169498.

[2208] SEQ ID NO: 2169 represents the cDNA sequence for clone AA169503.

[2209] SEQ ID NO: 2170 represents the cDNA sequence for clone AA169504.

[2210] SEQ ID NO: 2171 represents the cDNA sequence for clone AA169513.

[2211] SEQ ID NO: 2172 represents the cDNA sequence for clone AA169516.

[2212] SEQ ID NO: 2173 represents the cDNA sequence for clone AA169543.

[2213] SEQ ID NO: 2174 represents the cDNA sequence for clone AA169531.

[2214] SEQ ID NO: 2175 represents the cDNA sequence for clone AA169560.

[2215] SEQ ID NO: 2176 represents the cDNA sequence for clone AA169573.

[2216] SEQ ID NO: 2177 represents the cDNA sequence for clone AA169578.

[2217] SEQ ID NO: 2178 represents the cDNA sequence for clone AA169583.

[2218] SEQ ID NO: 2179 represents the cDNA sequence for clone AA169535.

[2219] SEQ ID NO: 2180 represents the cDNA sequence for clone AA169594.

[2220] SEQ ID NO: 2181 represents the cDNA sequence for clone AA169599.

[2221] SEQ ID NO: 2182 represents the cDNA sequence for clone AA169602.

[2222] SEQ ID NO: 2183 represents the cDNA sequence for clone AA169606.

[2223] SEQ ID NO: 2184 represents the cDNA sequence for clone AA169609.

[2224] SEQ ID NO: 2185 represents the cDNA sequence for clone AA169612.

[2225] SEQ ID NO: 2186 represents the cDNA sequence for clone AA169623.

[2226] SEQ ID NO: 2187 represents the cDNA sequence for clone AA169625.

[2227] SEQ ID NO: 2188 represents the cDNA sequence for clone AA169650.

[2228] SEQ ID NO: 2189 represents the cDNA sequence for clone AA169651.

[2229] SEQ ID NO: 2190 represents the cDNA sequence for clone AA169654.

[2230] SEQ ID NO: 2191 represents the cDNA sequence for clone AA169656.

[2231] SEQ ID NO: 2192 represents the cDNA sequence for clone AA169660.

[2232] SEQ ID NO: 2193 represents the cDNA sequence for clone AA169662.

[2233] SEQ ID NO: 2194 represents the cDNA sequence for clone AA169663.

[2234] SEQ ID NO: 2195 represents the cDNA sequence for clone AA169668.

[2235] SEQ ID NO: 2196 represents the cDNA sequence for clone AA169670.

[2236] SEQ ID NO: 2197 represents the cDNA sequence for clone AA169676.

[2237] SEQ ID NO: 2198 represents the cDNA sequence for clone AA169678.

[2238] SEQ ID NO: 2199 represents the cDNA sequence for clone AA169679.

[2239] SEQ ID NO: 2200 represents the cDNA sequence for clone AA169680.

[2240] SEQ ID NO: 2201 represents the cDNA sequence for clone AA169682.

[2241] SEQ ID NO: 2202 represents the cDNA sequence for clone AA169706.

[2242] SEQ ID NO: 2203 represents the cDNA sequence for clone AA169707.

[2243] SEQ ID NO: 2204 represents the cDNA sequence for clone AA169830.

[2244] SEQ ID NO: 2205 represents the cDNA sequence for clone AA169831.

[2245] SEQ ID NO: 2206 represents the cDNA sequence for clone AA169834.

[2246] SEQ ID NO: 2207 represents the cDNA sequence for clone AA169204.

[2247] SEQ ID NO: 2208 represents the cDNA sequence for clone AA169488.

[2248] SEQ ID NO: 2209 represents the cDNA sequence for clone AA169493.

[2249] SEQ ID NO: 2210 represents the cDNA sequence for clone AA169588.

[2250] SEQ ID NO: 2211 represents the cDNA sequence for clone AA169640.

[2251] SEQ ID NO: 2212 represents the cDNA sequence for clone AA169641.

[2252] SEQ ID NO: 2213 represents the cDNA sequence for clone AA169642.

[2253] SEQ ID NO: 2214 represents the cDNA sequence for clone AA169644.

[2254] SEQ ID NO: 2215 represents the cDNA sequence for clone AA169645.

[2255] SEQ ID NO: 2216 represents the cDNA sequence for clone AA169807.

[2256] SEQ ID NO: 2217 represents the cDNA sequence for clone AA169808.

[2257] SEQ ID NO: 2218 represents the cDNA sequence for clone AA169810.

[2258] SEQ ID NO: 2219 represents the cDNA sequence for clone AA169811.

[2259] SEQ ID NO: 2220 represents the cDNA sequence for clone AA169120.

[2260] SEQ ID NO: 2221 represents the cDNA sequence for clone AA169121.

[2261] SEQ ID NO: 2222 represents the cDNA sequence for clone AA169122.

[2262] SEQ ID NO: 2223 represents the cDNA sequence for clone AA169124.

[2263] SEQ ID NO: 2224 represents the cDNA sequence for clone AA169300.

[2264] SEQ ID NO: 2225 represents the cDNA sequence for clone AA169307.

[2265] SEQ ID NO: 2226 represents the cDNA sequence for clone AA169630.

[2266] SEQ ID NO: 2227 represents the cDNA sequence for clone AA169633.

[2267] SEQ ID NO: 2228 represents the cDNA sequence for clone AA169635.

[2268] SEQ ID NO: 2229 represents the cDNA sequence for clone AA169377.

[2269] SEQ ID NO: 2230 represents the cDNA sequence for clone AA169379.

[2270] SEQ ID NO: 2231 represents the cDNA sequence for clone AA169394.

[2271] SEQ ID NO: 2232 represents the cDNA sequence for clone AA169396.

[2272] SEQ ID NO: 2233 represents the cDNA sequence for clone AA169398.

[2273] SEQ ID NO: 2234 represents the cDNA sequence for clone AA169400.

[2274] SEQ ID NO: 2235 represents the cDNA sequence for clone AA169405.

[2275] SEQ ID NO: 2236 represents the cDNA sequence for clone AA169411.

[2276] SEQ ID NO: 2237 represents the cDNA sequence for clone AA169412.

[2277] SEQ ID NO: 2238 represents the cDNA sequence for clone AA169733.

[2278] SEQ ID NO: 2239 represents the cDNA sequence for clone AA169361.

[2279] SEQ ID NO: 2240 represents the cDNA sequence for clone AA169366.

[2280] SEQ ID NO: 2241 represents the cDNA sequence for clone AA169415.

[2281] SEQ ID NO: 2242 represents the cDNA sequence for clone AA169419.

[2282] SEQ ID NO: 2243 represents the cDNA sequence for clone AA169424.

[2283] SEQ ID NO: 2244 represents the cDNA sequence for clone AA169430.

[2284] SEQ ID NO: 2245 represents the cDNA sequence for clone AA169435.

[2285] SEQ ID NO: 2246 represents the cDNA sequence for clone AA169437.

[2286] SEQ ID NO: 2247 represents the cDNA sequence for clone AA169444.

[2287] SEQ ID NO: 2248 represents the cDNA sequence for clone AA169352.

[2288] SEQ ID NO: 2249 represents the cDNA sequence for clone AA169355.

[2289] SEQ ID NO: 2250 represents the cDNA sequence for clone AA169838.

[2290] SEQ ID NO: 2251 represents the cDNA sequence for clone AA169840.

[2291] SEQ ID NO: 2252 represents the cDNA sequence for clone AA169882.

[2292] SEQ ID NO: 2253 represents the cDNA sequence for clone AA169883.

[2293] SEQ ID NO: 2254 represents the cDNA sequence for clone AA169886.

[2294] SEQ ID NO: 2255 represents the cDNA sequence for clone AA171635.

[2295] SEQ ID NO: 2256 represents the cDNA sequence for clone AA171636.

[2296] SEQ ID NO: 2257 represents the cDNA sequence for clone AA171637.

[2297] SEQ ID NO: 2258 represents the cDNA sequence for clone AA171639.

[2298] SEQ ID NO: 2259 represents the cDNA sequence for clone AA171640.

[2299] SEQ ID NO: 2260 represents the cDNA sequence for clone AA171645.

[2300] SEQ ID NO: 2261 represents the cDNA sequence for clone AA171646.

[2301] SEQ ID NO: 2262 represents the cDNA sequence for clone AA171647.

[2302] SEQ ID NO: 2263 represents the cDNA sequence for clone AA171648.

[2303] SEQ ID NO: 2264 represents the cDNA sequence for clone AA171654.

[2304] SEQ ID NO: 2265 represents the cDNA sequence for clone AA171657.

[2305] SEQ ID NO: 2266 represents the cDNA sequence for clone AA171669.

[2306] SEQ ID NO: 2267 represents the cDNA sequence for clone AA171675.

[2307] SEQ ID NO: 2268 represents the cDNA sequence for clone AA171677.

[2308] SEQ ID NO: 2269 represents the cDNA sequence for clone AA171426.

[2309] SEQ ID NO: 2270 represents the cDNA sequence for clone AA171688.

[2310] SEQ ID NO: 2271 represents the cDNA sequence for clone AA171692.

[2311] SEQ ID NO: 2272 represents the cDNA sequence for clone AA171702.

[2312] SEQ ID NO: 2273 represents the cDNA sequence for clone AA171750.

[2313] SEQ ID NO: 2274 represents the cDNA sequence for clone AA171609.

[2314] SEQ ID NO: 2275 represents the cDNA sequence for clone AA171755.

[2315] SEQ ID NO: 2276 represents the cDNA sequence for clone AA171760.

[2316] SEQ ID NO: 2277 represents the cDNA sequence for clone AA171793.

[2317] SEQ ID NO: 2278 represents the cDNA sequence for clone AA171797.

[2318] SEQ ID NO: 2279 represents the cDNA sequence for clone AA171803.

[2319] SEQ ID NO: 2280 represents the cDNA sequence for clone AA171806.

[2320] SEQ ID NO: 2281 represents the cDNA sequence for clone AA171807.

[2321] SEQ ID NO: 2282 represents the cDNA sequence for clone AA171814.

[2322] SEQ ID NO: 2283 represents the cDNA sequence for clone AA171818.

[2323] SEQ ID NO: 2284 represents the cDNA sequence for clone AA171626.

[2324] SEQ ID NO: 2285 represents the cDNA sequence for clone AA171631.

[2325] SEQ ID NO: 2286 represents the cDNA sequence for clone AA171951.

[2326] SEQ ID NO: 2287 represents the cDNA sequence for clone AA171960.

[2327] SEQ ID NO: 2288 represents the cDNA sequence for clone AA171762.

[2328] SEQ ID NO: 2289 represents the cDNA sequence for clone AA171766.

[2329] SEQ ID NO: 2290 represents the cDNA sequence for clone AA171768.

[2330] SEQ ID NO: 2291 represents the cDNA sequence for clone AA171913.

[2331] SEQ ID NO: 2292 represents the cDNA sequence for clone AA171968.

[2332] SEQ ID NO: 2293 represents the cDNA sequence for clone AA171974.

[2333] SEQ ID NO: 2294 represents the cDNA sequence for clone AA171994.

[2334] SEQ ID NO: 2295 represents the cDNA sequence for clone AA171996.

[2335] SEQ ID NO: 2296 represents the cDNA sequence for clone AA172000.

[2336] SEQ ID NO: 2297 represents the cDNA sequence for clone AA172001.

[2337] SEQ ID NO: 2298 represents the cDNA sequence for clone AA172008.

[2338] SEQ ID NO: 2299 represents the cDNA sequence for clone AA172020.

[2339] SEQ ID NO: 2300 represents the cDNA sequence for clone AA172039.

[2340] SEQ ID NO: 2301 represents the cDNA sequence for clone AA171844.

[2341] SEQ ID NO: 2302 represents the cDNA sequence for clone AA171984.

[2342] SEQ ID NO: 2303 represents the cDNA sequence for clone AA171985.

[2343] SEQ ID NO: 2304 represents the cDNA sequence for clone AA172046.

[2344] SEQ ID NO: 2305 represents the cDNA sequence for clone AA172047.

[2345] SEQ ID NO: 2306 represents the cDNA sequence for clone AA172051.

[2346] SEQ ID NO: 2307 represents the cDNA sequence for clone AA172052.

[2347] SEQ ID NO: 2308 represents the cDNA sequence for clone AA172053.

[2348] SEQ ID NO: 2309 represents the cDNA sequence for clone AA172056.

[2349] SEQ ID NO: 2310 represents the cDNA sequence for clone AA172097.

[2350] SEQ ID NO: 2311 represents the cDNA sequence for clone AA172099.

[2351] SEQ ID NO: 2312 represents the cDNA sequence for clone AA172199.

[2352] SEQ ID NO: 2313 represents the cDNA sequence for clone AA172224.

[2353] SEQ ID NO: 2314 represents the cDNA sequence for clone AA172225.

[2354] SEQ ID NO: 2315 represents the cDNA sequence for clone AA172227.

[2355] SEQ ID NO: 2316 represents the cDNA sequence for clone AA172236.

[2356] SEQ ID NO: 2317 represents the cDNA sequence for clone AA172238.

[2357] SEQ ID NO: 2318 represents the cDNA sequence for clone AA172243.

[2358] SEQ ID NO: 2319 represents the cDNA sequence for clone AA172247.

[2359] SEQ ID NO: 2320 represents the cDNA sequence for clone AA172248.

[2360] SEQ ID NO: 2321 represents the cDNA sequence for clone AA172064.

[2361] SEQ ID NO: 2322 represents the cDNA sequence for clone AA172219.

[2362] SEQ ID NO: 2323 represents the cDNA sequence for clone AA172291.

[2363] SEQ ID NO: 2324 represents the cDNA sequence for clone AA172293.

[2364] SEQ ID NO: 2325 represents the cDNA sequence for clone AA172297.

[2365] SEQ ID NO: 2326 represents the cDNA sequence for clone AA172298.

[2366] SEQ ID NO: 2327 represents the cDNA sequence for clone AA172300.

[2367] SEQ ID NO: 2328 represents the cDNA sequence for clone AA172301.

[2368] SEQ ID NO: 2329 represents the cDNA sequence for clone AA172303.

[2369] SEQ ID NO: 2330 represents the cDNA sequence for clone AA172306.

[2370] SEQ ID NO: 2331 represents the cDNA sequence for clone AA172370.

[2371] SEQ ID NO: 2332 represents the cDNA sequence for clone AA172376.

[2372] SEQ ID NO: 2333 represents the cDNA sequence for clone AA172385.

[2373] SEQ ID NO: 2334 represents the cDNA sequence for clone AA172387.

[2374] SEQ ID NO: 2335 represents the cDNA sequence for clone AA172213.

[2375] SEQ ID NO: 2336 represents the cDNA sequence for clone AA173381.

[2376] SEQ ID NO: 2337 represents the cDNA sequence for clone AA173403.

[2377] SEQ ID NO: 2338 represents the cDNA sequence for clone AA173409.

[2378] SEQ ID NO: 2339 represents the cDNA sequence for clone AA173417.

[2379] SEQ ID NO: 2340 represents the cDNA sequence for clone AA173420.

[2380] SEQ ID NO: 2341 represents the cDNA sequence for clone AA173428.

[2381] SEQ ID NO: 2342 represents the cDNA sequence for clone AA173431.

[2382] SEQ ID NO: 2343 represents the cDNA sequence for clone AA173433.

[2383] SEQ ID NO: 2344 represents the cDNA sequence for clone AA173436.

[2384] SEQ ID NO: 2345 represents the cDNA sequence for clone AA173440.

[2385] SEQ ID NO: 2346 represents the cDNA sequence for clone AA173444.

[2386] SEQ ID NO: 2347 represents the cDNA sequence for clone AA173447.

[2387] SEQ ID NO: 2348 represents the cDNA sequence for clone AA173463.

[2388] SEQ ID NO: 2349 represents the cDNA sequence for clone AA173464.

[2389] SEQ ID NO: 2350 represents the cDNA sequence for clone AA173465.

[2390] SEQ ID NO: 2351 represents the cDNA sequence for clone AA173466.

[2391] SEQ ID NO: 2352 represents the cDNA sequence for clone AA173507.

[2392] SEQ ID NO: 2353 represents the cDNA sequence for clone AA173509.

[2393] SEQ ID NO: 2354 represents the cDNA sequence for clone AA173510.

[2394] SEQ ID NO: 2355 represents the cDNA sequence for clone AA173511.

[2395] SEQ ID NO: 2356 represents the cDNA sequence for clone AA173512.

[2396] SEQ ID NO: 2357 represents the cDNA sequence for clone AA173515.

[2397] SEQ ID NO: 2358 represents the cDNA sequence for clone AA173518.

[2398] SEQ ID NO: 2359 represents the cDNA sequence for clone AA173325.

[2399] SEQ ID NO: 2360 represents the cDNA sequence for clone AA173327.

[2400] SEQ ID NO: 2361 represents the cDNA sequence for clone AA173493.

[2401] SEQ ID NO: 2362 represents the cDNA sequence for clone AA173494.

[2402] SEQ ID NO: 2363 represents the cDNA sequence for clone AA173495.

[2403] SEQ ID NO: 2364 represents the cDNA sequence for clone AA173499.

[2404] SEQ ID NO: 2365 represents the cDNA sequence for clone AA173500.

[2405] SEQ ID NO: 2366 represents the cDNA sequence for clone AA173501.

[2406] SEQ ID NO: 2367 represents the cDNA sequence for clone AA173520.

[2407] SEQ ID NO: 2368 represents the cDNA sequence for clone AA173521.

[2408] SEQ ID NO: 2369 represents the cDNA sequence for clone AA173523.

[2409] SEQ ID NO: 2370 represents the cDNA sequence for clone AA173525.

[2410] SEQ ID NO: 2371 represents the cDNA sequence for clone AA173564.

[2411] SEQ ID NO: 2372 represents the cDNA sequence for clone AA173577.

[2412] SEQ ID NO: 2373 represents the cDNA sequence for clone AA173583.

[2413] SEQ ID NO: 2374 represents the cDNA sequence for clone AA173588.

[2414] SEQ ID NO: 2375 represents the cDNA sequence for clone AA173383.

[2415] SEQ ID NO: 2376 represents the cDNA sequence for clone AA173384.

[2416] SEQ ID NO: 2377 represents the cDNA sequence for clone AA173389.

[2417] SEQ ID NO: 2378 represents the cDNA sequence for clone AA173538.

[2418] SEQ ID NO: 2379 represents the cDNA sequence for clone AA173596.

[2419] SEQ ID NO: 2380 represents the cDNA sequence for clone AA173618.

[2420] SEQ ID NO: 2381 represents the cDNA sequence for clone AA173622.

[2421] SEQ ID NO: 2382 represents the cDNA sequence for clone AA173628.

[2422] SEQ ID NO: 2383 represents the cDNA sequence for clone AA173631.

[2423] SEQ ID NO: 2384 represents the cDNA sequence for clone AA173632.

[2424] SEQ ID NO: 2385 represents the cDNA sequence for clone AA173635.

[2425] SEQ ID NO: 2386 represents the cDNA sequence for clone AA173638.

[2426] SEQ ID NO: 2387 represents the cDNA sequence for clone AA173639.

[2427] SEQ ID NO: 2388 represents the cDNA sequence for clone AA173640.

[2428] SEQ ID NO: 2389 represents the cDNA sequence for clone AA173645.

[2429] SEQ ID NO: 2390 represents the cDNA sequence for clone AA173646.

[2430] SEQ ID NO: 2391 represents the cDNA sequence for clone AA173659.

[2431] SEQ ID NO: 2392 represents the cDNA sequence for clone AA173610.

[2432] SEQ ID NO: 2393 represents the cDNA sequence for clone AA173665.

[2433] SEQ ID NO: 2394 represents the cDNA sequence for clone AA173666.

[2434] SEQ ID NO: 2395 represents the cDNA sequence for clone AA173671.

[2435] SEQ ID NO: 2396 represents the cDNA sequence for clone AA173709.

[2436] SEQ ID NO: 2397 represents the cDNA sequence for clone AA173713.

[2437] SEQ ID NO: 2398 represents the cDNA sequence for clone AA173716.

[2438] SEQ ID NO: 2399 represents the cDNA sequence for clone AA173721.

[2439] SEQ ID NO: 2400 represents the cDNA sequence for clone AA173727.

[2440] SEQ ID NO: 2401 represents the cDNA sequence for clone AA173729.

[2441] SEQ ID NO: 2402 represents the cDNA sequence for clone AA173530.

[2442] SEQ ID NO: 2403 represents the cDNA sequence for clone AA173535.

[2443] SEQ ID NO: 2404 represents the cDNA sequence for clone AA173536.

[2444] SEQ ID NO: 2405 represents the cDNA sequence for clone AA173699.

[2445] SEQ ID NO: 2406 represents the cDNA sequence for clone AA173702.

[2446] SEQ ID NO: 2407 represents the cDNA sequence for clone AA173735.

[2447] SEQ ID NO: 2408 represents the cDNA sequence for clone AA173736.

[2448] SEQ ID NO: 2409 represents the cDNA sequence for clone AA173739.

[2449] SEQ ID NO: 2410 represents the cDNA sequence for clone AA173740.

[2450] SEQ ID NO: 2411 represents the cDNA sequence for clone AA173868.

[2451] SEQ ID NO: 2412 represents the cDNA sequence for clone AA173746.

[2452] SEQ ID NO: 2413 represents the cDNA sequence for clone AA173823.

[2453] SEQ ID NO: 2414 represents the cDNA sequence for clone AA173826.

[2454] SEQ ID NO: 2415 represents the cDNA sequence for clone AA173830.

[2455] SEQ ID NO: 2416 represents the cDNA sequence for clone AA173872.

[2456] SEQ ID NO: 2417 represents the cDNA sequence for clone AA173878.

[2457] SEQ ID NO: 2418 represents the cDNA sequence for clone AA173879.

[2458] SEQ ID NO: 2419 represents the cDNA sequence for clone AA173897.

[2459] SEQ ID NO: 2420 represents the cDNA sequence for clone AA173901.

[2460] SEQ ID NO: 2421 represents the cDNA sequence for clone AA173907.

[2461] SEQ ID NO: 2422 represents the cDNA sequence for clone AA173923.

[2462] SEQ ID NO: 2423 represents the cDNA sequence for clone AA173926.

[2463] SEQ ID NO: 2424 represents the cDNA sequence for clone AA173928.

[2464] SEQ ID NO: 2425 represents the cDNA sequence for clone AA173938.

[2465] SEQ ID NO: 2426 represents the cDNA sequence for clone AA173939.

[2466] SEQ ID NO: 2427 represents the cDNA sequence for clone AA173759.

[2467] SEQ ID NO: 2428 represents the cDNA sequence for clone AA173888.

[2468] SEQ ID NO: 2429 represents the cDNA sequence for clone AA173942.

[2469] SEQ ID NO: 2430 represents the cDNA sequence for clone AA173970.

[2470] SEQ ID NO: 2431 represents the cDNA sequence for clone AA173978.

[2471] SEQ ID NO: 2432 represents the cDNA sequence for clone AA173983.

[2472] SEQ ID NO: 2433 represents the cDNA sequence for clone AA173988.

[2473] SEQ ID NO: 2434 represents the cDNA sequence for clone AA173994.

[2474] SEQ ID NO: 2435 represents the cDNA sequence for clone AA173955.

[2475] SEQ ID NO: 2436 represents the cDNA sequence for clone AA173956.

[2476] SEQ ID NO: 2437 represents the cDNA sequence for clone AA174006.

[2477] SEQ ID NO: 2438 represents the cDNA sequence for clone AA174008.

[2478] SEQ ID NO: 2439 represents the cDNA sequence for clone AA173813.

[2479] SEQ ID NO: 2440 represents the cDNA sequence for clone AA173817.

[2480] SEQ ID NO: 2441 represents the cDNA sequence for clone AA173881.

[2481] SEQ ID NO: 2442 represents the cDNA sequence for clone AA173884.

[2482] SEQ ID NO: 2443 represents the cDNA sequence for clone AA173886.

[2483] SEQ ID NO: 2444 represents the cDNA sequence for clone AA174022.

[2484] SEQ ID NO: 2445 represents the cDNA sequence for clone AA174023.

[2485] SEQ ID NO: 2446 represents the cDNA sequence for clone AA174030.

[2486] SEQ ID NO: 2447 represents the cDNA sequence for clone AA174044.

[2487] SEQ ID NO: 2448 represents the cDNA sequence for clone AA174046.

[2488] SEQ ID NO: 2449 represents the cDNA sequence for clone AA174145.

[2489] SEQ ID NO: 2450 represents the cDNA sequence for clone AA174004.

[2490] SEQ ID NO: 2451 represents the cDNA sequence for clone AA174094.

[2491] SEQ ID NO: 2452 represents the cDNA sequence for clone AA173029.

[2492] SEQ ID NO: 2453 represents the cDNA sequence for clone AA173033.

[2493] SEQ ID NO: 2454 represents the cDNA sequence for clone AA173046.

[2494] SEQ ID NO: 2455 represents the cDNA sequence for clone AA173055.

[2495] SEQ ID NO: 2456 represents the cDNA sequence for clone AA173058.

[2496] SEQ ID NO: 2457 represents the cDNA sequence for clone AA173172.

[2497] SEQ ID NO: 2458 represents the cDNA sequence for clone AA173188.

[2498] SEQ ID NO: 2459 represents the cDNA sequence for clone AA173196.

[2499] SEQ ID NO: 2460 represents the cDNA sequence for clone AA173166.

[2500] SEQ ID NO: 2461 represents the cDNA sequence for clone AA173199.

[2501] SEQ ID NO: 2462 represents the cDNA sequence for clone AA176202.

[2502] SEQ ID NO: 2463 represents the cDNA sequence for clone AA176225.

[2503] SEQ ID NO: 2464 represents the cDNA sequence for clone AA176226.

[2504] SEQ ID NO: 2465 represents the cDNA sequence for clone AA176249.

[2505] SEQ ID NO: 2466 represents the cDNA sequence for clone AA176253.

[2506] SEQ ID NO: 2467 represents the cDNA sequence for clone AA176257.

[2507] SEQ ID NO: 2468 represents the cDNA sequence for clone AA176090.

[2508] SEQ ID NO: 2469 represents the cDNA sequence for clone AA176304.

[2509] SEQ ID NO: 2470 represents the cDNA sequence for clone AA176305.

[2510] SEQ ID NO: 2471 represents the cDNA sequence for clone AA176312.

[2511] SEQ ID NO: 2472 represents the cDNA sequence for clone AA176313.

[2512] SEQ ID NO: 2473 represents the cDNA sequence for clone AA176315.

[2513] SEQ ID NO: 2474 represents the cDNA sequence for clone AA176273.

[2514] SEQ ID NO: 2475 represents the cDNA sequence for clone AA176323.

[2515] SEQ ID NO: 2476 represents the cDNA sequence for clone AA176324.

[2516] SEQ ID NO: 2477 represents the cDNA sequence for clone AA176328.

[2517] SEQ ID NO: 2478 represents the cDNA sequence for clone AA176330.

[2518] SEQ ID NO: 2479 represents the cDNA sequence for clone AA176690.

[2519] SEQ ID NO: 2480 represents the cDNA sequence for clone AA176693.

[2520] SEQ ID NO: 2481 represents the cDNA sequence for clone AA176702.

[2521] SEQ ID NO: 2482 represents the cDNA sequence for clone AA176710.

[2522] SEQ ID NO: 2483 represents the cDNA sequence for clone AA176713.

[2523] SEQ ID NO: 2484 represents the cDNA sequence for clone AA176717.

[2524] SEQ ID NO: 2485 represents the cDNA sequence for clone AA176528.

[2525] SEQ ID NO: 2486 represents the cDNA sequence for clone AA180008.

[2526] SEQ ID NO: 2487 represents the cDNA sequence for clone AA180011.

[2527] SEQ ID NO: 2488 represents the cDNA sequence for clone AA180012.

[2528] SEQ ID NO: 2489 represents the cDNA sequence for clone AA180031.

[2529] SEQ ID NO: 2490 represents the cDNA sequence for clone AA180032.

[2530] SEQ ID NO: 2491 represents the cDNA sequence for clone AA180033.

[2531] SEQ ID NO: 2492 represents the cDNA sequence for clone AA180037.

[2532] SEQ ID NO: 2493 represents the cDNA sequence for clone AA180039.

[2533] SEQ ID NO: 2494 represents the cDNA sequence for clone AA235450.

[2534] SEQ ID NO: 2495 represents the cDNA sequence for clone AA235315.

[2535] SEQ ID NO: 2496 represents the cDNA sequence for clone AA235316.

[2536] SEQ ID NO: 2497 represents the cDNA sequence for clone AA235401.

[2537] SEQ ID NO: 2498 represents the cDNA sequence for clone AA235403.

[2538] SEQ ID NO: 2499 represents the cDNA sequence for clone AA235454.

[2539] SEQ ID NO: 2500 represents the cDNA sequence for clone AA235455.

[2540] SEQ ID NO: 2501 represents the cDNA sequence for clone AA235492.

[2541] SEQ ID NO: 2502 represents the cDNA sequence for clone AA235504.

[2542] SEQ ID NO: 2503 represents the cDNA sequence for clone AA235512.

[2543] SEQ ID NO: 2504 represents the cDNA sequence for clone AA235329.

[2544] SEQ ID NO: 2505 represents the cDNA sequence for clone AA235523.

[2545] SEQ ID NO: 2506 represents the cDNA sequence for clone AA235551.

[2546] SEQ ID NO: 2507 represents the cDNA sequence for clone AA235562.

[2547] SEQ ID NO: 2508 represents the cDNA sequence for clone AA235534.

[2548] SEQ ID NO: 2509 represents the cDNA sequence for clone AA235536.

[2549] SEQ ID NO: 2510 represents the cDNA sequence for clone AA235538.

[2550] SEQ ID NO: 2511 represents the cDNA sequence for clone AA235576.

[2551] SEQ ID NO: 2512 represents the cDNA sequence for clone AA235387.

[2552] SEQ ID NO: 2513 represents the cDNA sequence for clone AA235392.

[2553] SEQ ID NO: 2514 represents the cDNA sequence for clone AA235393.

[2554] SEQ ID NO: 2515 represents the cDNA sequence for clone AA235572.

[2555] SEQ ID NO: 2516 represents the cDNA sequence for clone AA235544.

[2556] SEQ ID NO: 2517 represents the cDNA sequence for clone AA235546.

[2557] SEQ ID NO: 2518 represents the cDNA sequence for clone AA235547.

[2558] SEQ ID NO: 2519 represents the cDNA sequence for clone AA235604.

[2559] SEQ ID NO: 2520 represents the cDNA sequence for clone AA235626.

[2560] SEQ ID NO: 2521 represents the cDNA sequence for clone AA235633.

[2561] SEQ ID NO: 2522 represents the cDNA sequence for clone AA235636.

[2562] SEQ ID NO: 2523 represents the cDNA sequence for clone AA235641.

[2563] SEQ ID NO: 2524 represents the cDNA sequence for clone AA235654.

[2564] SEQ ID NO: 2525 represents the cDNA sequence for clone AA235660.

[2565] SEQ ID NO: 2526 represents the cDNA sequence for clone AA235662.

[2566] SEQ ID NO: 2527 represents the cDNA sequence for clone AA235663.

[2567] SEQ ID NO: 2528 represents the cDNA sequence for clone AA235466.

[2568] SEQ ID NO: 2529 represents the cDNA sequence for clone AA235664.

[2569] SEQ ID NO: 2530 represents the cDNA sequence for clone AA235668.

[2570] SEQ ID NO: 2531 represents the cDNA sequence for clone AA235693.

[2571] SEQ ID NO: 2532 represents the cDNA sequence for clone AA235698.

[2572] SEQ ID NO: 2533 represents the cDNA sequence for clone AA235701.

[2573] SEQ ID NO: 2534 represents the cDNA sequence for clone AA235704.

[2574] SEQ ID NO: 2535 represents the cDNA sequence for clone AA235709.

[2575] SEQ ID NO: 2536 represents the cDNA sequence for clone AA235710.

[2576] SEQ ID NO: 2537 represents the cDNA sequence for clone AA235712.

[2577] SEQ ID NO: 2538 represents the cDNA sequence for clone AA235721.

[2578] SEQ ID NO: 2539 represents the cDNA sequence for clone AA235723.

[2579] SEQ ID NO: 2540 represents the cDNA sequence for clone AA235687.

[2580] SEQ ID NO: 2541 represents the cDNA sequence for clone AA235742.

[2581] SEQ ID NO: 2542 represents the cDNA sequence for clone AA236698.

[2582] SEQ ID NO: 2543 represents the cDNA sequence for clone AA236706.

[2583] SEQ ID NO: 2544 represents the cDNA sequence for clone AA236711.

[2584] SEQ ID NO: 2545 represents the cDNA sequence for clone AA236712.

[2585] SEQ ID NO: 2546 represents the cDNA sequence for clone AA236719.

[2586] SEQ ID NO: 2547 represents the cDNA sequence for clone AA236730.

[2587] SEQ ID NO: 2548 represents the cDNA sequence for clone AA236671.

[2588] SEQ ID NO: 2549 represents the cDNA sequence for clone AA236672.

[2589] SEQ ID NO: 2550 represents the cDNA sequence for clone AA250734.

[2590] SEQ ID NO: 2551 represents the cDNA sequence for clone AA250735.

[2591] SEQ ID NO: 2552 represents the cDNA sequence for clone AA250736.

[2592] SEQ ID NO: 2553 represents the cDNA sequence for clone AA250737.

[2593] SEQ ID NO: 2554 represents the cDNA sequence for clone AA250739.

[2594] SEQ ID NO: 2555 represents the cDNA sequence for clone AA250767.

[2595] SEQ ID NO: 2556 represents the cDNA sequence for clone AA250771.

[2596] SEQ ID NO: 2557 represents the cDNA sequence for clone AA250776.

[2597] SEQ ID NO: 2558 represents the cDNA sequence for clone AA250782.

[2598] SEQ ID NO: 2559 represents the cDNA sequence for clone AA250762.

[2599] SEQ ID NO: 2560 represents the cDNA sequence for clone AA250763.

[2600] SEQ ID NO: 2561 represents the cDNA sequence for clone AA250765.

[2601] SEQ ID NO: 2562 represents the cDNA sequence for clone AA282991.

[2602] SEQ ID NO: 2563 represents the cDNA sequence for clone AA283183.

[2603] SEQ ID NO: 2564 represents the cDNA sequence for clone AA283185.

[2604] SEQ ID NO: 2565 represents the cDNA sequence for clone AA283198.

[2605] SEQ ID NO: 2566 represents the cDNA sequence for clone AA283199.

[2606] SEQ ID NO: 2567 represents the cDNA sequence for clone AA283192.

[2607] SEQ ID NO: 2568 represents the cDNA sequence for clone AA283204.

[2608] SEQ ID NO: 2569 represents the cDNA sequence for clone AA284701.

[2609] SEQ ID NO: 2570 represents the cDNA sequence for clone AA284703.

[2610] SEQ ID NO: 2571 represents the cDNA sequence for clone AA284730.

[2611] SEQ ID NO: 2572 represents the cDNA sequence for clone AA284731.

[2612] SEQ ID NO: 2573 represents the cDNA sequence for clone AA284733.

[2613] SEQ ID NO: 2574 represents the cDNA sequence for clone AA284736.

[2614] SEQ ID NO: 2575 represents the cDNA sequence for clone AA284740.

[2615] SEQ ID NO: 2576 represents the cDNA sequence for clone AA284741.

[2616] SEQ ID NO: 2577 represents the cDNA sequence for clone AA284742.

[2617] SEQ ID NO: 2578 represents the cDNA sequence for clone AA284743.

[2618] SEQ ID NO: 2579 represents the cDNA sequence for clone AA284747.

[2619] SEQ ID NO: 2580 represents the cDNA sequence for clone AA284752.

[2620] SEQ ID NO: 2581 represents the cDNA sequence for clone AA284754.

[2621] SEQ ID NO: 2582 represents the cDNA sequence for clone AA284772.

[2622] SEQ ID NO: 2583 represents the cDNA sequence for clone AA284683.

[2623] SEQ ID NO: 2584 represents the cDNA sequence for clone AA284684.

[2624] SEQ ID NO: 2585 represents the cDNA sequence for clone AA284685.

[2625] SEQ ID NO: 2586 represents the cDNA sequence for clone AA284721.

[2626] SEQ ID NO: 2587 represents the cDNA sequence for clone AA284726.

[2627] SEQ ID NO: 2588 represents the cDNA sequence for clone AA284775.

[2628] SEQ ID NO: 2589 represents the cDNA sequence for clone AA284776.

[2629] SEQ ID NO: 2590 represents the cDNA sequence for clone AA284777.

[2630] SEQ ID NO: 2591 represents the cDNA sequence for clone AA284782.

[2631] SEQ ID NO: 2592 represents the cDNA sequence for clone AA284811.

[2632] SEQ ID NO: 2593 represents the cDNA sequence for clone AA284815.

[2633] SEQ ID NO: 2594 represents the cDNA sequence for clone AA284818.

[2634] SEQ ID NO: 2595 represents the cDNA sequence for clone AA284823.

[2635] SEQ ID NO: 2596 represents the cDNA sequence for clone AA284790.

[2636] SEQ ID NO: 2597 represents the cDNA sequence for clone AA284841.

[2637] SEQ ID NO: 2598 represents the cDNA sequence for clone AA284692.

[2638] SEQ ID NO: 2599 represents the cDNA sequence for clone AA284693.

[2639] SEQ ID NO: 2600 represents the cDNA sequence for clone AA284826.

[2640] SEQ ID NO: 2601 represents the cDNA sequence for clone AA284830.

[2641] SEQ ID NO: 2602 represents the cDNA sequence for clone AA284832.

[2642] SEQ ID NO: 2603 represents the cDNA sequence for clone AA284842.

[2643] SEQ ID NO: 2604 represents the cDNA sequence for clone AA284845.

[2644] SEQ ID NO: 2605 represents the cDNA sequence for clone AA284847.

[2645] SEQ ID NO: 2606 represents the cDNA sequence for clone AA284850.

[2646] SEQ ID NO: 2607 represents the cDNA sequence for clone AA284855.

[2647] SEQ ID NO: 2608 represents the cDNA sequence for clone AA284858.

[2648] SEQ ID NO: 2609 represents the cDNA sequence for clone AA284881.

[2649] SEQ ID NO: 2610 represents the cDNA sequence for clone AA284882.

[2650] SEQ ID NO: 2611 represents the cDNA sequence for clone AA284891.

[2651] SEQ ID NO: 2612 represents the cDNA sequence for clone AA284898.

[2652] SEQ ID NO: 2613 represents the cDNA sequence for clone AA284902.

[2653] SEQ ID NO: 2614 represents the cDNA sequence for clone AA284903.

[2654] SEQ ID NO: 2615 represents the cDNA sequence for clone AA284910.

[2655] SEQ ID NO: 2616 represents the cDNA sequence for clone AA284711.

[2656] SEQ ID NO: 2617 represents the cDNA sequence for clone AA284718.

[2657] SEQ ID NO: 2618 represents the cDNA sequence for clone AA284871.

[2658] SEQ ID NO: 2619 represents the cDNA sequence for clone AA284874.

[2659] SEQ ID NO: 2620 represents the cDNA sequence for clone AA284542.

[2660] SEQ ID NO: 2621 represents the cDNA sequence for clone AA284545.

[2661] SEQ ID NO: 2622 represents the cDNA sequence for clone AA284552.

[2662] SEQ ID NO: 2623 represents the cDNA sequence for clone AA284580.

[2663] SEQ ID NO: 2624 represents the cDNA sequence for clone AA284581.

[2664] SEQ ID NO: 2625 represents the cDNA sequence for clone AA284585.

[2665] SEQ ID NO: 2626 represents the cDNA sequence for clone AA284587.

[2666] SEQ ID NO: 2627 represents the cDNA sequence for clone AA284588.

[2667] SEQ ID NO: 2628 represents the cDNA sequence for clone AA284589.

[2668] SEQ ID NO: 2629 represents the cDNA sequence for clone AA284591.

[2669] SEQ ID NO: 2630 represents the cDNA sequence for clone AA284598.

[2670] SEQ ID NO: 2631 represents the cDNA sequence for clone AA284602.

[2671] SEQ ID NO: 2632 represents the cDNA sequence for clone AA284606.

[2672] SEQ ID NO: 2633 represents the cDNA sequence for clone AA284798.

[2673] SEQ ID NO: 2634 represents the cDNA sequence for clone AA284800.

[2674] SEQ ID NO: 2635 represents the cDNA sequence for clone AA284570.

[2675] SEQ ID NO: 2636 represents the cDNA sequence for clone AA284574.

[2676] SEQ ID NO: 2637 represents the cDNA sequence for clone AA284611.

[2677] SEQ ID NO: 2638 represents the cDNA sequence for clone AA284612.

[2678] SEQ ID NO: 2639 represents the cDNA sequence for clone AA284613.

[2679] SEQ ID NO: 2640 represents the cDNA sequence for clone AA284637.

[2680] SEQ ID NO: 2641 represents the cDNA sequence for clone AA284639.

[2681] SEQ ID NO: 2642 represents the cDNA sequence for clone AA284643.

[2682] SEQ ID NO: 2643 represents the cDNA sequence for clone AA284651.

[2683] SEQ ID NO: 2644 represents the cDNA sequence for clone AA284653.

[2684] SEQ ID NO: 2645 represents the cDNA sequence for clone AA284654.

[2685] SEQ ID NO: 2646 represents the cDNA sequence for clone AA284658.

[2686] SEQ ID NO: 2647 represents the cDNA sequence for clone AA284659.

[2687] SEQ ID NO: 2648 represents the cDNA sequence for clone AA284666.

[2688] SEQ ID NO: 2649 represents the cDNA sequence for clone AA284675.

[2689] SEQ ID NO: 2650 represents the cDNA sequence for clone AA284676.

[2690] SEQ ID NO: 2651 represents the cDNA sequence for clone AA284678.

[2691] SEQ ID NO: 2652 represents the cDNA sequence for clone AA284558.

[2692] SEQ ID NO: 2653 represents the cDNA sequence for clone AA284564.

[2693] SEQ ID NO: 2654 represents the cDNA sequence for clone AA284565.

[2694] SEQ ID NO: 2655 represents the cDNA sequence for clone AA284915.

[2695] SEQ ID NO: 2656 represents the cDNA sequence for clone AA284966.

[2696] SEQ ID NO: 2657 represents the cDNA sequence for clone AA284968.

[2697] SEQ ID NO: 2658 represents the cDNA sequence for clone AA284970.

[2698] SEQ ID NO: 2659 represents the cDNA sequence for clone AA284978.

[2699] SEQ ID NO: 2660 represents the cDNA sequence for clone AA284619.

[2700] SEQ ID NO: 2661 represents the cDNA sequence for clone AA284623.

[2701] SEQ ID NO: 2662 represents the cDNA sequence for clone AA284986.

[2702] SEQ ID NO: 2663 represents the cDNA sequence for clone AA284989.

[2703] SEQ ID NO: 2664 represents the cDNA sequence for clone AA284990.

[2704] SEQ ID NO: 2665 represents the cDNA sequence for clone AA285009.

[2705] SEQ ID NO: 2666 represents the cDNA sequence for clone AA285015.

[2706] SEQ ID NO: 2667 represents the cDNA sequence for clone AA285021.

[2707] SEQ ID NO: 2668 represents the cDNA sequence for clone AA285030.

[2708] SEQ ID NO: 2669 represents the cDNA sequence for clone AA283613.

[2709] SEQ ID NO: 2670 represents the cDNA sequence for clone AA283614.

[2710] SEQ ID NO: 2671 represents the cDNA sequence for clone AA285061.

[2711] SEQ ID NO: 2672 represents the cDNA sequence for clone AA285090.

[2712] SEQ ID NO: 2673 represents the cDNA sequence for clone AA285093.

[2713] SEQ ID NO: 2674 represents the cDNA sequence for clone AA285097.

[2714] SEQ ID NO: 2675 represents the cDNA sequence for clone AA285098.

[2715] SEQ ID NO: 2676 represents the cDNA sequence for clone AA285105.

[2716] SEQ ID NO: 2677 represents the cDNA sequence for clone AA285119.

[2717] SEQ ID NO: 2678 represents the cDNA sequence for clone AA285124.

[2718] SEQ ID NO: 2679 represents the cDNA sequence for clone AA284991.

[2719] SEQ ID NO: 2680 represents the cDNA sequence for clone AA284993.

[2720] SEQ ID NO: 2681 represents the cDNA sequence for clone AA284996.

[2721] SEQ ID NO: 2682 represents the cDNA sequence for clone AA284997.

[2722] SEQ ID NO: 2683 represents the cDNA sequence for clone AA283621.

[2723] SEQ ID NO: 2684 represents the cDNA sequence for clone AA283622.

[2724] SEQ ID NO: 2685 represents the cDNA sequence for clone AA283674.

[2725] SEQ ID NO: 2686 represents the cDNA sequence for clone AA283687.

[2726] SEQ ID NO: 2687 represents the cDNA sequence for clone AA283737.

[2727] SEQ ID NO: 2688 represents the cDNA sequence for clone AA283739.

[2728] SEQ ID NO: 2689 represents the cDNA sequence for clone AA283740.

[2729] SEQ ID NO: 2690 represents the cDNA sequence for clone AA283763.

[2730] SEQ ID NO: 2691 represents the cDNA sequence for clone AA283766.

[2731] SEQ ID NO: 2692 represents the cDNA sequence for clone AA283772.

[2732] SEQ ID NO: 2693 represents the cDNA sequence for clone AA283784.

[2733] SEQ ID NO: 2694 represents the cDNA sequence for clone AA283791.

[2734] SEQ ID NO: 2695 represents the cDNA sequence for clone AA283794.

[2735] SEQ ID NO: 2696 represents the cDNA sequence for clone AA283796.

[2736] SEQ ID NO: 2697 represents the cDNA sequence for clone AA283747.

[2737] SEQ ID NO: 2698 represents the cDNA sequence for clone AA283753.

[2738] SEQ ID NO: 2699 represents the cDNA sequence for clone AA283853.

[2739] SEQ ID NO: 2700 represents the cDNA sequence for clone AA283854.

[2740] SEQ ID NO: 2701 represents the cDNA sequence for clone AA283855.

[2741] SEQ ID NO: 2702 represents the cDNA sequence for clone AA283857.

[2742] SEQ ID NO: 2703 represents the cDNA sequence for clone AA284322.

[2743] SEQ ID NO: 2704 represents the cDNA sequence for clone AA284499.

[2744] SEQ ID NO: 2705 represents the cDNA sequence for clone AA284515.

[2745] SEQ ID NO: 2706 represents the cDNA sequence for clone AA284530.

[2746] SEQ ID NO: 2707 represents the cDNA sequence for clone AA284537.

[2747] SEQ ID NO: 2708 represents the cDNA sequence for clone AA284508.

[2748] SEQ ID NO: 2709 represents the cDNA sequence for clone AA287132.

[2749] SEQ ID NO: 2710 represents the cDNA sequence for clone AA287150.

[2750] SEQ ID NO: 2711 represents the cDNA sequence for clone AA287151.

[2751] SEQ ID NO: 2712 represents the cDNA sequence for clone AA287153.

[2752] SEQ ID NO: 2713 represents the cDNA sequence for clone AA287211.

[2753] SEQ ID NO: 2714 represents the cDNA sequence for clone AA287217.

[2754] SEQ ID NO: 2715 represents the cDNA sequence for clone AA287229.

[2755] SEQ ID NO: 2716 represents the cDNA sequence for clone AA287230.

[2756] SEQ ID NO: 2717 represents the cDNA sequence for clone AA287237.

[2757] SEQ ID NO: 2718 represents the cDNA sequence for clone AA287238.

[2758] SEQ ID NO: 2719 represents the cDNA sequence for clone AA287239.

[2759] SEQ ID NO: 2720 represents the cDNA sequence for clone AA287073.

[2760] SEQ ID NO: 2721 represents the cDNA sequence for clone AA287223.

[2761] SEQ ID NO: 2722 represents the cDNA sequence for clone AA287248.

[2762] SEQ ID NO: 2723 represents the cDNA sequence for clone AA287251.

[2763] SEQ ID NO: 2724 represents the cDNA sequence for clone AA290739.

[2764] SEQ ID NO: 2725 represents the cDNA sequence for clone AA290740.

[2765] SEQ ID NO: 2726 represents the cDNA sequence for clone AA290743.

[2766] SEQ ID NO: 2727 represents the cDNA sequence for clone AA290744.

[2767] SEQ ID NO: 2728 represents the cDNA sequence for clone AA290745.

[2768] SEQ ID NO: 2729 represents the cDNA sequence for clone AA290748.

[2769] SEQ ID NO: 2730 represents the cDNA sequence for clone AA290749.

[2770] SEQ ID NO: 2731 represents the cDNA sequence for clone AA290753.

[2771] SEQ ID NO: 2732 represents the cDNA sequence for clone AA290754.

[2772] SEQ ID NO: 2733 represents the cDNA sequence for clone AA290765.

[2773] SEQ ID NO: 2734 represents the cDNA sequence for clone AA290767.

[2774] SEQ ID NO: 2735 represents the cDNA sequence for clone AA290773.

[2775] SEQ ID NO: 2736 represents the cDNA sequence for clone AA290774.

[2776] SEQ ID NO: 2737 represents the cDNA sequence for clone AA290776.

[2777] SEQ ID NO: 2738 represents the cDNA sequence for clone AA290786.

[2778] SEQ ID NO: 2739 represents the cDNA sequence for clone AA290787.

[2779] SEQ ID NO: 2740 represents the cDNA sequence for clone AA290791.

[2780] SEQ ID NO: 2741 represents the cDNA sequence for clone AA290811.

[2781] SEQ ID NO: 2742 represents the cDNA sequence for clone AA290813.

[2782] SEQ ID NO: 2743 represents the cDNA sequence for clone AA290827.

[2783] SEQ ID NO: 2744 represents the cDNA sequence for clone AA290830.

[2784] SEQ ID NO: 2745 represents the cDNA sequence for clone AA290831.

[2785] SEQ ID NO: 2746 represents the cDNA sequence for clone AA290832.

[2786] SEQ ID NO: 2747 represents the cDNA sequence for clone AA290835.

[2787] SEQ ID NO: 2748 represents the cDNA sequence for clone AA290837.

[2788] SEQ ID NO: 2749 represents the cDNA sequence for clone AA290838.

[2789] SEQ ID NO: 2750 represents the cDNA sequence for clone AA290840.

[2790] SEQ ID NO: 2751 represents the cDNA sequence for clone AA290794.

[2791] SEQ ID NO: 2752 represents the cDNA sequence for clone AA290709.

[2792] SEQ ID NO: 2753 represents the cDNA sequence for clone AA290712.

[2793] SEQ ID NO: 2754 represents the cDNA sequence for clone AA290844.

[2794] SEQ ID NO: 2755 represents the cDNA sequence for clone AA290848.

[2795] SEQ ID NO: 2756 represents the cDNA sequence for clone AA290849.

[2796] SEQ ID NO: 2757 represents the cDNA sequence for clone AA290851.

[2797] SEQ ID NO: 2758 represents the cDNA sequence for clone AA290853.

[2798] SEQ ID NO: 2759 represents the cDNA sequence for clone AA290856.

[2799] SEQ ID NO: 2760 represents the cDNA sequence for clone AA290857.

[2800] SEQ ID NO: 2761 represents the cDNA sequence for clone AA290858.

[2801] SEQ ID NO: 2762 represents the cDNA sequence for clone AA290895.

[2802] SEQ ID NO: 2763 represents the cDNA sequence for clone AA290901.

[2803] SEQ ID NO: 2764 represents the cDNA sequence for clone AA290903.

[2804] SEQ ID NO: 2765 represents the cDNA sequence for clone AA290961.

[2805] SEQ ID NO: 2766 represents the cDNA sequence for clone AA290962.

[2806] SEQ ID NO: 2767 represents the cDNA sequence for clone AA290985.

[2807] SEQ ID NO: 2768 represents the cDNA sequence for clone AA290986.

[2808] SEQ ID NO: 2769 represents the cDNA sequence for clone AA290987.

[2809] SEQ ID NO: 2770 represents the cDNA sequence for clone AA290800.

[2810] SEQ ID NO: 2771 represents the cDNA sequence for clone AA290801.

[2811] SEQ ID NO: 2772 represents the cDNA sequence for clone AA290805.

[2812] SEQ ID NO: 2773 represents the cDNA sequence for clone AA290860.

[2813] SEQ ID NO: 2774 represents the cDNA sequence for clone AA290863.

[2814] SEQ ID NO: 2775 represents the cDNA sequence for clone AA290865.

[2815] SEQ ID NO: 2776 represents the cDNA sequence for clone AA290867.

[2816] SEQ ID NO: 2777 represents the cDNA sequence for clone AA290868.

[2817] SEQ ID NO: 2778 represents the cDNA sequence for clone AA290581.

[2818] SEQ ID NO: 2779 represents the cDNA sequence for clone AA290582.

[2819] SEQ ID NO: 2780 represents the cDNA sequence for clone AA290585.

[2820] SEQ ID NO: 2781 represents the cDNA sequence for clone AA290589.

[2821] SEQ ID NO: 2782 represents the cDNA sequence for clone AA290643.

[2822] SEQ ID NO: 2783 represents the cDNA sequence for clone AA290666.

[2823] SEQ ID NO: 2784 represents the cDNA sequence for clone AA290684.

[2824] SEQ ID NO: 2785 represents the cDNA sequence for clone AA291043.

[2825] SEQ ID NO: 2786 represents the cDNA sequence for clone AA291046.

[2826] SEQ ID NO: 2787 represents the cDNA sequence for clone AA291047.

[2827] SEQ ID NO: 2788 represents the cDNA sequence for clone AA291048.

[2828] SEQ ID NO: 2789 represents the cDNA sequence for clone AA291049.

[2829] SEQ ID NO: 2790 represents the cDNA sequence for clone AA291051.

[2830] SEQ ID NO: 2791 represents the cDNA sequence for clone AA291052.

[2831] SEQ ID NO: 2792 represents the cDNA sequence for clone AA290647.

[2832] SEQ ID NO: 2793 represents the cDNA sequence for clone AA290650.

[2833] SEQ ID NO: 2794 represents the cDNA sequence for clone AA291022.

[2834] SEQ ID NO: 2795 represents the cDNA sequence for clone AA291027.

[2835] SEQ ID NO: 2796 represents the cDNA sequence for clone AA291056.

[2836] SEQ ID NO: 2797 represents the cDNA sequence for clone AA291059.

[2837] SEQ ID NO: 2798 represents the cDNA sequence for clone AA291364.

[2838] SEQ ID NO: 2799 represents the cDNA sequence for clone AA291371.

[2839] SEQ ID NO: 2800 represents the cDNA sequence for clone AA291374.

[2840] SEQ ID NO: 2801 represents the cDNA sequence for clone AA291375.

[2841] SEQ ID NO: 2802 represents the cDNA sequence for clone AA291377.

[2842] SEQ ID NO: 2803 represents the cDNA sequence for clone AA291379.

[2843] SEQ ID NO: 2804 represents the cDNA sequence for clone AA291383.

[2844] SEQ ID NO: 2805 represents the cDNA sequence for clone AA291395.

[2845] SEQ ID NO: 2806 represents the cDNA sequence for clone AA291398.

[2846] SEQ ID NO: 2807 represents the cDNA sequence for clone AA291404.

[2847] SEQ ID NO: 2808 represents the cDNA sequence for clone AA291202.

[2848] SEQ ID NO: 2809 represents the cDNA sequence for clone AA291204.

[2849] SEQ ID NO: 2810 represents the cDNA sequence for clone AA291207.

[2850] SEQ ID NO: 2811 represents the cDNA sequence for clone AA291210.

[2851] SEQ ID NO: 2812 represents the cDNA sequence for clone AA291355.

[2852] SEQ ID NO: 2813 represents the cDNA sequence for clone AA291356.

[2853] SEQ ID NO: 2814 represents the cDNA sequence for clone AA291357.

[2854] SEQ ID NO: 2815 represents the cDNA sequence for clone AA291360.

[2855] SEQ ID NO: 2816 represents the cDNA sequence for clone AA291409.

[2856] SEQ ID NO: 2817 represents the cDNA sequence for clone AA291411.

[2857] SEQ ID NO: 2818 represents the cDNA sequence for clone AA291438.

[2858] SEQ ID NO: 2819 represents the cDNA sequence for clone AA291439.

[2859] SEQ ID NO: 2820 represents the cDNA sequence for clone AA291441.

[2860] SEQ ID NO: 2821 represents the cDNA sequence for clone AA291442.

[2861] SEQ ID NO: 2822 represents the cDNA sequence for clone AA291443.

[2862] SEQ ID NO: 2823 represents the cDNA sequence for clone AA291455.

[2863] SEQ ID NO: 2824 represents the cDNA sequence for clone AA291457.

[2864] SEQ ID NO: 2825 represents the cDNA sequence for clone AA291458.

[2865] SEQ ID NO: 2826 represents the cDNA sequence for clone AA291459.

[2866] SEQ ID NO: 2827 represents the cDNA sequence for clone AA291472.

[2867] SEQ ID NO: 2828 represents the cDNA sequence for clone AA291286.

[2868] SEQ ID NO: 2829 represents the cDNA sequence for clone AA291430.

[2869] SEQ ID NO: 2830 represents the cDNA sequence for clone AA291475.

[2870] SEQ ID NO: 2831 represents the cDNA sequence for clone AA291503.

[2871] SEQ ID NO: 2832 represents the cDNA sequence for clone AA291512.

[2872] SEQ ID NO: 2833 represents the cDNA sequence for clone AA291514.

[2873] SEQ ID NO: 2834 represents the cDNA sequence for clone AA291515.

[2874] SEQ ID NO: 2835 represents the cDNA sequence for clone AA291522.

[2875] SEQ ID NO: 2836 represents the cDNA sequence for clone AA291523.

[2876] SEQ ID NO: 2837 represents the cDNA sequence for clone AA291485.

[2877] SEQ ID NO: 2838 represents the cDNA sequence for clone AA291488.

[2878] SEQ ID NO: 2839 represents the cDNA sequence for clone AA291536.

[2879] SEQ ID NO: 2840 represents the cDNA sequence for clone AA291494.

[2880] SEQ ID NO: 2841 represents the cDNA sequence for clone AA291495.

[2881] SEQ ID NO: 2842 represents the cDNA sequence for clone AA291499.

[2882] SEQ ID NO: 2843 represents the cDNA sequence for clone AA291548.

[2883] SEQ ID NO: 2844 represents the cDNA sequence for clone AA291584.

[2884] SEQ ID NO: 2845 represents the cDNA sequence for clone AA291588.

[2885] SEQ ID NO: 2846 represents the cDNA sequence for clone AA291590.

[2886] SEQ ID NO: 2847 represents the cDNA sequence for clone AA291600.

[2887] SEQ ID NO: 2848 represents the cDNA sequence for clone AA291606.

[2888] SEQ ID NO: 2849 represents the cDNA sequence for clone AA291608.

[2889] SEQ ID NO: 2850 represents the cDNA sequence for clone AA291611.

[2890] SEQ ID NO: 2851 represents the cDNA sequence for clone AA291348.

[2891] SEQ ID NO: 2852 represents the cDNA sequence for clone AA291351.

[2892] SEQ ID NO: 2853 represents the cDNA sequence for clone AA291353.

[2893] SEQ ID NO: 2854 represents the cDNA sequence for clone AA291562.

[2894] SEQ ID NO: 2855 represents the cDNA sequence for clone AA291565.

[2895] SEQ ID NO: 2856 represents the cDNA sequence for clone AA291615.

[2896] SEQ ID NO: 2857 represents the cDNA sequence for clone AA291617.

[2897] SEQ ID NO: 2858 represents the cDNA sequence for clone AA291639.

[2898] SEQ ID NO: 2859 represents the cDNA sequence for clone AA291644.

[2899] SEQ ID NO: 2860 represents the cDNA sequence for clone AA291646.

[2900] SEQ ID NO: 2861 represents the cDNA sequence for clone AA291660.

[2901] SEQ ID NO: 2862 represents the cDNA sequence for clone AA291672.

[2902] SEQ ID NO: 2863 represents the cDNA sequence for clone AA291530.

[2903] SEQ ID NO: 2864 represents the cDNA sequence for clone AA291631.

[2904] SEQ ID NO: 2865 represents the cDNA sequence for clone AA291633.

[2905] SEQ ID NO: 2866 represents the cDNA sequence for clone AA291634.

[2906] SEQ ID NO: 2867 represents the cDNA sequence for clone AA291635.

[2907] SEQ ID NO: 2868 represents the cDNA sequence for clone AA291638.

[2908] SEQ ID NO: 2869 represents the cDNA sequence for clone AA291685.

[2909] SEQ ID NO: 2870 represents the cDNA sequence for clone AA291687.

[2910] SEQ ID NO: 2871 represents the cDNA sequence for clone AA291706.

[2911] SEQ ID NO: 2872 represents the cDNA sequence for clone AA291713.

[2912] SEQ ID NO: 2873 represents the cDNA sequence for clone AA291716.

[2913] SEQ ID NO: 2874 represents the cDNA sequence for clone AA291717.

[2914] SEQ ID NO: 2875 represents the cDNA sequence for clone AA291724.

[2915] SEQ ID NO: 2876 represents the cDNA sequence for clone AA291739.

[2916] SEQ ID NO: 2877 represents the cDNA sequence for clone AA291741.

[2917] SEQ ID NO: 2878 represents the cDNA sequence for clone AA291742.

[2918] SEQ ID NO: 2879 represents the cDNA sequence for clone AA291553.

[2919] SEQ ID NO: 2880 represents the cDNA sequence for clone AA291625.

[2920] SEQ ID NO: 2881 represents the cDNA sequence for clone AA291750.

[2921] SEQ ID NO: 2882 represents the cDNA sequence for clone AA291751.

[2922] SEQ ID NO: 2883 represents the cDNA sequence for clone AA291754.

[2923] SEQ ID NO: 2884 represents the cDNA sequence for clone AA291756.

[2924] SEQ ID NO: 2885 represents the cDNA sequence for clone AA291762.

[2925] SEQ ID NO: 2886 represents the cDNA sequence for clone AA291793.

[2926] SEQ ID NO: 2887 represents the cDNA sequence for clone AA291800.

[2927] SEQ ID NO: 2888 represents the cDNA sequence for clone AA291803.

[2928] SEQ ID NO: 2889 represents the cDNA sequence for clone AA291806.

[2929] SEQ ID NO: 2890 represents the cDNA sequence for clone AA291692.

[2930] SEQ ID NO: 2891 represents the cDNA sequence for clone AA291695.

[2931] SEQ ID NO: 2892 represents the cDNA sequence for clone AA291779.

[2932] SEQ ID NO: 2893 represents the cDNA sequence for clone AA291783.

[2933] SEQ ID NO: 2894 represents the cDNA sequence for clone AA291817.

[2934] SEQ ID NO: 2895 represents the cDNA sequence for clone AA291818.

[2935] SEQ ID NO: 2896 represents the cDNA sequence for clone AA291820.

[2936] SEQ ID NO: 2897 represents the cDNA sequence for clone AA291860.

[2937] SEQ ID NO: 2898 represents the cDNA sequence for clone AA291862.

[2938] SEQ ID NO: 2899 represents the cDNA sequence for clone AA291864.

[2939] SEQ ID NO: 2900 represents the cDNA sequence for clone AA291865.

[2940] SEQ ID NO: 2901 represents the cDNA sequence for clone AA291871.

[2941] SEQ ID NO: 2902 represents the cDNA sequence for clone AA291877.

[2942] SEQ ID NO: 2903 represents the cDNA sequence for clone AA291884.

[2943] SEQ ID NO: 2904 represents the cDNA sequence for clone AA291697.

[2944] SEQ ID NO: 2905 represents the cDNA sequence for clone AA291704.

[2945] SEQ ID NO: 2906 represents the cDNA sequence for clone AA291705.

[2946] SEQ ID NO: 2907 represents the cDNA sequence for clone AA291835.

[2947] SEQ ID NO: 2908 represents the cDNA sequence for clone AA291837.

[2948] SEQ ID NO: 2909 represents the cDNA sequence for clone AA291838.

[2949] SEQ ID NO: 2910 represents the cDNA sequence for clone AA291887.

[2950] SEQ ID NO: 2911 represents the cDNA sequence for clone AA291892.

[2951] SEQ ID NO: 2912 represents the cDNA sequence for clone AA291912.

[2952] SEQ ID NO: 2913 represents the cDNA sequence for clone AA291914.

[2953] SEQ ID NO: 2914 represents the cDNA sequence for clone AA291898.

[2954] SEQ ID NO: 2915 represents the cDNA sequence for clone AA291902.

[2955] SEQ ID NO: 2916 represents the cDNA sequence for clone AA291904.

[2956] SEQ ID NO: 2917 represents the cDNA sequence for clone AA291905.

[2957] SEQ ID NO: 2918 represents the cDNA sequence for clone AA291765.

[2958] SEQ ID NO: 2919 represents the cDNA sequence for clone AA291930.

[2959] SEQ ID NO: 2920 represents the cDNA sequence for clone AA291931.

[2960] SEQ ID NO: 2921 represents the cDNA sequence for clone AA291964.

[2961] SEQ ID NO: 2922 represents the cDNA sequence for clone AA291983.

[2962] SEQ ID NO: 2923 represents the cDNA sequence for clone AA291989.

[2963] SEQ ID NO: 2924 represents the cDNA sequence for clone AA291994.

[2964] SEQ ID NO: 2925 represents the cDNA sequence for clone AA291996.

[2965] SEQ ID NO: 2926 represents the cDNA sequence for clone AA291997.

[2966] SEQ ID NO: 2927 represents the cDNA sequence for clone AA292013.

[2967] SEQ ID NO: 2928 represents the cDNA sequence for clone AA292015.

[2968] SEQ ID NO: 2929 represents the cDNA sequence for clone AA292018.

[2969] SEQ ID NO: 2930 represents the cDNA sequence for clone AA292021.

[2970] SEQ ID NO: 2931 represents the cDNA sequence for clone AA292023.

[2971] SEQ ID NO: 2932 represents the cDNA sequence for clone AA291827.

[2972] SEQ ID NO: 2933 represents the cDNA sequence for clone AA291828.

[2973] SEQ ID NO: 2934 represents the cDNA sequence for clone AA291974.

[2974] SEQ ID NO: 2935 represents the cDNA sequence for clone AA291981.

[2975] SEQ ID NO: 2936 represents the cDNA sequence for clone AA292072.

[2976] SEQ ID NO: 2937 represents the cDNA sequence for clone AA292075.

[2977] SEQ ID NO: 2938 represents the cDNA sequence for clone AA292077.

[2978] SEQ ID NO: 2939 represents the cDNA sequence for clone AA292084.

[2979] SEQ ID NO: 2940 represents the cDNA sequence for clone AA292085.

[2980] SEQ ID NO: 2941 represents the cDNA sequence for clone AA292087.

[2981] SEQ ID NO: 2942 represents the cDNA sequence for clone AA292148.

[2982] SEQ ID NO: 2943 represents the cDNA sequence for clone AA292157.

[2983] SEQ ID NO: 2944 represents the cDNA sequence for clone AA292166.

[2984] SEQ ID NO: 2945 represents the cDNA sequence for clone AA292026.

[2985] SEQ ID NO: 2946 represents the cDNA sequence for clone AA292029.

[2986] SEQ ID NO: 2947 represents the cDNA sequence for clone AA292034.

[2987] SEQ ID NO: 2948 represents the cDNA sequence for clone AA292121.

[2988] SEQ ID NO: 2949 represents the cDNA sequence for clone AA292122.

[2989] SEQ ID NO: 2950 represents the cDNA sequence for clone AA292123.

[2990] SEQ ID NO: 2951 represents the cDNA sequence for clone AA292113.

[2991] SEQ ID NO: 2952 represents the cDNA sequence for clone AA292180.

[2992] SEQ ID NO: 2953 represents the cDNA sequence for clone AA292182.

[2993] SEQ ID NO: 2954 represents the cDNA sequence for clone AA292186.

[2994] SEQ ID NO: 2955 represents the cDNA sequence for clone AA292195.

[2995] SEQ ID NO: 2956 represents the cDNA sequence for clone AA292196.

[2996] SEQ ID NO: 2957 represents the cDNA sequence for clone AA292201.

[2997] SEQ ID NO: 2958 represents the cDNA sequence for clone AA292204.

[2998] SEQ ID NO: 2959 represents the cDNA sequence for clone AA292206.

[2999] SEQ ID NO: 2960 represents the cDNA sequence for clone AA292208.

[3000] SEQ ID NO: 2961 represents the cDNA sequence for clone AA292214.

[3001] SEQ ID NO: 2962 represents the cDNA sequence for clone AA292169.

[3002] SEQ ID NO: 2963 represents the cDNA sequence for clone AA292174.

[3003] SEQ ID NO: 2964 represents the cDNA sequence for clone AA292234.

[3004] SEQ ID NO: 2965 represents the cDNA sequence for clone AA292044.

[3005] SEQ ID NO: 2966 represents the cDNA sequence for clone AA292052.

[3006] SEQ ID NO: 2967 represents the cDNA sequence for clone AA292245.

[3007] SEQ ID NO: 2968 represents the cDNA sequence for clone AA292266.

[3008] SEQ ID NO: 2969 represents the cDNA sequence for clone AA292275.

[3009] SEQ ID NO: 2970 represents the cDNA sequence for clone AA292280.

[3010] SEQ ID NO: 2971 represents the cDNA sequence for clone AA292289.

[3011] SEQ ID NO: 2972 represents the cDNA sequence for clone AA292292.

[3012] SEQ ID NO: 2973 represents the cDNA sequence for clone AA292293.

[3013] SEQ ID NO: 2974 represents the cDNA sequence for clone AA292297.

[3014] SEQ ID NO: 2975 represents the cDNA sequence for clone AA292301.

[3015] SEQ ID NO: 2976 represents the cDNA sequence for clone AA292305.

[3016] SEQ ID NO: 2977 represents the cDNA sequence for clone AA292192.

[3017] SEQ ID NO: 2978 represents the cDNA sequence for clone AA292259.

[3018] SEQ ID NO: 2979 represents the cDNA sequence for clone AA292307.

[3019] SEQ ID NO: 2980 represents the cDNA sequence for clone AA292308.

[3020] SEQ ID NO: 2981 represents the cDNA sequence for clone AA292348.

[3021] SEQ ID NO: 2982 represents the cDNA sequence for clone AA292352.

[3022] SEQ ID NO: 2983 represents the cDNA sequence for clone AA292356.

[3023] SEQ ID NO: 2984 represents the cDNA sequence for clone AA292357.

[3024] SEQ ID NO: 2985 represents the cDNA sequence for clone AA292359.

[3025] SEQ ID NO: 2986 represents the cDNA sequence for clone AA292363.

[3026] SEQ ID NO: 2987 represents the cDNA sequence for clone AA292364.

[3027] SEQ ID NO: 2988 represents the cDNA sequence for clone AA292366.

[3028] SEQ ID NO: 2989 represents the cDNA sequence for clone AA292367.

[3029] SEQ ID NO: 2990 represents the cDNA sequence for clone AA292370.

[3030] SEQ ID NO: 2991 represents the cDNA sequence for clone AA292376.

[3031] SEQ ID NO: 2992 represents the cDNA sequence for clone AA292223.

[3032] SEQ ID NO: 2993 represents the cDNA sequence for clone AA292227.

[3033] SEQ ID NO: 2994 represents the cDNA sequence for clone AA292331.

[3034] SEQ ID NO: 2995 represents the cDNA sequence for clone AA292382.

[3035] SEQ ID NO: 2996 represents the cDNA sequence for clone AA292383.

[3036] SEQ ID NO: 2997 represents the cDNA sequence for clone AA292403.

[3037] SEQ ID NO: 2998 represents the cDNA sequence for clone AA292405.

[3038] SEQ ID NO: 2999 represents the cDNA sequence for clone AA292411.

[3039] SEQ ID NO: 3000 represents the cDNA sequence for clone AA292415.

[3040] SEQ ID NO: 3001 represents the cDNA sequence for clone AA292418.

[3041] SEQ ID NO: 3002 represents the cDNA sequence for clone AA292420.

[3042] SEQ ID NO: 3003 represents the cDNA sequence for clone AA292423.

[3043] SEQ ID NO: 3004 represents the cDNA sequence for clone AA292435.

[3044] SEQ ID NO: 3005 represents the cDNA sequence for clone AA292436.

[3045] SEQ ID NO: 3006 represents the cDNA sequence for clone AA292254.

[3046] SEQ ID NO: 3007 represents the cDNA sequence for clone AA292394.

[3047] SEQ ID NO: 3008 represents the cDNA sequence for clone AA292395.

[3048] SEQ ID NO: 3009 represents the cDNA sequence for clone AA292396.

[3049] SEQ ID NO: 3010 represents the cDNA sequence for clone AA292399.

[3050] SEQ ID NO: 3011 represents the cDNA sequence for clone AA292387.

[3051] SEQ ID NO: 3012 represents the cDNA sequence for clone AA292388.

[3052] SEQ ID NO: 3013 represents the cDNA sequence for clone AA292389.

[3053] SEQ ID NO: 3014 represents the cDNA sequence for clone AA292454.

[3054] SEQ ID NO: 3015 represents the cDNA sequence for clone AA292473.

[3055] SEQ ID NO: 3016 represents the cDNA sequence for clone AA292475.

[3056] SEQ ID NO: 3017 represents the cDNA sequence for clone AA292447.

[3057] SEQ ID NO: 3018 represents the cDNA sequence for clone AA292449.

[3058] SEQ ID NO: 3019 represents the cDNA sequence for clone AA292486.

[3059] SEQ ID NO: 3020 represents the cDNA sequence for clone AA292487.

[3060] SEQ ID NO: 3021 represents the cDNA sequence for clone AA292505.

[3061] SEQ ID NO: 3022 represents the cDNA sequence for clone AA292508.

[3062] SEQ ID NO: 3023 represents the cDNA sequence for clone AA292316.

[3063] SEQ ID NO: 3024 represents the cDNA sequence for clone AA292319.

[3064] SEQ ID NO: 3025 represents the cDNA sequence for clone AA292516.

[3065] SEQ ID NO: 3026 represents the cDNA sequence for clone AA292543.

[3066] SEQ ID NO: 3027 represents the cDNA sequence for clone AA292549.

[3067] SEQ ID NO: 3028 represents the cDNA sequence for clone AA292564.

[3068] SEQ ID NO: 3029 represents the cDNA sequence for clone AA292520.

[3069] SEQ ID NO: 3030 represents the cDNA sequence for clone AA292527.

[3070] SEQ ID NO: 3031 represents the cDNA sequence for clone AA292574.

[3071] SEQ ID NO: 3032 represents the cDNA sequence for clone AA292575.

[3072] SEQ ID NO: 3033 represents the cDNA sequence for clone AA292576.

[3073] SEQ ID NO: 3034 represents the cDNA sequence for clone AA292579.

[3074] SEQ ID NO: 3035 represents the cDNA sequence for clone AA292465.

[3075] SEQ ID NO: 3036 represents the cDNA sequence for clone AA292567.

[3076] SEQ ID NO: 3037 represents the cDNA sequence for clone AA292569.

[3077] SEQ ID NO: 3038 represents the cDNA sequence for clone AA292584.

[3078] SEQ ID NO: 3039 represents the cDNA sequence for clone AA292587.

[3079] SEQ ID NO: 3040 represents the cDNA sequence for clone AA292588.

[3080] SEQ ID NO: 3041 represents the cDNA sequence for clone AA292589.

[3081] SEQ ID NO: 3042 represents the cDNA sequence for clone AA292600.

[3082] SEQ ID NO: 3043 represents the cDNA sequence for clone AA292602.

[3083] SEQ ID NO: 3044 represents the cDNA sequence for clone AA292604.

[3084] SEQ ID NO: 3045 represents the cDNA sequence for clone AA292645.

[3085] SEQ ID NO: 3046 represents the cDNA sequence for clone AA292650.

[3086] SEQ ID NO: 3047 represents the cDNA sequence for clone AA292663.

[3087] SEQ ID NO: 3048 represents the cDNA sequence for clone AA292669.

[3088] SEQ ID NO: 3049 represents the cDNA sequence for clone AA292677.

[3089] SEQ ID NO: 3050 represents the cDNA sequence for clone AA292684.

[3090] SEQ ID NO: 3051 represents the cDNA sequence for clone AA292689.

[3091] SEQ ID NO: 3052 represents the cDNA sequence for clone AA293328.

[3092] SEQ ID NO: 3053 represents the cDNA sequence for clone AA293352.

[3093] SEQ ID NO: 3054 represents the cDNA sequence for clone AA293355.

[3094] SEQ ID NO: 3055 represents the cDNA sequence for clone AA293360.

[3095] SEQ ID NO: 3056 represents the cDNA sequence for clone AA293361.

[3096] SEQ ID NO: 3057 represents the cDNA sequence for clone AA293364.

[3097] SEQ ID NO: 3058 represents the cDNA sequence for clone AA293332.

[3098] SEQ ID NO: 3059 represents the cDNA sequence for clone AA293333.

[3099] SEQ ID NO: 3060 represents the cDNA sequence for clone AA293383.

[3100] SEQ ID NO: 3061 represents the cDNA sequence for clone AA293384.

[3101] SEQ ID NO: 3062 represents the cDNA sequence for clone AA293385.

[3102] SEQ ID NO: 3063 represents the cDNA sequence for clone AA293387.

[3103] SEQ ID NO: 3064 represents the cDNA sequence for clone AA293399.

[3104] SEQ ID NO: 3065 represents the cDNA sequence for clone AA293401.

[3105] SEQ ID NO: 3066 represents the cDNA sequence for clone AA293403.

[3106] SEQ ID NO: 3067 represents the cDNA sequence for clone AA293404.

[3107] SEQ ID NO: 3068 represents the cDNA sequence for clone AA293409.

[3108] SEQ ID NO: 3069 represents the cDNA sequence for clone AA293413.

[3109] SEQ ID NO: 3070 represents the cDNA sequence for clone AA293414.

[3110] SEQ ID NO: 3071 represents the cDNA sequence for clone AA293422.

[3111] SEQ ID NO: 3072 represents the cDNA sequence for clone AA293426.

[3112] SEQ ID NO: 3073 represents the cDNA sequence for clone AA293427.

[3113] SEQ ID NO: 3074 represents the cDNA sequence for clone AA293435.

[3114] SEQ ID NO: 3075 represents the cDNA sequence for clone AA293440.

[3115] SEQ ID NO: 3076 represents the cDNA sequence for clone AA293366.

[3116] SEQ ID NO: 3077 represents the cDNA sequence for clone AA293369.

[3117] SEQ ID NO: 3078 represents the cDNA sequence for clone AA292955.

[3118] SEQ ID NO: 3079 represents the cDNA sequence for clone AA292961.

[3119] SEQ ID NO: 3080 represents the cDNA sequence for clone AA292962.

[3120] SEQ ID NO: 3081 represents the cDNA sequence for clone AA292965.

[3121] SEQ ID NO: 3082 represents the cDNA sequence for clone AA292972.

[3122] SEQ ID NO: 3083 represents the cDNA sequence for clone AA292975.

[3123] SEQ ID NO: 3084 represents the cDNA sequence for clone AA292977.

[3124] SEQ ID NO: 3085 represents the cDNA sequence for clone AA292942.

[3125] SEQ ID NO: 3086 represents the cDNA sequence for clone AA293373.

[3126] SEQ ID NO: 3087 represents the cDNA sequence for clone AA293375.

[3127] SEQ ID NO: 3088 represents the cDNA sequence for clone AA293376.

[3128] SEQ ID NO: 3089 represents the cDNA sequence for clone AA293378.

[3129] SEQ ID NO: 3090 represents the cDNA sequence for clone AA293379.

[3130] SEQ ID NO: 3091 represents the cDNA sequence for clone AA293380.

[3131] SEQ ID NO: 3092 represents the cDNA sequence for clone AA293381.

[3132] SEQ ID NO: 3093 represents the cDNA sequence for clone AA292986.

[3133] SEQ ID NO: 3094 represents the cDNA sequence for clone AA292987.

[3134] SEQ ID NO: 3095 represents the cDNA sequence for clone AA292988.

[3135] SEQ ID NO: 3096 represents the cDNA sequence for clone AA292993.

[3136] SEQ ID NO: 3097 represents the cDNA sequence for clone AA292994.

[3137] SEQ ID NO: 3098 represents the cDNA sequence for clone AA292998.

[3138] SEQ ID NO: 3099 represents the cDNA sequence for clone AA293001.

[3139] SEQ ID NO: 3100 represents the cDNA sequence for clone AA293029.

[3140] SEQ ID NO: 3101 represents the cDNA sequence for clone AA293034.

[3141] SEQ ID NO: 3102 represents the cDNA sequence for clone AA293035.

[3142] SEQ ID NO: 3103 represents the cDNA sequence for clone AA293036.

[3143] SEQ ID NO: 3104 represents the cDNA sequence for clone AA293043.

[3144] SEQ ID NO: 3105 represents the cDNA sequence for clone AA293044.

[3145] SEQ ID NO: 3106 represents the cDNA sequence for clone AA293049.

[3146] SEQ ID NO: 3107 represents the cDNA sequence for clone AA293051.

[3147] SEQ ID NO: 3108 represents the cDNA sequence for clone AA293054.

[3148] SEQ ID NO: 3109 represents the cDNA sequence for clone AA292944.

[3149] SEQ ID NO: 3110 represents the cDNA sequence for clone AA292948.

[3150] SEQ ID NO: 3111 represents the cDNA sequence for clone AA293394.

[3151] SEQ ID NO: 3112 represents the cDNA sequence for clone AA293395.

[3152] SEQ ID NO: 3113 represents the cDNA sequence for clone AA293443.

[3153] SEQ ID NO: 3114 represents the cDNA sequence for clone AA293471.

[3154] SEQ ID NO: 3115 represents the cDNA sequence for clone AA293472.

[3155] SEQ ID NO: 3116 represents the cDNA sequence for clone AA293479.

[3156] SEQ ID NO: 3117 represents the cDNA sequence for clone AA293485.

[3157] SEQ ID NO: 3118 represents the cDNA sequence for clone AA293496.

[3158] SEQ ID NO: 3119 represents the cDNA sequence for clone AA293008.

[3159] SEQ ID NO: 3120 represents the cDNA sequence for clone AA293458.

[3160] SEQ ID NO: 3121 represents the cDNA sequence for clone AA293460.

[3161] SEQ ID NO: 3122 represents the cDNA sequence for clone AA293466.

[3162] SEQ ID NO: 3123 represents the cDNA sequence for clone AA293502.

[3163] SEQ ID NO: 3124 represents the cDNA sequence for clone AA293507.

[3164] SEQ ID NO: 3125 represents the cDNA sequence for clone AA293532.

[3165] SEQ ID NO: 3126 represents the cDNA sequence for clone AA293533.

[3166] SEQ ID NO: 3127 represents the cDNA sequence for clone AA293534.

[3167] SEQ ID NO: 3128 represents the cDNA sequence for clone AA293542.

[3168] SEQ ID NO: 3129 represents the cDNA sequence for clone AA293548.

[3169] SEQ ID NO: 3130 represents the cDNA sequence for clone AA293549.

[3170] SEQ ID NO: 3131 represents the cDNA sequence for clone AA293510.

[3171] SEQ ID NO: 3132 represents the cDNA sequence for clone AA293512.

[3172] SEQ ID NO: 3133 represents the cDNA sequence for clone AA293016.

[3173] SEQ ID NO: 3134 represents the cDNA sequence for clone AA293017.

[3174] SEQ ID NO: 3135 represents the cDNA sequence for clone AA293018.

[3175] SEQ ID NO: 3136 represents the cDNA sequence for clone AA293088.

[3176] SEQ ID NO: 3137 represents the cDNA sequence for clone AA293070.

[3177] SEQ ID NO: 3138 represents the cDNA sequence for clone AA293072.

[3178] SEQ ID NO: 3139 represents the cDNA sequence for clone AA293109.

[3179] SEQ ID NO: 3140 represents the cDNA sequence for clone AA293119.

[3180] SEQ ID NO: 3141 represents the cDNA sequence for clone AA293451.

[3181] SEQ ID NO: 3142 represents the cDNA sequence for clone AA293095.

[3182] SEQ ID NO: 3143 represents the cDNA sequence for clone AA293099.

[3183] SEQ ID NO: 3144 represents the cDNA sequence for clone AA293159.

[3184] SEQ ID NO: 3145 represents the cDNA sequence for clone AA293164.

[3185] SEQ ID NO: 3146 represents the cDNA sequence for clone AA293179.

[3186] SEQ ID NO: 3147 represents the cDNA sequence for clone AA293183.

[3187] SEQ ID NO: 3148 represents the cDNA sequence for clone AA293193.

[3188] SEQ ID NO: 3149 represents the cDNA sequence for clone AA293194.

[3189] SEQ ID NO: 3150 represents the cDNA sequence for clone AA293081.

[3190] SEQ ID NO: 3151 represents the cDNA sequence for clone AA293083.

[3191] SEQ ID NO: 3152 represents the cDNA sequence for clone AA293517.

[3192] SEQ ID NO: 3153 represents the cDNA sequence for clone AA293518.

[3193] SEQ ID NO: 3154 represents the cDNA sequence for clone AA293521.

[3194] SEQ ID NO: 3155 represents the cDNA sequence for clone AA293523.

[3195] SEQ ID NO: 3156 represents the cDNA sequence for clone AA293570.

[3196] SEQ ID NO: 3157 represents the cDNA sequence for clone AA293574.

[3197] SEQ ID NO: 3158 represents the cDNA sequence for clone AA293593.

[3198] SEQ ID NO: 3159 represents the cDNA sequence for clone AA293595.

[3199] SEQ ID NO: 3160 represents the cDNA sequence for clone AA293596.

[3200] SEQ ID NO: 3161 represents the cDNA sequence for clone AA293597.

[3201] SEQ ID NO: 3162 represents the cDNA sequence for clone AA293599.

[3202] SEQ ID NO: 3163 represents the cDNA sequence for clone AA293600.

[3203] SEQ ID NO: 3164 represents the cDNA sequence for clone AA293601.

[3204] SEQ ID NO: 3165 represents the cDNA sequence for clone AA293628.

[3205] SEQ ID NO: 3166 represents the cDNA sequence for clone AA293632.

[3206] SEQ ID NO: 3167 represents the cDNA sequence for clone AA293138.

[3207] SEQ ID NO: 3168 represents the cDNA sequence for clone AA293145.

[3208] SEQ ID NO: 3169 represents the cDNA sequence for clone AA293147.

[3209] SEQ ID NO: 3170 represents the cDNA sequence for clone AA293197.

[3210] SEQ ID NO: 3171 represents the cDNA sequence for clone AA293200.

[3211] SEQ ID NO: 3172 represents the cDNA sequence for clone AA293202.

[3212] SEQ ID NO: 3173 represents the cDNA sequence for clone AA293221.

[3213] SEQ ID NO: 3174 represents the cDNA sequence for clone AA293222.

[3214] SEQ ID NO: 3175 represents the cDNA sequence for clone AA293223.

[3215] SEQ ID NO: 3176 represents the cDNA sequence for clone AA293226.

[3216] SEQ ID NO: 3177 represents the cDNA sequence for clone AA293228.

[3217] SEQ ID NO: 3178 represents the cDNA sequence for clone AA293240.

[3218] SEQ ID NO: 3179 represents the cDNA sequence for clone AA293242.

[3219] SEQ ID NO: 3180 represents the cDNA sequence for clone AA293243.

[3220] SEQ ID NO: 3181 represents the cDNA sequence for clone AA293248.

[3221] SEQ ID NO: 3182 represents the cDNA sequence for clone AA293249.

[3222] SEQ ID NO: 3183 represents the cDNA sequence for clone AA293252.

[3223] SEQ ID NO: 3184 represents the cDNA sequence for clone AA293254.

[3224] SEQ ID NO: 3185 represents the cDNA sequence for clone AA293257.

[3225] SEQ ID NO: 3186 represents the cDNA sequence for clone AA293258.

[3226] SEQ ID NO: 3187 represents the cDNA sequence for clone AA293219.

[3227] SEQ ID NO: 3188 represents the cDNA sequence for clone AA293295.

[3228] SEQ ID NO: 3189 represents the cDNA sequence for clone AA293302.

[3229] SEQ ID NO: 3190 represents the cDNA sequence for clone AA293304.

[3230] SEQ ID NO: 3191 represents the cDNA sequence for clone AA293320.

[3231] SEQ ID NO: 3192 represents the cDNA sequence for clone AA293326.

[3232] SEQ ID NO: 3193 represents the cDNA sequence for clone AA293270.

[3233] SEQ ID NO: 3194 represents the cDNA sequence for clone AA293275.

[3234] SEQ ID NO: 3195 represents the cDNA sequence for clone AA293662.

[3235] SEQ ID NO: 3196 represents the cDNA sequence for clone AA293673.

[3236] SEQ ID NO: 3197 represents the cDNA sequence for clone AA293678.

[3237] SEQ ID NO: 3198 represents the cDNA sequence for clone AA293685.

[3238] SEQ ID NO: 3199 represents the cDNA sequence for clone AA293689.

[3239] SEQ ID NO: 3200 represents the cDNA sequence for clone AA293691.

[3240] SEQ ID NO: 3201 represents the cDNA sequence for clone AA293700.

[3241] SEQ ID NO: 3202 represents the cDNA sequence for clone AA293205.

[3242] SEQ ID NO: 3203 represents the cDNA sequence for clone AA293655.

[3243] SEQ ID NO: 3204 represents the cDNA sequence for clone AA293656.

[3244] SEQ ID NO: 3205 represents the cDNA sequence for clone AA293658.

[3245] SEQ ID NO: 3206 represents the cDNA sequence for clone AA293659.

[3246] SEQ ID NO: 3207 represents the cDNA sequence for clone AA293727.

[3247] SEQ ID NO: 3208 represents the cDNA sequence for clone AA293737.

[3248] SEQ ID NO: 3209 represents the cDNA sequence for clone AA293742.

[3249] SEQ ID NO: 3210 represents the cDNA sequence for clone AA293749.

[3250] SEQ ID NO: 3211 represents the cDNA sequence for clone AA293753.

[3251] SEQ ID NO: 3212 represents the cDNA sequence for clone AA293761.

[3252] SEQ ID NO: 3213 represents the cDNA sequence for clone AA293650.

[3253] SEQ ID NO: 3214 represents the cDNA sequence for clone AA293280.

[3254] SEQ ID NO: 3215 represents the cDNA sequence for clone AA292730.

[3255] SEQ ID NO: 3216 represents the cDNA sequence for clone AA292736.

[3256] SEQ ID NO: 3217 represents the cDNA sequence for clone AA292759.

[3257] SEQ ID NO: 3218 represents the cDNA sequence for clone AA292765.

[3258] SEQ ID NO: 3219 represents the cDNA sequence for clone AA292770.

[3259] SEQ ID NO: 3220 represents the cDNA sequence for clone AA292778.

[3260] SEQ ID NO: 3221 represents the cDNA sequence for clone AA292779.

[3261] SEQ ID NO: 3222 represents the cDNA sequence for clone AA292789.

[3262] SEQ ID NO: 3223 represents the cDNA sequence for clone AA292747.

[3263] SEQ ID NO: 3224 represents the cDNA sequence for clone AA292868.

[3264] SEQ ID NO: 3225 represents the cDNA sequence for clone AA292869.

[3265] SEQ ID NO: 3226 represents the cDNA sequence for clone AA293771.

[3266] SEQ ID NO: 3227 represents the cDNA sequence for clone AA293772.

[3267] SEQ ID NO: 3228 represents the cDNA sequence for clone AA293773.

[3268] SEQ ID NO: 3229 represents the cDNA sequence for clone AA293775.

[3269] SEQ ID NO: 3230 represents the cDNA sequence for clone AA293795.

[3270] SEQ ID NO: 3231 represents the cDNA sequence for clone AA394039.

[3271] SEQ ID NO: 3232 represents the cDNA sequence for clone AA394066.

[3272] SEQ ID NO: 3233 represents the cDNA sequence for clone AA394069.

[3273] SEQ ID NO: 3234 represents the cDNA sequence for clone AA394040.

[3274] SEQ ID NO: 3235 represents the cDNA sequence for clone AA394041.

[3275] SEQ ID NO: 3236 represents the cDNA sequence for clone AA394044.

[3276] SEQ ID NO: 3237 represents the cDNA sequence for clone AA394084.

[3277] SEQ ID NO: 3238 represents the cDNA sequence for clone AA394086.

[3278] SEQ ID NO: 3239 represents the cDNA sequence for clone AA394090.

[3279] SEQ ID NO: 3240 represents the cDNA sequence for clone AA394091.

[3280] SEQ ID NO: 3241 represents the cDNA sequence for clone AA394092.

[3281] SEQ ID NO: 3242 represents the cDNA sequence for clone AA394133.

[3282] SEQ ID NO: 3243 represents the cDNA sequence for clone AA394135.

[3283] SEQ ID NO: 3244 represents the cDNA sequence for clone AA394141.

[3284] SEQ ID NO: 3245 represents the cDNA sequence for clone AA394145.

[3285] SEQ ID NO: 3246 represents the cDNA sequence for clone AA394147.

[3286] SEQ ID NO: 3247 represents the cDNA sequence for clone AA394108.

[3287] SEQ ID NO: 3248 represents the cDNA sequence for clone AA394166.

[3288] SEQ ID NO: 3249 represents the cDNA sequence for clone AA394124.

[3289] SEQ ID NO: 3250 represents the cDNA sequence for clone AA394052.

[3290] SEQ ID NO: 3251 represents the cDNA sequence for clone AA394056.

[3291] SEQ ID NO: 3252 represents the cDNA sequence for clone AA394170.

[3292] SEQ ID NO: 3253 represents the cDNA sequence for clone AA394174.

[3293] SEQ ID NO: 3254 represents the cDNA sequence for clone AA394180.

[3294] SEQ ID NO: 3255 represents the cDNA sequence for clone AA394182.

[3295] SEQ ID NO: 3256 represents the cDNA sequence for clone AA394233.

[3296] SEQ ID NO: 3257 represents the cDNA sequence for clone AA394236.

[3297] SEQ ID NO: 3258 represents the cDNA sequence for clone AA393998.

[3298] SEQ ID NO: 3259 represents the cDNA sequence for clone AA393999.

[3299] SEQ ID NO: 3260 represents the cDNA sequence for clone AA394003.

[3300] SEQ ID NO: 3261 represents the cDNA sequence for clone AA394195.

[3301] SEQ ID NO: 3262 represents the cDNA sequence for clone AA394197.

[3302] SEQ ID NO: 3263 represents the cDNA sequence for clone AA394200.

[3303] SEQ ID NO: 3264 represents the cDNA sequence for clone AA394241.

[3304] SEQ ID NO: 3265 represents the cDNA sequence for clone AA394251.

[3305] SEQ ID NO: 3266 represents the cDNA sequence for clone AA394259.

[3306] SEQ ID NO: 3267 represents the cDNA sequence for clone AA394261.

[3307] SEQ ID NO: 3268 represents the cDNA sequence for clone AA394264.

[3308] SEQ ID NO: 3269 represents the cDNA sequence for clone AA394268.

[3309] SEQ ID NO: 3270 represents the cDNA sequence for clone AA394276.

[3310] SEQ ID NO: 3271 represents the cDNA sequence for clone AA394278.

[3311] SEQ ID NO: 3272 represents the cDNA sequence for clone AA394281.

[3312] SEQ ID NO: 3273 represents the cDNA sequence for clone AA397815.

[3313] SEQ ID NO: 3274 represents the cDNA sequence for clone AA397821.

[3314] SEQ ID NO: 3275 represents the cDNA sequence for clone AA397822.

[3315] SEQ ID NO: 3276 represents the cDNA sequence for clone AA397823.

[3316] SEQ ID NO: 3277 represents the cDNA sequence for clone AA397827.

[3317] SEQ ID NO: 3278 represents the cDNA sequence for clone AA398314.

[3318] SEQ ID NO: 3279 represents the cDNA sequence for clone AA398451.

[3319] SEQ ID NO: 3280 represents the cDNA sequence for clone AA398453.

[3320] SEQ ID NO: 3281 represents the cDNA sequence for clone AA398523.

[3321] SEQ ID NO: 3282 represents the cDNA sequence for clone AA398579.

[3322] SEQ ID NO: 3283 represents the cDNA sequence for clone AA298089.

[3323] SEQ ID NO: 3284 represents the cDNA sequence for clone AA297920.

[3324] SEQ ID NO: 3285 represents the cDNA sequence for clone AA297922.

[3325] SEQ ID NO: 3286 represents the cDNA sequence for clone AA298143.

[3326] SEQ ID NO: 3287 represents the cDNA sequence for clone AA362635.

[3327] SEQ ID NO: 3288 represents the cDNA sequence for clone AA362636.

[3328] SEQ ID NO: 3289 represents the cDNA sequence for clone AA362637.

[3329] SEQ ID NO: 3290 represents the cDNA sequence for clone AA362639.

[3330] SEQ ID NO: 3291 represents the cDNA sequence for clone AA362641.

[3331] SEQ ID NO: 3292 represents the cDNA sequence for clone AA362693.

[3332] SEQ ID NO: 3293 represents the cDNA sequence for clone AA362694.

[3333] SEQ ID NO: 3294 represents the cDNA sequence for clone AA362696.

[3334] SEQ ID NO: 3295 represents the cDNA sequence for clone AA362697.

[3335] SEQ ID NO: 3296 represents the cDNA sequence for clone AA362698.

[3336] SEQ ID NO: 3297 represents the cDNA sequence for clone AA362707.

[3337] SEQ ID NO: 3298 represents the cDNA sequence for clone AA362710.

[3338] SEQ ID NO: 3299 represents the cDNA sequence for clone AA362711.

[3339] SEQ ID NO: 3300 represents the cDNA sequence for clone AA362733.

[3340] SEQ ID NO: 3301 represents the cDNA sequence for clone AA362734.

[3341] SEQ ID NO: 3302 represents the cDNA sequence for clone AA362736.

[3342] SEQ ID NO: 3303 represents the cDNA sequence for clone AA362740.

[3343] SEQ ID NO: 3304 represents the cDNA sequence for clone AA362742.

[3344] SEQ ID NO: 3305 represents the cDNA sequence for clone AA362743.

[3345] SEQ ID NO: 3306 represents the cDNA sequence for clone AA362744.

[3346] SEQ ID NO: 3307 represents the cDNA sequence for clone AA362745.

[3347] SEQ ID NO: 3308 represents the cDNA sequence for clone AA362747.

[3348] SEQ ID NO: 3309 represents the cDNA sequence for clone AA362748.

[3349] SEQ ID NO: 3310 represents the cDNA sequence for clone AA362750.

[3350] SEQ ID NO: 3311 represents the cDNA sequence for clone AA362751.

[3351] SEQ ID NO: 3312 represents the cDNA sequence for clone AA362753.

[3352] SEQ ID NO: 3313 represents the cDNA sequence for clone AA362754.

[3353] SEQ ID NO: 3314 represents the cDNA sequence for clone AA362759.

[3354] SEQ ID NO: 3315 represents the cDNA sequence for clone AA362761.

[3355] SEQ ID NO: 3316 represents the cDNA sequence for clone AA362762.

[3356] SEQ ID NO: 3317 represents the cDNA sequence for clone AA362763.

[3357] SEQ ID NO: 3318 represents the cDNA sequence for clone AA362591.

[3358] SEQ ID NO: 3319 represents the cDNA sequence for clone AA362593.

[3359] SEQ ID NO: 3320 represents the cDNA sequence for clone AA362595.

[3360] SEQ ID NO: 3321 represents the cDNA sequence for clone AA362596.

[3361] SEQ ID NO: 3322 represents the cDNA sequence for clone AA362598.

[3362] SEQ ID NO: 3323 represents the cDNA sequence for clone AA362723.

[3363] SEQ ID NO: 3324 represents the cDNA sequence for clone AA362726.

[3364] SEQ ID NO: 3325 represents the cDNA sequence for clone AA362728.

[3365] SEQ ID NO: 3326 represents the cDNA sequence for clone AA362732.

[3366] SEQ ID NO: 3327 represents the cDNA sequence for clone AA362764.

[3367] SEQ ID NO: 3328 represents the cDNA sequence for clone AA362766.

[3368] SEQ ID NO: 3329 represents the cDNA sequence for clone AA362767.

[3369] SEQ ID NO: 3330 represents the cDNA sequence for clone AA362770.

[3370] SEQ ID NO: 3331 represents the cDNA sequence for clone AA362773.

[3371] SEQ ID NO: 3332 represents the cDNA sequence for clone AA362774.

[3372] SEQ ID NO: 3333 represents the cDNA sequence for clone AA362796.

[3373] SEQ ID NO: 3334 represents the cDNA sequence for clone AA362797.

[3374] SEQ ID NO: 3335 represents the cDNA sequence for clone AA362800.

[3375] SEQ ID NO: 3336 represents the cDNA sequence for clone AA362802.

[3376] SEQ ID NO: 3337 represents the cDNA sequence for clone AA362806.

[3377] SEQ ID NO: 3338 represents the cDNA sequence for clone AA362808.

[3378] SEQ ID NO: 3339 represents the cDNA sequence for clone AA362809.

[3379] SEQ ID NO: 3340 represents the cDNA sequence for clone AA362810.

[3380] SEQ ID NO: 3341 represents the cDNA sequence for clone AA362811.

[3381] SEQ ID NO: 3342 represents the cDNA sequence for clone AA362812.

[3382] SEQ ID NO: 3343 represents the cDNA sequence for clone AA362816.

[3383] SEQ ID NO: 3344 represents the cDNA sequence for clone AA362818.

[3384] SEQ ID NO: 3345 represents the cDNA sequence for clone AA362821.

[3385] SEQ ID NO: 3346 represents the cDNA sequence for clone AA362822.

[3386] SEQ ID NO: 3347 represents the cDNA sequence for clone AA362824.

[3387] SEQ ID NO: 3348 represents the cDNA sequence for clone AA362826.

[3388] SEQ ID NO: 3349 represents the cDNA sequence for clone AA362830.

[3389] SEQ ID NO: 3350 represents the cDNA sequence for clone AA362831.

[3390] SEQ ID NO: 3351 represents the cDNA sequence for clone AA362832.

[3391] SEQ ID NO: 3352 represents the cDNA sequence for clone AA362834.

[3392] SEQ ID NO: 3353 represents the cDNA sequence for clone AA362840.

[3393] SEQ ID NO: 3354 represents the cDNA sequence for clone AA362841.

[3394] SEQ ID NO: 3355 represents the cDNA sequence for clone AA362842.

[3395] SEQ ID NO: 3356 represents the cDNA sequence for clone AA362844.

[3396] SEQ ID NO: 3357 represents the cDNA sequence for clone AA362845.

[3397] SEQ ID NO: 3358 represents the cDNA sequence for clone AA362775.

[3398] SEQ ID NO: 3359 represents the cDNA sequence for clone AA362778.

[3399] SEQ ID NO: 3360 represents the cDNA sequence for clone AA362780.

[3400] SEQ ID NO: 3361 represents the cDNA sequence for clone AA362781.

[3401] SEQ ID NO: 3362 represents the cDNA sequence for clone AA362782.

[3402] SEQ ID NO: 3363 represents the cDNA sequence for clone AA362784.

[3403] SEQ ID NO: 3364 represents the cDNA sequence for clone AA362785.

[3404] SEQ ID NO: 3365 represents the cDNA sequence for clone AA362627.

[3405] SEQ ID NO: 3366 represents the cDNA sequence for clone AA362629.

[3406] SEQ ID NO: 3367 represents the cDNA sequence for clone AA362849.

[3407] SEQ ID NO: 3368 represents the cDNA sequence for clone AA362850.

[3408] SEQ ID NO: 3369 represents the cDNA sequence for clone AA362851.

[3409] SEQ ID NO: 3370 represents the cDNA sequence for clone AA362854.

[3410] SEQ ID NO: 3371 represents the cDNA sequence for clone AA362856.

[3411] SEQ ID NO: 3372 represents the cDNA sequence for clone AA362879.

[3412] SEQ ID NO: 3373 represents the cDNA sequence for clone AA362881.

[3413] SEQ ID NO: 3374 represents the cDNA sequence for clone AA362884.

[3414] SEQ ID NO: 3375 represents the cDNA sequence for clone AA362887.

[3415] SEQ ID NO: 3376 represents the cDNA sequence for clone AA362889.

[3416] SEQ ID NO: 3377 represents the cDNA sequence for clone AA362892.

[3417] SEQ ID NO: 3378 represents the cDNA sequence for clone AA362895.

[3418] SEQ ID NO: 3379 represents the cDNA sequence for clone AA362898.

[3419] SEQ ID NO: 3380 represents the cDNA sequence for clone AA362899.

[3420] SEQ ID NO: 3381 represents the cDNA sequence for clone AA362903.

[3421] SEQ ID NO: 3382 represents the cDNA sequence for clone AA362906.

[3422] SEQ ID NO: 3383 represents the cDNA sequence for clone AA362907.

[3423] SEQ ID NO: 3384 represents the cDNA sequence for clone AA362908.

[3424] SEQ ID NO: 3385 represents the cDNA sequence for clone AA362910.

[3425] SEQ ID NO: 3386 represents the cDNA sequence for clone AA362911.

[3426] SEQ ID NO: 3387 represents the cDNA sequence for clone AA362912.

[3427] SEQ ID NO: 3388 represents the cDNA sequence for clone AA362913.

[3428] SEQ ID NO: 3389 represents the cDNA sequence for clone AA362918.

[3429] SEQ ID NO: 3390 represents the cDNA sequence for clone AA362919.

[3430] SEQ ID NO: 3391 represents the cDNA sequence for clone AA362921.

[3431] SEQ ID NO: 3392 represents the cDNA sequence for clone AA362924.

[3432] SEQ ID NO: 3393 represents the cDNA sequence for clone AA362927.

[3433] SEQ ID NO: 3394 represents the cDNA sequence for clone AA362928.

[3434] SEQ ID NO: 3395 represents the cDNA sequence for clone AA362929.

[3435] SEQ ID NO: 3396 represents the cDNA sequence for clone AA362930.

[3436] SEQ ID NO: 3397 represents the cDNA sequence for clone AA362931.

[3437] SEQ ID NO: 3398 represents the cDNA sequence for clone AA362714.

[3438] SEQ ID NO: 3399 represents the cDNA sequence for clone AA362717.

[3439] SEQ ID NO: 3400 represents the cDNA sequence for clone AA362719.

[3440] SEQ ID NO: 3401 represents the cDNA sequence for clone AA362871.

[3441] SEQ ID NO: 3402 represents the cDNA sequence for clone AA362872.

[3442] SEQ ID NO: 3403 represents the cDNA sequence for clone AA362876.

[3443] SEQ ID NO: 3404 represents the cDNA sequence for clone AA362877.

[3444] SEQ ID NO: 3405 represents the cDNA sequence for clone AA362878.

[3445] SEQ ID NO: 3406 represents the cDNA sequence for clone AA362934.

[3446] SEQ ID NO: 3407 represents the cDNA sequence for clone AA362937.

[3447] SEQ ID NO: 3408 represents the cDNA sequence for clone AA362941.

[3448] SEQ ID NO: 3409 represents the cDNA sequence for clone AA362942.

[3449] SEQ ID NO: 3410 represents the cDNA sequence for clone AA362968.

[3450] SEQ ID NO: 3411 represents the cDNA sequence for clone AA362969.

[3451] SEQ ID NO: 3412 represents the cDNA sequence for clone AA362970.

[3452] SEQ ID NO: 3413 represents the cDNA sequence for clone AA362971.

[3453] SEQ ID NO: 3414 represents the cDNA sequence for clone AA362972.

[3454] SEQ ID NO: 3415 represents the cDNA sequence for clone AA362973.

[3455] SEQ ID NO: 3416 represents the cDNA sequence for clone AA362985.

[3456] SEQ ID NO: 3417 represents the cDNA sequence for clone AA362988.

[3457] SEQ ID NO: 3418 represents the cDNA sequence for clone AA362989.

[3458] SEQ ID NO: 3419 represents the cDNA sequence for clone AA362993.

[3459] SEQ ID NO: 3420 represents the cDNA sequence for clone AA362994.

[3460] SEQ ID NO: 3421 represents the cDNA sequence for clone AA363001.

[3461] SEQ ID NO: 3422 represents the cDNA sequence for clone AA363006.

[3462] SEQ ID NO: 3423 represents the cDNA sequence for clone AA363009.

[3463] SEQ ID NO: 3424 represents the cDNA sequence for clone AA363010.

[3464] SEQ ID NO: 3425 represents the cDNA sequence for clone AA363011.

[3465] SEQ ID NO: 3426 represents the cDNA sequence for clone AA363012.

[3466] SEQ ID NO: 3427 represents the cDNA sequence for clone AA363013.

[3467] SEQ ID NO: 3428 represents the cDNA sequence for clone AA363014.

[3468] SEQ ID NO: 3429 represents the cDNA sequence for clone AA362786.

[3469] SEQ ID NO: 3430 represents the cDNA sequence for clone AA362788.

[3470] SEQ ID NO: 3431 represents the cDNA sequence for clone AA362790.

[3471] SEQ ID NO: 3432 represents the cDNA sequence for clone AA362791.

[3472] SEQ ID NO: 3433 represents the cDNA sequence for clone AA362961.

[3473] SEQ ID NO: 3434 represents the cDNA sequence for clone AA362962.

[3474] SEQ ID NO: 3435 represents the cDNA sequence for clone AA362963.

[3475] SEQ ID NO: 3436 represents the cDNA sequence for clone AA363023.

[3476] SEQ ID NO: 3437 represents the cDNA sequence for clone AA363048.

[3477] SEQ ID NO: 3438 represents the cDNA sequence for clone AA363050.

[3478] SEQ ID NO: 3439 represents the cDNA sequence for clone AA363052.

[3479] SEQ ID NO: 3440 represents the cDNA sequence for clone AA363053.

[3480] SEQ ID NO: 3441 represents the cDNA sequence for clone AA363055.

[3481] SEQ ID NO: 3442 represents the cDNA sequence for clone AA363062.

[3482] SEQ ID NO: 3443 represents the cDNA sequence for clone AA363064.

[3483] SEQ ID NO: 3444 represents the cDNA sequence for clone AA363070.

[3484] SEQ ID NO: 3445 represents the cDNA sequence for clone AA363073.

[3485] SEQ ID NO: 3446 represents the cDNA sequence for clone AA363074.

[3486] SEQ ID NO: 3447 represents the cDNA sequence for clone AA363075.

[3487] SEQ ID NO: 3448 represents the cDNA sequence for clone AA363076.

[3488] SEQ ID NO: 3449 represents the cDNA sequence for clone AA363082.

[3489] SEQ ID NO: 3450 represents the cDNA sequence for clone AA363089.

[3490] SEQ ID NO: 3451 represents the cDNA sequence for clone AA363092.

[3491] SEQ ID NO: 3452 represents the cDNA sequence for clone AA362858.

[3492] SEQ ID NO: 3453 represents the cDNA sequence for clone AA362859.

[3493] SEQ ID NO: 3454 represents the cDNA sequence for clone AA362862.

[3494] SEQ ID NO: 3455 represents the cDNA sequence for clone AA362863.

[3495] SEQ ID NO: 3456 represents the cDNA sequence for clone AA362865.

[3496] SEQ ID NO: 3457 represents the cDNA sequence for clone AA362866.

[3497] SEQ ID NO: 3458 represents the cDNA sequence for clone AA362867.

[3498] SEQ ID NO: 3459 represents the cDNA sequence for clone AA363041.

[3499] SEQ ID NO: 3460 represents the cDNA sequence for clone AA363042.

[3500] SEQ ID NO: 3461 represents the cDNA sequence for clone AA363043.

[3501] SEQ ID NO: 3462 represents the cDNA sequence for clone AA363044.

[3502] SEQ ID NO: 3463 represents the cDNA sequence for clone AA363046.

[3503] SEQ ID NO: 3464 represents the cDNA sequence for clone AA363099.

[3504] SEQ ID NO: 3465 represents the cDNA sequence for clone AA363104.

[3505] SEQ ID NO: 3466 represents the cDNA sequence for clone AA363105.

[3506] SEQ ID NO: 3467 represents the cDNA sequence for clone AA363106.

[3507] SEQ ID NO: 3468 represents the cDNA sequence for clone AA363107.

[3508] SEQ ID NO: 3469 represents the cDNA sequence for clone AA363131.

[3509] SEQ ID NO: 3470 represents the cDNA sequence for clone AA363134.

[3510] SEQ ID NO: 3471 represents the cDNA sequence for clone AA363136.

[3511] SEQ ID NO: 3472 represents the cDNA sequence for clone AA363137.

[3512] SEQ ID NO: 3473 represents the cDNA sequence for clone AA363139.

[3513] SEQ ID NO: 3474 represents the cDNA sequence for clone AA363141.

[3514] SEQ ID NO: 3475 represents the cDNA sequence for clone AA363146.

[3515] SEQ ID NO: 3476 represents the cDNA sequence for clone AA363148.

[3516] SEQ ID NO: 3477 represents the cDNA sequence for clone AA363150.

[3517] SEQ ID NO: 3478 represents the cDNA sequence for clone AA363151.

[3518] SEQ ID NO: 3479 represents the cDNA sequence for clone AA363152.

[3519] SEQ ID NO: 3480 represents the cDNA sequence for clone AA363154.

[3520] SEQ ID NO: 3481 represents the cDNA sequence for clone AA363155.

[3521] SEQ ID NO: 3482 represents the cDNA sequence for clone AA363156.

[3522] SEQ ID NO: 3483 represents the cDNA sequence for clone AA363160.

[3523] SEQ ID NO: 3484 represents the cDNA sequence for clone AA363161.

[3524] SEQ ID NO: 3485 represents the cDNA sequence for clone AA363164.

[3525] SEQ ID NO: 3486 represents the cDNA sequence for clone AA363165.

[3526] SEQ ID NO: 3487 represents the cDNA sequence for clone AA363166.

[3527] SEQ ID NO: 3488 represents the cDNA sequence for clone AA363169.

[3528] SEQ ID NO: 3489 represents the cDNA sequence for clone AA363171.

[3529] SEQ ID NO: 3490 represents the cDNA sequence for clone AA363172.

[3530] SEQ ID NO: 3491 represents the cDNA sequence for clone AA363174.

[3531] SEQ ID NO: 3492 represents the cDNA sequence for clone AA363177.

[3532] SEQ ID NO: 3493 represents the cDNA sequence for clone AA363179.

[3533] SEQ ID NO: 3494 represents the cDNA sequence for clone AA363181.

[3534] SEQ ID NO: 3495 represents the cDNA sequence for clone AA363183.

[3535] SEQ ID NO: 3496 represents the cDNA sequence for clone AA362946.

[3536] SEQ ID NO: 3497 represents the cDNA sequence for clone AA362947.

[3537] SEQ ID NO: 3498 represents the cDNA sequence for clone AA362949.

[3538] SEQ ID NO: 3499 represents the cDNA sequence for clone AA362950.

[3539] SEQ ID NO: 3500 represents the cDNA sequence for clone AA362951.

[3540] SEQ ID NO: 3501 represents the cDNA sequence for clone AA362953.

[3541] SEQ ID NO: 3502 represents the cDNA sequence for clone AA363119.

[3542] SEQ ID NO: 3503 represents the cDNA sequence for clone AA363120.

[3543] SEQ ID NO: 3504 represents the cDNA sequence for clone AA363121.

[3544] SEQ ID NO: 3505 represents the cDNA sequence for clone AA363122.

[3545] SEQ ID NO: 3506 represents the cDNA sequence for clone AA363123.

[3546] SEQ ID NO: 3507 represents the cDNA sequence for clone AA363124.

[3547] SEQ ID NO: 3508 represents the cDNA sequence for clone AA363127.

[3548] SEQ ID NO: 3509 represents the cDNA sequence for clone AA363129.

[3549] SEQ ID NO: 3510 represents the cDNA sequence for clone AA363186.

[3550] SEQ ID NO: 3511 represents the cDNA sequence for clone AA363187.

[3551] SEQ ID NO: 3512 represents the cDNA sequence for clone AA363190.

[3552] SEQ ID NO: 3513 represents the cDNA sequence for clone AA363215.

[3553] SEQ ID NO: 3514 represents the cDNA sequence for clone AA363217.

[3554] SEQ ID NO: 3515 represents the cDNA sequence for clone AA363221.

[3555] SEQ ID NO: 3516 represents the cDNA sequence for clone AA363245.

[3556] SEQ ID NO: 3517 represents the cDNA sequence for clone AA363246.

[3557] SEQ ID NO: 3518 represents the cDNA sequence for clone AA363247.

[3558] SEQ ID NO: 3519 represents the cDNA sequence for clone AA363250.

[3559] SEQ ID NO: 3520 represents the cDNA sequence for clone AA363251.

[3560] SEQ ID NO: 3521 represents the cDNA sequence for clone AA363259.

[3561] SEQ ID NO: 3522 represents the cDNA sequence for clone AA363260.

[3562] SEQ ID NO: 3523 represents the cDNA sequence for clone AA363261.

[3563] SEQ ID NO: 3524 represents the cDNA sequence for clone AA363028.

[3564] SEQ ID NO: 3525 represents the cDNA sequence for clone AA363033.

[3565] SEQ ID NO: 3526 represents the cDNA sequence for clone AA363225.

[3566] SEQ ID NO: 3527 represents the cDNA sequence for clone AA363226.

[3567] SEQ ID NO: 3528 represents the cDNA sequence for clone AA363268.

[3568] SEQ ID NO: 3529 represents the cDNA sequence for clone AA363270.

[3569] SEQ ID NO: 3530 represents the cDNA sequence for clone AA363271.

[3570] SEQ ID NO: 3531 represents the cDNA sequence for clone AA363307.

[3571] SEQ ID NO: 3532 represents the cDNA sequence for clone AA363308.

[3572] SEQ ID NO: 3533 represents the cDNA sequence for clone AA363312.

[3573] SEQ ID NO: 3534 represents the cDNA sequence for clone AA363315.

[3574] SEQ ID NO: 3535 represents the cDNA sequence for clone AA363324.

[3575] SEQ ID NO: 3536 represents the cDNA sequence for clone AA363327.

[3576] SEQ ID NO: 3537 represents the cDNA sequence for clone AA363331.

[3577] SEQ ID NO: 3538 represents the cDNA sequence for clone AA363334.

[3578] SEQ ID NO: 3539 represents the cDNA sequence for clone AA363342.

[3579] SEQ ID NO: 3540 represents the cDNA sequence for clone AA363345.

[3580] SEQ ID NO: 3541 represents the cDNA sequence for clone AA363113.

[3581] SEQ ID NO: 3542 represents the cDNA sequence for clone AA363206.

[3582] SEQ ID NO: 3543 represents the cDNA sequence for clone AA363207.

[3583] SEQ ID NO: 3544 represents the cDNA sequence for clone AA363209.

[3584] SEQ ID NO: 3545 represents the cDNA sequence for clone AA363210.

[3585] SEQ ID NO: 3546 represents the cDNA sequence for clone AA363214.

[3586] SEQ ID NO: 3547 represents the cDNA sequence for clone AA363347.

[3587] SEQ ID NO: 3548 represents the cDNA sequence for clone AA363348.

[3588] SEQ ID NO: 3549 represents the cDNA sequence for clone AA363349.

[3589] SEQ ID NO: 3550 represents the cDNA sequence for clone AA363351.

[3590] SEQ ID NO: 3551 represents the cDNA sequence for clone AA363353.

[3591] SEQ ID NO: 3552 represents the cDNA sequence for clone AA363354.

[3592] SEQ ID NO: 3553 represents the cDNA sequence for clone AA363357.

[3593] SEQ ID NO: 3554 represents the cDNA sequence for clone AA363380.

[3594] SEQ ID NO: 3555 represents the cDNA sequence for clone AA363382.

[3595] SEQ ID NO: 3556 represents the cDNA sequence for clone AA363389.

[3596] SEQ ID NO: 3557 represents the cDNA sequence for clone AA363393.

[3597] SEQ ID NO: 3558 represents the cDNA sequence for clone AA363396.

[3598] SEQ ID NO: 3559 represents the cDNA sequence for clone AA363400.

[3599] SEQ ID NO: 3560 represents the cDNA sequence for clone AA363401.

[3600] SEQ ID NO: 3561 represents the cDNA sequence for clone AA363402.

[3601] SEQ ID NO: 3562 represents the cDNA sequence for clone AA363403.

[3602] SEQ ID NO: 3563 represents the cDNA sequence for clone AA363405.

[3603] SEQ ID NO: 3564 represents the cDNA sequence for clone AA363406.

[3604] SEQ ID NO: 3565 represents the cDNA sequence for clone AA363407.

[3605] SEQ ID NO: 3566 represents the cDNA sequence for clone AA363410.

[3606] SEQ ID NO: 3567 represents the cDNA sequence for clone AA363411.

[3607] SEQ ID NO: 3568 represents the cDNA sequence for clone AA363413.

[3608] SEQ ID NO: 3569 represents the cDNA sequence for clone AA363416.

[3609] SEQ ID NO: 3570 represents the cDNA sequence for clone AA363417.

[3610] SEQ ID NO: 3571 represents the cDNA sequence for clone AA363365.

[3611] SEQ ID NO: 3572 represents the cDNA sequence for clone AA363366.

[3612] SEQ ID NO: 3573 represents the cDNA sequence for clone AA363370.

[3613] SEQ ID NO: 3574 represents the cDNA sequence for clone AA363373.

[3614] SEQ ID NO: 3575 represents the cDNA sequence for clone AA363376.

[3615] SEQ ID NO: 3576 represents the cDNA sequence for clone AA363377.

[3616] SEQ ID NO: 3577 represents the cDNA sequence for clone AA363290.

[3617] SEQ ID NO: 3578 represents the cDNA sequence for clone AA363291.

[3618] SEQ ID NO: 3579 represents the cDNA sequence for clone AA363292.

[3619] SEQ ID NO: 3580 represents the cDNA sequence for clone AA363296.

[3620] SEQ ID NO: 3581 represents the cDNA sequence for clone AA363430.

[3621] SEQ ID NO: 3582 represents the cDNA sequence for clone AA363432.

[3622] SEQ ID NO: 3583 represents the cDNA sequence for clone AA363446.

[3623] SEQ ID NO: 3584 represents the cDNA sequence for clone AA363447.

[3624] SEQ ID NO: 3585 represents the cDNA sequence for clone AA363448.

[3625] SEQ ID NO: 3586 represents the cDNA sequence for clone AA363472.

[3626] SEQ ID NO: 3587 represents the cDNA sequence for clone AA363476.

[3627] SEQ ID NO: 3588 represents the cDNA sequence for clone AA363477.

[3628] SEQ ID NO: 3589 represents the cDNA sequence for clone AA363478.

[3629] SEQ ID NO: 3590 represents the cDNA sequence for clone AA363487.

[3630] SEQ ID NO: 3591 represents the cDNA sequence for clone AA363488.

[3631] SEQ ID NO: 3592 represents the cDNA sequence for clone AA363491.

[3632] SEQ ID NO: 3593 represents the cDNA sequence for clone AA363498.

[3633] SEQ ID NO: 3594 represents the cDNA sequence for clone AA363509.

[3634] SEQ ID NO: 3595 represents the cDNA sequence for clone AA363277.

[3635] SEQ ID NO: 3596 represents the cDNA sequence for clone AA363280.

[3636] SEQ ID NO: 3597 represents the cDNA sequence for clone AA363281.

[3637] SEQ ID NO: 3598 represents the cDNA sequence for clone AA363285.

[3638] SEQ ID NO: 3599 represents the cDNA sequence for clone AA399124.

[3639] SEQ ID NO: 3600 represents the cDNA sequence for clone AA399134.

[3640] SEQ ID NO: 3601 represents the cDNA sequence for clone AA399136.

[3641] SEQ ID NO: 3602 represents the cDNA sequence for clone AA399139.

[3642] SEQ ID NO: 3603 represents the cDNA sequence for clone AA399141.

[3643] SEQ ID NO: 3604 represents the cDNA sequence for clone AA398948.

[3644] SEQ ID NO: 3605 represents the cDNA sequence for clone AA399613.

[3645] SEQ ID NO: 3606 represents the cDNA sequence for clone AA399615.

[3646] SEQ ID NO: 3607 represents the cDNA sequence for clone AA399144.

[3647] SEQ ID NO: 3608 represents the cDNA sequence for clone AA399147.

[3648] SEQ ID NO: 3609 represents the cDNA sequence for clone AA399149.

[3649] SEQ ID NO: 3610 represents the cDNA sequence for clone AA399170.

[3650] SEQ ID NO: 3611 represents the cDNA sequence for clone AA399172.

[3651] SEQ ID NO: 3612 represents the cDNA sequence for clone AA399175.

[3652] SEQ ID NO: 3613 represents the cDNA sequence for clone AA399176.

[3653] SEQ ID NO: 3614 represents the cDNA sequence for clone AA399177.

[3654] SEQ ID NO: 3615 represents the cDNA sequence for clone AA399178.

[3655] SEQ ID NO: 3616 represents the cDNA sequence for clone AA399179.

[3656] SEQ ID NO: 3617 represents the cDNA sequence for clone AA399181.

[3657] SEQ ID NO: 3618 represents the cDNA sequence for clone AA399191.

[3658] SEQ ID NO: 3619 represents the cDNA sequence for clone AA399194.

[3659] SEQ ID NO: 3620 represents the cDNA sequence for clone AA399197.

[3660] SEQ ID NO: 3621 represents the cDNA sequence for clone AA399199.

[3661] SEQ ID NO: 3622 represents the cDNA sequence for clone AA399203.

[3662] SEQ ID NO: 3623 represents the cDNA sequence for clone AA399087.

[3663] SEQ ID NO: 3624 represents the cDNA sequence for clone AA399162.

[3664] SEQ ID NO: 3625 represents the cDNA sequence for clone AA399331.

[3665] SEQ ID NO: 3626 represents the cDNA sequence for clone AA399334.

[3666] SEQ ID NO: 3627 represents the cDNA sequence for clone AA399335.

[3667] SEQ ID NO: 3628 represents the cDNA sequence for clone AA399337.

[3668] SEQ ID NO: 3629 represents the cDNA sequence for clone AA399338.

[3669] SEQ ID NO: 3630 represents the cDNA sequence for clone AA399342.

[3670] SEQ ID NO: 3631 represents the cDNA sequence for clone AA399153.

[3671] SEQ ID NO: 3632 represents the cDNA sequence for clone AA399155.

[3672] SEQ ID NO: 3633 represents the cDNA sequence for clone AA399158.

[3673] SEQ ID NO: 3634 represents the cDNA sequence for clone AA399305.

[3674] SEQ ID NO: 3635 represents the cDNA sequence for clone AA399355.

[3675] SEQ ID NO: 3636 represents the cDNA sequence for clone AA399221.

[3676] SEQ ID NO: 3637 represents the cDNA sequence for clone AA399364.

[3677] SEQ ID NO: 3638 represents the cDNA sequence for clone AA399416.

[3678] SEQ ID NO: 3639 represents the cDNA sequence for clone AA399417.

[3679] SEQ ID NO: 3640 represents the cDNA sequence for clone AA399438.

[3680] SEQ ID NO: 3641 represents the cDNA sequence for clone AA399441.

[3681] SEQ ID NO: 3642 represents the cDNA sequence for clone AA399450.

[3682] SEQ ID NO: 3643 represents the cDNA sequence for clone AA399453.

[3683] SEQ ID NO: 3644 represents the cDNA sequence for clone AA399420.

[3684] SEQ ID NO: 3645 represents the cDNA sequence for clone AA399422.

[3685] SEQ ID NO: 3646 represents the cDNA sequence for clone AA399462.

[3686] SEQ ID NO: 3647 represents the cDNA sequence for clone AA399467.

[3687] SEQ ID NO: 3648 represents the cDNA sequence for clone AA399468.

[3688] SEQ ID NO: 3649 represents the cDNA sequence for clone AA399472.

[3689] SEQ ID NO: 3650 represents the cDNA sequence for clone AA399478.

[3690] SEQ ID NO: 3651 represents the cDNA sequence for clone AA399293.

[3691] SEQ ID NO: 3652 represents the cDNA sequence for clone AA399296.

[3692] SEQ ID NO: 3653 represents the cDNA sequence for clone AA399455.

[3693] SEQ ID NO: 3654 represents the cDNA sequence for clone AA401332.

[3694] SEQ ID NO: 3655 represents the cDNA sequence for clone AA401359.

[3695] SEQ ID NO: 3656 represents the cDNA sequence for clone AA401446.

[3696] SEQ ID NO: 3657 represents the cDNA sequence for clone AA401452.

[3697] SEQ ID NO: 3658 represents the cDNA sequence for clone AA401459.

[3698] SEQ ID NO: 3659 represents the cDNA sequence for clone AA400885.

[3699] SEQ ID NO: 3660 represents the cDNA sequence for clone AA400888.

[3700] SEQ ID NO: 3661 represents the cDNA sequence for clone AA400891.

[3701] SEQ ID NO: 3662 represents the cDNA sequence for clone AA400938.

[3702] SEQ ID NO: 3663 represents the cDNA sequence for clone AA400941.

[3703] SEQ ID NO: 3664 represents the cDNA sequence for clone AA400943.

[3704] SEQ ID NO: 3665 represents the cDNA sequence for clone AA400945.

[3705] SEQ ID NO: 3666 represents the cDNA sequence for clone AA400967.

[3706] SEQ ID NO: 3667 represents the cDNA sequence for clone AA400951.

[3707] SEQ ID NO: 3668 represents the cDNA sequence for clone AA400983.

[3708] SEQ ID NO: 3669 represents the cDNA sequence for clone AA400997.

[3709] SEQ ID NO: 3670 represents the cDNA sequence for clone AA400960.

[3710] SEQ ID NO: 3671 represents the cDNA sequence for clone AA400961.

[3711] SEQ ID NO: 3672 represents the cDNA sequence for clone AA400962.

[3712] SEQ ID NO: 3673 represents the cDNA sequence for clone AA400877.

[3713] SEQ ID NO: 3674 represents the cDNA sequence for clone AA400879.

[3714] SEQ ID NO: 3675 represents the cDNA sequence for clone AA400883.

[3715] SEQ ID NO: 3676 represents the cDNA sequence for clone AA400884.

[3716] SEQ ID NO: 3677 represents the cDNA sequence for clone AA401030.

[3717] SEQ ID NO: 3678 represents the cDNA sequence for clone AA401031.

[3718] SEQ ID NO: 3679 represents the cDNA sequence for clone AA401037.

[3719] SEQ ID NO: 3680 represents the cDNA sequence for clone AA401046.

[3720] SEQ ID NO: 3681 represents the cDNA sequence for clone AA401049.

[3721] SEQ ID NO: 3682 represents the cDNA sequence for clone AA401051.

[3722] SEQ ID NO: 3683 represents the cDNA sequence for clone AA401053.

[3723] SEQ ID NO: 3684 represents the cDNA sequence for clone AA401022.

[3724] SEQ ID NO: 3685 represents the cDNA sequence for clone AA401067.

[3725] SEQ ID NO: 3686 represents the cDNA sequence for clone AA401068.

[3726] SEQ ID NO: 3687 represents the cDNA sequence for clone AA400979.

[3727] SEQ ID NO: 3688 represents the cDNA sequence for clone AA400813.

[3728] SEQ ID NO: 3689 represents the cDNA sequence for clone AA400815.

[3729] SEQ ID NO: 3690 represents the cDNA sequence for clone AA401072.

[3730] SEQ ID NO: 3691 represents the cDNA sequence for clone AA401073.

[3731] SEQ ID NO: 3692 represents the cDNA sequence for clone AA401101.

[3732] SEQ ID NO: 3693 represents the cDNA sequence for clone AA401114.

[3733] SEQ ID NO: 3694 represents the cDNA sequence for clone AA401115.

[3734] SEQ ID NO: 3695 represents the cDNA sequence for clone AA401124.

[3735] SEQ ID NO: 3696 represents the cDNA sequence for clone AA401125.

[3736] SEQ ID NO: 3697 represents the cDNA sequence for clone AA401129.

[3737] SEQ ID NO: 3698 represents the cDNA sequence for clone AA401132.

[3738] SEQ ID NO: 3699 represents the cDNA sequence for clone AA401028.

[3739] SEQ ID NO: 3700 represents the cDNA sequence for clone AA401055.

[3740] SEQ ID NO: 3701 represents the cDNA sequence for clone AA401060.

[3741] SEQ ID NO: 3702 represents the cDNA sequence for clone AA401134.

[3742] SEQ ID NO: 3703 represents the cDNA sequence for clone AA401156.

[3743] SEQ ID NO: 3704 represents the cDNA sequence for clone AA401158.

[3744] SEQ ID NO: 3705 represents the cDNA sequence for clone AA401164.

[3745] SEQ ID NO: 3706 represents the cDNA sequence for clone AA401166.

[3746] SEQ ID NO: 3707 represents the cDNA sequence for clone AA401167.

[3747] SEQ ID NO: 3708 represents the cDNA sequence for clone AA401177.

[3748] SEQ ID NO: 3709 represents the cDNA sequence for clone AA401182.

[3749] SEQ ID NO: 3710 represents the cDNA sequence for clone AA401183.

[3750] SEQ ID NO: 3711 represents the cDNA sequence for clone AA401184.

[3751] SEQ ID NO: 3712 represents the cDNA sequence for clone AA401185.

[3752] SEQ ID NO: 3713 represents the cDNA sequence for clone AA401192.

[3753] SEQ ID NO: 3714 represents the cDNA sequence for clone AA401149.

[3754] SEQ ID NO: 3715 represents the cDNA sequence for clone AA401093.

[3755] SEQ ID NO: 3716 represents the cDNA sequence for clone AA401196.

[3756] SEQ ID NO: 3717 represents the cDNA sequence for clone AA401212.

[3757] SEQ ID NO: 3718 represents the cDNA sequence for clone AA403288.

[3758] SEQ ID NO: 3719 represents the cDNA sequence for clone AA403293.

[3759] SEQ ID NO: 3720 represents the cDNA sequence for clone AA403297.

[3760] SEQ ID NO: 3721 represents the cDNA sequence for clone AA403298.

[3761] SEQ ID NO: 3722 represents the cDNA sequence for clone AA403301.

[3762] SEQ ID NO: 3723 represents the cDNA sequence for clone AA403310.

[3763] SEQ ID NO: 3724 represents the cDNA sequence for clone AA403314.

[3764] SEQ ID NO: 3725 represents the cDNA sequence for clone AA403268.

[3765] SEQ ID NO: 3726 represents the cDNA sequence for clone AA403272.

[3766] SEQ ID NO: 3727 represents the cDNA sequence for clone AA401887.

[3767] SEQ ID NO: 3728 represents the cDNA sequence for clone AA401888.

[3768] SEQ ID NO: 3729 represents the cDNA sequence for clone AA401890.

[3769] SEQ ID NO: 3730 represents the cDNA sequence for clone AA401826.

[3770] SEQ ID NO: 3731 represents the cDNA sequence for clone AA401910.

[3771] SEQ ID NO: 3732 represents the cDNA sequence for clone AA401912.

[3772] SEQ ID NO: 3733 represents the cDNA sequence for clone AA401913.

[3773] SEQ ID NO: 3734 represents the cDNA sequence for clone AA401917.

[3774] SEQ ID NO: 3735 represents the cDNA sequence for clone AA401918.

[3775] SEQ ID NO: 3736 represents the cDNA sequence for clone AA401947.

[3776] SEQ ID NO: 3737 represents the cDNA sequence for clone AA401949.

[3777] SEQ ID NO: 3738 represents the cDNA sequence for clone AA401950.

[3778] SEQ ID NO: 3739 represents the cDNA sequence for clone AA401952.

[3779] SEQ ID NO: 3740 represents the cDNA sequence for clone AA401963.

[3780] SEQ ID NO: 3741 represents the cDNA sequence for clone AA401968.

[3781] SEQ ID NO: 3742 represents the cDNA sequence for clone AA401923.

[3782] SEQ ID NO: 3743 represents the cDNA sequence for clone AA401925.

[3783] SEQ ID NO: 3744 represents the cDNA sequence for clone AA401927.

[3784] SEQ ID NO: 3745 represents the cDNA sequence for clone AA401931.

[3785] SEQ ID NO: 3746 represents the cDNA sequence for clone AA401933.

[3786] SEQ ID NO: 3747 represents the cDNA sequence for clone AA401934.

[3787] SEQ ID NO: 3748 represents the cDNA sequence for clone AA401935.

[3788] SEQ ID NO: 3749 represents the cDNA sequence for clone AA401936.

[3789] SEQ ID NO: 3750 represents the cDNA sequence for clone AA401989.

[3790] SEQ ID NO: 3751 represents the cDNA sequence for clone AA401991.

[3791] SEQ ID NO: 3752 represents the cDNA sequence for clone AA401994.

[3792] SEQ ID NO: 3753 represents the cDNA sequence for clone AA402013.

[3793] SEQ ID NO: 3754 represents the cDNA sequence for clone AA402028.

[3794] SEQ ID NO: 3755 represents the cDNA sequence for clone AA401995.

[3795] SEQ ID NO: 3756 represents the cDNA sequence for clone AA402000.

[3796] SEQ ID NO: 3757 represents the cDNA sequence for clone AA401969.

[3797] SEQ ID NO: 3758 represents the cDNA sequence for clone AA401971.

[3798] SEQ ID NO: 3759 represents the cDNA sequence for clone AA401975.

[3799] SEQ ID NO: 3760 represents the cDNA sequence for clone AA401976.

[3800] SEQ ID NO: 3761 represents the cDNA sequence for clone AA402039.

[3801] SEQ ID NO: 3762 represents the cDNA sequence for clone AA402043.

[3802] SEQ ID NO: 3763 represents the cDNA sequence for clone AA402046.

[3803] SEQ ID NO: 3764 represents the cDNA sequence for clone AA402047.

[3804] SEQ ID NO: 3765 represents the cDNA sequence for clone AA402070.

[3805] SEQ ID NO: 3766 represents the cDNA sequence for clone AA402074.

[3806] SEQ ID NO: 3767 represents the cDNA sequence for clone AA402076.

[3807] SEQ ID NO: 3768 represents the cDNA sequence for clone AA402077.

[3808] SEQ ID NO: 3769 represents the cDNA sequence for clone AA402078.

[3809] SEQ ID NO: 3770 represents the cDNA sequence for clone AA402081.

[3810] SEQ ID NO: 3771 represents the cDNA sequence for clone AA402082.

[3811] SEQ ID NO: 3772 represents the cDNA sequence for clone AA402085.

[3812] SEQ ID NO: 3773 represents the cDNA sequence for clone AA402091.

[3813] SEQ ID NO: 3774 represents the cDNA sequence for clone AA402092.

[3814] SEQ ID NO: 3775 represents the cDNA sequence for clone AA402094.

[3815] SEQ ID NO: 3776 represents the cDNA sequence for clone AA402099.

[3816] SEQ ID NO: 3777 represents the cDNA sequence for clone AA402104.

[3817] SEQ ID NO: 3778 represents the cDNA sequence for clone AA402106.

[3818] SEQ ID NO: 3779 represents the cDNA sequence for clone AA402107.

[3819] SEQ ID NO: 3780 represents the cDNA sequence for clone AA402132.

[3820] SEQ ID NO: 3781 represents the cDNA sequence for clone AA402111.

[3821] SEQ ID NO: 3782 represents the cDNA sequence for clone AA402113.

[3822] SEQ ID NO: 3783 represents the cDNA sequence for clone AA402116.

[3823] SEQ ID NO: 3784 represents the cDNA sequence for clone AA402149.

[3824] SEQ ID NO: 3785 represents the cDNA sequence for clone AA402150.

[3825] SEQ ID NO: 3786 represents the cDNA sequence for clone AA402158.

[3826] SEQ ID NO: 3787 represents the cDNA sequence for clone AA402160.

[3827] SEQ ID NO: 3788 represents the cDNA sequence for clone AA402164.

[3828] SEQ ID NO: 3789 represents the cDNA sequence for clone AA402169.

[3829] SEQ ID NO: 3790 represents the cDNA sequence for clone AA402192.

[3830] SEQ ID NO: 3791 represents the cDNA sequence for clone AA402196.

[3831] SEQ ID NO: 3792 represents the cDNA sequence for clone AA402219.

[3832] SEQ ID NO: 3793 represents the cDNA sequence for clone AA402200.

[3833] SEQ ID NO: 3794 represents the cDNA sequence for clone AA402238.

[3834] SEQ ID NO: 3795 represents the cDNA sequence for clone AA402253.

[3835] SEQ ID NO: 3796 represents the cDNA sequence for clone AA402257.

[3836] SEQ ID NO: 3797 represents the cDNA sequence for clone AA402207.

[3837] SEQ ID NO: 3798 represents the cDNA sequence for clone AA402212.

[3838] SEQ ID NO: 3799 represents the cDNA sequence for clone AA402214.

[3839] SEQ ID NO: 3800 represents the cDNA sequence for clone AA402260.

[3840] SEQ ID NO: 3801 represents the cDNA sequence for clone AA402266.

[3841] SEQ ID NO: 3802 represents the cDNA sequence for clone AA402288.

[3842] SEQ ID NO: 3803 represents the cDNA sequence for clone AA402289.

[3843] SEQ ID NO: 3804 represents the cDNA sequence for clone AA402294.

[3844] SEQ ID NO: 3805 represents the cDNA sequence for clone AA402295.

[3845] SEQ ID NO: 3806 represents the cDNA sequence for clone AA402296.

[3846] SEQ ID NO: 3807 represents the cDNA sequence for clone AA402320.

[3847] SEQ ID NO: 3808 represents the cDNA sequence for clone AA402323.

[3848] SEQ ID NO: 3809 represents the cDNA sequence for clone AA402312.

[3849] SEQ ID NO: 3810 represents the cDNA sequence for clone AA402275.

[3850] SEQ ID NO: 3811 represents the cDNA sequence for clone AA402279.

[3851] SEQ ID NO: 3812 represents the cDNA sequence for clone AA402343.

[3852] SEQ ID NO: 3813 represents the cDNA sequence for clone AA402348.

[3853] SEQ ID NO: 3814 represents the cDNA sequence for clone AA402350.

[3854] SEQ ID NO: 3815 represents the cDNA sequence for clone AA402356.

[3855] SEQ ID NO: 3816 represents the cDNA sequence for clone AA402381.

[3856] SEQ ID NO: 3817 represents the cDNA sequence for clone AA402387.

[3857] SEQ ID NO: 3818 represents the cDNA sequence for clone AA402302.

[3858] SEQ ID NO: 3819 represents the cDNA sequence for clone AA402305.

[3859] SEQ ID NO: 3820 represents the cDNA sequence for clone AA402370.

[3860] SEQ ID NO: 3821 represents the cDNA sequence for clone AA402395.

[3861] SEQ ID NO: 3822 represents the cDNA sequence for clone AA402496.

[3862] SEQ ID NO: 3823 represents the cDNA sequence for clone AA402498.

[3863] SEQ ID NO: 3824 represents the cDNA sequence for clone AA402502.

[3864] SEQ ID NO: 3825 represents the cDNA sequence for clone AA402525.

[3865] SEQ ID NO: 3826 represents the cDNA sequence for clone AA402531.

[3866] SEQ ID NO: 3827 represents the cDNA sequence for clone AA402546.

[3867] SEQ ID NO: 3828 represents the cDNA sequence for clone AA402565.

[3868] SEQ ID NO: 3829 represents the cDNA sequence for clone AA402571.

[3869] SEQ ID NO: 3830 represents the cDNA sequence for clone AA402572.

[3870] SEQ ID NO: 3831 represents the cDNA sequence for clone AA402581.

[3871] SEQ ID NO: 3832 represents the cDNA sequence for clone AA402586.

[3872] SEQ ID NO: 3833 represents the cDNA sequence for clone AA402590.

[3873] SEQ ID NO: 3834 represents the cDNA sequence for clone AA402591.

[3874] SEQ ID NO: 3835 represents the cDNA sequence for clone AA402592.

[3875] SEQ ID NO: 3836 represents the cDNA sequence for clone AA402558.

[3876] SEQ ID NO: 3837 represents the cDNA sequence for clone AA402547.

[3877] SEQ ID NO: 3838 represents the cDNA sequence for clone AA402548.

[3878] SEQ ID NO: 3839 represents the cDNA sequence for clone AA402606.

[3879] SEQ ID NO: 3840 represents the cDNA sequence for clone AA402613.

[3880] SEQ ID NO: 3841 represents the cDNA sequence for clone AA402633.

[3881] SEQ ID NO: 3842 represents the cDNA sequence for clone AA402637.

[3882] SEQ ID NO: 3843 represents the cDNA sequence for clone AA402638.

[3883] SEQ ID NO: 3844 represents the cDNA sequence for clone AA402659.

[3884] SEQ ID NO: 3845 represents the cDNA sequence for clone AA402618.

[3885] SEQ ID NO: 3846 represents the cDNA sequence for clone AA402620.

[3886] SEQ ID NO: 3847 represents the cDNA sequence for clone AA402621.

[3887] SEQ ID NO: 3848 represents the cDNA sequence for clone AA402667.

[3888] SEQ ID NO: 3849 represents the cDNA sequence for clone AA402668.

[3889] SEQ ID NO: 3850 represents the cDNA sequence for clone AA402670.

[3890] SEQ ID NO: 3851 represents the cDNA sequence for clone AA402673.

[3891] SEQ ID NO: 3852 represents the cDNA sequence for clone AA402649.

[3892] SEQ ID NO: 3853 represents the cDNA sequence for clone AA402690.

[3893] SEQ ID NO: 3854 represents the cDNA sequence for clone AA402713.

[3894] SEQ ID NO: 3855 represents the cDNA sequence for clone AA402719.

[3895] SEQ ID NO: 3856 represents the cDNA sequence for clone AA402723.

[3896] SEQ ID NO: 3857 represents the cDNA sequence for clone AA402623.

[3897] SEQ ID NO: 3858 represents the cDNA sequence for clone AA402627.

[3898] SEQ ID NO: 3859 represents the cDNA sequence for clone AA402707.

[3899] SEQ ID NO: 3860 represents the cDNA sequence for clone AA402749.

[3900] SEQ ID NO: 3861 represents the cDNA sequence for clone AA402753.

[3901] SEQ ID NO: 3862 represents the cDNA sequence for clone AA402777.

[3902] SEQ ID NO: 3863 represents the cDNA sequence for clone AA402782.

[3903] SEQ ID NO: 3864 represents the cDNA sequence for clone AA402681.

[3904] SEQ ID NO: 3865 represents the cDNA sequence for clone AA402767.

[3905] SEQ ID NO: 3866 represents the cDNA sequence for clone AA402801.

[3906] SEQ ID NO: 3867 represents the cDNA sequence for clone AA402803.

[3907] SEQ ID NO: 3868 represents the cDNA sequence for clone AA402807.

[3908] SEQ ID NO: 3869 represents the cDNA sequence for clone AA402829.

[3909] SEQ ID NO: 3870 represents the cDNA sequence for clone AA402831.

[3910] SEQ ID NO: 3871 represents the cDNA sequence for clone AA402838.

[3911] SEQ ID NO: 3872 represents the cDNA sequence for clone AA402840.

[3912] SEQ ID NO: 3873 represents the cDNA sequence for clone AA402843.

[3913] SEQ ID NO: 3874 represents the cDNA sequence for clone AA402844.

[3914] SEQ ID NO: 3875 represents the cDNA sequence for clone AA402845.

[3915] SEQ ID NO: 3876 represents the cDNA sequence for clone AA402848.

[3916] SEQ ID NO: 3877 represents the cDNA sequence for clone AA402883.

[3917] SEQ ID NO: 3878 represents the cDNA sequence for clone AA402910.

[3918] SEQ ID NO: 3879 represents the cDNA sequence for clone AA402921.

[3919] SEQ ID NO: 3880 represents the cDNA sequence for clone AA402932.

[3920] SEQ ID NO: 3881 represents the cDNA sequence for clone AA402934.

[3921] SEQ ID NO: 3882 represents the cDNA sequence for clone AA402935.

[3922] SEQ ID NO: 3883 represents the cDNA sequence for clone AA402809.

[3923] SEQ ID NO: 3884 represents the cDNA sequence for clone AA402814.

[3924] SEQ ID NO: 3885 represents the cDNA sequence for clone AA402895.

[3925] SEQ ID NO: 3886 represents the cDNA sequence for clone AA402937.

[3926] SEQ ID NO: 3887 represents the cDNA sequence for clone AA402939.

[3927] SEQ ID NO: 3888 represents the cDNA sequence for clone AA402951.

[3928] SEQ ID NO: 3889 represents the cDNA sequence for clone AA402970.

[3929] SEQ ID NO: 3890 represents the cDNA sequence for clone AA402971.

[3930] SEQ ID NO: 3891 represents the cDNA sequence for clone AA402976.

[3931] SEQ ID NO: 3892 represents the cDNA sequence for clone AA402987.

[3932] SEQ ID NO: 3893 represents the cDNA sequence for clone AA402993.

[3933] SEQ ID NO: 3894 represents the cDNA sequence for clone AA402821.

[3934] SEQ ID NO: 3895 represents the cDNA sequence for clone AA402823.

[3935] SEQ ID NO: 3896 represents the cDNA sequence for clone AA402959.

[3936] SEQ ID NO: 3897 represents the cDNA sequence for clone AA403004.

[3937] SEQ ID NO: 3898 represents the cDNA sequence for clone AA403010.

[3938] SEQ ID NO: 3899 represents the cDNA sequence for clone AA403029.

[3939] SEQ ID NO: 3900 represents the cDNA sequence for clone AA401711.

[3940] SEQ ID NO: 3901 represents the cDNA sequence for clone AA401714.

[3941] SEQ ID NO: 3902 represents the cDNA sequence for clone AA401752.

[3942] SEQ ID NO: 3903 represents the cDNA sequence for clone AA401754.

[3943] SEQ ID NO: 3904 represents the cDNA sequence for clone AA401756.

[3944] SEQ ID NO: 3905 represents the cDNA sequence for clone AA401757.

[3945] SEQ ID NO: 3906 represents the cDNA sequence for clone AA401761.

[3946] SEQ ID NO: 3907 represents the cDNA sequence for clone AA404576.

[3947] SEQ ID NO: 3908 represents the cDNA sequence for clone AA404577.

[3948] SEQ ID NO: 3909 represents the cDNA sequence for clone AA404581.

[3949] SEQ ID NO: 3910 represents the cDNA sequence for clone AA404583.

[3950] SEQ ID NO: 3911 represents the cDNA sequence for clone AA404584.

[3951] SEQ ID NO: 3912 represents the cDNA sequence for clone AA404589.

[3952] SEQ ID NO: 3913 represents the cDNA sequence for clone AA404593.

[3953] SEQ ID NO: 3914 represents the cDNA sequence for clone AA404595.

[3954] SEQ ID NO: 3915 represents the cDNA sequence for clone AA404598.

[3955] SEQ ID NO: 3916 represents the cDNA sequence for clone AA404600.

[3956] SEQ ID NO: 3917 represents the cDNA sequence for clone AA404601.

[3957] SEQ ID NO: 3918 represents the cDNA sequence for clone AA404609.

[3958] SEQ ID NO: 3919 represents the cDNA sequence for clone AA404613.

[3959] SEQ ID NO: 3920 represents the cDNA sequence for clone AA404635.

[3960] SEQ ID NO: 3921 represents the cDNA sequence for clone AA404636.

[3961] SEQ ID NO: 3922 represents the cDNA sequence for clone AA404637.

[3962] SEQ ID NO: 3923 represents the cDNA sequence for clone AA404653.

[3963] SEQ ID NO: 3924 represents the cDNA sequence for clone AA404617.

[3964] SEQ ID NO: 3925 represents the cDNA sequence for clone AA404618.

[3965] SEQ ID NO: 3926 represents the cDNA sequence for clone AA404684.

[3966] SEQ ID NO: 3927 represents the cDNA sequence for clone AA404686.

[3967] SEQ ID NO: 3928 represents the cDNA sequence for clone AA404695.

[3968] SEQ ID NO: 3929 represents the cDNA sequence for clone AA404630.

[3969] SEQ ID NO: 3930 represents the cDNA sequence for clone AA404631.

[3970] SEQ ID NO: 3931 represents the cDNA sequence for clone AA404707.

[3971] SEQ ID NO: 3932 represents the cDNA sequence for clone AA404710.

[3972] SEQ ID NO: 3933 represents the cDNA sequence for clone AA404715.

[3973] SEQ ID NO: 3934 represents the cDNA sequence for clone AA404716.

[3974] SEQ ID NO: 3935 represents the cDNA sequence for clone AA404718.

[3975] SEQ ID NO: 3936 represents the cDNA sequence for clone AA404719.

[3976] SEQ ID NO: 3937 represents the cDNA sequence for clone AA404723.

[3977] SEQ ID NO: 3938 represents the cDNA sequence for clone AA404736.

[3978] SEQ ID NO: 3939 represents the cDNA sequence for clone AA404644.

[3979] SEQ ID NO: 3940 represents the cDNA sequence for clone AA404648.

[3980] SEQ ID NO: 3941 represents the cDNA sequence for clone AA404649.

[3981] SEQ ID NO: 3942 represents the cDNA sequence for clone AA404726.

[3982] SEQ ID NO: 3943 represents the cDNA sequence for clone AA404731.

[3983] SEQ ID NO: 3944 represents the cDNA sequence for clone AA404733.

[3984] SEQ ID NO: 3945 represents the cDNA sequence for clone AA404215.

[3985] SEQ ID NO: 3946 represents the cDNA sequence for clone AA404220.

[3986] SEQ ID NO: 3947 represents the cDNA sequence for clone AA404223.

[3987] SEQ ID NO: 3948 represents the cDNA sequence for clone AA404225.

[3988] SEQ ID NO: 3949 represents the cDNA sequence for clone AA404299.

[3989] SEQ ID NO: 3950 represents the cDNA sequence for clone AA404257.

[3990] SEQ ID NO: 3951 represents the cDNA sequence for clone AA404311.

[3991] SEQ ID NO: 3952 represents the cDNA sequence for clone AA404314.

[3992] SEQ ID NO: 3953 represents the cDNA sequence for clone AA404315.

[3993] SEQ ID NO: 3954 represents the cDNA sequence for clone AA405266.

[3994] SEQ ID NO: 3955 represents the cDNA sequence for clone AA405280.

[3995] SEQ ID NO: 3956 represents the cDNA sequence for clone AA405281.

[3996] SEQ ID NO: 3957 represents the cDNA sequence for clone AA405248.

[3997] SEQ ID NO: 3958 represents the cDNA sequence for clone AA405250.

[3998] SEQ ID NO: 3959 represents the cDNA sequence for clone AA405302.

[3999] SEQ ID NO: 3960 represents the cDNA sequence for clone AA405317.

[4000] SEQ ID NO: 3961 represents the cDNA sequence for clone AA405288.

[4001] SEQ ID NO: 3962 represents the cDNA sequence for clone AA405167.

[4002] SEQ ID NO: 3963 represents the cDNA sequence for clone AA405678.

[4003] SEQ ID NO: 3964 represents the cDNA sequence for clone AA405679.

[4004] SEQ ID NO: 3965 represents the cDNA sequence for clone AA405680.

[4005] SEQ ID NO: 3966 represents the cDNA sequence for clone AA405168.

[4006] SEQ ID NO: 3967 represents the cDNA sequence for clone AA405169.

[4007] SEQ ID NO: 3968 represents the cDNA sequence for clone AA405171.

[4008] SEQ ID NO: 3969 represents the cDNA sequence for clone AA405198.

[4009] SEQ ID NO: 3970 represents the cDNA sequence for clone AA405204.

[4010] SEQ ID NO: 3971 represents the cDNA sequence for clone AA405206.

[4011] SEQ ID NO: 3972 represents the cDNA sequence for clone AA405395.

[4012] SEQ ID NO: 3973 represents the cDNA sequence for clone AA405401.

[4013] SEQ ID NO: 3974 represents the cDNA sequence for clone AA405402.

[4014] SEQ ID NO: 3975 represents the cDNA sequence for clone AA405403.

[4015] SEQ ID NO: 3976 represents the cDNA sequence for clone AA405404.

[4016] SEQ ID NO: 3977 represents the cDNA sequence for clone AA405405.

[4017] SEQ ID NO: 3978 represents the cDNA sequence for clone AA405407.

[4018] SEQ ID NO: 3979 represents the cDNA sequence for clone AA405423.

[4019] SEQ ID NO: 3980 represents the cDNA sequence for clone AA405424.

[4020] SEQ ID NO: 3981 represents the cDNA sequence for clone AA405746.

[4021] SEQ ID NO: 3982 represents the cDNA sequence for clone AA405747.

[4022] SEQ ID NO: 3983 represents the cDNA sequence for clone AA405190.

[4023] SEQ ID NO: 3984 represents the cDNA sequence for clone AA405192.

[4024] SEQ ID NO: 3985 represents the cDNA sequence for clone AA405727.

[4025] SEQ ID NO: 3986 represents the cDNA sequence for clone AA405763.

[4026] SEQ ID NO: 3987 represents the cDNA sequence for clone AA405793.

[4027] SEQ ID NO: 3988 represents the cDNA sequence for clone AA405798.

[4028] SEQ ID NO: 3989 represents the cDNA sequence for clone AA405804.

[4029] SEQ ID NO: 3990 represents the cDNA sequence for clone AA405805.

[4030] SEQ ID NO: 3991 represents the cDNA sequence for clone AA405869.

[4031] SEQ ID NO: 3992 represents the cDNA sequence for clone AA405871.

[4032] SEQ ID NO: 3993 represents the cDNA sequence for clone AA405872.

[4033] SEQ ID NO: 3994 represents the cDNA sequence for clone AA405881.

[4034] SEQ ID NO: 3995 represents the cDNA sequence for clone AA405883.

[4035] SEQ ID NO: 3996 represents the cDNA sequence for clone AA405886.

[4036] SEQ ID NO: 3997 represents the cDNA sequence for clone AA405887.

[4037] SEQ ID NO: 3998 represents the cDNA sequence for clone AA405888.

[4038] SEQ ID NO: 3999 represents the cDNA sequence for clone AA405845.

[4039] SEQ ID NO: 4000 represents the cDNA sequence for clone AA405847.

[4040] SEQ ID NO: 4001 represents the cDNA sequence for clone AA405894.

[4041] SEQ ID NO: 4002 represents the cDNA sequence for clone AA405899.

[4042] SEQ ID NO: 4003 represents the cDNA sequence for clone AA405919.

[4043] SEQ ID NO: 4004 represents the cDNA sequence for clone AA405921.

[4044] SEQ ID NO: 4005 represents the cDNA sequence for clone AA405922.

[4045] SEQ ID NO: 4006 represents the cDNA sequence for clone AA405924.

[4046] SEQ ID NO: 4007 represents the cDNA sequence for clone AA405928.

[4047] SEQ ID NO: 4008 represents the cDNA sequence for clone AA406000.

[4048] SEQ ID NO: 4009 represents the cDNA sequence for clone AA406002.

[4049] SEQ ID NO: 4010 represents the cDNA sequence for clone AA406003.

[4050] SEQ ID NO: 4011 represents the cDNA sequence for clone AA406006.

[4051] SEQ ID NO: 4012 represents the cDNA sequence for clone AA406008.

[4052] SEQ ID NO: 4013 represents the cDNA sequence for clone AA406016.

[4053] SEQ ID NO: 4014 represents the cDNA sequence for clone AA406017.

[4054] SEQ ID NO: 4015 represents the cDNA sequence for clone AA405975.

[4055] SEQ ID NO: 4016 represents the cDNA sequence for clone AA405976.

[4056] SEQ ID NO: 4017 represents the cDNA sequence for clone AA405977.

[4057] SEQ ID NO: 4018 represents the cDNA sequence for clone AA405978.

[4058] SEQ ID NO: 4019 represents the cDNA sequence for clone AA406021.

[4059] SEQ ID NO: 4020 represents the cDNA sequence for clone AA406027.

[4060] SEQ ID NO: 4021 represents the cDNA sequence for clone AA406028.

[4061] SEQ ID NO: 4022 represents the cDNA sequence for clone AA406031.

[4062] SEQ ID NO: 4023 represents the cDNA sequence for clone AA401244.

[4063] SEQ ID NO: 4024 represents the cDNA sequence for clone AA411249.

[4064] SEQ ID NO: 4025 represents the cDNA sequence for clone AA411260.

[4065] SEQ ID NO: 4026 represents the cDNA sequence for clone AA411613.

[4066] SEQ ID NO: 4027 represents the cDNA sequence for clone AA411272.

[4067] SEQ ID NO: 4028 represents the cDNA sequence for clone AA411315.

[4068] SEQ ID NO: 4029 represents the cDNA sequence for clone AA411316.

[4069] SEQ ID NO: 4030 represents the cDNA sequence for clone AA411322.

[4070] SEQ ID NO: 4031 represents the cDNA sequence for clone AA411323.

[4071] SEQ ID NO: 4032 represents the cDNA sequence for clone AA411211.

[4072] SEQ ID NO: 4033 represents the cDNA sequence for clone AA411214.

[4073] SEQ ID NO: 4034 represents the cDNA sequence for clone AA411372.

[4074] SEQ ID NO: 4035 represents the cDNA sequence for clone AA411351.

[4075] SEQ ID NO: 4036 represents the cDNA sequence for clone AA411355.

[4076] SEQ ID NO: 4037 represents the cDNA sequence for clone AA411403.

[4077] SEQ ID NO: 4038 represents the cDNA sequence for clone AA411428.

[4078] SEQ ID NO: 4039 represents the cDNA sequence for clone AA411430.

[4079] SEQ ID NO: 4040 represents the cDNA sequence for clone AA411432.

[4080] SEQ ID NO: 4041 represents the cDNA sequence for clone AA411437.

[4081] SEQ ID NO: 4042 represents the cDNA sequence for clone AA411441.

[4082] SEQ ID NO: 4043 represents the cDNA sequence for clone AA411443.

[4083] SEQ ID NO: 4044 represents the cDNA sequence for clone AA411449.

[4084] SEQ ID NO: 4045 represents the cDNA sequence for clone AA411453.

[4085] SEQ ID NO: 4046 represents the cDNA sequence for clone AA411458.

[4086] SEQ ID NO: 4047 represents the cDNA sequence for clone AA411460.

[4087] SEQ ID NO: 4048 represents the cDNA sequence for clone AA411469.

[4088] SEQ ID NO: 4049 represents the cDNA sequence for clone AA411304.

[4089] SEQ ID NO: 4050 represents the cDNA sequence for clone AA411418.

[4090] SEQ ID NO: 4051 represents the cDNA sequence for clone AA411423.

[4091] SEQ ID NO: 4052 represents the cDNA sequence for clone AA411424.

[4092] SEQ ID NO: 4053 represents the cDNA sequence for clone AA411473.

[4093] SEQ ID NO: 4054 represents the cDNA sequence for clone AA411474.

[4094] SEQ ID NO: 4055 represents the cDNA sequence for clone AA411504.

[4095] SEQ ID NO: 4056 represents the cDNA sequence for clone AA411506.

[4096] SEQ ID NO: 4057 represents the cDNA sequence for clone AA411515.

[4097] SEQ ID NO: 4058 represents the cDNA sequence for clone AA411516.

[4098] SEQ ID NO: 4059 represents the cDNA sequence for clone AA411521.

[4099] SEQ ID NO: 4060 represents the cDNA sequence for clone AA411523.

[4100] SEQ ID NO: 4061 represents the cDNA sequence for clone AA411537.

[4101] SEQ ID NO: 4062 represents the cDNA sequence for clone AA411538.

[4102] SEQ ID NO: 4063 represents the cDNA sequence for clone AA411550.

[4103] SEQ ID NO: 4064 represents the cDNA sequence for clone AA411551.

[4104] SEQ ID NO: 4065 represents the cDNA sequence for clone AA411573.

[4105] SEQ ID NO: 4066 represents the cDNA sequence for clone AA411580.

[4106] SEQ ID NO: 4067 represents the cDNA sequence for clone AA411586.

[4107] SEQ ID NO: 4068 represents the cDNA sequence for clone AA411587.

[4108] SEQ ID NO: 4069 represents the cDNA sequence for clone AA411590.

[4109] SEQ ID NO: 4070 represents the cDNA sequence for clone AA411597.

[4110] SEQ ID NO: 4071 represents the cDNA sequence for clone AA410233.

[4111] SEQ ID NO: 4072 represents the cDNA sequence for clone AA410236.

[4112] SEQ ID NO: 4073 represents the cDNA sequence for clone AA410240.

[4113] SEQ ID NO: 4074 represents the cDNA sequence for clone AA411492.

[4114] SEQ ID NO: 4075 represents the cDNA sequence for clone AA410245.

[4115] SEQ ID NO: 4076 represents the cDNA sequence for clone AA410247.

[4116] SEQ ID NO: 4077 represents the cDNA sequence for clone AA410250.

[4117] SEQ ID NO: 4078 represents the cDNA sequence for clone AA410253.

[4118] SEQ ID NO: 4079 represents the cDNA sequence for clone AA410276.

[4119] SEQ ID NO: 4080 represents the cDNA sequence for clone AA410595.

[4120] SEQ ID NO: 4081 represents the cDNA sequence for clone AA410596.

[4121] SEQ ID NO: 4082 represents the cDNA sequence for clone AA410601.

[4122] SEQ ID NO: 4083 represents the cDNA sequence for clone AA410412.

[4123] SEQ ID NO: 4084 represents the cDNA sequence for clone AA410413.

[4124] SEQ ID NO: 4085 represents the cDNA sequence for clone AA410557.

[4125] SEQ ID NO: 4086 represents the cDNA sequence for clone AA410558.

[4126] SEQ ID NO: 4087 represents the cDNA sequence for clone AA410631.

[4127] SEQ ID NO: 4088 represents the cDNA sequence for clone AA410639.

[4128] SEQ ID NO: 4089 represents the cDNA sequence for clone AA410645.

[4129] SEQ ID NO: 4090 represents the cDNA sequence for clone AA410648.

[4130] SEQ ID NO: 4091 represents the cDNA sequence for clone AA410656.

[4131] SEQ ID NO: 4092 represents the cDNA sequence for clone AA410664.

[4132] SEQ ID NO: 4093 represents the cDNA sequence for clone AA410615.

[4133] SEQ ID NO: 4094 represents the cDNA sequence for clone AA410617.

[4134] SEQ ID NO: 4095 represents the cDNA sequence for clone AA410618.

[4135] SEQ ID NO: 4096 represents the cDNA sequence for clone AA410620.

[4136] SEQ ID NO: 4097 represents the cDNA sequence for clone AA410621.

[4137] SEQ ID NO: 4098 represents the cDNA sequence for clone AA410475.

[4138] SEQ ID NO: 4099 represents the cDNA sequence for clone AA410476.

[4139] SEQ ID NO: 4100 represents the cDNA sequence for clone AA410674.

[4140] SEQ ID NO: 4101 represents the cDNA sequence for clone AA410679.

[4141] SEQ ID NO: 4102 represents the cDNA sequence for clone AA410701.

[4142] SEQ ID NO: 4103 represents the cDNA sequence for clone AA410703.

[4143] SEQ ID NO: 4104 represents the cDNA sequence for clone AA410687.

[4144] SEQ ID NO: 4105 represents the cDNA sequence for clone AA410719.

[4145] SEQ ID NO: 4106 represents the cDNA sequence for clone AA410720.

[4146] SEQ ID NO: 4107 represents the cDNA sequence for clone AA410721.

[4147] SEQ ID NO: 4108 represents the cDNA sequence for clone AA410722.

[4148] SEQ ID NO: 4109 represents the cDNA sequence for clone AA410732.

[4149] SEQ ID NO: 4110 represents the cDNA sequence for clone AA410734.

[4150] SEQ ID NO: 4111 represents the cDNA sequence for clone AA410740.

[4151] SEQ ID NO: 4112 represents the cDNA sequence for clone AA410627.

[4152] SEQ ID NO: 4113 represents the cDNA sequence for clone AA410542.

[4153] SEQ ID NO: 4114 represents the cDNA sequence for clone AA410549.

[4154] SEQ ID NO: 4115 represents the cDNA sequence for clone AA410749.

[4155] SEQ ID NO: 4116 represents the cDNA sequence for clone AA410769.

[4156] SEQ ID NO: 4117 represents the cDNA sequence for clone AA410776.

[4157] SEQ ID NO: 4118 represents the cDNA sequence for clone AA410778.

[4158] SEQ ID NO: 4119 represents the cDNA sequence for clone AA410786.

[4159] SEQ ID NO: 4120 represents the cDNA sequence for clone AA410792.

[4160] SEQ ID NO: 4121 represents the cDNA sequence for clone AA410804.

[4161] SEQ ID NO: 4122 represents the cDNA sequence for clone AA410699.

[4162] SEQ ID NO: 4123 represents the cDNA sequence for clone AA410761.

[4163] SEQ ID NO: 4124 represents the cDNA sequence for clone AA410832.

[4164] SEQ ID NO: 4125 represents the cDNA sequence for clone AA410834.

[4165] SEQ ID NO: 4126 represents the cDNA sequence for clone AA410835.

[4166] SEQ ID NO: 4127 represents the cDNA sequence for clone AA410838.

[4167] SEQ ID NO: 4128 represents the cDNA sequence for clone AA410849.

[4168] SEQ ID NO: 4129 represents the cDNA sequence for clone AA410853.

[4169] SEQ ID NO: 4130 represents the cDNA sequence for clone AA410860.

[4170] SEQ ID NO: 4131 represents the cDNA sequence for clone AA410864.

[4171] SEQ ID NO: 4132 represents the cDNA sequence for clone AA410820.

[4172] SEQ ID NO: 4133 represents the cDNA sequence for clone AA410822.

[4173] SEQ ID NO: 4134 represents the cDNA sequence for clone AA410823.

[4174] SEQ ID NO: 4135 represents the cDNA sequence for clone AA410825.

[4175] SEQ ID NO: 4136 represents the cDNA sequence for clone AA410828.

[4176] SEQ ID NO: 4137 represents the cDNA sequence for clone AA410829.

[4177] SEQ ID NO: 4138 represents the cDNA sequence for clone AA410752.

[4178] SEQ ID NO: 4139 represents the cDNA sequence for clone AA410756.

[4179] SEQ ID NO: 4140 represents the cDNA sequence for clone AA410878.

[4180] SEQ ID NO: 4141 represents the cDNA sequence for clone AA410902.

[4181] SEQ ID NO: 4142 represents the cDNA sequence for clone AA410903.

[4182] SEQ ID NO: 4143 represents the cDNA sequence for clone AA410909.

[4183] SEQ ID NO: 4144 represents the cDNA sequence for clone AA410910.

[4184] SEQ ID NO: 4145 represents the cDNA sequence for clone AA410911.

[4185] SEQ ID NO: 4146 represents the cDNA sequence for clone AA410922.

[4186] SEQ ID NO: 4147 represents the cDNA sequence for clone AA410924.

[4187] SEQ ID NO: 4148 represents the cDNA sequence for clone AA410932.

[4188] SEQ ID NO: 4149 represents the cDNA sequence for clone AA410933.

[4189] SEQ ID NO: 4150 represents the cDNA sequence for clone AA410865.

[4190] SEQ ID NO: 4151 represents the cDNA sequence for clone AA410873.

[4191] SEQ ID NO: 4152 represents the cDNA sequence for clone AA410708.

[4192] SEQ ID NO: 4153 represents the cDNA sequence for clone AA410709.

[4193] SEQ ID NO: 4154 represents the cDNA sequence for clone AA410711.

[4194] SEQ ID NO: 4155 represents the cDNA sequence for clone AA410947.

[4195] SEQ ID NO: 4156 represents the cDNA sequence for clone AA410948.

[4196] SEQ ID NO: 4157 represents the cDNA sequence for clone AA410949.

[4197] SEQ ID NO: 4158 represents the cDNA sequence for clone AA410977.

[4198] SEQ ID NO: 4159 represents the cDNA sequence for clone AA411012.

[4199] SEQ ID NO: 4160 represents the cDNA sequence for clone AA411016.

[4200] SEQ ID NO: 4161 represents the cDNA sequence for clone AA411046.

[4201] SEQ ID NO: 4162 represents the cDNA sequence for clone AA411021.

[4202] SEQ ID NO: 4163 represents the cDNA sequence for clone AA410941.

[4203] SEQ ID NO: 4164 represents the cDNA sequence for clone AA410942.

[4204] SEQ ID NO: 4165 represents the cDNA sequence for clone AA410943.

[4205] SEQ ID NO: 4166 represents the cDNA sequence for clone AA411064.

[4206] SEQ ID NO: 4167 represents the cDNA sequence for clone AA411077.

[4207] SEQ ID NO: 4168 represents the cDNA sequence for clone AA411080.

[4208] SEQ ID NO: 4169 represents the cDNA sequence for clone AA411083.

[4209] SEQ ID NO: 4170 represents the cDNA sequence for clone AA411101.

[4210] SEQ ID NO: 4171 represents the cDNA sequence for clone AA411102.

[4211] SEQ ID NO: 4172 represents the cDNA sequence for clone AA411085.

[4212] SEQ ID NO: 4173 represents the cDNA sequence for clone AA411117.

[4213] SEQ ID NO: 4174 represents the cDNA sequence for clone AA411118.

[4214] SEQ ID NO: 4175 represents the cDNA sequence for clone AA411119.

[4215] SEQ ID NO: 4176 represents the cDNA sequence for clone AA411126.

[4216] SEQ ID NO: 4177 represents the cDNA sequence for clone AA411128.

[4217] SEQ ID NO: 4178 represents the cDNA sequence for clone AA411133.

[4218] SEQ ID NO: 4179 represents the cDNA sequence for clone AA411138.

[4219] SEQ ID NO: 4180 represents the cDNA sequence for clone AA411140.

[4220] SEQ ID NO: 4181 represents the cDNA sequence for clone AA411142.

[4221] SEQ ID NO: 4182 represents the cDNA sequence for clone AA410963.

[4222] SEQ ID NO: 4183 represents the cDNA sequence for clone AA411110.

[4223] SEQ ID NO: 4184 represents the cDNA sequence for clone AA411143.

[4224] SEQ ID NO: 4185 represents the cDNA sequence for clone AA411144.

[4225] SEQ ID NO: 4186 represents the cDNA sequence for clone AA411155.

[4226] SEQ ID NO: 4187 represents the cDNA sequence for clone AA411156.

[4227] SEQ ID NO: 4188 represents the cDNA sequence for clone AA411161.

[4228] SEQ ID NO: 4189 represents the cDNA sequence for clone AA411162.

[4229] SEQ ID NO: 4190 represents the cDNA sequence for clone AA411171.

[4230] SEQ ID NO: 4191 represents the cDNA sequence for clone AA411175.

[4231] SEQ ID NO: 4192 represents the cDNA sequence for clone AA411185.

[4232] SEQ ID NO: 4193 represents the cDNA sequence for clone AA418995.

[4233] SEQ ID NO: 4194 represents the cDNA sequence for clone AA418999.

[4234] SEQ ID NO: 4195 represents the cDNA sequence for clone AA419018.

[4235] SEQ ID NO: 4196 represents the cDNA sequence for clone AA419022.

[4236] SEQ ID NO: 4197 represents the cDNA sequence for clone AA419042.

[4237] SEQ ID NO: 4198 represents the cDNA sequence for clone AA419043.

[4238] SEQ ID NO: 4199 represents the cDNA sequence for clone AA419044.

[4239] SEQ ID NO: 4200 represents the cDNA sequence for clone AA419050.

[4240] SEQ ID NO: 4201 represents the cDNA sequence for clone AA419006.

[4241] SEQ ID NO: 4202 represents the cDNA sequence for clone AA419057.

[4242] SEQ ID NO: 4203 represents the cDNA sequence for clone AA419077.

[4243] SEQ ID NO: 4204 represents the cDNA sequence for clone AA419010.

[4244] SEQ ID NO: 4205 represents the cDNA sequence for clone AA419074.

[4245] SEQ ID NO: 4206 represents the cDNA sequence for clone AA419088.

[4246] SEQ ID NO: 4207 represents the cDNA sequence for clone AA419092.

[4247] SEQ ID NO: 4208 represents the cDNA sequence for clone AA419112.

[4248] SEQ ID NO: 4209 represents the cDNA sequence for clone AA419116.

[4249] SEQ ID NO: 4210 represents the cDNA sequence for clone AA419121.

[4250] SEQ ID NO: 4211 represents the cDNA sequence for clone AA419122.

[4251] SEQ ID NO: 4212 represents the cDNA sequence for clone AA419124.

[4252] SEQ ID NO: 4213 represents the cDNA sequence for clone AA419125.

[4253] SEQ ID NO: 4214 represents the cDNA sequence for clone AA419126.

[4254] SEQ ID NO: 4215 represents the cDNA sequence for clone AA419028.

[4255] SEQ ID NO: 4216 represents the cDNA sequence for clone AA419029.

[4256] SEQ ID NO: 4217 represents the cDNA sequence for clone AA419105.

[4257] SEQ ID NO: 4218 represents the cDNA sequence for clone AA419061.

[4258] SEQ ID NO: 4219 represents the cDNA sequence for clone AA419064.

[4259] SEQ ID NO: 4220 represents the cDNA sequence for clone AA419147.

[4260] SEQ ID NO: 4221 represents the cDNA sequence for clone AA419153.

[4261] SEQ ID NO: 4222 represents the cDNA sequence for clone AA419158.

[4262] SEQ ID NO: 4223 represents the cDNA sequence for clone AA419159.

[4263] SEQ ID NO: 4224 represents the cDNA sequence for clone AA419162.

[4264] SEQ ID NO: 4225 represents the cDNA sequence for clone AA419184.

[4265] SEQ ID NO: 4226 represents the cDNA sequence for clone AA419185.

[4266] SEQ ID NO: 4227 represents the cDNA sequence for clone AA419187.

[4267] SEQ ID NO: 4228 represents the cDNA sequence for clone AA419195.

[4268] SEQ ID NO: 4229 represents the cDNA sequence for clone AA419101.

[4269] SEQ ID NO: 4230 represents the cDNA sequence for clone AA419173.

[4270] SEQ ID NO: 4231 represents the cDNA sequence for clone AA419179.

[4271] SEQ ID NO: 4232 represents the cDNA sequence for clone AA419198.

[4272] SEQ ID NO: 4233 represents the cDNA sequence for clone AA419204.

[4273] SEQ ID NO: 4234 represents the cDNA sequence for clone AA419205.

[4274] SEQ ID NO: 4235 represents the cDNA sequence for clone AA419144.

[4275] SEQ ID NO: 4236 represents the cDNA sequence for clone AA419216.

[4276] SEQ ID NO: 4237 represents the cDNA sequence for clone AA419217.

[4277] SEQ ID NO: 4238 represents the cDNA sequence for clone AA419219.

[4278] SEQ ID NO: 4239 represents the cDNA sequence for clone AA419226.

[4279] SEQ ID NO: 4240 represents the cDNA sequence for clone AA419229.

[4280] SEQ ID NO: 4241 represents the cDNA sequence for clone AA419254.

[4281] SEQ ID NO: 4242 represents the cDNA sequence for clone AA419258.

[4282] SEQ ID NO: 4243 represents the cDNA sequence for clone AA419261.

[4283] SEQ ID NO: 4244 represents the cDNA sequence for clone AA419262.

[4284] SEQ ID NO: 4245 represents the cDNA sequence for clone AA419264.

[4285] SEQ ID NO: 4246 represents the cDNA sequence for clone AA419267.

[4286] SEQ ID NO: 4247 represents the cDNA sequence for clone AA419271.

[4287] SEQ ID NO: 4248 represents the cDNA sequence for clone AA419281.

[4288] SEQ ID NO: 4249 represents the cDNA sequence for clone AA419234.

[4289] SEQ ID NO: 4250 represents the cDNA sequence for clone AA419237.

[4290] SEQ ID NO: 4251 represents the cDNA sequence for clone AA419214.

[4291] SEQ ID NO: 4252 represents the cDNA sequence for clone AA419287.

[4292] SEQ ID NO: 4253 represents the cDNA sequence for clone AA419289.

[4293] SEQ ID NO: 4254 represents the cDNA sequence for clone AA419290.

[4294] SEQ ID NO: 4255 represents the cDNA sequence for clone AA419310.

[4295] SEQ ID NO: 4256 represents the cDNA sequence for clone AA419312.

[4296] SEQ ID NO: 4257 represents the cDNA sequence for clone AA419313.

[4297] SEQ ID NO: 4258 represents the cDNA sequence for clone AA419331.

[4298] SEQ ID NO: 4259 represents the cDNA sequence for clone AA419335.

[4299] SEQ ID NO: 4260 represents the cDNA sequence for clone AA419336.

[4300] SEQ ID NO: 4261 represents the cDNA sequence for clone AA419164.

[4301] SEQ ID NO: 4262 represents the cDNA sequence for clone AA419165.

[4302] SEQ ID NO: 4263 represents the cDNA sequence for clone AA419166.

[4303] SEQ ID NO: 4264 represents the cDNA sequence for clone AA419167.

[4304] SEQ ID NO: 4265 represents the cDNA sequence for clone AA419248.

[4305] SEQ ID NO: 4266 represents the cDNA sequence for clone AA419298.

[4306] SEQ ID NO: 4267 represents the cDNA sequence for clone AA419354.

[4307] SEQ ID NO: 4268 represents the cDNA sequence for clone AA419369.

[4308] SEQ ID NO: 4269 represents the cDNA sequence for clone AA419373.

[4309] SEQ ID NO: 4270 represents the cDNA sequence for clone AA419376.

[4310] SEQ ID NO: 4271 represents the cDNA sequence for clone AA419302.

[4311] SEQ ID NO: 4272 represents the cDNA sequence for clone AA419304.

[4312] SEQ ID NO: 4273 represents the cDNA sequence for clone AA419306.

[4313] SEQ ID NO: 4274 represents the cDNA sequence for clone AA419343.

[4314] SEQ ID NO: 4275 represents the cDNA sequence for clone AA421211.

[4315] SEQ ID NO: 4276 represents the cDNA sequence for clone AA421097.

[4316] SEQ ID NO: 4277 represents the cDNA sequence for clone AA421098.

[4317] SEQ ID NO: 4278 represents the cDNA sequence for clone AA421036.

[4318] SEQ ID NO: 4279 represents the cDNA sequence for clone AA421037.

[4319] SEQ ID NO: 4280 represents the cDNA sequence for clone AA421233.

[4320] SEQ ID NO: 4281 represents the cDNA sequence for clone AA421251.

[4321] SEQ ID NO: 4282 represents the cDNA sequence for clone AA421254.

[4322] SEQ ID NO: 4283 represents the cDNA sequence for clone AA421255.

[4323] SEQ ID NO: 4284 represents the cDNA sequence for clone AA421246.

[4324] SEQ ID NO: 4285 represents the cDNA sequence for clone AA421247.

[4325] SEQ ID NO: 4286 represents the cDNA sequence for clone AA421328.

[4326] SEQ ID NO: 4287 represents the cDNA sequence for clone AA421334.

[4327] SEQ ID NO: 4288 represents the cDNA sequence for clone AA421335.

[4328] SEQ ID NO: 4289 represents the cDNA sequence for clone AA421350.

[4329] SEQ ID NO: 4290 represents the cDNA sequence for clone AA421353.

[4330] SEQ ID NO: 4291 represents the cDNA sequence for clone AA421414.

[4331] SEQ ID NO: 4292 represents the cDNA sequence for clone AA421416.

[4332] SEQ ID NO: 4293 represents the cDNA sequence for clone AA421417.

[4333] SEQ ID NO: 4294 represents the cDNA sequence for clone AA421424.

[4334] SEQ ID NO: 4295 represents the cDNA sequence for clone AA421427.

[4335] SEQ ID NO: 4296 represents the cDNA sequence for clone AA421431.

[4336] SEQ ID NO: 4297 represents the cDNA sequence for clone AA421175.

[4337] SEQ ID NO: 4298 represents the cDNA sequence for clone AA421176.

[4338] SEQ ID NO: 4299 represents the cDNA sequence for clone AA421182.

[4339] SEQ ID NO: 4300 represents the cDNA sequence for clone AA421183.

[4340] SEQ ID NO: 4301 represents the cDNA sequence for clone AA421383.

[4341] SEQ ID NO: 4302 represents the cDNA sequence for clone AA421385.

[4342] SEQ ID NO: 4303 represents the cDNA sequence for clone AA421388.

[4343] SEQ ID NO: 4304 represents the cDNA sequence for clone AA421389.

[4344] SEQ ID NO: 4305 represents the cDNA sequence for clone AA421434.

[4345] SEQ ID NO: 4306 represents the cDNA sequence for clone AA421438.

[4346] SEQ ID NO: 4307 represents the cDNA sequence for clone AA421440.

[4347] SEQ ID NO: 4308 represents the cDNA sequence for clone AA421462.

[4348] SEQ ID NO: 4309 represents the cDNA sequence for clone AA421594.

[4349] SEQ ID NO: 4310 represents the cDNA sequence for clone AA421596.

[4350] SEQ ID NO: 4311 represents the cDNA sequence for clone AA421599.

[4351] SEQ ID NO: 4312 represents the cDNA sequence for clone AA421601.

[4352] SEQ ID NO: 4313 represents the cDNA sequence for clone AA421659.

[4353] SEQ ID NO: 4314 represents the cDNA sequence for clone AA421685.

[4354] SEQ ID NO: 4315 represents the cDNA sequence for clone AA421695.

[4355] SEQ ID NO: 4316 represents the cDNA sequence for clone AA421668.

[4356] SEQ ID NO: 4317 represents the cDNA sequence for clone AA421710.

[4357] SEQ ID NO: 4318 represents the cDNA sequence for clone AA421712.

[4358] SEQ ID NO: 4319 represents the cDNA sequence for clone AA421673.

[4359] SEQ ID NO: 4320 represents the cDNA sequence for clone AA421674.

[4360] SEQ ID NO: 4321 represents the cDNA sequence for clone AA421679.

[4361] SEQ ID NO: 4322 represents the cDNA sequence for clone AA421603.

[4362] SEQ ID NO: 4323 represents the cDNA sequence for clone AA421607.

[4363] SEQ ID NO: 4324 represents the cDNA sequence for clone AA421784.

[4364] SEQ ID NO: 4325 represents the cDNA sequence for clone AA421785.

[4365] SEQ ID NO: 4326 represents the cDNA sequence for clone AA421790.

[4366] SEQ ID NO: 4327 represents the cDNA sequence for clone AA421791.

[4367] SEQ ID NO: 4328 represents the cDNA sequence for clone AA421813.

[4368] SEQ ID NO: 4329 represents the cDNA sequence for clone AA421816.

[4369] SEQ ID NO: 4330 represents the cDNA sequence for clone AA421817.

[4370] SEQ ID NO: 4331 represents the cDNA sequence for clone AA421819.

[4371] SEQ ID NO: 4332 represents the cDNA sequence for clone AA421733.

[4372] SEQ ID NO: 4333 represents the cDNA sequence for clone AA421738.

[4373] SEQ ID NO: 4334 represents the cDNA sequence for clone AA421853.

[4374] SEQ ID NO: 4335 represents the cDNA sequence for clone AA421857.

[4375] SEQ ID NO: 4336 represents the cDNA sequence for clone AA421880.

[4376] SEQ ID NO: 4337 represents the cDNA sequence for clone AA421888.

[4377] SEQ ID NO: 4338 represents the cDNA sequence for clone AA421893.

[4378] SEQ ID NO: 4339 represents the cDNA sequence for clone AA421896.

[4379] SEQ ID NO: 4340 represents the cDNA sequence for clone AA421900.

[4380] SEQ ID NO: 4341 represents the cDNA sequence for clone AA421908.

[4381] SEQ ID NO: 4342 represents the cDNA sequence for clone AA421909.

[4382] SEQ ID NO: 4343 represents the cDNA sequence for clone AA421722.

[4383] SEQ ID NO: 4344 represents the cDNA sequence for clone AA421724.

[4384] SEQ ID NO: 4345 represents the cDNA sequence for clone AA421725.

[4385] SEQ ID NO: 4346 represents the cDNA sequence for clone AA421727.

[4386] SEQ ID NO: 4347 represents the cDNA sequence for clone AA421728.

[4387] SEQ ID NO: 4348 represents the cDNA sequence for clone AA421922.

[4388] SEQ ID NO: 4349 represents the cDNA sequence for clone AA421923.

[4389] SEQ ID NO: 4350 represents the cDNA sequence for clone AA421924.

[4390] SEQ ID NO: 4351 represents the cDNA sequence for clone AA421973.

[4391] SEQ ID NO: 4352 represents the cDNA sequence for clone AA421974.

[4392] SEQ ID NO: 4353 represents the cDNA sequence for clone AA422036.

[4393] SEQ ID NO: 4354 represents the cDNA sequence for clone AA422040.

[4394] SEQ ID NO: 4355 represents the cDNA sequence for clone AA422044.

[4395] SEQ ID NO: 4356 represents the cDNA sequence for clone AA422048.

[4396] SEQ ID NO: 4357 represents the cDNA sequence for clone AA422052.

[4397] SEQ ID NO: 4358 represents the cDNA sequence for clone AA422056.

[4398] SEQ ID NO: 4359 represents the cDNA sequence for clone AA421865.

[4399] SEQ ID NO: 4360 represents the cDNA sequence for clone AA421867.

[4400] SEQ ID NO: 4361 represents the cDNA sequence for clone AA422006.

[4401] SEQ ID NO: 4362 represents the cDNA sequence for clone AA422007.

[4402] SEQ ID NO: 4363 represents the cDNA sequence for clone AA422008.

[4403] SEQ ID NO: 4364 represents the cDNA sequence for clone AA422127.

[4404] SEQ ID NO: 4365 represents the cDNA sequence for clone AA422151.

[4405] SEQ ID NO: 4366 represents the cDNA sequence for clone AA422153.

[4406] SEQ ID NO: 4367 represents the cDNA sequence for clone AA422163.

[4407] SEQ ID NO: 4368 represents the cDNA sequence for clone AA422165.

[4408] SEQ ID NO: 4369 represents the cDNA sequence for clone AA422166.

[4409] SEQ ID NO: 4370 represents the cDNA sequence for clone AA422167.

[4410] SEQ ID NO: 4371 represents the cDNA sequence for clone AA422168.

[4411] SEQ ID NO: 4372 represents the cDNA sequence for clone AA421998.

[4412] SEQ ID NO: 4373 represents the cDNA sequence for clone AA421999.

[4413] SEQ ID NO: 4374 represents the cDNA sequence for clone AA422179.

[4414] SEQ ID NO: 4375 represents the cDNA sequence for clone AA422183.

[4415] SEQ ID NO: 4376 represents the cDNA sequence for clone AA424696.

[4416] SEQ ID NO: 4377 represents the cDNA sequence for clone AA424700.

[4417] SEQ ID NO: 4378 represents the cDNA sequence for clone AA424701.

[4418] SEQ ID NO: 4379 represents the cDNA sequence for clone AA424706.

[4419] SEQ ID NO: 4380 represents the cDNA sequence for clone AA423796.

[4420] SEQ ID NO: 4381 represents the cDNA sequence for clone AA423797.

[4421] SEQ ID NO: 4382 represents the cDNA sequence for clone AA423798.

[4422] SEQ ID NO: 4383 represents the cDNA sequence for clone AA423813.

[4423] SEQ ID NO: 4384 represents the cDNA sequence for clone AA423823.

[4424] SEQ ID NO: 4385 represents the cDNA sequence for clone AA425633.

[4425] SEQ ID NO: 4386 represents the cDNA sequence for clone AA425730.

[4426] SEQ ID NO: 4387 represents the cDNA sequence for clone AA425732.

[4427] SEQ ID NO: 4388 represents the cDNA sequence for clone AA425733.

[4428] SEQ ID NO: 4389 represents the cDNA sequence for clone AA425734.

[4429] SEQ ID NO: 4390 represents the cDNA sequence for clone AA425735.

[4430] SEQ ID NO: 4391 represents the cDNA sequence for clone AA425787.

[4431] SEQ ID NO: 4392 represents the cDNA sequence for clone AA425867.

[4432] SEQ ID NO: 4393 represents the cDNA sequence for clone AA425870.

[4433] SEQ ID NO: 4394 represents the cDNA sequence for clone AA425873.

[4434] SEQ ID NO: 4395 represents the cDNA sequence for clone AA426095.

[4435] SEQ ID NO: 4396 represents the cDNA sequence for clone AA426096.

[4436] SEQ ID NO: 4397 represents the cDNA sequence for clone AA426446.

[4437] SEQ ID NO: 4398 represents the cDNA sequence for clone AA426451.

[4438] SEQ ID NO: 4399 represents the cDNA sequence for clone AA426540.

[4439] SEQ ID NO: 4400 represents the cDNA sequence for clone AA426546.

[4440] SEQ ID NO: 4401 represents the cDNA sequence for clone AA426547.

[4441] SEQ ID NO: 4402 represents the cDNA sequence for clone AA426615.

[4442] SEQ ID NO: 4403 represents the cDNA sequence for clone AA426617.

[4443] SEQ ID NO: 4404 represents the cDNA sequence for clone AA426618.

[4444] SEQ ID NO: 4405 represents the cDNA sequence for clone AA426619.

[4445] SEQ ID NO: 4406 represents the cDNA sequence for clone AA426648.

[4446] SEQ ID NO: 4407 represents the cDNA sequence for clone AA426655.

[4447] SEQ ID NO: 4408 represents the cDNA sequence for clone AA426647.

[4448] SEQ ID NO: 4409 represents the cDNA sequence for clone AA424835.

[4449] SEQ ID NO: 4410 represents the cDNA sequence for clone AA424839.

[4450] SEQ ID NO: 4411 represents the cDNA sequence for clone AA424840.

[4451] SEQ ID NO: 4412 represents the cDNA sequence for clone AA424841.

[4452] SEQ ID NO: 4413 represents the cDNA sequence for clone AA424890.

[4453] SEQ ID NO: 4414 represents the cDNA sequence for clone AA424898.

[4454] SEQ ID NO: 4415 represents the cDNA sequence for clone AA424929.

[4455] SEQ ID NO: 4416 represents the cDNA sequence for clone AA424932.

[4456] SEQ ID NO: 4417 represents the cDNA sequence for clone AA425119.

[4457] SEQ ID NO: 4418 represents the cDNA sequence for clone AA425120.

[4458] SEQ ID NO: 4419 represents the cDNA sequence for clone AA425121.

[4459] SEQ ID NO: 4420 represents the cDNA sequence for clone AA425123.

[4460] SEQ ID NO: 4421 represents the cDNA sequence for clone AA425327.

[4461] SEQ ID NO: 4422 represents the cDNA sequence for clone AA425329.

[4462] SEQ ID NO: 4423 represents the cDNA sequence for clone AA425331.

[4463] SEQ ID NO: 4424 represents the cDNA sequence for clone AA425334.

[4464] SEQ ID NO: 4425 represents the cDNA sequence for clone AA425714.

[4465] SEQ ID NO: 4426 represents the cDNA sequence for clone AA425715.

[4466] SEQ ID NO: 4427 represents the cDNA sequence for clone AA425718.

[4467] SEQ ID NO: 4428 represents the cDNA sequence for clone AA425719.

[4468] SEQ ID NO: 4429 represents the cDNA sequence for clone AA426079.

[4469] SEQ ID NO: 4430 represents the cDNA sequence for clone AA426080.

[4470] SEQ ID NO: 4431 represents the cDNA sequence for clone AA426081.

[4471] SEQ ID NO: 4432 represents the cDNA sequence for clone AA426082.

[4472] SEQ ID NO: 4433 represents the cDNA sequence for clone AA426264.

[4473] SEQ ID NO: 4434 represents the cDNA sequence for clone AA426267.

[4474] SEQ ID NO: 4435 represents the cDNA sequence for clone AA426270.

[4475] SEQ ID NO: 4436 represents the cDNA sequence for clone AA426213.

[4476] SEQ ID NO: 4437 represents the cDNA sequence for clone AA426214.

[4477] SEQ ID NO: 4438 represents the cDNA sequence for clone AA426218.

[4478] SEQ ID NO: 4439 represents the cDNA sequence for clone AA425796.

[4479] SEQ ID NO: 4440 represents the cDNA sequence for clone AA425820.

[4480] SEQ ID NO: 4441 represents the cDNA sequence for clone AA425848.

[4481] SEQ ID NO: 4442 represents the cDNA sequence for clone AA426150.

[4482] SEQ ID NO: 4443 represents the cDNA sequence for clone AA425834.

[4483] SEQ ID NO: 4444 represents the cDNA sequence for clone AA425837.

[4484] SEQ ID NO: 4445 represents the cDNA sequence for clone AA425840.

[4485] SEQ ID NO: 4446 represents the cDNA sequence for clone AA425887.

[4486] SEQ ID NO: 4447 represents the cDNA sequence for clone AA425888.

[4487] SEQ ID NO: 4448 represents the cDNA sequence for clone AA425891.

[4488] SEQ ID NO: 4449 represents the cDNA sequence for clone AA425892.

[4489] SEQ ID NO: 4450 represents the cDNA sequence for clone AA425922.

[4490] SEQ ID NO: 4451 represents the cDNA sequence for clone AA425924.

[4491] SEQ ID NO: 4452 represents the cDNA sequence for clone AA425925.

[4492] SEQ ID NO: 4453 represents the cDNA sequence for clone AA425927.

[4493] SEQ ID NO: 4454 represents the cDNA sequence for clone AA425928.

[4494] SEQ ID NO: 4455 represents the cDNA sequence for clone AA425930.

[4495] SEQ ID NO: 4456 represents the cDNA sequence for clone AA425934.

[4496] SEQ ID NO: 4457 represents the cDNA sequence for clone AA425895.

[4497] SEQ ID NO: 4458 represents the cDNA sequence for clone AA425900.

[4498] SEQ ID NO: 4459 represents the cDNA sequence for clone AA425966.

[4499] SEQ ID NO: 4460 represents the cDNA sequence for clone AA425970.

[4500] SEQ ID NO: 4461 represents the cDNA sequence for clone AA425973.

[4501] SEQ ID NO: 4462 represents the cDNA sequence for clone AA425984.

[4502] SEQ ID NO: 4463 represents the cDNA sequence for clone AA425985.

[4503] SEQ ID NO: 4464 represents the cDNA sequence for clone AA425986.

[4504] SEQ ID NO: 4465 represents the cDNA sequence for clone AA425988.

[4505] SEQ ID NO: 4466 represents the cDNA sequence for clone AA425991.

[4506] SEQ ID NO: 4467 represents the cDNA sequence for clone AA425998.

[4507] SEQ ID NO: 4468 represents the cDNA sequence for clone AA426001.

[4508] SEQ ID NO: 4469 represents the cDNA sequence for clone AA426281.

[4509] SEQ ID NO: 4470 represents the cDNA sequence for clone AA426284.

[4510] SEQ ID NO: 4471 represents the cDNA sequence for clone AA426287.

[4511] SEQ ID NO: 4472 represents the cDNA sequence for clone AA428275.

[4512] SEQ ID NO: 4473 represents the cDNA sequence for clone AA428276.

[4513] SEQ ID NO: 4474 represents the cDNA sequence for clone AA428300.

[4514] SEQ ID NO: 4475 represents the cDNA sequence for clone AA428305.

[4515] SEQ ID NO: 4476 represents the cDNA sequence for clone AA428306.

[4516] SEQ ID NO: 4477 represents the cDNA sequence for clone AA428294.

[4517] SEQ ID NO: 4478 represents the cDNA sequence for clone AA428295.

[4518] SEQ ID NO: 4479 represents the cDNA sequence for clone AA428321.

[4519] SEQ ID NO: 4480 represents the cDNA sequence for clone AA428329.

[4520] SEQ ID NO: 4481 represents the cDNA sequence for clone AA428330.

[4521] SEQ ID NO: 4482 represents the cDNA sequence for clone AA428334.

[4522] SEQ ID NO: 4483 represents the cDNA sequence for clone AA428340.

[4523] SEQ ID NO: 4484 represents the cDNA sequence for clone AA428341.

[4524] SEQ ID NO: 4485 represents the cDNA sequence for clone AA428350.

[4525] SEQ ID NO: 4486 represents the cDNA sequence for clone AA428369.

[4526] SEQ ID NO: 4487 represents the cDNA sequence for clone AA428370.

[4527] SEQ ID NO: 4488 represents the cDNA sequence for clone AA428373.

[4528] SEQ ID NO: 4489 represents the cDNA sequence for clone AA428400.

[4529] SEQ ID NO: 4490 represents the cDNA sequence for clone AA428402.

[4530] SEQ ID NO: 4491 represents the cDNA sequence for clone AA428403.

[4531] SEQ ID NO: 4492 represents the cDNA sequence for clone AA428424.

[4532] SEQ ID NO: 4493 represents the cDNA sequence for clone AA428425.

[4533] SEQ ID NO: 4494 represents the cDNA sequence for clone AA428426.

[4534] SEQ ID NO: 4495 represents the cDNA sequence for clone AA428432.

[4535] SEQ ID NO: 4496 represents the cDNA sequence for clone AA428434.

[4536] SEQ ID NO: 4497 represents the cDNA sequence for clone AA428437.

[4537] SEQ ID NO: 4498 represents the cDNA sequence for clone AA428441.

[4538] SEQ ID NO: 4499 represents the cDNA sequence for clone AA428442.

[4539] SEQ ID NO: 4500 represents the cDNA sequence for clone AA428446.

[4540] SEQ ID NO: 4501 represents the cDNA sequence for clone AA428666.

[4541] SEQ ID NO: 4502 represents the cDNA sequence for clone AA428671.

[4542] SEQ ID NO: 4503 represents the cDNA sequence for clone AA428692.

[4543] SEQ ID NO: 4504 represents the cDNA sequence for clone AA428694.

[4544] SEQ ID NO: 4505 represents the cDNA sequence for clone AA428695.

[4545] SEQ ID NO: 4506 represents the cDNA sequence for clone AA428698.

[4546] SEQ ID NO: 4507 represents the cDNA sequence for clone AA428700.

[4547] SEQ ID NO: 4508 represents the cDNA sequence for clone AA428705.

[4548] SEQ ID NO: 4509 represents the cDNA sequence for clone AA428707.

[4549] SEQ ID NO: 4510 represents the cDNA sequence for clone AA428715.

[4550] SEQ ID NO: 4511 represents the cDNA sequence for clone AA428718.

[4551] SEQ ID NO: 4512 represents the cDNA sequence for clone AA428721.

[4552] SEQ ID NO: 4513 represents the cDNA sequence for clone AA428722.

[4553] SEQ ID NO: 4514 represents the cDNA sequence for clone AA428727.

[4554] SEQ ID NO: 4515 represents the cDNA sequence for clone AA428728.

[4555] SEQ ID NO: 4516 represents the cDNA sequence for clone AA428731.

[4556] SEQ ID NO: 4517 represents the cDNA sequence for clone AA428738.

[4557] SEQ ID NO: 4518 represents the cDNA sequence for clone AA428743.

[4558] SEQ ID NO: 4519 represents the cDNA sequence for clone AA428748.

[4559] SEQ ID NO: 4520 represents the cDNA sequence for clone AA428769.

[4560] SEQ ID NO: 4521 represents the cDNA sequence for clone AA428770.

[4561] SEQ ID NO: 4522 represents the cDNA sequence for clone AA428771.

[4562] SEQ ID NO: 4523 represents the cDNA sequence for clone AA428790.

[4563] SEQ ID NO: 4524 represents the cDNA sequence for clone AA428791.

[4564] SEQ ID NO: 4525 represents the cDNA sequence for clone AA428792.

[4565] SEQ ID NO: 4526 represents the cDNA sequence for clone AA428794.

[4566] SEQ ID NO: 4527 represents the cDNA sequence for clone AA428796.

[4567] SEQ ID NO: 4528 represents the cDNA sequence for clone AA428797.

[4568] SEQ ID NO: 4529 represents the cDNA sequence for clone AA428798.

[4569] SEQ ID NO: 4530 represents the cDNA sequence for clone AA428799.

[4570] SEQ ID NO: 4531 represents the cDNA sequence for clone AA428806.

[4571] SEQ ID NO: 4532 represents the cDNA sequence for clone AA428816.

[4572] SEQ ID NO: 4533 represents the cDNA sequence for clone AA428758.

[4573] SEQ ID NO: 4534 represents the cDNA sequence for clone AA428761.

[4574] SEQ ID NO: 4535 represents the cDNA sequence for clone AA428765.

[4575] SEQ ID NO: 4536 represents the cDNA sequence for clone AA428821.

[4576] SEQ ID NO: 4537 represents the cDNA sequence for clone AA428827.

[4577] SEQ ID NO: 4538 represents the cDNA sequence for clone AA428854.

[4578] SEQ ID NO: 4539 represents the cDNA sequence for clone AA428855.

[4579] SEQ ID NO: 4540 represents the cDNA sequence for clone AA428859.

[4580] SEQ ID NO: 4541 represents the cDNA sequence for clone AA428756.

[4581] SEQ ID NO: 4542 represents the cDNA sequence for clone AA428837.

[4582] SEQ ID NO: 4543 represents the cDNA sequence for clone AA428838.

[4583] SEQ ID NO: 4544 represents the cDNA sequence for clone AA428839.

[4584] SEQ ID NO: 4545 represents the cDNA sequence for clone AA428881.

[4585] SEQ ID NO: 4546 represents the cDNA sequence for clone AA428886.

[4586] SEQ ID NO: 4547 represents the cDNA sequence for clone AA428776.

[4587] SEQ ID NO: 4548 represents the cDNA sequence for clone AA428781.

[4588] SEQ ID NO: 4549 represents the cDNA sequence for clone AA428784.

[4589] SEQ ID NO: 4550 represents the cDNA sequence for clone AA428899.

[4590] SEQ ID NO: 4551 represents the cDNA sequence for clone AA428960.

[4591] SEQ ID NO: 4552 represents the cDNA sequence for clone AA428964.

[4592] SEQ ID NO: 4553 represents the cDNA sequence for clone AA428965.

[4593] SEQ ID NO: 4554 represents the cDNA sequence for clone AA428938.

[4594] SEQ ID NO: 4555 represents the cDNA sequence for clone AA428974.

[4595] SEQ ID NO: 4556 represents the cDNA sequence for clone AA428982.

[4596] SEQ ID NO: 4557 represents the cDNA sequence for clone AA428991.

[4597] SEQ ID NO: 4558 represents the cDNA sequence for clone AA428992.

[4598] SEQ ID NO: 4559 represents the cDNA sequence for clone AA428994.

[4599] SEQ ID NO: 4560 represents the cDNA sequence for clone AA429021.

[4600] SEQ ID NO: 4561 represents the cDNA sequence for clone AA429022.

[4601] SEQ ID NO: 4562 represents the cDNA sequence for clone AA428957.

[4602] SEQ ID NO: 4563 represents the cDNA sequence for clone AA429040.

[4603] SEQ ID NO: 4564 represents the cDNA sequence for clone AA428972.

[4604] SEQ ID NO: 4565 represents the cDNA sequence for clone AA429052.

[4605] SEQ ID NO: 4566 represents the cDNA sequence for clone AA429066.

[4606] SEQ ID NO: 4567 represents the cDNA sequence for clone AA429068.

[4607] SEQ ID NO: 4568 represents the cDNA sequence for clone AA429069.

[4608] SEQ ID NO: 4569 represents the cDNA sequence for clone AA429072.

[4609] SEQ ID NO: 4570 represents the cDNA sequence for clone AA429094.

[4610] SEQ ID NO: 4571 represents the cDNA sequence for clone AA429095.

[4611] SEQ ID NO: 4572 represents the cDNA sequence for clone AA429102.

[4612] SEQ ID NO: 4573 represents the cDNA sequence for clone AA429127.

[4613] SEQ ID NO: 4574 represents the cDNA sequence for clone AA429128.

[4614] SEQ ID NO: 4575 represents the cDNA sequence for clone AA429131.

[4615] SEQ ID NO: 4576 represents the cDNA sequence for clone AA429119.

[4616] SEQ ID NO: 4577 represents the cDNA sequence for clone AA429123.

[4617] SEQ ID NO: 4578 represents the cDNA sequence for clone AA429124.

[4618] SEQ ID NO: 4579 represents the cDNA sequence for clone AA429146.

[4619] SEQ ID NO: 4580 represents the cDNA sequence for clone AA429147.

[4620] SEQ ID NO: 4581 represents the cDNA sequence for clone AA429168.

[4621] SEQ ID NO: 4582 represents the cDNA sequence for clone AA429169.

[4622] SEQ ID NO: 4583 represents the cDNA sequence for clone AA429170.

[4623] SEQ ID NO: 4584 represents the cDNA sequence for clone AA429172.

[4624] SEQ ID NO: 4585 represents the cDNA sequence for clone AA429173.

[4625] SEQ ID NO: 4586 represents the cDNA sequence for clone AA429175.

[4626] SEQ ID NO: 4587 represents the cDNA sequence for clone AA429179.

[4627] SEQ ID NO: 4588 represents the cDNA sequence for clone AA429180.

[4628] SEQ ID NO: 4589 represents the cDNA sequence for clone AA429181.

[4629] SEQ ID NO: 4590 represents the cDNA sequence for clone AA429152.

[4630] SEQ ID NO: 4591 represents the cDNA sequence for clone AA429154.

[4631] SEQ ID NO: 4592 represents the cDNA sequence for clone AA429156.

[4632] SEQ ID NO: 4593 represents the cDNA sequence for clone AA429157.

[4633] SEQ ID NO: 4594 represents the cDNA sequence for clone AA429158.

[4634] SEQ ID NO: 4595 represents the cDNA sequence for clone AA429199.

[4635] SEQ ID NO: 4596 represents the cDNA sequence for clone AA429205.

[4636] SEQ ID NO: 4597 represents the cDNA sequence for clone AA429223.

[4637] SEQ ID NO: 4598 represents the cDNA sequence for clone AA429163.

[4638] SEQ ID NO: 4599 represents the cDNA sequence for clone AA429167.

[4639] SEQ ID NO: 4600 represents the cDNA sequence for clone AA429251.

[4640] SEQ ID NO: 4601 represents the cDNA sequence for clone AA429212.

[4641] SEQ ID NO: 4602 represents the cDNA sequence for clone AA429215.

[4642] SEQ ID NO: 4603 represents the cDNA sequence for clone AA429262.

[4643] SEQ ID NO: 4604 represents the cDNA sequence for clone AA429266.

[4644] SEQ ID NO: 4605 represents the cDNA sequence for clone AA429269.

[4645] SEQ ID NO: 4606 represents the cDNA sequence for clone AA429273.

[4646] SEQ ID NO: 4607 represents the cDNA sequence for clone AA429254.

[4647] SEQ ID NO: 4608 represents the cDNA sequence for clone AA429257.

[4648] SEQ ID NO: 4609 represents the cDNA sequence for clone AA429345.

[4649] SEQ ID NO: 4610 represents the cDNA sequence for clone AA429351.

[4650] SEQ ID NO: 4611 represents the cDNA sequence for clone AA429357.

[4651] SEQ ID NO: 4612 represents the cDNA sequence for clone AA429362.

[4652] SEQ ID NO: 4613 represents the cDNA sequence for clone AA430357.

[4653] SEQ ID NO: 4614 represents the cDNA sequence for clone AA430358.

[4654] SEQ ID NO: 4615 represents the cDNA sequence for clone AA430366.

[4655] SEQ ID NO: 4616 represents the cDNA sequence for clone AA430336.

[4656] SEQ ID NO: 4617 represents the cDNA sequence for clone AA430338.

[4657] SEQ ID NO: 4618 represents the cDNA sequence for clone AA430395.

[4658] SEQ ID NO: 4619 represents the cDNA sequence for clone AA430400.

[4659] SEQ ID NO: 4620 represents the cDNA sequence for clone AA430401.

[4660] SEQ ID NO: 4621 represents the cDNA sequence for clone AA430431.

[4661] SEQ ID NO: 4622 represents the cDNA sequence for clone AA430432.

[4662] SEQ ID NO: 4623 represents the cDNA sequence for clone AA430435.

[4663] SEQ ID NO: 4624 represents the cDNA sequence for clone AA430441.

[4664] SEQ ID NO: 4625 represents the cDNA sequence for clone AA430332.

[4665] SEQ ID NO: 4626 represents the cDNA sequence for clone AA430417.

[4666] SEQ ID NO: 4627 represents the cDNA sequence for clone AA430471.

[4667] SEQ ID NO: 4628 represents the cDNA sequence for clone AA430389.

[4668] SEQ ID NO: 4629 represents the cDNA sequence for clone AA430390.

[4669] SEQ ID NO: 4630 represents the cDNA sequence for clone AA430466.

[4670] SEQ ID NO: 4631 represents the cDNA sequence for clone AA430467.

[4671] SEQ ID NO: 4632 represents the cDNA sequence for clone AA430484.

[4672] SEQ ID NO: 4633 represents the cDNA sequence for clone AA430486.

[4673] SEQ ID NO: 4634 represents the cDNA sequence for clone AA430514.

[4674] SEQ ID NO: 4635 represents the cDNA sequence for clone AA430515.

[4675] SEQ ID NO: 4636 represents the cDNA sequence for clone AA430517.

[4676] SEQ ID NO: 4637 represents the cDNA sequence for clone AA430519.

[4677] SEQ ID NO: 4638 represents the cDNA sequence for clone AA430522.

[4678] SEQ ID NO: 4639 represents the cDNA sequence for clone AA430523.

[4679] SEQ ID NO: 4640 represents the cDNA sequence for clone AA430504.

[4680] SEQ ID NO: 4641 represents the cDNA sequence for clone AA430510.

[4681] SEQ ID NO: 4642 represents the cDNA sequence for clone AA430511.

[4682] SEQ ID NO: 4643 represents the cDNA sequence for clone AA430512.

[4683] SEQ ID NO: 4644 represents the cDNA sequence for clone AA430404.

[4684] SEQ ID NO: 4645 represents the cDNA sequence for clone AA430407.

[4685] SEQ ID NO: 4646 represents the cDNA sequence for clone AA430410.

[4686] SEQ ID NO: 4647 represents the cDNA sequence for clone AA430538.

[4687] SEQ ID NO: 4648 represents the cDNA sequence for clone AA430539.

[4688] SEQ ID NO: 4649 represents the cDNA sequence for clone AA430543.

[4689] SEQ ID NO: 4650 represents the cDNA sequence for clone AA430550.

[4690] SEQ ID NO: 4651 represents the cDNA sequence for clone AA430552.

[4691] SEQ ID NO: 4652 represents the cDNA sequence for clone AA430553.

[4692] SEQ ID NO: 4653 represents the cDNA sequence for clone AA430577.

[4693] SEQ ID NO: 4654 represents the cDNA sequence for clone AA430457.

[4694] SEQ ID NO: 4655 represents the cDNA sequence for clone AA430459.

[4695] SEQ ID NO: 4656 represents the cDNA sequence for clone AA430461.

[4696] SEQ ID NO: 4657 represents the cDNA sequence for clone AA430564.

[4697] SEQ ID NO: 4658 represents the cDNA sequence for clone AA430569.

[4698] SEQ ID NO: 4659 represents the cDNA sequence for clone AA430570.

[4699] SEQ ID NO: 4660 represents the cDNA sequence for clone AA430571.

[4700] SEQ ID NO: 4661 represents the cDNA sequence for clone AA430558.

[4701] SEQ ID NO: 4662 represents the cDNA sequence for clone AA430562.

[4702] SEQ ID NO: 4663 represents the cDNA sequence for clone AA430531.

[4703] SEQ ID NO: 4664 represents the cDNA sequence for clone AA430536.

[4704] SEQ ID NO: 4665 represents the cDNA sequence for clone AA430537.

[4705] SEQ ID NO: 4666 represents the cDNA sequence for clone AA430600.

[4706] SEQ ID NO: 4667 represents the cDNA sequence for clone AA430602.

[4707] SEQ ID NO: 4668 represents the cDNA sequence for clone AA430604.

[4708] SEQ ID NO: 4669 represents the cDNA sequence for clone AA430608.

[4709] SEQ ID NO: 4670 represents the cDNA sequence for clone AA430646.

[4710] SEQ ID NO: 4671 represents the cDNA sequence for clone AA430647.

[4711] SEQ ID NO: 4672 represents the cDNA sequence for clone AA430651.

[4712] SEQ ID NO: 4673 represents the cDNA sequence for clone AA430636.

[4713] SEQ ID NO: 4674 represents the cDNA sequence for clone AA430639.

[4714] SEQ ID NO: 4675 represents the cDNA sequence for clone AA430640.

[4715] SEQ ID NO: 4676 represents the cDNA sequence for clone AA430641.

[4716] SEQ ID NO: 4677 represents the cDNA sequence for clone AA430682.

[4717] SEQ ID NO: 4678 represents the cDNA sequence for clone AA430669.

[4718] SEQ ID NO: 4679 represents the cDNA sequence for clone AA430672.

[4719] SEQ ID NO: 4680 represents the cDNA sequence for clone AA430701.

[4720] SEQ ID NO: 4681 represents the cDNA sequence for clone AA430722.

[4721] SEQ ID NO: 4682 represents the cDNA sequence for clone AA430726.

[4722] SEQ ID NO: 4683 represents the cDNA sequence for clone AA430727.

[4723] SEQ ID NO: 4684 represents the cDNA sequence for clone AA430737.

[4724] SEQ ID NO: 4685 represents the cDNA sequence for clone AA427360.

[4725] SEQ ID NO: 4686 represents the cDNA sequence for clone AA427363.

[4726] SEQ ID NO: 4687 represents the cDNA sequence for clone AA427408.

[4727] SEQ ID NO: 4688 represents the cDNA sequence for clone AA427409.

[4728] SEQ ID NO: 4689 represents the cDNA sequence for clone AA427414.

[4729] SEQ ID NO: 4690 represents the cDNA sequence for clone AA427439.

[4730] SEQ ID NO: 4691 represents the cDNA sequence for clone AA427440.

[4731] SEQ ID NO: 4692 represents the cDNA sequence for clone AA427451.

[4732] SEQ ID NO: 4693 represents the cDNA sequence for clone AA427452.

[4733] SEQ ID NO: 4694 represents the cDNA sequence for clone AA427453.

[4734] SEQ ID NO: 4695 represents the cDNA sequence for clone AA427457.

[4735] SEQ ID NO: 4696 represents the cDNA sequence for clone AA427466.

[4736] SEQ ID NO: 4697 represents the cDNA sequence for clone AA427467.

[4737] SEQ ID NO: 4698 represents the cDNA sequence for clone AA427470.

[4738] SEQ ID NO: 4699 represents the cDNA sequence for clone AA427473.

[4739] SEQ ID NO: 4700 represents the cDNA sequence for clone AA427496.

[4740] SEQ ID NO: 4701 represents the cDNA sequence for clone AA427497.

[4741] SEQ ID NO: 4702 represents the cDNA sequence for clone AA427498.

[4742] SEQ ID NO: 4703 represents the cDNA sequence for clone AA427499.

[4743] SEQ ID NO: 4704 represents the cDNA sequence for clone AA427502.

[4744] SEQ ID NO: 4705 represents the cDNA sequence for clone AA427503.

[4745] SEQ ID NO: 4706 represents the cDNA sequence for clone AA427481.

[4746] SEQ ID NO: 4707 represents the cDNA sequence for clone AA427483.

[4747] SEQ ID NO: 4708 represents the cDNA sequence for clone AA427445.

[4748] SEQ ID NO: 4709 represents the cDNA sequence for clone AA427449.

[4749] SEQ ID NO: 4710 represents the cDNA sequence for clone AA427450.

[4750] SEQ ID NO: 4711 represents the cDNA sequence for clone AA427512.

[4751] SEQ ID NO: 4712 represents the cDNA sequence for clone AA427513.

[4752] SEQ ID NO: 4713 represents the cDNA sequence for clone AA427487.

[4753] SEQ ID NO: 4714 represents the cDNA sequence for clone AA427490.

[4754] SEQ ID NO: 4715 represents the cDNA sequence for clone AA427555.

[4755] SEQ ID NO: 4716 represents the cDNA sequence for clone AA427569.

[4756] SEQ ID NO: 4717 represents the cDNA sequence for clone AA427571.

[4757] SEQ ID NO: 4718 represents the cDNA sequence for clone AA427557.

[4758] SEQ ID NO: 4719 represents the cDNA sequence for clone AA427558.

[4759] SEQ ID NO: 4720 represents the cDNA sequence for clone AA427562.

[4760] SEQ ID NO: 4721 represents the cDNA sequence for clone AA427584.

[4761] SEQ ID NO: 4722 represents the cDNA sequence for clone AA427588.

[4762] SEQ ID NO: 4723 represents the cDNA sequence for clone AA427595.

[4763] SEQ ID NO: 4724 represents the cDNA sequence for clone AA427597.

[4764] SEQ ID NO: 4725 represents the cDNA sequence for clone AA427617.

[4765] SEQ ID NO: 4726 represents the cDNA sequence for clone AA427622.

[4766] SEQ ID NO: 4727 represents the cDNA sequence for clone AA427629.

[4767] SEQ ID NO: 4728 represents the cDNA sequence for clone AA427646.

[4768] SEQ ID NO: 4729 represents the cDNA sequence for clone AA427666.

[4769] SEQ ID NO: 4730 represents the cDNA sequence for clone AA427667.

[4770] SEQ ID NO: 4731 represents the cDNA sequence for clone AA427671.

[4771] SEQ ID NO: 4732 represents the cDNA sequence for clone AA427680.

[4772] SEQ ID NO: 4733 represents the cDNA sequence for clone AA427712.

[4773] SEQ ID NO: 4734 represents the cDNA sequence for clone AA427653.

[4774] SEQ ID NO: 4735 represents the cDNA sequence for clone AA427655.

[4775] SEQ ID NO: 4736 represents the cDNA sequence for clone AA427660.

[4776] SEQ ID NO: 4737 represents the cDNA sequence for clone AA427661.

[4777] SEQ ID NO: 4738 represents the cDNA sequence for clone AA427662.

[4778] SEQ ID NO: 4739 represents the cDNA sequence for clone AA427724.

[4779] SEQ ID NO: 4740 represents the cDNA sequence for clone AA427725.

[4780] SEQ ID NO: 4741 represents the cDNA sequence for clone AA427730.

[4781] SEQ ID NO: 4742 represents the cDNA sequence for clone AA427731.

[4782] SEQ ID NO: 4743 represents the cDNA sequence for clone AA427744.

[4783] SEQ ID NO: 4744 represents the cDNA sequence for clone AA427745.

[4784] SEQ ID NO: 4745 represents the cDNA sequence for clone AA427746.

[4785] SEQ ID NO: 4746 represents the cDNA sequence for clone AA427701.

[4786] SEQ ID NO: 4747 represents the cDNA sequence for clone AA427706.

[4787] SEQ ID NO: 4748 represents the cDNA sequence for clone AA427750.

[4788] SEQ ID NO: 4749 represents the cDNA sequence for clone AA427767.

[4789] SEQ ID NO: 4750 represents the cDNA sequence for clone AA429370.

[4790] SEQ ID NO: 4751 represents the cDNA sequence for clone AA429371.

[4791] SEQ ID NO: 4752 represents the cDNA sequence for clone AA430746.

[4792] SEQ ID NO: 4753 represents the cDNA sequence for clone AA427400.

[4793] SEQ ID NO: 4754 represents the cDNA sequence for clone AA427402.

[4794] SEQ ID NO: 4755 represents the cDNA sequence for clone AA427404.

[4795] SEQ ID NO: 4756 represents the cDNA sequence for clone AA427721.

[4796] SEQ ID NO: 4757 represents the cDNA sequence for clone AA427722.

[4797] SEQ ID NO: 4758 represents the cDNA sequence for clone AA427872.

[4798] SEQ ID NO: 4759 represents the cDNA sequence for clone AA427975.

[4799] SEQ ID NO: 4760 represents the cDNA sequence for clone AA428088.

[4800] SEQ ID NO: 4761 represents the cDNA sequence for clone AA428091.

[4801] SEQ ID NO: 4762 represents the cDNA sequence for clone AA428092.

[4802] SEQ ID NO: 4763 represents the cDNA sequence for clone AA428171.

[4803] SEQ ID NO: 4764 represents the cDNA sequence for clone AA428250.

[4804] SEQ ID NO: 4765 represents the cDNA sequence for clone AA428252.

[4805] SEQ ID NO: 4766 represents the cDNA sequence for clone AA428253.

[4806] SEQ ID NO: 4767 represents the cDNA sequence for clone AA428413.

[4807] SEQ ID NO: 4768 represents the cDNA sequence for clone AA428414.

[4808] SEQ ID NO: 4769 represents the cDNA sequence for clone AA428416.

[4809] SEQ ID NO: 4770 represents the cDNA sequence for clone AA428418.

[4810] SEQ ID NO: 4771 represents the cDNA sequence for clone AA429285.

[4811] SEQ ID NO: 4772 represents the cDNA sequence for clone AA429286.

[4812] SEQ ID NO: 4773 represents the cDNA sequence for clone AA430693.

[4813] SEQ ID NO: 4774 represents the cDNA sequence for clone AA427394.

[4814] SEQ ID NO: 4775 represents the cDNA sequence for clone AA427521.

[4815] SEQ ID NO: 4776 represents the cDNA sequence for clone AA427522.

[4816] SEQ ID NO: 4777 represents the cDNA sequence for clone AA428222.

[4817] SEQ ID NO: 4778 represents the cDNA sequence for clone AA428224.

[4818] SEQ ID NO: 4779 represents the cDNA sequence for clone AA429411.

[4819] SEQ ID NO: 4780 represents the cDNA sequence for clone AA429413.

[4820] SEQ ID NO: 4781 represents the cDNA sequence for clone AA429414.

[4821] SEQ ID NO: 4782 represents the cDNA sequence for clone AA429415.

[4822] SEQ ID NO: 4783 represents the cDNA sequence for clone AA429416.

[4823] SEQ ID NO: 4784 represents the cDNA sequence for clone AA427538.

[4824] SEQ ID NO: 4785 represents the cDNA sequence for clone AA427539.

[4825] SEQ ID NO: 4786 represents the cDNA sequence for clone AA427540.

[4826] SEQ ID NO: 4787 represents the cDNA sequence for clone AA428351.

[4827] SEQ ID NO: 4788 represents the cDNA sequence for clone AA428352.

[4828] SEQ ID NO: 4789 represents the cDNA sequence for clone AA429393.

[4829] SEQ ID NO: 4790 represents the cDNA sequence for clone AA429394.

[4830] SEQ ID NO: 4791 represents the cDNA sequence for clone AA429398.

[4831] SEQ ID NO: 4792 represents the cDNA sequence for clone AA429399.

[4832] SEQ ID NO: 4793 represents the cDNA sequence for clone AA427780.

[4833] SEQ ID NO: 4794 represents the cDNA sequence for clone AA428159.

[4834] SEQ ID NO: 4795 represents the cDNA sequence for clone AA430713.

[4835] SEQ ID NO: 4796 represents the cDNA sequence for clone AA430718.

[4836] SEQ ID NO: 4797 represents the cDNA sequence for clone AA428107.

[4837] SEQ ID NO: 4798 represents the cDNA sequence for clone AA428110.

[4838] SEQ ID NO: 4799 represents the cDNA sequence for clone AA428111.

[4839] SEQ ID NO: 4800 represents the cDNA sequence for clone AA428113.

[4840] SEQ ID NO: 4801 represents the cDNA sequence for clone AA427371.

[4841] SEQ ID NO: 4802 represents the cDNA sequence for clone AA429042.

[4842] SEQ ID NO: 4803 represents the cDNA sequence for clone AA429047.

[4843] SEQ ID NO: 4804 represents the cDNA sequence for clone AA429049.

[4844] SEQ ID NO: 4805 represents the cDNA sequence for clone AA429427.

[4845] SEQ ID NO: 4806 represents the cDNA sequence for clone AA429457.

[4846] SEQ ID NO: 4807 represents the cDNA sequence for clone AA429458.

[4847] SEQ ID NO: 4808 represents the cDNA sequence for clone AA429462.

[4848] SEQ ID NO: 4809 represents the cDNA sequence for clone AA429470.

[4849] SEQ ID NO: 4810 represents the cDNA sequence for clone AA429481.

[4850] SEQ ID NO: 4811 represents the cDNA sequence for clone AA429484.

[4851] SEQ ID NO: 4812 represents the cDNA sequence for clone AA427936.

[4852] SEQ ID NO: 4813 represents the cDNA sequence for clone AA428379.

[4853] SEQ ID NO: 4814 represents the cDNA sequence for clone AA433808.

[4854] SEQ ID NO: 4815 represents the cDNA sequence for clone AA433809.

[4855] SEQ ID NO: 4816 represents the cDNA sequence for clone AA433813.

[4856] SEQ ID NO: 4817 represents the cDNA sequence for clone AA433850.

[4857] SEQ ID NO: 4818 represents the cDNA sequence for clone AA433851.

[4858] SEQ ID NO: 4819 represents the cDNA sequence for clone AA433855.

[4859] SEQ ID NO: 4820 represents the cDNA sequence for clone AA433858.

[4860] SEQ ID NO: 4821 represents the cDNA sequence for clone AA433863.

[4861] SEQ ID NO: 4822 represents the cDNA sequence for clone AA433864.

[4862] SEQ ID NO: 4823 represents the cDNA sequence for clone AA433865.

[4863] SEQ ID NO: 4824 represents the cDNA sequence for clone AA433868.

[4864] SEQ ID NO: 4825 represents the cDNA sequence for clone AA433874.

[4865] SEQ ID NO: 4826 represents the cDNA sequence for clone AA433882.

[4866] SEQ ID NO: 4827 represents the cDNA sequence for clone AA433960.

[4867] SEQ ID NO: 4828 represents the cDNA sequence for clone AA433965.

[4868] SEQ ID NO: 4829 represents the cDNA sequence for clone AA433967.

[4869] SEQ ID NO: 4830 represents the cDNA sequence for clone AA433976.

[4870] SEQ ID NO: 4831 represents the cDNA sequence for clone AA433980.

[4871] SEQ ID NO: 4832 represents the cDNA sequence for clone AA433988.

[4872] SEQ ID NO: 4833 represents the cDNA sequence for clone AA433996.

[4873] SEQ ID NO: 4834 represents the cDNA sequence for clone AA433997.

[4874] SEQ ID NO: 4835 represents the cDNA sequence for clone AA434004.

[4875] SEQ ID NO: 4836 represents the cDNA sequence for clone AA434005.

[4876] SEQ ID NO: 4837 represents the cDNA sequence for clone AA434009.

[4877] SEQ ID NO: 4838 represents the cDNA sequence for clone AA434010.

[4878] SEQ ID NO: 4839 represents the cDNA sequence for clone AA434011.

[4879] SEQ ID NO: 4840 represents the cDNA sequence for clone AA434012.

[4880] SEQ ID NO: 4841 represents the cDNA sequence for clone AA434013.

[4881] SEQ ID NO: 4842 represents the cDNA sequence for clone AA434018.

[4882] SEQ ID NO: 4843 represents the cDNA sequence for clone AA434019.

[4883] SEQ ID NO: 4844 represents the cDNA sequence for clone AA434020.

[4884] SEQ ID NO: 4845 represents the cDNA sequence for clone AA434023.

[4885] SEQ ID NO: 4846 represents the cDNA sequence for clone AA434025.

[4886] SEQ ID NO: 4847 represents the cDNA sequence for clone AA434029.

[4887] SEQ ID NO: 4848 represents the cDNA sequence for clone AA434032.

[4888] SEQ ID NO: 4849 represents the cDNA sequence for clone AA434036.

[4889] SEQ ID NO: 4850 represents the cDNA sequence for clone AA434041.

[4890] SEQ ID NO: 4851 represents the cDNA sequence for clone AA434043.

[4891] SEQ ID NO: 4852 represents the cDNA sequence for clone AA434044.

[4892] SEQ ID NO: 4853 represents the cDNA sequence for clone AA434047.

[4893] SEQ ID NO: 4854 represents the cDNA sequence for clone AA434052.

[4894] SEQ ID NO: 4855 represents the cDNA sequence for clone AA434055.

[4895] SEQ ID NO: 4856 represents the cDNA sequence for clone AA434056.

[4896] SEQ ID NO: 4857 represents the cDNA sequence for clone AA434057.

[4897] SEQ ID NO: 4858 represents the cDNA sequence for clone AA434104.

[4898] SEQ ID NO: 4859 represents the cDNA sequence for clone AA434109.

[4899] SEQ ID NO: 4860 represents the cDNA sequence for clone AA434111.

[4900] SEQ ID NO: 4861 represents the cDNA sequence for clone AA434120.

[4901] SEQ ID NO: 4862 represents the cDNA sequence for clone AA434121.

[4902] SEQ ID NO: 4863 represents the cDNA sequence for clone AA434126.

[4903] SEQ ID NO: 4864 represents the cDNA sequence for clone AA434127.

[4904] SEQ ID NO: 4865 represents the cDNA sequence for clone AA434130.

[4905] SEQ ID NO: 4866 represents the cDNA sequence for clone AA434136.

[4906] SEQ ID NO: 4867 represents the cDNA sequence for clone AA434142.

[4907] SEQ ID NO: 4868 represents the cDNA sequence for clone AA434145.

[4908] SEQ ID NO: 4869 represents the cDNA sequence for clone AA434154.

[4909] SEQ ID NO: 4870 represents the cDNA sequence for clone AA434155.

[4910] SEQ ID NO: 4871 represents the cDNA sequence for clone AA434156.

[4911] SEQ ID NO: 4872 represents the cDNA sequence for clone AA434160.

[4912] SEQ ID NO: 4873 represents the cDNA sequence for clone AA434165.

[4913] SEQ ID NO: 4874 represents the cDNA sequence for clone AA434166.

[4914] SEQ ID NO: 4875 represents the cDNA sequence for clone AA434168.

[4915] SEQ ID NO: 4876 represents the cDNA sequence for clone AA434170.

[4916] SEQ ID NO: 4877 represents the cDNA sequence for clone AA434172.

[4917] SEQ ID NO: 4878 represents the cDNA sequence for clone AA434173.

[4918] SEQ ID NO: 4879 represents the cDNA sequence for clone AA434183.

[4919] SEQ ID NO: 4880 represents the cDNA sequence for clone AA434185.

[4920] SEQ ID NO: 4881 represents the cDNA sequence for clone AA434186.

[4921] SEQ ID NO: 4882 represents the cDNA sequence for clone AA434190.

[4922] SEQ ID NO: 4883 represents the cDNA sequence for clone AA434192.

[4923] SEQ ID NO: 4884 represents the cDNA sequence for clone AA434194.

[4924] SEQ ID NO: 4885 represents the cDNA sequence for clone AA434201.

[4925] SEQ ID NO: 4886 represents the cDNA sequence for clone AA434213.

[4926] SEQ ID NO: 4887 represents the cDNA sequence for clone AA434214.

[4927] SEQ ID NO: 4888 represents the cDNA sequence for clone AA434242.

[4928] SEQ ID NO: 4889 represents the cDNA sequence for clone AA434243.

[4929] SEQ ID NO: 4890 represents the cDNA sequence for clone AA434246.

[4930] SEQ ID NO: 4891 represents the cDNA sequence for clone AA434250.

[4931] SEQ ID NO: 4892 represents the cDNA sequence for clone AA434252.

[4932] SEQ ID NO: 4893 represents the cDNA sequence for clone AA434256.

[4933] SEQ ID NO: 4894 represents the cDNA sequence for clone AA434257.

[4934] SEQ ID NO: 4895 represents the cDNA sequence for clone AA434261.

[4935] SEQ ID NO: 4896 represents the cDNA sequence for clone AA434265.

[4936] SEQ ID NO: 4897 represents the cDNA sequence for clone AA434274.

[4937] SEQ ID NO: 4898 represents the cDNA sequence for clone AA434280.

[4938] SEQ ID NO: 4899 represents the cDNA sequence for clone AA434281.

[4939] SEQ ID NO: 4900 represents the cDNA sequence for clone AA434282.

[4940] SEQ ID NO: 4901 represents the cDNA sequence for clone AA434288.

[4941] SEQ ID NO: 4902 represents the cDNA sequence for clone AA434309.

[4942] SEQ ID NO: 4903 represents the cDNA sequence for clone AA434316.

[4943] SEQ ID NO: 4904 represents the cDNA sequence for clone AA434326.

[4944] SEQ ID NO: 4905 represents the cDNA sequence for clone AA434328.

[4945] SEQ ID NO: 4906 represents the cDNA sequence for clone AA434329.

[4946] SEQ ID NO: 4907 represents the cDNA sequence for clone AA434330.

[4947] SEQ ID NO: 4908 represents the cDNA sequence for clone AA434332.

[4948] SEQ ID NO: 4909 represents the cDNA sequence for clone AA434335.

[4949] SEQ ID NO: 4910 represents the cDNA sequence for clone AA434388.

[4950] SEQ ID NO: 4911 represents the cDNA sequence for clone AA434404.

[4951] SEQ ID NO: 4912 represents the cDNA sequence for clone AA434411.

[4952] SEQ ID NO: 4913 represents the cDNA sequence for clone AA434419.

[4953] SEQ ID NO: 4914 represents the cDNA sequence for clone AA434433.

[4954] SEQ ID NO: 4915 represents the cDNA sequence for clone AA434442.

[4955] SEQ ID NO: 4916 represents the cDNA sequence for clone AA434446.

[4956] SEQ ID NO: 4917 represents the cDNA sequence for clone AA434447.

[4957] SEQ ID NO: 4918 represents the cDNA sequence for clone AA434452.

[4958] SEQ ID NO: 4919 represents the cDNA sequence for clone AA434484.

[4959] SEQ ID NO: 4920 represents the cDNA sequence for clone AA434487.

[4960] SEQ ID NO: 4921 represents the cDNA sequence for clone AA434502.

[4961] SEQ ID NO: 4922 represents the cDNA sequence for clone AA434508.

[4962] SEQ ID NO: 4923 represents the cDNA sequence for clone AA434517.

[4963] SEQ ID NO: 4924 represents the cDNA sequence for clone AA434518.

[4964] SEQ ID NO: 4925 represents the cDNA sequence for clone AA434520.

[4965] SEQ ID NO: 4926 represents the cDNA sequence for clone AA436332.

[4966] SEQ ID NO: 4927 represents the cDNA sequence for clone AA436346.

[4967] SEQ ID NO: 4928 represents the cDNA sequence for clone AA436350.

[4968] SEQ ID NO: 4929 represents the cDNA sequence for clone AA436359.

[4969] SEQ ID NO: 4930 represents the cDNA sequence for clone AA436362.

[4970] SEQ ID NO: 4931 represents the cDNA sequence for clone AA436366.

[4971] SEQ ID NO: 4932 represents the cDNA sequence for clone AA436393.

[4972] SEQ ID NO: 4933 represents the cDNA sequence for clone AA436405.

[4973] SEQ ID NO: 4934 represents the cDNA sequence for clone AA436409.

[4974] SEQ ID NO: 4935 represents the cDNA sequence for clone AA436414.

[4975] SEQ ID NO: 4936 represents the cDNA sequence for clone AA436427.

[4976] SEQ ID NO: 4937 represents the cDNA sequence for clone AA436432.

[4977] SEQ ID NO: 4938 represents the cDNA sequence for clone AA436438.

[4978] SEQ ID NO: 4939 represents the cDNA sequence for clone AA436442.

[4979] SEQ ID NO: 4940 represents the cDNA sequence for clone AA437329.

[4980] SEQ ID NO: 4941 represents the cDNA sequence for clone AA437340.

[4981] SEQ ID NO: 4942 represents the cDNA sequence for clone AA437346.

[4982] SEQ ID NO: 4943 represents the cDNA sequence for clone AA437349.

[4983] SEQ ID NO: 4944 represents the cDNA sequence for clone AA437351.

[4984] SEQ ID NO: 4945 represents the cDNA sequence for clone AA437354.

[4985] SEQ ID NO: 4946 represents the cDNA sequence for clone AA437356.

[4986] SEQ ID NO: 4947 represents the cDNA sequence for clone AA437358.

[4987] SEQ ID NO: 4948 represents the cDNA sequence for clone AA437361.

[4988] SEQ ID NO: 4949 represents the cDNA sequence for clone AA437369.

[4989] SEQ ID NO: 4950 represents the cDNA sequence for clone AA437370.

[4990] SEQ ID NO: 4951 represents the cDNA sequence for clone AA437378.

[4991] SEQ ID NO: 4952 represents the cDNA sequence for clone AA437379.

[4992] SEQ ID NO: 4953 represents the cDNA sequence for clone AA437381.

[4993] SEQ ID NO: 4954 represents the cDNA sequence for clone AA437386.

[4994] SEQ ID NO: 4955 represents the cDNA sequence for clone AA437388.

[4995] SEQ ID NO: 4956 represents the cDNA sequence for clone AA437393.

[4996] SEQ ID NO: 4957 represents the cDNA sequence for clone AA442941.

[4997] SEQ ID NO: 4958 represents the cDNA sequence for clone AA442944.

[4998] SEQ ID NO: 4959 represents the cDNA sequence for clone AA442945.

[4999] SEQ ID NO: 4960 represents the cDNA sequence for clone AA442950.

[5000] SEQ ID NO: 4961 represents the cDNA sequence for clone AA442953.

[5001] SEQ ID NO: 4962 represents the cDNA sequence for clone AA442964.

[5002] SEQ ID NO: 4963 represents the cDNA sequence for clone AA442973.

[5003] SEQ ID NO: 4964 represents the cDNA sequence for clone AA442977.

[5004] SEQ ID NO: 4965 represents the cDNA sequence for clone AA442986.

[5005] SEQ ID NO: 4966 represents the cDNA sequence for clone AA442990.

[5006] SEQ ID NO: 4967 represents the cDNA sequence for clone AA442994.

[5007] SEQ ID NO: 4968 represents the cDNA sequence for clone AA443087.

[5008] SEQ ID NO: 4969 represents the cDNA sequence for clone AA443093.

[5009] SEQ ID NO: 4970 represents the cDNA sequence for clone AA443102.

[5010] SEQ ID NO: 4971 represents the cDNA sequence for clone AA443115.

[5011] SEQ ID NO: 4972 represents the cDNA sequence for clone AA443117.

[5012] SEQ ID NO: 4973 represents the cDNA sequence for clone AA443261.

[5013] SEQ ID NO: 4974 represents the cDNA sequence for clone AA443262.

[5014] SEQ ID NO: 4975 represents the cDNA sequence for clone AA443263.

[5015] SEQ ID NO: 4976 represents the cDNA sequence for clone AA443265.

[5016] SEQ ID NO: 4977 represents the cDNA sequence for clone AA443267.

[5017] SEQ ID NO: 4978 represents the cDNA sequence for clone AA443471.

[5018] SEQ ID NO: 4979 represents the cDNA sequence for clone AA443473.

[5019] SEQ ID NO: 4980 represents the cDNA sequence for clone AA443475.

[5020] SEQ ID NO: 4981 represents the cDNA sequence for clone AA443479.

[5021] SEQ ID NO: 4982 represents the cDNA sequence for clone AA443480.

[5022] SEQ ID NO: 4983 represents the cDNA sequence for clone AA443487.

[5023] SEQ ID NO: 4984 represents the cDNA sequence for clone AA443489.

[5024] SEQ ID NO: 4985 represents the cDNA sequence for clone AA443498.

[5025] SEQ ID NO: 4986 represents the cDNA sequence for clone AA443507.

[5026] SEQ ID NO: 4987 represents the cDNA sequence for clone AA443512.

[5027] SEQ ID NO: 4988 represents the cDNA sequence for clone AA443514.

[5028] SEQ ID NO: 4989 represents the cDNA sequence for clone AA443519.

[5029] SEQ ID NO: 4990 represents the cDNA sequence for clone AA443523.

[5030] SEQ ID NO: 4991 represents the cDNA sequence for clone AA443528.

[5031] SEQ ID NO: 4992 represents the cDNA sequence for clone AA443532.

[5032] SEQ ID NO: 4993 represents the cDNA sequence for clone AA443561.

[5033] SEQ ID NO: 4994 represents the cDNA sequence for clone AA443562.

[5034] SEQ ID NO: 4995 represents the cDNA sequence for clone AA443566.

[5035] SEQ ID NO: 4996 represents the cDNA sequence for clone AA443567.

[5036] SEQ ID NO: 4997 represents the cDNA sequence for clone AA443569.

[5037] SEQ ID NO: 4998 represents the cDNA sequence for clone AA443573.

[5038] SEQ ID NO: 4999 represents the cDNA sequence for clone AA443575.

[5039] SEQ ID NO: 5000 represents the cDNA sequence for clone AA443581.

[5040] SEQ ID NO: 5001 represents the cDNA sequence for clone AA443584.

[5041] SEQ ID NO: 5002 represents the cDNA sequence for clone AA443587.

[5042] SEQ ID NO: 5003 represents the cDNA sequence for clone AA443594.

[5043] SEQ ID NO: 5004 represents the cDNA sequence for clone AA443605.

[5044] SEQ ID NO: 5005 represents the cDNA sequence for clone AA443608.

[5045] SEQ ID NO: 5006 represents the cDNA sequence for clone AA443615.

[5046] SEQ ID NO: 5007 represents the cDNA sequence for clone AA443618.

[5047] SEQ ID NO: 5008 represents the cDNA sequence for clone AA443622.

[5048] SEQ ID NO: 5009 represents the cDNA sequence for clone AA443630.

[5049] SEQ ID NO: 5010 represents the cDNA sequence for clone AA443635.

[5050] SEQ ID NO: 5011 represents the cDNA sequence for clone AA443636.

[5051] SEQ ID NO: 5012 represents the cDNA sequence for clone AA443642.

[5052] SEQ ID NO: 5013 represents the cDNA sequence for clone AA443644.

[5053] SEQ ID NO: 5014 represents the cDNA sequence for clone AA443646.

[5054] SEQ ID NO: 5015 represents the cDNA sequence for clone AA443649.

[5055] SEQ ID NO: 5016 represents the cDNA sequence for clone AA443884.

[5056] SEQ ID NO: 5017 represents the cDNA sequence for clone AA443888.

[5057] SEQ ID NO: 5018 represents the cDNA sequence for clone AA443891.

[5058] SEQ ID NO: 5019 represents the cDNA sequence for clone AA443898.

[5059] SEQ ID NO: 5020 represents the cDNA sequence for clone AA443904.

[5060] SEQ ID NO: 5021 represents the cDNA sequence for clone AA443917.

[5061] SEQ ID NO: 5022 represents the cDNA sequence for clone AA443919.

[5062] SEQ ID NO: 5023 represents the cDNA sequence for clone AA443921.

[5063] SEQ ID NO: 5024 represents the cDNA sequence for clone AA443991.

[5064] SEQ ID NO: 5025 represents the cDNA sequence for clone AA443994.

[5065] SEQ ID NO: 5026 represents the cDNA sequence for clone AA443995.

[5066] SEQ ID NO: 5027 represents the cDNA sequence for clone AA443996.

[5067] SEQ ID NO: 5028 represents the cDNA sequence for clone AA443998.

[5068] SEQ ID NO: 5029 represents the cDNA sequence for clone AA444010.

[5069] SEQ ID NO: 5030 represents the cDNA sequence for clone AA444012.

[5070] SEQ ID NO: 5031 represents the cDNA sequence for clone AA444016.

[5071] SEQ ID NO: 5032 represents the cDNA sequence for clone AA444017.

[5072] SEQ ID NO: 5033 represents the cDNA sequence for clone AA444018.

[5073] SEQ ID NO: 5034 represents the cDNA sequence for clone AA444020.

[5074] SEQ ID NO: 5035 represents the cDNA sequence for clone AA444049.

[5075] SEQ ID NO: 5036 represents the cDNA sequence for clone AA444052.

[5076] SEQ ID NO: 5037 represents the cDNA sequence for clone AA444062.

[5077] SEQ ID NO: 5038 represents the cDNA sequence for clone AA444066.

[5078] SEQ ID NO: 5039 represents the cDNA sequence for clone AA444068.

[5079] SEQ ID NO: 5040 represents the cDNA sequence for clone AA444071.

[5080] SEQ ID NO: 5041 represents the cDNA sequence for clone AA444077.

[5081] SEQ ID NO: 5042 represents the cDNA sequence for clone AA444080.

[5082] SEQ ID NO: 5043 represents the cDNA sequence for clone AA444083.

[5083] SEQ ID NO: 5044 represents the cDNA sequence for clone AA444092.

[5084] SEQ ID NO: 5045 represents the cDNA sequence for clone AA444100.

[5085] SEQ ID NO: 5046 represents the cDNA sequence for clone AA453113.

[5086] SEQ ID NO: 5047 represents the cDNA sequence for clone AA456762.

[5087] SEQ ID NO: 5048 represents the cDNA sequence for clone AA456766.

[5088] SEQ ID NO: 5049 represents the cDNA sequence for clone AA456767.

[5089] SEQ ID NO: 5050 represents the cDNA sequence for clone AA456769.

[5090] SEQ ID NO: 5051 represents the cDNA sequence for clone AA456777.

[5091] SEQ ID NO: 5052 represents the cDNA sequence for clone AA456780.

[5092] SEQ ID NO: 5053 represents the cDNA sequence for clone AA456785.

[5093] SEQ ID NO: 5054 represents the cDNA sequence for clone AA456787.

[5094] SEQ ID NO: 5055 represents the cDNA sequence for clone AA456793.

[5095] SEQ ID NO: 5056 represents the cDNA sequence for clone AA456800.

[5096] SEQ ID NO: 5057 represents the cDNA sequence for clone AA456808.

[5097] SEQ ID NO: 5058 represents the cDNA sequence for clone AA456810.

[5098] SEQ ID NO: 5059 represents the cDNA sequence for clone AA454462.

[5099] SEQ ID NO: 5060 represents the cDNA sequence for clone AA454467.

[5100] SEQ ID NO: 5061 represents the cDNA sequence for clone AA454469.

[5101] SEQ ID NO: 5062 represents the cDNA sequence for clone AA454488.

[5102] SEQ ID NO: 5063 represents the cDNA sequence for clone AA454492.

[5103] SEQ ID NO: 5064 represents the cDNA sequence for clone AA454495.

[5104] SEQ ID NO: 5065 represents the cDNA sequence for clone AA454496.

[5105] SEQ ID NO: 5066 represents the cDNA sequence for clone AA454497.

[5106] SEQ ID NO: 5067 represents the cDNA sequence for clone AA454500.

[5107] SEQ ID NO: 5068 represents the cDNA sequence for clone AA454503.

[5108] SEQ ID NO: 5069 represents the cDNA sequence for clone AA454506.

[5109] SEQ ID NO: 5070 represents the cDNA sequence for clone AA454517.

[5110] SEQ ID NO: 5071 represents the cDNA sequence for clone AA454518.

[5111] SEQ ID NO: 5072 represents the cDNA sequence for clone AA454520.

[5112] SEQ ID NO: 5073 represents the cDNA sequence for clone AA454521.

[5113] SEQ ID NO: 5074 represents the cDNA sequence for clone AA454522.

[5114] SEQ ID NO: 5075 represents the cDNA sequence for clone AA454549.

[5115] SEQ ID NO: 5076 represents the cDNA sequence for clone AA454552.

[5116] SEQ ID NO: 5077 represents the cDNA sequence for clone AA454554.

[5117] SEQ ID NO: 5078 represents the cDNA sequence for clone AA454562.

[5118] SEQ ID NO: 5079 represents the cDNA sequence for clone AA454570.

[5119] SEQ ID NO: 5080 represents the cDNA sequence for clone AA454571.

[5120] SEQ ID NO: 5081 represents the cDNA sequence for clone AA454586.

[5121] SEQ ID NO: 5082 represents the cDNA sequence for clone AA454595.

[5122] SEQ ID NO: 5083 represents the cDNA sequence for clone AA454605.

[5123] SEQ ID NO: 5084 represents the cDNA sequence for clone AA454607.

[5124] SEQ ID NO: 5085 represents the cDNA sequence for clone AA454609.

[5125] SEQ ID NO: 5086 represents the cDNA sequence for clone AA454610.

[5126] SEQ ID NO: 5087 represents the cDNA sequence for clone AA454612.

[5127] SEQ ID NO: 5088 represents the cDNA sequence for clone AA454616.

[5128] SEQ ID NO: 5089 represents the cDNA sequence for clone AA454674.

[5129] SEQ ID NO: 5090 represents the cDNA sequence for clone AA454675.

[5130] SEQ ID NO: 5091 represents the cDNA sequence for clone AA454685.

[5131] SEQ ID NO: 5092 represents the cDNA sequence for clone AA454689.

[5132] SEQ ID NO: 5093 represents the cDNA sequence for clone AA454690.

[5133] SEQ ID NO: 5094 represents the cDNA sequence for clone AA454696.

[5134] SEQ ID NO: 5095 represents the cDNA sequence for clone AA454697.

[5135] SEQ ID NO: 5096 represents the cDNA sequence for clone AA454704.

[5136] SEQ ID NO: 5097 represents the cDNA sequence for clone AA454711.

[5137] SEQ ID NO: 5098 represents the cDNA sequence for clone AA454723.

[5138] SEQ ID NO: 5099 represents the cDNA sequence for clone AA454724.

[5139] SEQ ID NO: 5100 represents the cDNA sequence for clone AA454725.

[5140] SEQ ID NO: 5101 represents the cDNA sequence for clone AA454728.

[5141] SEQ ID NO: 5102 represents the cDNA sequence for clone AA454731.

[5142] SEQ ID NO: 5103 represents the cDNA sequence for clone AA454732.

[5143] SEQ ID NO: 5104 represents the cDNA sequence for clone AA454747.

[5144] SEQ ID NO: 5105 represents the cDNA sequence for clone AA454751.

[5145] SEQ ID NO: 5106 represents the cDNA sequence for clone AA454753.

[5146] SEQ ID NO: 5107 represents the cDNA sequence for clone AA454755.

[5147] SEQ ID NO: 5108 represents the cDNA sequence for clone AA454756.

[5148] SEQ ID NO: 5109 represents the cDNA sequence for clone AA454758.

[5149] SEQ ID NO: 5110 represents the cDNA sequence for clone AA454760.

[5150] SEQ ID NO: 5111 represents the cDNA sequence for clone AA454773.

[5151] SEQ ID NO: 5112 represents the cDNA sequence for clone AA454774.

[5152] SEQ ID NO: 5113 represents the cDNA sequence for clone AA454775.

[5153] SEQ ID NO: 5114 represents the cDNA sequence for clone AA454776.

[5154] SEQ ID NO: 5115 represents the cDNA sequence for clone AA454777.

[5155] SEQ ID NO: 5116 represents the cDNA sequence for clone AA454779.

[5156] SEQ ID NO: 5117 represents the cDNA sequence for clone AA454784.

[5157] SEQ ID NO: 5118 represents the cDNA sequence for clone AA454785.

[5158] SEQ ID NO: 5119 represents the cDNA sequence for clone AA454797.

[5159] SEQ ID NO: 5120 represents the cDNA sequence for clone AA454801.

[5160] SEQ ID NO: 5121 represents the cDNA sequence for clone AA454802.

[5161] SEQ ID NO: 5122 represents the cDNA sequence for clone AA454803.

[5162] SEQ ID NO: 5123 represents the cDNA sequence for clone AA454823.

[5163] SEQ ID NO: 5124 represents the cDNA sequence for clone AA454824.

[5164] SEQ ID NO: 5125 represents the cDNA sequence for clone AA454827.

[5165] SEQ ID NO: 5126 represents the cDNA sequence for clone AA454832.

[5166] SEQ ID NO: 5127 represents the cDNA sequence for clone AA454835.

[5167] SEQ ID NO: 5128 represents the cDNA sequence for clone AA454837.

[5168] SEQ ID NO: 5129 represents the cDNA sequence for clone AA454839.

[5169] SEQ ID NO: 5130 represents the cDNA sequence for clone AA454844.

[5170] SEQ ID NO: 5131 represents the cDNA sequence for clone AA454861.

[5171] SEQ ID NO: 5132 represents the cDNA sequence for clone AA454871.

[5172] SEQ ID NO: 5133 represents the cDNA sequence for clone AA454875.

[5173] SEQ ID NO: 5134 represents the cDNA sequence for clone AA454878.

[5174] SEQ ID NO: 5135 represents the cDNA sequence for clone AA454881.

[5175] SEQ ID NO: 5136 represents the cDNA sequence for clone AA454887.

[5176] SEQ ID NO: 5137 represents the cDNA sequence for clone AA454896.

[5177] SEQ ID NO: 5138 represents the cDNA sequence for clone AA454898.

[5178] SEQ ID NO: 5139 represents the cDNA sequence for clone AA454899.

[5179] SEQ ID NO: 5140 represents the cDNA sequence for clone AA454902.

[5180] SEQ ID NO: 5141 represents the cDNA sequence for clone AA454905.

[5181] SEQ ID NO: 5142 represents the cDNA sequence for clone AA454907.

[5182] SEQ ID NO: 5143 represents the cDNA sequence for clone AA454911.

[5183] SEQ ID NO: 5144 represents the cDNA sequence for clone AA454912.

[5184] SEQ ID NO: 5145 represents the cDNA sequence for clone AA454913.

[5185] SEQ ID NO: 5146 represents the cDNA sequence for clone AA455018.

[5186] SEQ ID NO: 5147 represents the cDNA sequence for clone AA455022.

[5187] SEQ ID NO: 5148 represents the cDNA sequence for clone AA455026.

[5188] SEQ ID NO: 5149 represents the cDNA sequence for clone AA455036.

[5189] SEQ ID NO: 5150 represents the cDNA sequence for clone AA455103.

[5190] SEQ ID NO: 5151 represents the cDNA sequence for clone AA455106.

[5191] SEQ ID NO: 5152 represents the cDNA sequence for clone AA455111.

[5192] SEQ ID NO: 5153 represents the cDNA sequence for clone AA455116.

[5193] SEQ ID NO: 5154 represents the cDNA sequence for clone AA455130.

[5194] SEQ ID NO: 5155 represents the cDNA sequence for clone AA455131.

[5195] SEQ ID NO: 5156 represents the cDNA sequence for clone AA455133.

[5196] SEQ ID NO: 5157 represents the cDNA sequence for clone AA455139.

[5197] SEQ ID NO: 5158 represents the cDNA sequence for clone AA455150.

[5198] SEQ ID NO: 5159 represents the cDNA sequence for clone AA455157.

[5199] SEQ ID NO: 5160 represents the cDNA sequence for clone AA455185.

[5200] SEQ ID NO: 5161 represents the cDNA sequence for clone AA455187.

[5201] SEQ ID NO: 5162 represents the cDNA sequence for clone AA455192.

[5202] SEQ ID NO: 5163 represents the cDNA sequence for clone AA455196.

[5203] SEQ ID NO: 5164 represents the cDNA sequence for clone AA455212.

[5204] SEQ ID NO: 5165 represents the cDNA sequence for clone AA455218.

[5205] SEQ ID NO: 5166 represents the cDNA sequence for clone AA455272.

[5206] SEQ ID NO: 5167 represents the cDNA sequence for clone AA455274.

[5207] SEQ ID NO: 5168 represents the cDNA sequence for clone AA455279.

[5208] SEQ ID NO: 5169 represents the cDNA sequence for clone AA455282.

[5209] SEQ ID NO: 5170 represents the cDNA sequence for clone AA455287.

[5210] SEQ ID NO: 5171 represents the cDNA sequence for clone AA455288.

[5211] SEQ ID NO: 5172 represents the cDNA sequence for clone AA455292.

[5212] SEQ ID NO: 5173 represents the cDNA sequence for clone AA455294.

[5213] SEQ ID NO: 5174 represents the cDNA sequence for clone AA455295.

[5214] SEQ ID NO: 5175 represents the cDNA sequence for clone AA455297.

[5215] SEQ ID NO: 5176 represents the cDNA sequence for clone AA455302.

[5216] SEQ ID NO: 5177 represents the cDNA sequence for clone AA455304.

[5217] SEQ ID NO: 5178 represents the cDNA sequence for clone AA455305.

[5218] SEQ ID NO: 5179 represents the cDNA sequence for clone AA455484.

[5219] SEQ ID NO: 5180 represents the cDNA sequence for clone AA455485.

[5220] SEQ ID NO: 5181 represents the cDNA sequence for clone AA455492.

[5221] SEQ ID NO: 5182 represents the cDNA sequence for clone AA455493.

[5222] SEQ ID NO: 5183 represents the cDNA sequence for clone AA455502.

[5223] SEQ ID NO: 5184 represents the cDNA sequence for clone AA455503.

[5224] SEQ ID NO: 5185 represents the cDNA sequence for clone AA455508.

[5225] SEQ ID NO: 5186 represents the cDNA sequence for clone AA455511.

[5226] SEQ ID NO: 5187 represents the cDNA sequence for clone AA455515.

[5227] SEQ ID NO: 5188 represents the cDNA sequence for clone AA455520.

[5228] SEQ ID NO: 5189 represents the cDNA sequence for clone AA455521.

[5229] SEQ ID NO: 5190 represents the cDNA sequence for clone AA455524.

[5230] SEQ ID NO: 5191 represents the cDNA sequence for clone AA455767.

[5231] SEQ ID NO: 5192 represents the cDNA sequence for clone AA455776.

[5232] SEQ ID NO: 5193 represents the cDNA sequence for clone AA455797.

[5233] SEQ ID NO: 5194 represents the cDNA sequence for clone AA455809.

[5234] SEQ ID NO: 5195 represents the cDNA sequence for clone AA455811.

[5235] SEQ ID NO: 5196 represents the cDNA sequence for clone AA455812.

[5236] SEQ ID NO: 5197 represents the cDNA sequence for clone AA455823.

[5237] SEQ ID NO: 5198 represents the cDNA sequence for clone AA455828.

[5238] SEQ ID NO: 5199 represents the cDNA sequence for clone AA455830.

[5239] SEQ ID NO: 5200 represents the cDNA sequence for clone AA455833.

[5240] SEQ ID NO: 5201 represents the cDNA sequence for clone AA455839.

[5241] SEQ ID NO: 5202 represents the cDNA sequence for clone AA455844.

[5242] SEQ ID NO: 5203 represents the cDNA sequence for clone AA455851.

[5243] SEQ ID NO: 5204 represents the cDNA sequence for clone AA455852.

[5244] SEQ ID NO: 5205 represents the cDNA sequence for clone AA455855.

[5245] SEQ ID NO: 5206 represents the cDNA sequence for clone AA456118.

[5246] SEQ ID NO: 5207 represents the cDNA sequence for clone AA456120.

[5247] SEQ ID NO: 5208 represents the cDNA sequence for clone AA456121.

[5248] SEQ ID NO: 5209 represents the cDNA sequence for clone AA456329.

[5249] SEQ ID NO: 5210 represents the cDNA sequence for clone AA456330.

[5250] SEQ ID NO: 5211 represents the cDNA sequence for clone AA456334.

[5251] SEQ ID NO: 5212 represents the cDNA sequence for clone AA456344.

[5252] SEQ ID NO: 5213 represents the cDNA sequence for clone AA456346.

[5253] SEQ ID NO: 5214 represents the cDNA sequence for clone AA456349.

[5254] SEQ ID NO: 5215 represents the cDNA sequence for clone AA456350.

[5255] SEQ ID NO: 5216 represents the cDNA sequence for clone AA456357.

[5256] SEQ ID NO: 5217 represents the cDNA sequence for clone AA456359.

[5257] SEQ ID NO: 5218 represents the cDNA sequence for clone AA456363.

[5258] SEQ ID NO: 5219 represents the cDNA sequence for clone AA456441.

[5259] SEQ ID NO: 5220 represents the cDNA sequence for clone AA456442.

[5260] SEQ ID NO: 5221 represents the cDNA sequence for clone AA456444.

[5261] SEQ ID NO: 5222 represents the cDNA sequence for clone AA456446.

[5262] SEQ ID NO: 5223 represents the cDNA sequence for clone AA456454.

[5263] SEQ ID NO: 5224 represents the cDNA sequence for clone AA456455.

[5264] SEQ ID NO: 5225 represents the cDNA sequence for clone AA456456.

[5265] SEQ ID NO: 5226 represents the cDNA sequence for clone AA456458.

[5266] SEQ ID NO: 5227 represents the cDNA sequence for clone AA456461.

[5267] SEQ ID NO: 5228 represents the cDNA sequence for clone AA456464.

[5268] SEQ ID NO: 5229 represents the cDNA sequence for clone AA456465.

[5269] SEQ ID NO: 5230 represents the cDNA sequence for clone AA456472.

[5270] SEQ ID NO: 5231 represents the cDNA sequence for clone AA456477.

[5271] SEQ ID NO: 5232 represents the cDNA sequence for clone AA456480.

[5272] SEQ ID NO: 5233 represents the cDNA sequence for clone AA456566.

[5273] SEQ ID NO: 5234 represents the cDNA sequence for clone AA456592.

[5274] SEQ ID NO: 5235 represents the cDNA sequence for clone AA456594.

[5275] SEQ ID NO: 5236 represents the cDNA sequence for clone AA456599.

[5276] SEQ ID NO: 5237 represents the cDNA sequence for clone AA456618.

[5277] SEQ ID NO: 5238 represents the cDNA sequence for clone AA456623.

[5278] SEQ ID NO: 5239 represents the cDNA sequence for clone AA456628.

[5279] SEQ ID NO: 5240 represents the cDNA sequence for clone AA456630.

[5280] SEQ ID NO: 5241 represents the cDNA sequence for clone AA456154.

[5281] SEQ ID NO: 5242 represents the cDNA sequence for clone AA456157.

[5282] SEQ ID NO: 5243 represents the cDNA sequence for clone AA456160.

[5283] SEQ ID NO: 5244 represents the cDNA sequence for clone AA456166.

[5284] SEQ ID NO: 5245 represents the cDNA sequence for clone AA456171.

[5285] SEQ ID NO: 5246 represents the cDNA sequence for clone AA456180.

[5286] SEQ ID NO: 5247 represents the cDNA sequence for clone AA456181.

[5287] SEQ ID NO: 5248 represents the cDNA sequence for clone AA456186.

[5288] SEQ ID NO: 5249 represents the cDNA sequence for clone AA457109.

[5289] SEQ ID NO: 5250 represents the cDNA sequence for clone AA457117.

[5290] SEQ ID NO: 5251 represents the cDNA sequence for clone AA457130.

[5291] SEQ ID NO: 5252 represents the cDNA sequence for clone AA457141.

[5292] SEQ ID NO: 5253 represents the cDNA sequence for clone AA457148.

[5293] SEQ ID NO: 5254 represents the cDNA sequence for clone AA457154.

[5294] SEQ ID NO: 5255 represents the cDNA sequence for clone AA457159.

[5295] SEQ ID NO: 5256 represents the cDNA sequence for clone AA457686.

[5296] SEQ ID NO: 5257 represents the cDNA sequence for clone AA457688.

[5297] SEQ ID NO: 5258 represents the cDNA sequence for clone AA457706.

[5298] SEQ ID NO: 5259 represents the cDNA sequence for clone AA457708.

[5299] SEQ ID NO: 5260 represents the cDNA sequence for clone AA457716.

[5300] SEQ ID NO: 5261 represents the cDNA sequence for clone AA457729.

[5301] SEQ ID NO: 5262 represents the cDNA sequence for clone AA459895.

[5302] SEQ ID NO: 5263 represents the cDNA sequence for clone AA459901.

[5303] SEQ ID NO: 5264 represents the cDNA sequence for clone AA459906.

[5304] SEQ ID NO: 5265 represents the cDNA sequence for clone AA459912.

[5305] SEQ ID NO: 5266 represents the cDNA sequence for clone AA458453.

[5306] SEQ ID NO: 5267 represents the cDNA sequence for clone AA458454.

[5307] SEQ ID NO: 5268 represents the cDNA sequence for clone AA458460.

[5308] SEQ ID NO: 5269 represents the cDNA sequence for clone AA458464.

[5309] SEQ ID NO: 5270 represents the cDNA sequence for clone AA458473.

[5310] SEQ ID NO: 5271 represents the cDNA sequence for clone AA458479.

[5311] SEQ ID NO: 5272 represents the cDNA sequence for clone AA458484.

[5312] SEQ ID NO: 5273 represents the cDNA sequence for clone AA458485.

[5313] SEQ ID NO: 5274 represents the cDNA sequence for clone AA458488.

[5314] SEQ ID NO: 5275 represents the cDNA sequence for clone AA458489.

[5315] SEQ ID NO: 5276 represents the cDNA sequence for clone AA458491.

[5316] SEQ ID NO: 5277 represents the cDNA sequence for clone AA458498.

[5317] SEQ ID NO: 5278 represents the cDNA sequence for clone AA458499.

[5318] SEQ ID NO: 5279 represents the cDNA sequence for clone AA458503.

[5319] SEQ ID NO: 5280 represents the cDNA sequence for clone AA458509.

[5320] SEQ ID NO: 5281 represents the cDNA sequence for clone AA458513.

[5321] SEQ ID NO: 5282 represents the cDNA sequence for clone AA458518.

[5322] SEQ ID NO: 5283 represents the cDNA sequence for clone AA458520.

[5323] SEQ ID NO: 5284 represents the cDNA sequence for clone AA458524.

[5324] SEQ ID NO: 5285 represents the cDNA sequence for clone AA458533.

[5325] SEQ ID NO: 5286 represents the cDNA sequence for clone AA458534.

[5326] SEQ ID NO: 5287 represents the cDNA sequence for clone AA458536.

[5327] SEQ ID NO: 5288 represents the cDNA sequence for clone AA458537.

[5328] SEQ ID NO: 5289 represents the cDNA sequence for clone AA458540.

[5329] SEQ ID NO: 5290 represents the cDNA sequence for clone AA458871.

[5330] SEQ ID NO: 5291 represents the cDNA sequence for clone AA458873.

[5331] SEQ ID NO: 5292 represents the cDNA sequence for clone AA458876.

[5332] SEQ ID NO: 5293 represents the cDNA sequence for clone AA458884.

[5333] SEQ ID NO: 5294 represents the cDNA sequence for clone AA458886.

[5334] SEQ ID NO: 5295 represents the cDNA sequence for clone AA458889.

[5335] SEQ ID NO: 5296 represents the cDNA sequence for clone AA458893.

[5336] SEQ ID NO: 5297 represents the cDNA sequence for clone AA458895.

[5337] SEQ ID NO: 5298 represents the cDNA sequence for clone AA458897.

[5338] SEQ ID NO: 5299 represents the cDNA sequence for clone AA458902.

[5339] SEQ ID NO: 5300 represents the cDNA sequence for clone AA458980.

[5340] SEQ ID NO: 5301 represents the cDNA sequence for clone AA458983.

[5341] SEQ ID NO: 5302 represents the cDNA sequence for clone AA459059.

[5342] SEQ ID NO: 5303 represents the cDNA sequence for clone AA459060.

[5343] SEQ ID NO: 5304 represents the cDNA sequence for clone AA459063.

[5344] SEQ ID NO: 5305 represents the cDNA sequence for clone AA459064.

[5345] SEQ ID NO: 5306 represents the cDNA sequence for clone AA459066.

[5346] SEQ ID NO: 5307 represents the cDNA sequence for clone AA459069.

[5347] SEQ ID NO: 5308 represents the cDNA sequence for clone AA459074.

[5348] SEQ ID NO: 5309 represents the cDNA sequence for clone AA459075.

[5349] SEQ ID NO: 5310 represents the cDNA sequence for clone AA459076.

[5350] SEQ ID NO: 5311 represents the cDNA sequence for clone AA459077.

[5351] SEQ ID NO: 5312 represents the cDNA sequence for clone AA459085.

[5352] SEQ ID NO: 5313 represents the cDNA sequence for clone AA459090.

[5353] SEQ ID NO: 5314 represents the cDNA sequence for clone AA459092.

[5354] SEQ ID NO: 5315 represents the cDNA sequence for clone AA459169.

[5355] SEQ ID NO: 5316 represents the cDNA sequence for clone AA459182.

[5356] SEQ ID NO: 5317 represents the cDNA sequence for clone AA459191.

[5357] SEQ ID NO: 5318 represents the cDNA sequence for clone AA459198.

[5358] SEQ ID NO: 5319 represents the cDNA sequence for clone AA459199.

[5359] SEQ ID NO: 5320 represents the cDNA sequence for clone AA459201.

[5360] SEQ ID NO: 5321 represents the cDNA sequence for clone AA459277.

[5361] SEQ ID NO: 5322 represents the cDNA sequence for clone AA459279.

[5362] SEQ ID NO: 5323 represents the cDNA sequence for clone AA459280.

[5363] SEQ ID NO: 5324 represents the cDNA sequence for clone AA459281.

[5364] SEQ ID NO: 5325 represents the cDNA sequence for clone AA459287.

[5365] SEQ ID NO: 5326 represents the cDNA sequence for clone AA459379.

[5366] SEQ ID NO: 5327 represents the cDNA sequence for clone AA459384.

[5367] SEQ ID NO: 5328 represents the cDNA sequence for clone AA459386.

[5368] SEQ ID NO: 5329 represents the cDNA sequence for clone AA459392.

[5369] SEQ ID NO: 5330 represents the cDNA sequence for clone AA459401.

[5370] SEQ ID NO: 5331 represents the cDNA sequence for clone AA459405.

[5371] SEQ ID NO: 5332 represents the cDNA sequence for clone AA459407.

[5372] SEQ ID NO: 5333 represents the cDNA sequence for clone AA459410.

[5373] SEQ ID NO: 5334 represents the cDNA sequence for clone AA459421.

[5374] SEQ ID NO: 5335 represents the cDNA sequence for clone AA459506.

[5375] SEQ ID NO: 5336 represents the cDNA sequence for clone AA459508.

[5376] SEQ ID NO: 5337 represents the cDNA sequence for clone AA459510.

[5377] SEQ ID NO: 5338 represents the cDNA sequence for clone AA459511.

[5378] SEQ ID NO: 5339 represents the cDNA sequence for clone AA459516.

[5379] SEQ ID NO: 5340 represents the cDNA sequence for clone AA459518.

[5380] SEQ ID NO: 5341 represents the cDNA sequence for clone AA459519.

[5381] SEQ ID NO: 5342 represents the cDNA sequence for clone AA459523.

[5382] SEQ ID NO: 5343 represents the cDNA sequence for clone AA459525.

[5383] SEQ ID NO: 5344 represents the cDNA sequence for clone AA459531.

[5384] SEQ ID NO: 5345 represents the cDNA sequence for clone AA459536.

[5385] SEQ ID NO: 5346 represents the cDNA sequence for clone AA459605.

[5386] SEQ ID NO: 5347 represents the cDNA sequence for clone AA459609.

[5387] SEQ ID NO: 5348 represents the cDNA sequence for clone AA459611.

[5388] SEQ ID NO: 5349 represents the cDNA sequence for clone AA459612.

[5389] SEQ ID NO: 5350 represents the cDNA sequence for clone AA459614.

[5390] SEQ ID NO: 5351 represents the cDNA sequence for clone AA459617.

[5391] SEQ ID NO: 5352 represents the cDNA sequence for clone AA459626.

[5392] SEQ ID NO: 5353 represents the cDNA sequence for clone AA459632.

[5393] SEQ ID NO: 5354 represents the cDNA sequence for clone AA459635.

[5394] SEQ ID NO: 5355 represents the cDNA sequence for clone AA459645.

[5395] SEQ ID NO: 5356 represents the cDNA sequence for clone AA463928.

[5396] SEQ ID NO: 5357 represents the cDNA sequence for clone AA463944.

[5397] SEQ ID NO: 5358 represents the cDNA sequence for clone AA463948.

[5398] SEQ ID NO: 5359 represents the cDNA sequence for clone AA463950.

[5399] SEQ ID NO: 5360 represents the cDNA sequence for clone AA463955.

[5400] SEQ ID NO: 5361 represents the cDNA sequence for clone AA463960.

[5401] SEQ ID NO: 5362 represents the cDNA sequence for clone AA463965.

[5402] SEQ ID NO: 5363 represents the cDNA sequence for clone AA463974.

[5403] SEQ ID NO: 5364 represents the cDNA sequence for clone AA463975.

[5404] SEQ ID NO: 5365 represents the cDNA sequence for clone AA463988.

[5405] SEQ ID NO: 5366 represents the cDNA sequence for clone AA463990.

[5406] SEQ ID NO: 5367 represents the cDNA sequence for clone AA463995.

[5407] SEQ ID NO: 5368 represents the cDNA sequence for clone AA463996.

[5408] SEQ ID NO: 5369 represents the cDNA sequence for clone AA463999.

[5409] SEQ ID NO: 5370 represents the cDNA sequence for clone AA464002.

[5410] SEQ ID NO: 5371 represents the cDNA sequence for clone AA464004.

[5411] SEQ ID NO: 5372 represents the cDNA sequence for clone AA464011.

[5412] SEQ ID NO: 5373 represents the cDNA sequence for clone AA464018.

[5413] SEQ ID NO: 5374 represents the cDNA sequence for clone AA464021.

[5414] SEQ ID NO: 5375 represents the cDNA sequence for clone AA464030.

[5415] SEQ ID NO: 5376 represents the cDNA sequence for clone AA464031.

[5416] SEQ ID NO: 5377 represents the cDNA sequence for clone AA464033.

[5417] SEQ ID NO: 5378 represents the cDNA sequence for clone AA464036.

[5418] SEQ ID NO: 5379 represents the cDNA sequence for clone AA464038.

[5419] SEQ ID NO: 5380 represents the cDNA sequence for clone AA464040.

[5420] SEQ ID NO: 5381 represents the cDNA sequence for clone AA464044.

[5421] SEQ ID NO: 5382 represents the cDNA sequence for clone AA464052.

[5422] SEQ ID NO: 5383 represents the cDNA sequence for clone AA464055.

[5423] SEQ ID NO: 5384 represents the cDNA sequence for clone AA464056.

[5424] SEQ ID NO: 5385 represents the cDNA sequence for clone AA464064.

[5425] SEQ ID NO: 5386 represents the cDNA sequence for clone AA464068.

[5426] SEQ ID NO: 5387 represents the cDNA sequence for clone AA464072.

[5427] SEQ ID NO: 5388 represents the cDNA sequence for clone AA464079.

[5428] SEQ ID NO: 5389 represents the cDNA sequence for clone AA464091.

[5429] SEQ ID NO: 5390 represents the cDNA sequence for clone AA464097.

[5430] SEQ ID NO: 5391 represents the cDNA sequence for clone AA464102.

[5431] SEQ ID NO: 5392 represents the cDNA sequence for clone AA464110.

[5432] SEQ ID NO: 5393 represents the cDNA sequence for clone AA464111.

[5433] SEQ ID NO: 5394 represents the cDNA sequence for clone AA464124.

[5434] SEQ ID NO: 5395 represents the cDNA sequence for clone AA464138.

[5435] SEQ ID NO: 5396 represents the cDNA sequence for clone AA464140.

[5436] SEQ ID NO: 5397 represents the cDNA sequence for clone AA464141.

[5437] SEQ ID NO: 5398 represents the cDNA sequence for clone AA464144.

[5438] SEQ ID NO: 5399 represents the cDNA sequence for clone AA464146.

[5439] SEQ ID NO: 5400 represents the cDNA sequence for clone AA464156.

[5440] SEQ ID NO: 5401 represents the cDNA sequence for clone AA464162.

[5441] SEQ ID NO: 5402 represents the cDNA sequence for clone AA464166.

[5442] SEQ ID NO: 5403 represents the cDNA sequence for clone AA464173.

[5443] SEQ ID NO: 5404 represents the cDNA sequence for clone AA464176.

[5444] SEQ ID NO: 5405 represents the cDNA sequence for clone AA464181.

[5445] SEQ ID NO: 5406 represents the cDNA sequence for clone AA464191.

[5446] SEQ ID NO: 5407 represents the cDNA sequence for clone AA464200.

[5447] SEQ ID NO: 5408 represents the cDNA sequence for clone AA464204.

[5448] SEQ ID NO: 5409 represents the cDNA sequence for clone AA464205.

[5449] SEQ ID NO: 5410 represents the cDNA sequence for clone AA464207.

[5450] SEQ ID NO: 5411 represents the cDNA sequence for clone AA464208.

[5451] SEQ ID NO: 5412 represents the cDNA sequence for clone AA464210.

[5452] SEQ ID NO: 5413 represents the cDNA sequence for clone AA464212.

[5453] SEQ ID NO: 5414 represents the cDNA sequence for clone AA464216.

[5454] SEQ ID NO: 5415 represents the cDNA sequence for clone AA464222.

[5455] SEQ ID NO: 5416 represents the cDNA sequence for clone AA464239.

[5456] SEQ ID NO: 5417 represents the cDNA sequence for clone AA464243.

[5457] SEQ ID NO: 5418 represents the cDNA sequence for clone AA464254.

[5458] SEQ ID NO: 5419 represents the cDNA sequence for clone AA464255.

[5459] SEQ ID NO: 5420 represents the cDNA sequence for clone AA464266.

[5460] SEQ ID NO: 5421 represents the cDNA sequence for clone AA464271.

[5461] SEQ ID NO: 5422 represents the cDNA sequence for clone AA464273.

[5462] SEQ ID NO: 5423 represents the cDNA sequence for clone AA464279.

[5463] SEQ ID NO: 5424 represents the cDNA sequence for clone AA464285.

[5464] SEQ ID NO: 5425 represents the cDNA sequence for clone AA464287.

[5465] SEQ ID NO: 5426 represents the cDNA sequence for clone AA464290.

[5466] SEQ ID NO: 5427 represents the cDNA sequence for clone AA464295.

[5467] SEQ ID NO: 5428 represents the cDNA sequence for clone AA464301.

[5468] SEQ ID NO: 5429 represents the cDNA sequence for clone AA464305.

[5469] SEQ ID NO: 5430 represents the cDNA sequence for clone AA464307.

[5470] SEQ ID NO: 5431 represents the cDNA sequence for clone AA464308.

[5471] SEQ ID NO: 5432 represents the cDNA sequence for clone AA464326.

[5472] SEQ ID NO: 5433 represents the cDNA sequence for clone AA464335.

[5473] SEQ ID NO: 5434 represents the cDNA sequence for clone AA464343.

[5474] SEQ ID NO: 5435 represents the cDNA sequence for clone AA464347.

[5475] SEQ ID NO: 5436 represents the cDNA sequence for clone AA464348.

[5476] SEQ ID NO: 5437 represents the cDNA sequence for clone AA464351.

[5477] SEQ ID NO: 5438 represents the cDNA sequence for clone AA464359.

[5478] SEQ ID NO: 5439 represents the cDNA sequence for clone AA464362.

[5479] SEQ ID NO: 5440 represents the cDNA sequence for clone AA464365.

[5480] SEQ ID NO: 5441 represents the cDNA sequence for clone AA464366.

[5481] SEQ ID NO: 5442 represents the cDNA sequence for clone AA464369.

[5482] SEQ ID NO: 5443 represents the cDNA sequence for clone AA464375.

[5483] SEQ ID NO: 5444 represents the cDNA sequence for clone AA464379.

[5484] SEQ ID NO: 5445 represents the cDNA sequence for clone AA464380.

[5485] SEQ ID NO: 5446 represents the cDNA sequence for clone AA464382.

[5486] SEQ ID NO: 5447 represents the cDNA sequence for clone AA464384.

[5487] SEQ ID NO: 5448 represents the cDNA sequence for clone AA464389.

[5488] SEQ ID NO: 5449 represents the cDNA sequence for clone AA464391.

[5489] SEQ ID NO: 5450 represents the cDNA sequence for clone AA464395.

[5490] SEQ ID NO: 5451 represents the cDNA sequence for clone AA464396.

[5491] SEQ ID NO: 5452 represents the cDNA sequence for clone AA464397.

[5492] SEQ ID NO: 5453 represents the cDNA sequence for clone AA464408.

[5493] SEQ ID NO: 5454 represents the cDNA sequence for clone AA464411.

[5494] SEQ ID NO: 5455 represents the cDNA sequence for clone AA464426.

[5495] SEQ ID NO: 5456 represents the cDNA sequence for clone AA464427.

[5496] SEQ ID NO: 5457 represents the cDNA sequence for clone AA464429.

[5497] SEQ ID NO: 5458 represents the cDNA sequence for clone AA464440.

[5498] SEQ ID NO: 5459 represents the cDNA sequence for clone AA464454.

[5499] SEQ ID NO: 5460 represents the cDNA sequence for clone AA464465.

[5500] SEQ ID NO: 5461 represents the cDNA sequence for clone AA464468.

[5501] SEQ ID NO: 5462 represents the cDNA sequence for clone AA464469.

[5502] SEQ ID NO: 5463 represents the cDNA sequence for clone AA464472.

[5503] SEQ ID NO: 5464 represents the cDNA sequence for clone AA464488.

[5504] SEQ ID NO: 5465 represents the cDNA sequence for clone AA464491.

[5505] SEQ ID NO: 5466 represents the cDNA sequence for clone AA464493.

[5506] SEQ ID NO: 5467 represents the cDNA sequence for clone AA464510.

[5507] SEQ ID NO: 5468 represents the cDNA sequence for clone AA464521.

[5508] SEQ ID NO: 5469 represents the cDNA sequence for clone AA464522.

[5509] SEQ ID NO: 5470 represents the cDNA sequence for clone AA464525.

[5510] SEQ ID NO: 5471 represents the cDNA sequence for clone AA464526.

[5511] SEQ ID NO: 5472 represents the cDNA sequence for clone AA464535.

[5512] SEQ ID NO: 5473 represents the cDNA sequence for clone AA464538.

[5513] SEQ ID NO: 5474 represents the cDNA sequence for clone AA464553.

[5514] SEQ ID NO: 5475 represents the cDNA sequence for clone AA464555.

[5515] SEQ ID NO: 5476 represents the cDNA sequence for clone AA464558.

[5516] SEQ ID NO: 5477 represents the cDNA sequence for clone AA464573.

[5517] SEQ ID NO: 5478 represents the cDNA sequence for clone AA464579.

[5518] SEQ ID NO: 5479 represents the cDNA sequence for clone AA464633.

[5519] SEQ ID NO: 5480 represents the cDNA sequence for clone AA464634.

[5520] SEQ ID NO: 5481 represents the cDNA sequence for clone AA464640.

[5521] SEQ ID NO: 5482 represents the cDNA sequence for clone AA464641.

[5522] SEQ ID NO: 5483 represents the cDNA sequence for clone AA464645.

[5523] SEQ ID NO: 5484 represents the cDNA sequence for clone AA464655.

[5524] SEQ ID NO: 5485 represents the cDNA sequence for clone AA464658.

[5525] SEQ ID NO: 5486 represents the cDNA sequence for clone AA464677.

[5526] SEQ ID NO: 5487 represents the cDNA sequence for clone AA464689.

[5527] SEQ ID NO: 5488 represents the cDNA sequence for clone AA464691.

[5528] SEQ ID NO: 5489 represents the cDNA sequence for clone AA464695.

[5529] SEQ ID NO: 5490 represents the cDNA sequence for clone AA464696.

[5530] SEQ ID NO: 5491 represents the cDNA sequence for clone AA464698.

[5531] SEQ ID NO: 5492 represents the cDNA sequence for clone AA464699.

[5532] SEQ ID NO: 5493 represents the cDNA sequence for clone AA464705.

[5533] SEQ ID NO: 5494 represents the cDNA sequence for clone AA464707.

[5534] SEQ ID NO: 5495 represents the cDNA sequence for clone AA464709.

[5535] SEQ ID NO: 5496 represents the cDNA sequence for clone AA464728.

[5536] SEQ ID NO: 5497 represents the cDNA sequence for clone AA464733.

[5537] SEQ ID NO: 5498 represents the cDNA sequence for clone AA464735.

[5538] SEQ ID NO: 5499 represents the cDNA sequence for clone AA464740.

[5539] SEQ ID NO: 5500 represents the cDNA sequence for clone AA464742.

[5540] SEQ ID NO: 5501 represents the cDNA sequence for clone AA464747.

[5541] SEQ ID NO: 5502 represents the cDNA sequence for clone AA464757.

[5542] SEQ ID NO: 5503 represents the cDNA sequence for clone AA464758.

[5543] SEQ ID NO: 5504 represents the cDNA sequence for clone AA464761.

[5544] SEQ ID NO: 5505 represents the cDNA sequence for clone AA464765.

[5545] SEQ ID NO: 5506 represents the cDNA sequence for clone AA464766.

[5546] SEQ ID NO: 5507 represents the cDNA sequence for clone AA464769.

[5547] SEQ ID NO: 5508 represents the cDNA sequence for clone AA464772.

[5548] SEQ ID NO: 5509 represents the cDNA sequence for clone AA464774.

[5549] SEQ ID NO: 5510 represents the cDNA sequence for clone AA464780.

[5550] SEQ ID NO: 5511 represents the cDNA sequence for clone AA464786.

[5551] SEQ ID NO: 5512 represents the cDNA sequence for clone AA464791.

[5552] SEQ ID NO: 5513 represents the cDNA sequence for clone AA464792.

[5553] SEQ ID NO: 5514 represents the cDNA sequence for clone AA464795.

[5554] SEQ ID NO: 5515 represents the cDNA sequence for clone AA464952.

[5555] SEQ ID NO: 5516 represents the cDNA sequence for clone AA464956.

[5556] SEQ ID NO: 5517 represents the cDNA sequence for clone AA464963.

[5557] SEQ ID NO: 5518 represents the cDNA sequence for clone AA464964.

[5558] SEQ ID NO: 5519 represents the cDNA sequence for clone AA464972.

[5559] SEQ ID NO: 5520 represents the cDNA sequence for clone AA464975.

[5560] SEQ ID NO: 5521 represents the cDNA sequence for clone AA464976.

[5561] SEQ ID NO: 5522 represents the cDNA sequence for clone AA464986.

[5562] SEQ ID NO: 5523 represents the cDNA sequence for clone AA464987.

[5563] SEQ ID NO: 5524 represents the cDNA sequence for clone AA464988.

[5564] SEQ ID NO: 5525 represents the cDNA sequence for clone AA464991.

[5565] SEQ ID NO: 5526 represents the cDNA sequence for clone AA464999.

[5566] SEQ ID NO: 5527 represents the cDNA sequence for clone AA465002.

[5567] SEQ ID NO: 5528 represents the cDNA sequence for clone AA465003.

[5568] SEQ ID NO: 5529 represents the cDNA sequence for clone AA465007.

[5569] SEQ ID NO: 5530 represents the cDNA sequence for clone AA465011.

[5570] SEQ ID NO: 5531 represents the cDNA sequence for clone AA465012.

[5571] SEQ ID NO: 5532 represents the cDNA sequence for clone AA465013.

[5572] SEQ ID NO: 5533 represents the cDNA sequence for clone AA465014.

[5573] SEQ ID NO: 5534 represents the cDNA sequence for clone AA465016.

[5574] SEQ ID NO: 5535 represents the cDNA sequence for clone AA465020.

[5575] SEQ ID NO: 5536 represents the cDNA sequence for clone AA465022.

[5576] SEQ ID NO: 5537 represents the cDNA sequence for clone AA465025.

[5577] SEQ ID NO: 5538 represents the cDNA sequence for clone AA465032.

[5578] SEQ ID NO: 5539 represents the cDNA sequence for clone AA465033.

[5579] SEQ ID NO: 5540 represents the cDNA sequence for clone AA465037.

[5580] SEQ ID NO: 5541 represents the cDNA sequence for clone AA465043.

[5581] SEQ ID NO: 5542 represents the cDNA sequence for clone AA465044.

[5582] SEQ ID NO: 5543 represents the cDNA sequence for clone AA465048.

[5583] SEQ ID NO: 5544 represents the cDNA sequence for clone AA465050.

[5584] SEQ ID NO: 5545 represents the cDNA sequence for clone AA465052.

[5585] SEQ ID NO: 5546 represents the cDNA sequence for clone AA479877.

[5586] SEQ ID NO: 5547 represents the cDNA sequence for clone AA476209.

[5587] SEQ ID NO: 5548 represents the cDNA sequence for clone AA476210.

[5588] SEQ ID NO: 5549 represents the cDNA sequence for clone AA476211.

[5589] SEQ ID NO: 5550 represents the cDNA sequence for clone AA476212.

[5590] SEQ ID NO: 5551 represents the cDNA sequence for clone AA476213.

[5591] SEQ ID NO: 5552 represents the cDNA sequence for clone AA476214.

[5592] SEQ ID NO: 5553 represents the cDNA sequence for clone AA476215.

[5593] SEQ ID NO: 5554 represents the cDNA sequence for clone AA476220.

[5594] SEQ ID NO: 5555 represents the cDNA sequence for clone AA476222.

[5595] SEQ ID NO: 5556 represents the cDNA sequence for clone AA476223.

[5596] SEQ ID NO: 5557 represents the cDNA sequence for clone AA476227.

[5597] SEQ ID NO: 5558 represents the cDNA sequence for clone AA476228.

[5598] SEQ ID NO: 5559 represents the cDNA sequence for clone AA476244.

[5599] SEQ ID NO: 5560 represents the cDNA sequence for clone AA476276.

[5600] SEQ ID NO: 5561 represents the cDNA sequence for clone AA476279.

[5601] SEQ ID NO: 5562 represents the cDNA sequence for clone AA476288.

[5602] SEQ ID NO: 5563 represents the cDNA sequence for clone AA476297.

[5603] SEQ ID NO: 5564 represents the cDNA sequence for clone AA476300.

[5604] SEQ ID NO: 5565 represents the cDNA sequence for clone AA476305.

[5605] SEQ ID NO: 5566 represents the cDNA sequence for clone AA476848.

[5606] SEQ ID NO: 5567 represents the cDNA sequence for clone AA476850.

[5607] SEQ ID NO: 5568 represents the cDNA sequence for clone AA476851.

[5608] SEQ ID NO: 5569 represents the cDNA sequence for clone AA476862.

[5609] SEQ ID NO: 5570 represents the cDNA sequence for clone AA476867.

[5610] SEQ ID NO: 5571 represents the cDNA sequence for clone AA476868.

[5611] SEQ ID NO: 5572 represents the cDNA sequence for clone AA476869.

[5612] SEQ ID NO: 5573 represents the cDNA sequence for clone AA476870.

[5613] SEQ ID NO: 5574 represents the cDNA sequence for clone AA476876.

[5614] SEQ ID NO: 5575 represents the cDNA sequence for clone AA476881.

[5615] SEQ ID NO: 5576 represents the cDNA sequence for clone AA476884.

[5616] SEQ ID NO: 5577 represents the cDNA sequence for clone AA476885.

[5617] SEQ ID NO: 5578 represents the cDNA sequence for clone AA476891.

[5618] SEQ ID NO: 5579 represents the cDNA sequence for clone AA476904.

[5619] SEQ ID NO: 5580 represents the cDNA sequence for clone AA476906.

[5620] SEQ ID NO: 5581 represents the cDNA sequence for clone AA476907.

[5621] SEQ ID NO. 5582 represents the cDNA sequence for clone AA476908.

[5622] SEQ ID NO: 5583 represents the cDNA sequence for clone AA476913.

[5623] SEQ ID NO: 5584 represents the cDNA sequence for clone AA476915.

[5624] SEQ ID NO: 5585 represents the cDNA sequence for clone AA476916.

[5625] SEQ ID NO: 5586 represents the cDNA sequence for clone AA476917.

[5626] SEQ ID NO: 5587 represents the cDNA sequence for clone AA476918.

[5627] SEQ ID NO: 5588 represents the cDNA sequence for clone AA476936.

[5628] SEQ ID NO: 5589 represents the cDNA sequence for clone AA476937.

[5629] SEQ ID NO: 5590 represents the cDNA sequence for clone AA476943.

[5630] SEQ ID NO: 5591 represents the cDNA sequence for clone AA476950.

[5631] SEQ ID NO: 5592 represents the cDNA sequence for clone AA476957.

[5632] SEQ ID NO: 5593 represents the cDNA sequence for clone AA476963.

[5633] SEQ ID NO: 5594 represents the cDNA sequence for clone AA476966.

[5634] SEQ ID NO: 5595 represents the cDNA sequence for clone AA476972.

[5635] SEQ ID NO: 5596 represents the cDNA sequence for clone AA476973.

[5636] SEQ ID NO: 5597 represents the cDNA sequence for clone AA476974.

[5637] SEQ ID NO: 5598 represents the cDNA sequence for clone AA476976.

[5638] SEQ ID NO: 5599 represents the cDNA sequence for clone AA476977.

[5639] SEQ ID NO: 5600 represents the cDNA sequence for clone AA476987.

[5640] SEQ ID NO: 5601 represents the cDNA sequence for clone AA476989.

[5641] SEQ ID NO: 5602 represents the cDNA sequence for clone AA476993.

[5642] SEQ ID NO: 5603 represents the cDNA sequence for clone AA476997.

[5643] SEQ ID NO: 5604 represents the cDNA sequence for clone AA477006.

[5644] SEQ ID NO: 5605 represents the cDNA sequence for clone AA477008.

[5645] SEQ ID NO: 5606 represents the cDNA sequence for clone AA477016.

[5646] SEQ ID NO: 5607 represents the cDNA sequence for clone AA477018.

[5647] SEQ ID NO: 5608 represents the cDNA sequence for clone AA477025.

[5648] SEQ ID NO: 5609 represents the cDNA sequence for clone AA477026.

[5649] SEQ ID NO: 5610 represents the cDNA sequence for clone AA477027.

[5650] SEQ ID NO: 5611 represents the cDNA sequence for clone AA477031.

[5651] SEQ ID NO: 5612 represents the cDNA sequence for clone AA477033.

[5652] SEQ ID NO: 5613 represents the cDNA sequence for clone AA477035.

[5653] SEQ ID NO: 5614 represents the cDNA sequence for clone AA477041.

[5654] SEQ ID NO: 5615 represents the cDNA sequence for clone AA477042.

[5655] SEQ ID NO: 5616 represents the cDNA sequence for clone AA477048.

[5656] SEQ ID NO: 5617 represents the cDNA sequence for clone AA477049.

[5657] SEQ ID NO: 5618 represents the cDNA sequence for clone AA477053.

[5658] SEQ ID NO: 5619 represents the cDNA sequence for clone AA477054.

[5659] SEQ ID NO: 5620 represents the cDNA sequence for clone AA477059.

[5660] SEQ ID NO: 5621 represents the cDNA sequence for clone AA477061.

[5661] SEQ ID NO: 5622 represents the cDNA sequence for clone AA477067.

[5662] SEQ ID NO: 5623 represents the cDNA sequence for clone AA477075.

[5663] SEQ ID NO: 5624 represents the cDNA sequence for clone AA477214.

[5664] SEQ ID NO: 5625 represents the cDNA sequence for clone AA477218.

[5665] SEQ ID NO: 5626 represents the cDNA sequence for clone AA477224.

[5666] SEQ ID NO: 5627 represents the cDNA sequence for clone AA477225.

[5667] SEQ ID NO: 5628 represents the cDNA sequence for clone AA477226.

[5668] SEQ ID NO: 5629 represents the cDNA sequence for clone AA477231.

[5669] SEQ ID NO: 5630 represents the cDNA sequence for clone AA477233.

[5670] SEQ ID NO: 5631 represents the cDNA sequence for clone AA477245.

[5671] SEQ ID NO: 5632 represents the cDNA sequence for clone AA477249.

[5672] SEQ ID NO: 5633 represents the cDNA sequence for clone AA477250.

[5673] SEQ ID NO: 5634 represents the cDNA sequence for clone AA477253.

[5674] SEQ ID NO: 5635 represents the cDNA sequence for clone AA477256.

[5675] SEQ ID NO: 5636 represents the cDNA sequence for clone AA477260.

[5676] SEQ ID NO: 5637 represents the cDNA sequence for clone AA477262.

[5677] SEQ ID NO: 5638 represents the cDNA sequence for clone AA478977.

[5678] SEQ ID NO: 5639 represents the cDNA sequence for clone AA478980.

[5679] SEQ ID NO: 5640 represents the cDNA sequence for clone AA478981.

[5680] SEQ ID NO: 5641 represents the cDNA sequence for clone AA478984.

[5681] SEQ ID NO: 5642 represents the cDNA sequence for clone AA478986.

[5682] SEQ ID NO: 5643 represents the cDNA sequence for clone AA478996.

[5683] SEQ ID NO: 5644 represents the cDNA sequence for clone AA479005.

[5684] SEQ ID NO: 5645 represents the cDNA sequence for clone AA479014.

[5685] SEQ ID NO: 5646 represents the cDNA sequence for clone AA479016.

[5686] SEQ ID NO: 5647 represents the cDNA sequence for clone AA479017.

[5687] SEQ ID NO: 5648 represents the cDNA sequence for clone AA479018.

[5688] SEQ ID NO: 5649 represents the cDNA sequence for clone AA479038.

[5689] SEQ ID NO: 5650 represents the cDNA sequence for clone AA479048.

[5690] SEQ ID NO: 5651 represents the cDNA sequence for clone AA479051.

[5691] SEQ ID NO: 5652 represents the cDNA sequence for clone AA479544.

[5692] SEQ ID NO: 5653 represents the cDNA sequence for clone AA479551.

[5693] SEQ ID NO: 5654 represents the cDNA sequence for clone AA479553.

[5694] SEQ ID NO: 5655 represents the cDNA sequence for clone AA479556.

[5695] SEQ ID NO: 5656 represents the cDNA sequence for clone AA479568.

[5696] SEQ ID NO: 5657 represents the cDNA sequence for clone AA479570.

[5697] SEQ ID NO: 5658 represents the cDNA sequence for clone AA479571.

[5698] SEQ ID NO: 5659 represents the cDNA sequence for clone AA479572.

[5699] SEQ ID NO: 5660 represents the cDNA sequence for clone AA479578.

[5700] SEQ ID NO: 5661 represents the cDNA sequence for clone AA479586.

[5701] SEQ ID NO: 5662 represents the cDNA sequence for clone AA479591.

[5702] SEQ ID NO: 5663 represents the cDNA sequence for clone AA479593.

[5703] SEQ ID NO: 5664 represents the cDNA sequence for clone AA479597.

[5704] SEQ ID NO: 5665 represents the cDNA sequence for clone AA479606.

[5705] SEQ ID NO: 5666 represents the cDNA sequence for clone AA479617.

[5706] SEQ ID NO: 5667 represents the cDNA sequence for clone AA479622.

[5707] SEQ ID NO: 5668 represents the cDNA sequence for clone AA479623.

[5708] SEQ ID NO: 5669 represents the cDNA sequence for clone AA479629.

[5709] SEQ ID NO: 5670 represents the cDNA sequence for clone AA479636.

[5710] SEQ ID NO: 5671 represents the cDNA sequence for clone AA479637.

[5711] SEQ ID NO: 5672 represents the cDNA sequence for clone AA479642.

[5712] SEQ ID NO: 5673 represents the cDNA sequence for clone AA479648.

[5713] SEQ ID NO: 5674 represents the cDNA sequence for clone AA479653.

[5714] SEQ ID NO: 5675 represents the cDNA sequence for clone AA479655.

[5715] SEQ ID NO: 5676 represents the cDNA sequence for clone AA479656.

[5716] SEQ ID NO: 5677 represents the cDNA sequence for clone AA479665.

[5717] SEQ ID NO: 5678 represents the cDNA sequence for clone AA479666.

[5718] SEQ ID NO: 5679 represents the cDNA sequence for clone AA479667.

[5719] SEQ ID NO: 5680 represents the cDNA sequence for clone AA479671.

[5720] SEQ ID NO: 5681 represents the cDNA sequence for clone AA479673.

[5721] SEQ ID NO: 5682 represents the cDNA sequence for clone AA479676.

[5722] SEQ ID NO: 5683 represents the cDNA sequence for clone AA479678.

[5723] SEQ ID NO: 5684 represents the cDNA sequence for clone AA479679.

[5724] SEQ ID NO: 5685 represents the cDNA sequence for clone AA479700.

[5725] SEQ ID NO: 5686 represents the cDNA sequence for clone AA479704.

[5726] SEQ ID NO: 5687 represents the cDNA sequence for clone AA479710.

[5727] SEQ ID NO: 5688 represents the cDNA sequence for clone AA479726.

[5728] SEQ ID NO: 5689 represents the cDNA sequence for clone AA479729.

[5729] SEQ ID NO: 5690 represents the cDNA sequence for clone AA479731.

[5730] SEQ ID NO: 5691 represents the cDNA sequence for clone AA479735.

[5731] SEQ ID NO: 5692 represents the cDNA sequence for clone AA479744.

[5732] SEQ ID NO: 5693 represents the cDNA sequence for clone AA479754.

[5733] SEQ ID NO: 5694 represents the cDNA sequence for clone AA479755.

[5734] SEQ ID NO: 5695 represents the cDNA sequence for clone AA479774.

[5735] SEQ ID NO: 5696 represents the cDNA sequence for clone AA479775.

[5736] SEQ ID NO: 5697 represents the cDNA sequence for clone AA479776.

[5737] SEQ ID NO: 5698 represents the cDNA sequence for clone AA479787.

[5738] SEQ ID NO: 5699 represents the cDNA sequence for clone AA479800.

[5739] SEQ ID NO: 5700 represents the cDNA sequence for clone AA479801.

[5740] SEQ ID NO: 5701 represents the cDNA sequence for clone AA479802.

[5741] SEQ ID NO: 5702 represents the cDNA sequence for clone AA479813.

[5742] SEQ ID NO: 5703 represents the cDNA sequence for clone AA479814.

[5743] SEQ ID NO: 5704 represents the cDNA sequence for clone AA479817.

[5744] SEQ ID NO: 5705 represents the cDNA sequence for clone AA479819.

[5745] SEQ ID NO: 5706 represents the cDNA sequence for clone AA479821.

[5746] SEQ ID NO: 5707 represents the cDNA sequence for clone AA479823.

[5747] SEQ ID NO: 5708 represents the cDNA sequence for clone AA479825.

[5748] SEQ ID NO: 5709 represents the cDNA sequence for clone AA479832.

[5749] SEQ ID NO: 5710 represents the cDNA sequence for clone AA479848.

[5750] SEQ ID NO: 5711 represents the cDNA sequence for clone AA479856.

[5751] SEQ ID NO: 5712 represents the cDNA sequence for clone AA479860.

[5752] SEQ ID NO: 5713 represents the cDNA sequence for clone AA479861.

[5753] SEQ ID NO: 5714 represents the cDNA sequence for clone AA479863.

[5754] SEQ ID NO: 5715 represents the cDNA sequence for clone AA479865.

[5755] SEQ ID NO: 5716 represents the cDNA sequence for clone AA479867.

[5756] SEQ ID NO: 5717 represents the cDNA sequence for clone AA479868.

[5757] SEQ ID NO: 5718 represents the cDNA sequence for clone AA479873.

[5758] SEQ ID NO: 5719 represents the cDNA sequence for clone AA479874.

[5759] SEQ ID NO: 5720 represents the cDNA sequence for clone AA477079.

[5760] SEQ ID NO: 5721 represents the cDNA sequence for clone AA477085.

[5761] SEQ ID NO: 5722 represents the cDNA sequence for clone AA477089.

[5762] SEQ ID NO: 5723 represents the cDNA sequence for clone AA477090.

[5763] SEQ ID NO: 5724 represents the cDNA sequence for clone AA477092.

[5764] SEQ ID NO: 5725 represents the cDNA sequence for clone AA477095.

[5765] SEQ ID NO: 5726 represents the cDNA sequence for clone AA477096.

[5766] SEQ ID NO: 5727 represents the cDNA sequence for clone AA477097.

[5767] SEQ ID NO: 5728 represents the cDNA sequence for clone AA477099.

[5768] SEQ ID NO: 5729 represents the cDNA sequence for clone AA477105.

[5769] SEQ ID NO: 5730 represents the cDNA sequence for clone AA477108.

[5770] SEQ ID NO: 5731 represents the cDNA sequence for clone AA477109.

[5771] SEQ ID NO: 5732 represents the cDNA sequence for clone AA477110.

[5772] SEQ ID NO: 5733 represents the cDNA sequence for clone AA477112.

[5773] SEQ ID NO: 5734 represents the cDNA sequence for clone AA477115.

[5774] SEQ ID NO: 5735 represents the cDNA sequence for clone AA477126.

[5775] SEQ ID NO: 5736 represents the cDNA sequence for clone AA477127.

[5776] SEQ ID NO: 5737 represents the cDNA sequence for clone AA477131.

[5777] SEQ ID NO: 5738 represents the cDNA sequence for clone AA477136.

[5778] SEQ ID NO: 5739 represents the cDNA sequence for clone AA477146.

[5779] SEQ ID NO: 5740 represents the cDNA sequence for clone AA477148.

[5780] SEQ ID NO: 5741 represents the cDNA sequence for clone AA477155.

[5781] SEQ ID NO: 5742 represents the cDNA sequence for clone AA477158.

[5782] SEQ ID NO: 5743 represents the cDNA sequence for clone AA477159.

[5783] SEQ ID NO: 5744 represents the cDNA sequence for clone AA477164.

[5784] SEQ ID NO: 5745 represents the cDNA sequence for clone AA477166.

[5785] SEQ ID NO: 5746 represents the cDNA sequence for clone AA477169.

[5786] SEQ ID NO: 5747 represents the cDNA sequence for clone AA477170.

[5787] SEQ ID NO: 5748 represents the cDNA sequence for clone AA477171.

[5788] SEQ ID NO: 5749 represents the cDNA sequence for clone AA477176.

[5789] SEQ ID NO: 5750 represents the cDNA sequence for clone AA477178.

[5790] SEQ ID NO: 5751 represents the cDNA sequence for clone AA477180.

[5791] SEQ ID NO: 5752 represents the cDNA sequence for clone AA477181.

[5792] SEQ ID NO: 5753 represents the cDNA sequence for clone AA477184.

[5793] SEQ ID NO: 5754 represents the cDNA sequence for clone AA477185.

[5794] SEQ ID NO: 5755 represents the cDNA sequence for clone AA477191.

[5795] SEQ ID NO: 5756 represents the cDNA sequence for clone AA477193.

[5796] SEQ ID NO: 5757 represents the cDNA sequence for clone AA477197.

[5797] SEQ ID NO: 5758 represents the cDNA sequence for clone AA477200.

[5798] SEQ ID NO: 5759 represents the cDNA sequence for clone AA477204.

[5799] SEQ ID NO: 5760 represents the cDNA sequence for clone AA477274.

[5800] SEQ ID NO: 5761 represents the cDNA sequence for clone AA477275.

[5801] SEQ ID NO: 5762 represents the cDNA sequence for clone AA477282.

[5802] SEQ ID NO: 5763 represents the cDNA sequence for clone AA477283.

[5803] SEQ ID NO: 5764 represents the cDNA sequence for clone AA477284.

[5804] SEQ ID NO: 5765 represents the cDNA sequence for clone AA477294.

[5805] SEQ ID NO: 5766 represents the cDNA sequence for clone AA477314.

[5806] SEQ ID NO: 5767 represents the cDNA sequence for clone AA477330.

[5807] SEQ ID NO: 5768 represents the cDNA sequence for clone AA477338.

[5808] SEQ ID NO: 5769 represents the cDNA sequence for clone AA477341.

[5809] SEQ ID NO: 5770 represents the cDNA sequence for clone AA477349.

[5810] SEQ ID NO: 5771 represents the cDNA sequence for clone AA477351.

[5811] SEQ ID NO: 5772 represents the cDNA sequence for clone AA477353.

[5812] SEQ ID NO: 5773 represents the cDNA sequence for clone AA477354.

[5813] SEQ ID NO: 5774 represents the cDNA sequence for clone AA477355.

[5814] SEQ ID NO: 5775 represents the cDNA sequence for clone AA477358.

[5815] SEQ ID NO: 5776 represents the cDNA sequence for clone AA477361.

[5816] SEQ ID NO: 5777 represents the cDNA sequence for clone AA477363.

[5817] SEQ ID NO: 5778 represents the cDNA sequence for clone AA477365.

[5818] SEQ ID NO: 5779 represents the cDNA sequence for clone AA477369.

[5819] SEQ ID NO: 5780 represents the cDNA sequence for clone AA477372.

[5820] SEQ ID NO: 5781 represents the cDNA sequence for clone AA477373.

[5821] SEQ ID NO: 5782 represents the cDNA sequence for clone AA477385.

[5822] SEQ ID NO: 5783 represents the cDNA sequence for clone AA477386.

[5823] SEQ ID NO: 5784 represents the cDNA sequence for clone AA477396.

[5824] SEQ ID NO: 5785 represents the cDNA sequence for clone AA477405.

[5825] SEQ ID NO: 5786 represents the cDNA sequence for clone AA477409.

[5826] SEQ ID NO: 5787 represents the cDNA sequence for clone AA477415.

[5827] SEQ ID NO: 5788 represents the cDNA sequence for clone AA477425.

[5828] SEQ ID NO: 5789 represents the cDNA sequence for clone AA477431.

[5829] SEQ ID NO: 5790 represents the cDNA sequence for clone AA477435.

[5830] SEQ ID NO: 5791 represents the cDNA sequence for clone AA477460.

[5831] SEQ ID NO: 5792 represents the cDNA sequence for clone AA477461.

[5832] SEQ ID NO: 5793 represents the cDNA sequence for clone AA477462.

[5833] SEQ ID NO: 5794 represents the cDNA sequence for clone AA477470.

[5834] SEQ ID NO: 5795 represents the cDNA sequence for clone AA477484.

[5835] SEQ ID NO: 5796 represents the cDNA sequence for clone AA477496.

[5836] SEQ ID NO: 5797 represents the cDNA sequence for clone AA477501.

[5837] SEQ ID NO: 5798 represents the cDNA sequence for clone AA477508.

[5838] SEQ ID NO: 5799 represents the cDNA sequence for clone AA477511.

[5839] SEQ ID NO: 5800 represents the cDNA sequence for clone AA477514.

[5840] SEQ ID NO: 5801 represents the cDNA sequence for clone AA477516.

[5841] SEQ ID NO: 5802 represents the cDNA sequence for clone AA477520.

[5842] SEQ ID NO: 5803 represents the cDNA sequence for clone AA477521.

[5843] SEQ ID NO: 5804 represents the cDNA sequence for clone AA477525.

[5844] SEQ ID NO: 5805 represents the cDNA sequence for clone AA477529.

[5845] SEQ ID NO: 5806 represents the cDNA sequence for clone AA477531.

[5846] SEQ ID NO: 5807 represents the cDNA sequence for clone AA477534.

[5847] SEQ ID NO: 5808 represents the cDNA sequence for clone AA477537.

[5848] SEQ ID NO: 5809 represents the cDNA sequence for clone AA477547.

[5849] SEQ ID NO: 5810 represents the cDNA sequence for clone AA477549.

[5850] SEQ ID NO: 5811 represents the cDNA sequence for clone AA477550.

[5851] SEQ ID NO: 5812 represents the cDNA sequence for clone AA477564.

[5852] SEQ ID NO: 5813 represents the cDNA sequence for clone AA477566.

[5853] SEQ ID NO: 5814 represents the cDNA sequence for clone AA477568.

[5854] SEQ ID NO: 5815 represents the cDNA sequence for clone AA477587.

[5855] SEQ ID NO: 5816 represents the cDNA sequence for clone AA477588.

[5856] SEQ ID NO: 5817 represents the cDNA sequence for clone AA477589.

[5857] SEQ ID NO: 5818 represents the cDNA sequence for clone AA477591.

[5858] SEQ ID NO: 5819 represents the cDNA sequence for clone AA477596.

[5859] SEQ ID NO: 5820 represents the cDNA sequence for clone AA477598.

[5860] SEQ ID NO: 5821 represents the cDNA sequence for clone AA477601.

[5861] SEQ ID NO: 5822 represents the cDNA sequence for clone AA477604.

[5862] SEQ ID NO: 5823 represents the cDNA sequence for clone AA477609.

[5863] SEQ ID NO: 5824 represents the cDNA sequence for clone AA477616.

[5864] SEQ ID NO: 5825 represents the cDNA sequence for clone AA477624.

[5865] SEQ ID NO: 5826 represents the cDNA sequence for clone AA477627.

[5866] SEQ ID NO: 5827 represents the cDNA sequence for clone AA477631.

[5867] SEQ ID NO: 5828 represents the cDNA sequence for clone AA477633.

[5868] SEQ ID NO: 5829 represents the cDNA sequence for clone AA477640.

[5869] SEQ ID NO: 5830 represents the cDNA sequence for clone AA477661.

[5870] SEQ ID NO: 5831 represents the cDNA sequence for clone AA477664.

[5871] SEQ ID NO: 5832 represents the cDNA sequence for clone AA477666.

[5872] SEQ ID NO: 5833 represents the cDNA sequence for clone AA477667.

[5873] SEQ ID NO: 5834 represents the cDNA sequence for clone AA477679.

[5874] SEQ ID NO: 5835 represents the cDNA sequence for clone AA477687.

[5875] SEQ ID NO: 5836 represents the cDNA sequence for clone AA477688.

[5876] SEQ ID NO: 5837 represents the cDNA sequence for clone AA477703.

[5877] SEQ ID NO: 5838 represents the cDNA sequence for clone AA477704.

[5878] SEQ ID NO: 5839 represents the cDNA sequence for clone AA477705.

[5879] SEQ ID NO: 5840 represents the cDNA sequence for clone AA477707.

[5880] SEQ ID NO: 5841 represents the cDNA sequence for clone AA477708.

[5881] SEQ ID NO: 5842 represents the cDNA sequence for clone AA477715.

[5882] SEQ ID NO: 5843 represents the cDNA sequence for clone AA477716.

[5883] SEQ ID NO: 5844 represents the cDNA sequence for clone AA477726.

[5884] SEQ ID NO: 5845 represents the cDNA sequence for clone AA477727.

[5885] SEQ ID NO: 5846 represents the cDNA sequence for clone AA477736.

[5886] SEQ ID NO: 5847 represents the cDNA sequence for clone AA477738.

[5887] SEQ ID NO: 5848 represents the cDNA sequence for clone AA477749.

[5888] SEQ ID NO: 5849 represents the cDNA sequence for clone AA477755.

[5889] SEQ ID NO: 5850 represents the cDNA sequence for clone AA477757.

[5890] SEQ ID NO: 5851 represents the cDNA sequence for clone AA477760.

[5891] SEQ ID NO: 5852 represents the cDNA sequence for clone AA477761.

[5892] SEQ ID NO: 5853 represents the cDNA sequence for clone AA477762.

[5893] SEQ ID NO: 5854 represents the cDNA sequence for clone AA477776.

[5894] SEQ ID NO: 5855 represents the cDNA sequence for clone AA477784.

[5895] SEQ ID NO: 5856 represents the cDNA sequence for clone AA477801.

[5896] SEQ ID NO: 5857 represents the cDNA sequence for clone AA477815.

[5897] SEQ ID NO: 5858 represents the cDNA sequence for clone AA477827.

[5898] SEQ ID NO: 5859 represents the cDNA sequence for clone AA477828.

[5899] SEQ ID NO: 5860 represents the cDNA sequence for clone AA477841.

[5900] SEQ ID NO: 5861 represents the cDNA sequence for clone AA477843.

[5901] SEQ ID NO: 5862 represents the cDNA sequence for clone AA477855.

[5902] SEQ ID NO: 5863 represents the cDNA sequence for clone AA477859.

[5903] SEQ ID NO: 5864 represents the cDNA sequence for clone AA477862.

[5904] SEQ ID NO: 5865 represents the cDNA sequence for clone AA477869.

[5905] SEQ ID NO: 5866 represents the cDNA sequence for clone AA477870.

[5906] SEQ ID NO: 5867 represents the cDNA sequence for clone AA477871.

[5907] SEQ ID NO: 5868 represents the cDNA sequence for clone AA477886.

[5908] SEQ ID NO: 5869 represents the cDNA sequence for clone AA477887.

[5909] SEQ ID NO: 5870 represents the cDNA sequence for clone AA477893.

[5910] SEQ ID NO: 5871 represents the cDNA sequence for clone AA477894.

[5911] SEQ ID NO: 5872 represents the cDNA sequence for clone AA477904.

[5912] SEQ ID NO: 5873 represents the cDNA sequence for clone AA477908.

[5913] SEQ ID NO: 5874 represents the cDNA sequence for clone AA477911.

[5914] SEQ ID NO: 5875 represents the cDNA sequence for clone AA477914.

[5915] SEQ ID NO: 5876 represents the cDNA sequence for clone AA477915.

[5916] SEQ ID NO: 5877 represents the cDNA sequence for clone AA477917.

[5917] SEQ ID NO: 5878 represents the cDNA sequence for clone AA477918.

[5918] SEQ ID NO: 5879 represents the cDNA sequence for clone AA477919.

[5919] SEQ ID NO: 5880 represents the cDNA sequence for clone AA477923.

[5920] SEQ ID NO: 5881 represents the cDNA sequence for clone AA477928.

[5921] SEQ ID NO: 5882 represents the cDNA sequence for clone AA477932.

[5922] SEQ ID NO: 5883 represents the cDNA sequence for clone AA477941.

[5923] SEQ ID NO: 5884 represents the cDNA sequence for clone AA477954.

[5924] SEQ ID NO: 5885 represents the cDNA sequence for clone AA477956.

[5925] SEQ ID NO: 5886 represents the cDNA sequence for clone AA477961.

[5926] SEQ ID NO: 5887 represents the cDNA sequence for clone AA477962.

[5927] SEQ ID NO: 5888 represents the cDNA sequence for clone AA477968.

[5928] SEQ ID NO: 5889 represents the cDNA sequence for clone AA477970.

[5929] SEQ ID NO: 5890 represents the cDNA sequence for clone AA477971.

[5930] SEQ ID NO: 5891 represents the cDNA sequence for clone AA477972.

[5931] SEQ ID NO: 5892 represents the cDNA sequence for clone AA477988.

[5932] SEQ ID NO: 5893 represents the cDNA sequence for clone AA477989.

[5933] SEQ ID NO: 5894 represents the cDNA sequence for clone AA478000.

[5934] SEQ ID NO: 5895 represents the cDNA sequence for clone AA478015.

[5935] SEQ ID NO: 5896 represents the cDNA sequence for clone AA478023.

[5936] SEQ ID NO: 5897 represents the cDNA sequence for clone AA478032.

[5937] SEQ ID NO: 5898 represents the cDNA sequence for clone AA478040.

[5938] SEQ ID NO: 5899 represents the cDNA sequence for clone AA478049.

[5939] SEQ ID NO: 5900 represents the cDNA sequence for clone AA478054.

[5940] SEQ ID NO: 5901 represents the cDNA sequence for clone AA478055.

[5941] SEQ ID NO: 5902 represents the cDNA sequence for clone AA478071.

[5942] SEQ ID NO: 5903 represents the cDNA sequence for clone AA478072.

[5943] SEQ ID NO: 5904 represents the cDNA sequence for clone AA478076.

[5944] SEQ ID NO: 5905 represents the cDNA sequence for clone AA478079.

[5945] SEQ ID NO: 5906 represents the cDNA sequence for clone AA478080.

[5946] SEQ ID NO: 5907 represents the cDNA sequence for clone AA478083.

[5947] SEQ ID NO: 5908 represents the cDNA sequence for clone AA478085.

[5948] SEQ ID NO: 5909 represents the cDNA sequence for clone AA478089.

[5949] SEQ ID NO: 5910 represents the cDNA sequence for clone AA478091.

[5950] SEQ ID NO: 5911 represents the cDNA sequence for clone AA478122.

[5951] SEQ ID NO: 5912 represents the cDNA sequence for clone AA478123.

[5952] SEQ ID NO: 5913 represents the cDNA sequence for clone AA478125.

[5953] SEQ ID NO: 5914 represents the cDNA sequence for clone AA478133.

[5954] SEQ ID NO: 5915 represents the cDNA sequence for clone AA478134.

[5955] SEQ ID NO: 5916 represents the cDNA sequence for clone AA478155.

[5956] SEQ ID NO: 5917 represents the cDNA sequence for clone AA478158.

[5957] SEQ ID NO: 5918 represents the cDNA sequence for clone AA478161.

[5958] SEQ ID NO: 5919 represents the cDNA sequence for clone AA478162.

[5959] SEQ ID NO: 5920 represents the cDNA sequence for clone AA478171.

[5960] SEQ ID NO: 5921 represents the cDNA sequence for clone AA478175.

[5961] SEQ ID NO: 5922 represents the cDNA sequence for clone AA478178.

[5962] SEQ ID NO: 5923 represents the cDNA sequence for clone AA478195.

[5963] SEQ ID NO: 5924 represents the cDNA sequence for clone AA478198.

[5964] SEQ ID NO: 5925 represents the cDNA sequence for clone AA478203.

[5965] SEQ ID NO: 5926 represents the cDNA sequence for clone AA478205.

[5966] SEQ ID NO: 5927 represents the cDNA sequence for clone AA478209.

[5967] SEQ ID NO: 5928 represents the cDNA sequence for clone AA478210.

[5968] SEQ ID NO: 5929 represents the cDNA sequence for clone AA478211.

[5969] SEQ ID NO: 5930 represents the cDNA sequence for clone AA478216.

[5970] SEQ ID NO: 5931 represents the cDNA sequence for clone AA478222.

[5971] SEQ ID NO: 5932 represents the cDNA sequence for clone AA478224.

[5972] SEQ ID NO: 5933 represents the cDNA sequence for clone AA478226.

[5973] SEQ ID NO: 5934 represents the cDNA sequence for clone AA478228.

[5974] SEQ ID NO: 5935 represents the cDNA sequence for clone AA478229.

[5975] SEQ ID NO: 5936 represents the cDNA sequence for clone AA478235.

[5976] SEQ ID NO: 5937 represents the cDNA sequence for clone AA478246.

[5977] SEQ ID NO: 5938 represents the cDNA sequence for clone AA478247.

[5978] SEQ ID NO: 5939 represents the cDNA sequence for clone AA478257.

[5979] SEQ ID NO: 5940 represents the cDNA sequence for clone AA478259.

[5980] SEQ ID NO: 5941 represents the cDNA sequence for clone AA478265.

[5981] SEQ ID NO: 5942 represents the cDNA sequence for clone AA478269.

[5982] SEQ ID NO: 5943 represents the cDNA sequence for clone AA478274.

[5983] SEQ ID NO: 5944 represents the cDNA sequence for clone AA478279.

[5984] SEQ ID NO: 5945 represents the cDNA sequence for clone AA478283.

[5985] SEQ ID NO: 5946 represents the cDNA sequence for clone AA478284.

[5986] SEQ ID NO: 5947 represents the cDNA sequence for clone AA478289.

[5987] SEQ ID NO: 5948 represents the cDNA sequence for clone AA478296.

[5988] SEQ ID NO: 5949 represents the cDNA sequence for clone AA478305.

[5989] SEQ ID NO: 5950 represents the cDNA sequence for clone AA478309.

[5990] SEQ ID NO: 5951 represents the cDNA sequence for clone AA478318.

[5991] SEQ ID NO: 5952 represents the cDNA sequence for clone AA478321.

[5992] SEQ ID NO: 5953 represents the cDNA sequence for clone AA478325.

[5993] SEQ ID NO: 5954 represents the cDNA sequence for clone AA478332.

[5994] SEQ ID NO: 5955 represents the cDNA sequence for clone AA478333.

[5995] SEQ ID NO: 5956 represents the cDNA sequence for clone AA478338.

[5996] SEQ ID NO: 5957 represents the cDNA sequence for clone AA478339.

[5997] SEQ ID NO: 5958 represents the cDNA sequence for clone AA478342.

[5998] SEQ ID NO: 5959 represents the cDNA sequence for clone AA478347.

[5999] SEQ ID NO: 5960 represents the cDNA sequence for clone AA478354.

[6000] SEQ ID NO: 5961 represents the cDNA sequence for clone AA478364.

[6001] SEQ ID NO: 5962 represents the cDNA sequence for clone AA478368.

[6002] SEQ ID NO: 5963 represents the cDNA sequence for clone AA478369.

[6003] SEQ ID NO: 5964 represents the cDNA sequence for clone AA478373.

[6004] SEQ ID NO: 5965 represents the cDNA sequence for clone AA478375.

[6005] SEQ ID NO: 5966 represents the cDNA sequence for clone AA478378.

[6006] SEQ ID NO: 5967 represents the cDNA sequence for clone AA478379.

[6007] SEQ ID NO: 5968 represents the cDNA sequence for clone AA478381.

[6008] SEQ ID NO: 5969 represents the cDNA sequence for clone AA478383.

[6009] SEQ ID NO: 5970 represents the cDNA sequence for clone AA478388.

[6010] SEQ ID NO: 5971 represents the cDNA sequence for clone AA478397.

[6011] SEQ ID NO: 5972 represents the cDNA sequence for clone AA478398.

[6012] SEQ ID NO: 5973 represents the cDNA sequence for clone AA478401.

[6013] SEQ ID NO: 5974 represents the cDNA sequence for clone AA478416.

[6014] SEQ ID NO: 5975 represents the cDNA sequence for clone AA478417.

[6015] SEQ ID NO: 5976 represents the cDNA sequence for clone AA478418.

[6016] SEQ ID NO: 5977 represents the cDNA sequence for clone AA478423.

[6017] SEQ ID NO: 5978 represents the cDNA sequence for clone AA478429.

[6018] SEQ ID NO: 5979 represents the cDNA sequence for clone AA480054.

[6019] SEQ ID NO: 5980 represents the cDNA sequence for clone AA480066.

[6020] SEQ ID NO: 5981 represents the cDNA sequence for clone AA480069.

[6021] SEQ ID NO: 5982 represents the cDNA sequence for clone AA480071.

[6022] SEQ ID NO: 5983 represents the cDNA sequence for clone AA480072.

[6023] SEQ ID NO: 5984 represents the cDNA sequence for clone AA480077.

[6024] SEQ ID NO: 5985 represents the cDNA sequence for clone AA480083.

[6025] SEQ ID NO: 5986 represents the cDNA sequence for clone AA480084.

[6026] SEQ ID NO: 5987 represents the cDNA sequence for clone AA480090.

[6027] SEQ ID NO: 5988 represents the cDNA sequence for clone AA480094.

[6028] SEQ ID NO: 5989 represents the cDNA sequence for clone AA480116.

[6029] SEQ ID NO: 5990 represents the cDNA sequence for clone AA480123.

[6030] SEQ ID NO: 5991 represents the cDNA sequence for clone AA480125.

[6031] SEQ ID NO: 5992 represents the cDNA sequence for clone AA480126.

[6032] SEQ ID NO: 5993 represents the cDNA sequence for clone AA480128.

[6033] SEQ ID NO: 5994 represents the cDNA sequence for clone AA480129.

[6034] SEQ ID NO: 5995 represents the cDNA sequence for clone AA480135.

[6035] SEQ ID NO: 5996 represents the cDNA sequence for clone AA480145.

[6036] SEQ ID NO: 5997 represents the cDNA sequence for clone AA481818.

[6037] SEQ ID NO: 5998 represents the cDNA sequence for clone AA481844.

[6038] SEQ ID NO: 5999 represents the cDNA sequence for clone AA481848.

[6039] SEQ ID NO: 6000 represents the cDNA sequence for clone AA481850.

[6040] SEQ ID NO: 6001 represents the cDNA sequence for clone AA481855.

[6041] SEQ ID NO: 6002 represents the cDNA sequence for clone AA481857.

[6042] SEQ ID NO: 6003 represents the cDNA sequence for clone AA481859.

[6043] SEQ ID NO: 6004 represents the cDNA sequence for clone AA481860.

[6044] SEQ ID NO: 6005 represents the cDNA sequence for clone AA481864.

[6045] SEQ ID NO: 6006 represents the cDNA sequence for clone AA481870.

[6046] SEQ ID NO: 6007 represents the cDNA sequence for clone AA481879.

[6047] SEQ ID NO: 6008 represents the cDNA sequence for clone AA481887.

[6048] SEQ ID NO: 6009 represents the cDNA sequence for clone AA481908.

[6049] SEQ ID NO: 6010 represents the cDNA sequence for clone AA481918.

[6050] SEQ ID NO: 6011 represents the cDNA sequence for clone AA481921.

[6051] SEQ ID NO: 6012 represents the cDNA sequence for clone AA481925.

[6052] SEQ ID NO: 6013 represents the cDNA sequence for clone AA481927.

[6053] SEQ ID NO: 6014 represents the cDNA sequence for clone AA481928.

[6054] SEQ ID NO: 6015 represents the cDNA sequence for clone AA481929.

[6055] SEQ ID NO: 6016 represents the cDNA sequence for clone AA481935.

[6056] SEQ ID NO: 6017 represents the cDNA sequence for clone AA481939.

[6057] SEQ ID NO: 6018 represents the cDNA sequence for clone AA481947.

[6058] SEQ ID NO: 6019 represents the cDNA sequence for clone AA481948.

[6059] SEQ ID NO: 6020 represents the cDNA sequence for clone AA481949.

[6060] SEQ ID NO: 6021 represents the cDNA sequence for clone AA481952.

[6061] SEQ ID NO: 6022 represents the cDNA sequence for clone AA481954.

[6062] SEQ ID NO: 6023 represents the cDNA sequence for clone AA481955.

[6063] SEQ ID NO: 6024 represents the cDNA sequence for clone AA481956.

[6064] SEQ ID NO: 6025 represents the cDNA sequence for clone AA481958.

[6065] SEQ ID NO: 6026 represents the cDNA sequence for clone AA481960.

[6066] SEQ ID NO: 6027 represents the cDNA sequence for clone AA481962.

[6067] SEQ ID NO: 6028 represents the cDNA sequence for clone AA481964.

[6068] SEQ ID NO: 6029 represents the cDNA sequence for clone AA481971.

[6069] SEQ ID NO: 6030 represents the cDNA sequence for clone AA481972.

[6070] SEQ ID NO: 6031 represents the cDNA sequence for clone AA481975.

[6071] SEQ ID NO: 6032 represents the cDNA sequence for clone AA481978.

[6072] SEQ ID NO: 6033 represents the cDNA sequence for clone AA481981.

[6073] SEQ ID NO: 6034 represents the cDNA sequence for clone AA481988.

[6074] SEQ ID NO: 6035 represents the cDNA sequence for clone AA481997.

[6075] SEQ ID NO: 6036 represents the cDNA sequence for clone AA482040.

[6076] SEQ ID NO: 6037 represents the cDNA sequence for clone AA482041.

[6077] SEQ ID NO: 6038 represents the cDNA sequence for clone AA482045.

[6078] SEQ ID NO: 6039 represents the cDNA sequence for clone AA482046.

[6079] SEQ ID NO: 6040 represents the cDNA sequence for clone AA482048.

[6080] SEQ ID NO: 6041 represents the cDNA sequence for clone AA482054.

[6081] SEQ ID NO: 6042 represents the cDNA sequence for clone AA482061.

[6082] SEQ ID NO: 6043 represents the cDNA sequence for clone AA482062.

[6083] SEQ ID NO: 6044 represents the cDNA sequence for clone AA482069.

[6084] SEQ ID NO: 6045 represents the cDNA sequence for clone AA482072.

[6085] SEQ ID NO: 6046 represents the cDNA sequence for clone AA482073.

[6086] SEQ ID NO: 6047 represents the cDNA sequence for clone AA482075.

[6087] SEQ ID NO: 6048 represents the cDNA sequence for clone AA482077.

[6088] SEQ ID NO: 6049 represents the cDNA sequence for clone AA482081.

[6089] SEQ ID NO: 6050 represents the cDNA sequence for clone AA482082.

[6090] SEQ ID NO: 6051 represents the cDNA sequence for clone AA482086.

[6091] SEQ ID NO: 6052 represents the cDNA sequence for clone AA482088.

[6092] SEQ ID NO: 6053 represents the cDNA sequence for clone AA482095.

[6093] SEQ ID NO: 6054 represents the cDNA sequence for clone AA482109.

[6094] SEQ ID NO: 6055 represents the cDNA sequence for clone AA482112.

[6095] SEQ ID NO: 6056 represents the cDNA sequence for clone AA482113.

[6096] SEQ ID NO: 6057 represents the cDNA sequence for clone AA482398.

[6097] SEQ ID NO: 6058 represents the cDNA sequence for clone AA482399.

[6098] SEQ ID NO: 6059 represents the cDNA sequence for clone AA482401.

[6099] SEQ ID NO: 6060 represents the cDNA sequence for clone AA482403.

[6100] SEQ ID NO: 6061 represents the cDNA sequence for clone AA482409.

[6101] SEQ ID NO: 6062 represents the cDNA sequence for clone AA482410.

[6102] SEQ ID NO: 6063 represents the cDNA sequence for clone AA482411.

[6103] SEQ ID NO: 6064 represents the cDNA sequence for clone AA482412.

[6104] SEQ ID NO: 6065 represents the cDNA sequence for clone AA482413.

[6105] SEQ ID NO: 6066 represents the cDNA sequence for clone AA482424.

[6106] SEQ ID NO: 6067 represents the cDNA sequence for clone AA482427.

[6107] SEQ ID NO: 6068 represents the cDNA sequence for clone AA482428.

[6108] SEQ ID NO: 6069 represents the cDNA sequence for clone AA482431.

[6109] SEQ ID NO: 6070 represents the cDNA sequence for clone AA482481.

[6110] SEQ ID NO: 6071 represents the cDNA sequence for clone AA482482.

[6111] SEQ ID NO: 6072 represents the cDNA sequence for clone AA482487.

[6112] SEQ ID NO: 6073 represents the cDNA sequence for clone AA482489.

[6113] SEQ ID NO: 6074 represents the cDNA sequence for clone AA482499.

[6114] SEQ ID NO: 6075 represents the cDNA sequence for clone AA482503.

[6115] SEQ ID NO: 6076 represents the cDNA sequence for clone AA482508.

[6116] SEQ ID NO: 6077 represents the cDNA sequence for clone AA482544.

[6117] SEQ ID NO: 6078 represents the cDNA sequence for clone AA482545.

[6118] SEQ ID NO: 6079 represents the cDNA sequence for clone AA482548.

[6119] SEQ ID NO: 6080 represents the cDNA sequence for clone AA482557.

[6120] SEQ ID NO: 6081 represents the cDNA sequence for clone AA482600.

[6121] SEQ ID NO: 6082 represents the cDNA sequence for clone AA482618.

[6122] SEQ ID NO: 6083 represents the cDNA sequence for clone AA482629.

[6123] SEQ ID NO: 6084 represents the cDNA sequence for clone AA482631.

[6124] SEQ ID NO: 6085 represents the cDNA sequence for clone AA482636.

[6125] SEQ ID NO: 6086 represents the cDNA sequence for clone AA482637.

[6126] SEQ ID NO: 6087 represents the cDNA sequence for clone AA482638.

[6127] SEQ ID NO: 6088 represents the cDNA sequence for clone AA482639.

[6128] SEQ ID NO: 6089 represents the cDNA sequence for clone AA482642.

[6129] SEQ ID NO: 6090 represents the cDNA sequence for clone AA482647.

[6130] SEQ ID NO: 6091 represents the cDNA sequence for clone AA482650.

[6131] SEQ ID NO: 6092 represents the cDNA sequence for clone AA482651.

[6132] SEQ ID NO: 6093 represents the cDNA sequence for clone AA482653.

[6133] SEQ ID NO: 6094 represents the cDNA sequence for clone AA482660.

[6134] SEQ ID NO: 6095 represents the cDNA sequence for clone AA482662.

[6135] SEQ ID NO: 6096 represents the cDNA sequence for clone AA482666.

[6136] SEQ ID NO: 6097 represents the cDNA sequence for clone AA480806.

[6137] SEQ ID NO: 6098 represents the cDNA sequence for clone AA480816.

[6138] SEQ ID NO: 6099 represents the cDNA sequence for clone AA480818.

[6139] SEQ ID NO: 6100 represents the cDNA sequence for clone AA480827.

[6140] SEQ ID NO: 6101 represents the cDNA sequence for clone AA480836.

[6141] SEQ ID NO: 6102 represents the cDNA sequence for clone AA480847.

[6142] SEQ ID NO: 6103 represents the cDNA sequence for clone AA481010.

[6143] SEQ ID NO: 6104 represents the cDNA sequence for clone AA481012.

[6144] SEQ ID NO: 6105 represents the cDNA sequence for clone AA481017.

[6145] SEQ ID NO: 6106 represents the cDNA sequence for clone AA481018.

[6146] SEQ ID NO: 6107 represents the cDNA sequence for clone AA481020.

[6147] SEQ ID NO: 6108 represents the cDNA sequence for clone AA481021.

[6148] SEQ ID NO: 6109 represents the cDNA sequence for clone AA481342.

[6149] SEQ ID NO: 6110 represents the cDNA sequence for clone AA481345.

[6150] SEQ ID NO: 6111 represents the cDNA sequence for clone AA481348.

[6151] SEQ ID NO: 6112 represents the cDNA sequence for clone AA481352.

[6152] SEQ ID NO: 6113 represents the cDNA sequence for clone AA481356.

[6153] SEQ ID NO: 6114 represents the cDNA sequence for clone AA481357.

[6154] SEQ ID NO: 6115 represents the cDNA sequence for clone AA481363.

[6155] SEQ ID NO: 6116 represents the cDNA sequence for clone AA481369.

[6156] SEQ ID NO: 6117 represents the cDNA sequence for clone AA481375.

[6157] SEQ ID NO: 6118 represents the cDNA sequence for clone AA481384.

[6158] SEQ ID NO: 6119 represents the cDNA sequence for clone AA481448.

[6159] SEQ ID NO: 6120 represents the cDNA sequence for clone AA481451.

[6160] SEQ ID NO: 6121 represents the cDNA sequence for clone AA481453.

[6161] SEQ ID NO: 6122 represents the cDNA sequence for clone AA481454.

[6162] SEQ ID NO: 6123 represents the cDNA sequence for clone AA481455.

[6163] SEQ ID NO: 6124 represents the cDNA sequence for clone AA481456.

[6164] SEQ ID NO: 6125 represents the cDNA sequence for clone AA481467.

[6165] SEQ ID NO: 6126 represents the cDNA sequence for clone AA481476.

[6166] SEQ ID NO: 6127 represents the cDNA sequence for clone AA481482.

[6167] SEQ ID NO: 6128 represents the cDNA sequence for clone AA481483.

[6168] SEQ ID NO: 6129 represents the cDNA sequence for clone AA481687.

[6169] SEQ ID NO: 6130 represents the cDNA sequence for clone AA481689.

[6170] SEQ ID NO: 6131 represents the cDNA sequence for clone AA481690.

[6171] SEQ ID NO: 6132 represents the cDNA sequence for clone AA481691.

[6172] SEQ ID NO: 6133 represents the cDNA sequence for clone AA481692.

[6173] SEQ ID NO: 6134 represents the cDNA sequence for clone AA481693.

[6174] SEQ ID NO: 6135 represents the cDNA sequence for clone AA481703.

[6175] SEQ ID NO: 6136 represents the cDNA sequence for clone AA481709.

[6176] SEQ ID NO: 6137 represents the cDNA sequence for clone AA481714.

[6177] SEQ ID NO: 6138 represents the cDNA sequence for clone AA481717.

[6178] SEQ ID NO: 6139 represents the cDNA sequence for clone AA481719.

[6179] SEQ ID NO: 6140 represents the cDNA sequence for clone AA481720.

[6180] SEQ ID NO: 6141 represents the cDNA sequence for clone AA481721.

[6181] SEQ ID NO: 6142 represents the cDNA sequence for clone AA481744.

[6182] SEQ ID NO: 6143 represents the cDNA sequence for clone AA481753.

[6183] SEQ ID NO: 6144 represents the cDNA sequence for clone AA481754.

[6184] SEQ ID NO: 6145 represents the cDNA sequence for clone AA481757.

[6185] SEQ ID NO: 6146 represents the cDNA sequence for clone AA485351.

[6186] SEQ ID NO: 6147 represents the cDNA sequence for clone AA485360.

[6187] SEQ ID NO: 6148 represents the cDNA sequence for clone AA485369.

[6188] SEQ ID NO: 6149 represents the cDNA sequence for clone AA485370.

[6189] SEQ ID NO: 6150 represents the cDNA sequence for clone AA485378.

[6190] SEQ ID NO: 6151 represents the cDNA sequence for clone AA485381.

[6191] SEQ ID NO: 6152 represents the cDNA sequence for clone AA485422.

[6192] SEQ ID NO: 6153 represents the cDNA sequence for clone AA485425.

[6193] SEQ ID NO: 6154 represents the cDNA sequence for clone AA485432.

[6194] SEQ ID NO: 6155 represents the cDNA sequence for clone AA485438.

[6195] SEQ ID NO: 6156 represents the cDNA sequence for clone AA485451.

[6196] SEQ ID NO: 6157 represents the cDNA sequence for clone AA485454.

[6197] SEQ ID NO: 6158 represents the cDNA sequence for clone AA485455.

[6198] SEQ ID NO: 6159 represents the cDNA sequence for clone AA485504.

[6199] SEQ ID NO: 6160 represents the cDNA sequence for clone AA485507.

[6200] SEQ ID NO: 6161 represents the cDNA sequence for clone AA485511.

[6201] SEQ ID NO: 6162 represents the cDNA sequence for clone AA485515.

[6202] SEQ ID NO: 6163 represents the cDNA sequence for clone AA485516.

[6203] SEQ ID NO: 6164 represents the cDNA sequence for clone AA485518.

[6204] SEQ ID NO: 6165 represents the cDNA sequence for clone AA485520.

[6205] SEQ ID NO: 6166 represents the cDNA sequence for clone AA485526.

[6206] SEQ ID NO: 6167 represents the cDNA sequence for clone AA485527.

[6207] SEQ ID NO: 6168 represents the cDNA sequence for clone AA485529.

[6208] SEQ ID NO: 6169 represents the cDNA sequence for clone AA485538.

[6209] SEQ ID NO: 6170 represents the cDNA sequence for clone AA485585.

[6210] SEQ ID NO: 6171 represents the cDNA sequence for clone AA485586.

[6211] SEQ ID NO: 6172 represents the cDNA sequence for clone AA485589.

[6212] SEQ ID NO: 6173 represents the cDNA sequence for clone AA485592.

[6213] SEQ ID NO: 6174 represents the cDNA sequence for clone AA485596.

[6214] SEQ ID NO: 6175 represents the cDNA sequence for clone AA485601.

[6215] SEQ ID NO: 6176 represents the cDNA sequence for clone AA485602.

[6216] SEQ ID NO: 6177 represents the cDNA sequence for clone AA485604.

[6217] SEQ ID NO: 6178 represents the cDNA sequence for clone AA485611.

[6218] SEQ ID NO: 6179 represents the cDNA sequence for clone AA485619.

[6219] SEQ ID NO: 6180 represents the cDNA sequence for clone AA485622.

[6220] SEQ ID NO: 6181 represents the cDNA sequence for clone AA485665.

[6221] SEQ ID NO: 6182 represents the cDNA sequence for clone AA485669.

[6222] SEQ ID NO: 6183 represents the cDNA sequence for clone AA485676.

[6223] SEQ ID NO: 6184 represents the cDNA sequence for clone AA485678.

[6224] SEQ ID NO: 6185 represents the cDNA sequence for clone AA485679.

[6225] SEQ ID NO: 6186 represents the cDNA sequence for clone AA485683.

[6226] SEQ ID NO: 6187 represents the cDNA sequence for clone AA485732.

[6227] SEQ ID NO: 6188 represents the cDNA sequence for clone AA485735.

[6228] SEQ ID NO: 6189 represents the cDNA sequence for clone AA485749.

[6229] SEQ ID NO: 6190 represents the cDNA sequence for clone AA485799.

[6230] SEQ ID NO: 6191 represents the cDNA sequence for clone AA485800.

[6231] SEQ ID NO: 6192 represents the cDNA sequence for clone AA485803.

[6232] SEQ ID NO: 6193 represents the cDNA sequence for clone AA485804.

[6233] SEQ ID NO: 6194 represents the cDNA sequence for clone AA485806.

[6234] SEQ ID NO: 6195 represents the cDNA sequence for clone AA485810.

[6235] SEQ ID NO: 6196 represents the cDNA sequence for clone AA485813.

[6236] SEQ ID NO: 6197 represents the cDNA sequence for clone AA485818.

[6237] SEQ ID NO: 6198 represents the cDNA sequence for clone AA486451.

[6238] SEQ ID NO: 6199 represents the cDNA sequence for clone AA486453.

[6239] SEQ ID NO: 6200 represents the cDNA sequence for clone AA486454.

[6240] SEQ ID NO: 6201 represents the cDNA sequence for clone AA486456.

[6241] SEQ ID NO: 6202 represents the cDNA sequence for clone AA486458.

[6242] SEQ ID NO: 6203 represents the cDNA sequence for clone AA486462.

[6243] SEQ ID NO: 6204 represents the cDNA sequence for clone AA486469.

[6244] SEQ ID NO: 6205 represents the cDNA sequence for clone AA496280.

[6245] SEQ ID NO: 6206 represents the cDNA sequence for clone AA496281.

[6246] SEQ ID NO: 6207 represents the cDNA sequence for clone AA496282.

[6247] SEQ ID NO: 6208 represents the cDNA sequence for clone AA496285.

[6248] SEQ ID NO: 6209 represents the cDNA sequence for clone AA496286.

[6249] SEQ ID NO: 6210 represents the cDNA sequence for clone AA496289.

[6250] SEQ ID NO: 6211 represents the cDNA sequence for clone AA496295.

[6251] SEQ ID NO: 6212 represents the cDNA sequence for clone AA496302.

[6252] SEQ ID NO: 6213 represents the cDNA sequence for clone AA496304.

[6253] SEQ ID NO: 6214 represents the cDNA sequence for clone AA496306.

[6254] SEQ ID NO: 6215 represents the cDNA sequence for clone AA496320.

[6255] SEQ ID NO: 6216 represents the cDNA sequence for clone AA496323.

[6256] SEQ ID NO: 6217 represents the cDNA sequence for clone AA496326.

[6257] SEQ ID NO: 6218 represents the cDNA sequence for clone AA496339.

[6258] SEQ ID NO: 6219 represents the cDNA sequence for clone AA496340.

[6259] SEQ ID NO: 6220 represents the cDNA sequence for clone AA496341.

[6260] SEQ ID NO: 6221 represents the cDNA sequence for clone AA496349.

[6261] SEQ ID NO: 6222 represents the cDNA sequence for clone AA496362.

[6262] SEQ ID NO: 6223 represents the cDNA sequence for clone AA496365.

[6263] SEQ ID NO: 6224 represents the cDNA sequence for clone AA496369.

[6264] SEQ ID NO: 6225 represents the cDNA sequence for clone AA496374.

[6265] SEQ ID NO: 6226 represents the cDNA sequence for clone AA496379.

[6266] SEQ ID NO: 6227 represents the cDNA sequence for clone AA496389.

[6267] SEQ ID NO: 6228 represents the cDNA sequence for clone AA496390.

[6268] SEQ ID NO: 6229 represents the cDNA sequence for clone AA496398.

[6269] SEQ ID NO: 6230 represents the cDNA sequence for clone AA496409.

[6270] SEQ ID NO: 6231 represents the cDNA sequence for clone AA496413.

[6271] SEQ ID NO: 6232 represents the cDNA sequence for clone AA496419.

[6272] SEQ ID NO: 6233 represents the cDNA sequence for clone AA496424.

[6273] SEQ ID NO: 6234 represents the cDNA sequence for clone AA496432.

[6274] SEQ ID NO: 6235 represents the cDNA sequence for clone AA496435.

[6275] SEQ ID NO: 6236 represents the cDNA sequence for clone AA496444.

[6276] SEQ ID NO: 6237 represents the cDNA sequence for clone AA496455.

[6277] SEQ ID NO: 6238 represents the cDNA sequence for clone AA496457.

[6278] SEQ ID NO: 6239 represents the cDNA sequence for clone AA496459.

[6279] SEQ ID NO: 6240 represents the cDNA sequence for clone AA496461.

[6280] SEQ ID NO: 6241 represents the cDNA sequence for clone AA496462.

[6281] SEQ ID NO: 6242 represents the cDNA sequence for clone AA496464.

[6282] SEQ ID NO: 6243 represents the cDNA sequence for clone AA496479.

[6283] SEQ ID NO: 6244 represents the cDNA sequence for clone AA496480.

[6284] SEQ ID NO: 6245 represents the cDNA sequence for clone AA496481.

[6285] SEQ ID NO: 6246 represents the cDNA sequence for clone AA496483.

[6286] SEQ ID NO: 6247 represents the cDNA sequence for clone AA496484.

[6287] SEQ ID NO: 6248 represents the cDNA sequence for clone AA496486.

[6288] SEQ ID NO: 6249 represents the cDNA sequence for clone AA496491.

[6289] SEQ ID NO: 6250 represents the cDNA sequence for clone AA496497.

[6290] SEQ ID NO: 6251 represents the cDNA sequence for clone AA496499.

[6291] SEQ ID NO: 6252 represents the cDNA sequence for clone AA496500.

[6292] SEQ ID NO: 6253 represents the cDNA sequence for clone AA496503.

[6293] SEQ ID NO: 6254 represents the cDNA sequence for clone AA496513.

[6294] SEQ ID NO: 6255 represents the cDNA sequence for clone AA496529.

[6295] SEQ ID NO: 6256 represents the cDNA sequence for clone AA496532.

[6296] SEQ ID NO: 6257 represents the cDNA sequence for clone AA496537.

[6297] SEQ ID NO: 6258 represents the cDNA sequence for clone AA496539.

[6298] SEQ ID NO: 6259 represents the cDNA sequence for clone AA496542.

[6299] SEQ ID NO: 6260 represents the cDNA sequence for clone AA496543.

[6300] SEQ ID NO: 6261 represents the cDNA sequence for clone AA496551.

[6301] SEQ ID NO: 6262 represents the cDNA sequence for clone AA496552.

[6302] SEQ ID NO: 6263 represents the cDNA sequence for clone AA496557.

[6303] SEQ ID NO: 6264 represents the cDNA sequence for clone AA496577.

[6304] SEQ ID NO: 6265 represents the cDNA sequence for clone AA496586.

[6305] SEQ ID NO: 6266 represents the cDNA sequence for clone AA496589.

[6306] SEQ ID NO: 6267 represents the cDNA sequence for clone AA496597.

[6307] SEQ ID NO: 6268 represents the cDNA sequence for clone AA496600.

[6308] SEQ ID NO: 6269 represents the cDNA sequence for clone AA496602.

[6309] SEQ ID NO: 6270 represents the cDNA sequence for clone AA496607.

[6310] SEQ ID NO: 6271 represents the cDNA sequence for clone AA496608.

[6311] SEQ ID NO: 6272 represents the cDNA sequence for clone AA496613.

[6312] SEQ ID NO: 6273 represents the cDNA sequence for clone AA496614.

[6313] SEQ ID NO: 6274 represents the cDNA sequence for clone AA496622.

[6314] SEQ ID NO: 6275 represents the cDNA sequence for clone AA496634.

[6315] SEQ ID NO: 6276 represents the cDNA sequence for clone AA496635.

[6316] SEQ ID NO: 6277 represents the cDNA sequence for clone AA496643.

[6317] SEQ ID NO: 6278 represents the cDNA sequence for clone AA496646.

[6318] SEQ ID NO: 6279 represents the cDNA sequence for clone AA496651.

[6319] SEQ ID NO: 6280 represents the cDNA sequence for clone AA496653.

[6320] SEQ ID NO: 6281 represents the cDNA sequence for clone AA496658.

[6321] SEQ ID NO: 6282 represents the cDNA sequence for clone AA496668.

[6322] SEQ ID NO: 6283 represents the cDNA sequence for clone AA502403.

[6323] SEQ ID NO: 6284 represents the cDNA sequence for clone AA502404.

[6324] SEQ ID NO: 6285 represents the cDNA sequence for clone AA502410.

[6325] SEQ ID NO: 6286 represents the cDNA sequence for clone AA502415.

[6326] SEQ ID NO: 6287 represents the cDNA sequence for clone AA502416.

[6327] SEQ ID NO: 6288 represents the cDNA sequence for clone AA502419.

[6328] SEQ ID NO: 6289 represents the cDNA sequence for clone AA502420.

[6329] SEQ ID NO: 6290 represents the cDNA sequence for clone AA502421.

[6330] SEQ ID NO: 6291 represents the cDNA sequence for clone AA502422.

[6331] SEQ ID NO: 6292 represents the cDNA sequence for clone AA502424.

[6332] SEQ ID NO: 6293 represents the cDNA sequence for clone AA502425.

[6333] SEQ ID NO: 6294 represents the cDNA sequence for clone AA502506.

[6334] SEQ ID NO: 6295 represents the cDNA sequence for clone AA502507.

[6335] SEQ ID NO: 6296 represents the cDNA sequence for clone AA502509.

[6336] SEQ ID NO: 6297 represents the cDNA sequence for clone AA502512.

[6337] SEQ ID NO: 6298 represents the cDNA sequence for clone AA502514.

[6338] SEQ ID NO: 6299 represents the cDNA sequence for clone AA502516.

[6339] SEQ ID NO: 6300 represents the cDNA sequence for clone AA502518.

[6340] SEQ ID NO: 6301 represents the cDNA sequence for clone AA502519.

[6341] SEQ ID NO: 6302 represents the cDNA sequence for clone AA502521.

[6342] SEQ ID NO: 6303 represents the cDNA sequence for clone AA502522.

[6343] SEQ ID NO: 6304 represents the cDNA sequence for clone AA502527.

[6344] SEQ ID NO: 6305 represents the cDNA sequence for clone AA502530.

[6345] SEQ ID NO: 6306 represents the cDNA sequence for clone AA502531.

[6346] SEQ ID NO: 6307 represents the cDNA sequence for clone AA502533.

[6347] SEQ ID NO: 6308 represents the cDNA sequence for clone AA502534.

[6348] SEQ ID NO: 6309 represents the cDNA sequence for clone AA502536.

[6349] SEQ ID NO: 6310 represents the cDNA sequence for clone AA502537.

[6350] SEQ ID NO: 6311 represents the cDNA sequence for clone AA502539.

[6351] SEQ ID NO: 6312 represents the cDNA sequence for clone AA502540.

[6352] SEQ ID NO: 6313 represents the cDNA sequence for clone AA502541.

[6353] SEQ ID NO: 6314 represents the cDNA sequence for clone AA502542.

[6354] SEQ ID NO: 6315 represents the cDNA sequence for clone AA502543.

[6355] SEQ ID NO: 6316 represents the cDNA sequence for clone AA502545.

[6356] SEQ ID NO: 6317 represents the cDNA sequence for clone AA502546.

[6357] SEQ ID NO: 6318 represents the cDNA sequence for clone AA502655.

[6358] SEQ ID NO: 6319 represents the cDNA sequence for clone AA502656.

[6359] SEQ ID NO: 6320 represents the cDNA sequence for clone AA502659.

[6360] SEQ ID NO: 6321 represents the cDNA sequence for clone AA502660.

[6361] SEQ ID NO: 6322 represents the cDNA sequence for clone AA502663.

[6362] SEQ ID NO: 6323 represents the cDNA sequence for clone AA502665.

[6363] SEQ ID NO: 6324 represents the cDNA sequence for clone AA502668.

[6364] SEQ ID NO: 6325 represents the cDNA sequence for clone AA502669.

[6365] SEQ ID NO: 6326 represents the cDNA sequence for clone AA502670.

[6366] SEQ ID NO: 6327 represents the cDNA sequence for clone AA502674.

[6367] SEQ ID NO: 6328 represents the cDNA sequence for clone AA502677.

[6368] SEQ ID NO: 6329 represents the cDNA sequence for clone AA502679.

[6369] SEQ ID NO: 6330 represents the cDNA sequence for clone AA502681.

[6370] SEQ ID NO: 6331 represents the cDNA sequence for clone AA502682.

[6371] SEQ ID NO: 6332 represents the cDNA sequence for clone AA502800.

[6372] SEQ ID NO: 6333 represents the cDNA sequence for clone AA502803.

[6373] SEQ ID NO: 6334 represents the cDNA sequence for clone AA502804.

[6374] SEQ ID NO: 6335 represents the cDNA sequence for clone AA502805.

[6375] SEQ ID NO: 6336 represents the cDNA sequence for clone AA502809.

[6376] SEQ ID NO: 6337 represents the cDNA sequence for clone AA502810.

[6377] SEQ ID NO: 6338 represents the cDNA sequence for clone AA502811.

[6378] SEQ ID NO: 6339 represents the cDNA sequence for clone AA502813.

[6379] SEQ ID NO: 6340 represents the cDNA sequence for clone AA502816.

[6380] SEQ ID NO: 6341 represents the cDNA sequence for clone AA502817.

[6381] SEQ ID NO: 6342 represents the cDNA sequence for clone AA502819.

[6382] SEQ ID NO: 6343 represents the cDNA sequence for clone AA502821.

[6383] SEQ ID NO: 6344 represents the cDNA sequence for clone AA502823.

[6384] SEQ ID NO: 6345 represents the cDNA sequence for clone AA502828.

[6385] SEQ ID NO: 6346 represents the cDNA sequence for clone AA502834.

[6386] SEQ ID NO: 6347 represents the cDNA sequence for clone AA502835.

[6387] SEQ ID NO: 6348 represents the cDNA sequence for clone AA502837.

[6388] SEQ ID NO: 6349 represents the cDNA sequence for clone AA502838.

[6389] SEQ ID NO: 6350 represents the cDNA sequence for clone AA502839.

[6390] SEQ ID NO: 6351 represents the cDNA sequence for clone AA502841.

[6391] SEQ ID NO: 6352 represents the cDNA sequence for clone AA502842.

[6392] SEQ ID NO: 6353 represents the cDNA sequence for clone AA502984.

[6393] SEQ ID NO: 6354 represents the cDNA sequence for clone AA502985.

[6394] SEQ ID NO: 6355 represents the cDNA sequence for clone AA502986.

[6395] SEQ ID NO: 6356 represents the cDNA sequence for clone AA502987.

[6396] SEQ ID NO: 6357 represents the cDNA sequence for clone AA502988.

[6397] SEQ ID NO: 6358 represents the cDNA sequence for clone AA502989.

[6398] SEQ ID NO: 6359 represents the cDNA sequence for clone AA502993.

[6399] SEQ ID NO: 6360 represents the cDNA sequence for clone AA502996.

[6400] SEQ ID NO: 6361 represents the cDNA sequence for clone AA502997.

[6401] SEQ ID NO: 6362 represents the cDNA sequence for clone AA502998.

[6402] SEQ ID NO: 6363 represents the cDNA sequence for clone AA502999.

[6403] SEQ ID NO: 6364 represents the cDNA sequence for clone AA503001.

[6404] SEQ ID NO: 6365 represents the cDNA sequence for clone AA503002.

[6405] SEQ ID NO: 6366 represents the cDNA sequence for clone AA503005.

[6406] SEQ ID NO: 6367 represents the cDNA sequence for clone AA503007.

[6407] SEQ ID NO: 6368 represents the cDNA sequence for clone AA503008.

[6408] SEQ ID NO: 6369 represents the cDNA sequence for clone AA503009.

[6409] SEQ ID NO: 6370 represents the cDNA sequence for clone AA503010.

[6410] SEQ ID NO: 6371 represents the cDNA sequence for clone AA503011.

[6411] SEQ ID NO: 6372 represents the cDNA sequence for clone AA503013.

[6412] SEQ ID NO: 6373 represents the cDNA sequence for clone AA503015.

[6413] SEQ ID NO: 6374 represents the cDNA sequence for clone AA503016.

[6414] SEQ ID NO: 6375 represents the cDNA sequence for clone AA503017.

[6415] SEQ ID NO: 6376 represents the cDNA sequence for clone AA503019.

[6416] SEQ ID NO: 6377 represents the cDNA sequence for clone AA503020.

[6417] SEQ ID NO: 6378 represents the cDNA sequence for clone AA503021.

[6418] SEQ ID NO: 6379 represents the cDNA sequence for clone AA503023.

[6419] SEQ ID NO: 6380 represents the cDNA sequence for clone AA503024.

[6420] SEQ ID NO: 6381 represents the cDNA sequence for clone AA503025.

[6421] SEQ ID NO: 6382 represents the cDNA sequence for clone AA503144.

[6422] SEQ ID NO: 6383 represents the cDNA sequence for clone AA503147.

[6423] SEQ ID NO: 6384 represents the cDNA sequence for clone AA503149.

[6424] SEQ ID NO: 6385 represents the cDNA sequence for clone AA503150.

[6425] SEQ ID NO: 6386 represents the cDNA sequence for clone AA503152.

[6426] SEQ ID NO: 6387 represents the cDNA sequence for clone AA503156.

[6427] SEQ ID NO: 6388 represents the cDNA sequence for clone AA503158.

[6428] SEQ ID NO: 6389 represents the cDNA sequence for clone AA503159.

[6429] SEQ ID NO: 6390 represents the cDNA sequence for clone AA503160.

[6430] SEQ ID NO: 6391 represents the cDNA sequence for clone AA503163.

[6431] SEQ ID NO: 6392 represents the cDNA sequence for clone AA503164.

[6432] SEQ ID NO: 6393 represents the cDNA sequence for clone AA503165.

[6433] SEQ ID NO: 6394 represents the cDNA sequence for clone AA503166.

[6434] SEQ ID NO: 6395 represents the cDNA sequence for clone AA503168.

[6435] SEQ ID NO: 6396 represents the cDNA sequence for clone AA503171.

[6436] SEQ ID NO: 6397 represents the cDNA sequence for clone AA503285.

[6437] SEQ ID NO: 6398 represents the cDNA sequence for clone AA503286.

[6438] SEQ ID NO: 6399 represents the cDNA sequence for clone AA503289.

[6439] SEQ ID NO: 6400 represents the cDNA sequence for clone AA503292.

[6440] SEQ ID NO: 6401 represents the cDNA sequence for clone AA503293.

[6441] SEQ ID NO: 6402 represents the cDNA sequence for clone AA503294.

[6442] SEQ ID NO: 6403 represents the cDNA sequence for clone AA503295.

[6443] SEQ ID NO: 6404 represents the cDNA sequence for clone AA503297.

[6444] SEQ ID NO: 6405 represents the cDNA sequence for clone AA503300.

[6445] SEQ ID NO: 6406 represents the cDNA sequence for clone AA503301.

[6446] SEQ ID NO: 6407 represents the cDNA sequence for clone AA503305.

[6447] SEQ ID NO: 6408 represents the cDNA sequence for clone AA503309.

[6448] SEQ ID NO: 6409 represents the cDNA sequence for clone AA503312.

[6449] SEQ ID NO: 6410 represents the cDNA sequence for clone AA503317.

[6450] SEQ ID NO: 6411 represents the cDNA sequence for clone AA503318.

[6451] SEQ ID NO: 6412 represents the cDNA sequence for clone AA503320.

[6452] SEQ ID NO: 6413 represents the cDNA sequence for clone AA503323.

[6453] SEQ ID NO: 6414 represents the cDNA sequence for clone AA503324.

[6454] SEQ ID NO: 6415 represents the cDNA sequence for clone AA503435.

[6455] SEQ ID NO: 6416 represents the cDNA sequence for clone AA503436.

[6456] SEQ ID NO: 6417 represents the cDNA sequence for clone AA503437.

[6457] SEQ ID NO: 6418 represents the cDNA sequence for clone AA503439.

[6458] SEQ ID NO: 6419 represents the cDNA sequence for clone AA503441.

[6459] SEQ ID NO: 6420 represents the cDNA sequence for clone AA503442.

[6460] SEQ ID NO: 6421 represents the cDNA sequence for clone AA503443.

[6461] SEQ ID NO: 6422 represents the cDNA sequence for clone AA503445.

[6462] SEQ ID NO: 6423 represents the cDNA sequence for clone AA503446.

[6463] SEQ ID NO: 6424 represents the cDNA sequence for clone AA503447.

[6464] SEQ ID NO: 6425 represents the cDNA sequence for clone AA503448.

[6465] SEQ ID NO: 6426 represents the cDNA sequence for clone AA503449.

[6466] SEQ ID NO: 6427 represents the cDNA sequence for clone AA503452.

[6467] SEQ ID NO: 6428 represents the cDNA sequence for clone AA503453.

[6468] SEQ ID NO: 6429 represents the cDNA sequence for clone AA503455.

[6469] SEQ ID NO: 6430 represents the cDNA sequence for clone AA503456.

[6470] SEQ ID NO: 6431 represents the cDNA sequence for clone AA503463.

[6471] SEQ ID NO: 6432 represents the cDNA sequence for clone AA503464.

[6472] SEQ ID NO: 6433 represents the cDNA sequence for clone AA503465.

[6473] SEQ ID NO: 6434 represents the cDNA sequence for clone AA503467.

[6474] SEQ ID NO: 6435 represents the cDNA sequence for clone AA503468.

[6475] SEQ ID NO: 6436 represents the cDNA sequence for clone AA503470.

[6476] SEQ ID NO: 6437 represents the cDNA sequence for clone AA503472.

[6477] SEQ ID NO: 6438 represents the cDNA sequence for clone AA503473.

[6478] SEQ ID NO: 6439 represents the cDNA sequence for clone AA523679.

[6479] SEQ ID NO: 6440 represents the cDNA sequence for clone AA523680.

[6480] SEQ ID NO: 6441 represents the cDNA sequence for clone AA523681.

[6481] SEQ ID NO: 6442 represents the cDNA sequence for clone AA523682.

[6482] SEQ ID NO: 6443 represents the cDNA sequence for clone AA523683.

[6483] SEQ ID NO: 6444 represents the cDNA sequence for clone AA523684.

[6484] SEQ ID NO: 6445 represents the cDNA sequence for clone AA523685.

[6485] SEQ ID NO: 6446 represents the cDNA sequence for clone AA523690.

[6486] SEQ ID NO: 6447 represents the cDNA sequence for clone AA523696.

[6487] SEQ ID NO: 6448 represents the cDNA sequence for clone AA523702.

[6488] SEQ ID NO: 6449 represents the cDNA sequence for clone AA523703.

[6489] SEQ ID NO: 6450 represents the cDNA sequence for clone AA523707.

[6490] SEQ ID NO: 6451 represents the cDNA sequence for clone AA523708.

[6491] SEQ ID NO: 6452 represents the cDNA sequence for clone AA523710.

[6492] SEQ ID NO: 6453 represents the cDNA sequence for clone AA523711.

[6493] SEQ ID NO: 6454 represents the cDNA sequence for clone AA523712.

[6494] SEQ ID NO: 6455 represents the cDNA sequence for clone AA523714.

[6495] SEQ ID NO: 6456 represents the cDNA sequence for clone AA523715.

[6496] SEQ ID NO: 6457 represents the cDNA sequence for clone AA523716.

[6497] SEQ ID NO: 6458 represents the cDNA sequence for clone AA523719.

[6498] SEQ ID NO: 6459 represents the cDNA sequence for clone AA523810.

[6499] SEQ ID NO: 6460 represents the cDNA sequence for clone AA523812.

[6500] SEQ ID NO: 6461 represents the cDNA sequence for clone AA523813.

[6501] SEQ ID NO: 6462 represents the cDNA sequence for clone AA523819.

[6502] SEQ ID NO: 6463 represents the cDNA sequence for clone AA523824.

[6503] SEQ ID NO: 6464 represents the cDNA sequence for clone AA523826.

[6504] SEQ ID NO: 6465 represents the cDNA sequence for clone AA523829.

[6505] SEQ ID NO: 6466 represents the cDNA sequence for clone AA523834.

[6506] SEQ ID NO: 6467 represents the cDNA sequence for clone AA523836.

[6507] SEQ ID NO: 6468 represents the cDNA sequence for clone AA523839.

[6508] SEQ ID NO: 6469 represents the cDNA sequence for clone AA523841.

[6509] SEQ ID NO: 6470 represents the cDNA sequence for clone AA523843.

[6510] SEQ ID NO: 6471 represents the cDNA sequence for clone AA523844.

[6511] SEQ ID NO: 6472 represents the cDNA sequence for clone AA523850.

[6512] SEQ ID NO: 6473 represents the cDNA sequence for clone AA524804.

[6513] SEQ ID NO: 6474 represents the cDNA sequence for clone AA524807.

[6514] SEQ ID NO: 6475 represents the cDNA sequence for clone AA524809.

[6515] SEQ ID NO: 6476 represents the cDNA sequence for clone AA524810.

[6516] SEQ ID NO: 6477 represents the cDNA sequence for clone AA524816.

[6517] SEQ ID NO: 6478 represents the cDNA sequence for clone AA524817.

[6518] SEQ ID NO: 6479 represents the cDNA sequence for clone AA524818.

[6519] SEQ ID NO: 6480 represents the cDNA sequence for clone AA524820.

[6520] SEQ ID NO: 6481 represents the cDNA sequence for clone AA524821.

[6521] SEQ ID NO: 6482 represents the cDNA sequence for clone AA524826.

[6522] SEQ ID NO: 6483 represents the cDNA sequence for clone AA524828.

[6523] SEQ ID NO: 6484 represents the cDNA sequence for clone AA524829.

[6524] SEQ ID NO: 6485 represents the cDNA sequence for clone AA524830.

[6525] SEQ ID NO: 6486 represents the cDNA sequence for clone AA524832.

[6526] SEQ ID NO: 6487 represents the cDNA sequence for clone AA524834.

[6527] SEQ ID NO: 6488 represents the cDNA sequence for clone AA524835.

[6528] SEQ ID NO: 6489 represents the cDNA sequence for clone AA524837.

[6529] SEQ ID NO: 6490 represents the cDNA sequence for clone AA524838.

[6530] SEQ ID NO: 6491 represents the cDNA sequence for clone AA524840.

[6531] SEQ ID NO: 6492 represents the cDNA sequence for clone AA524842.

[6532] SEQ ID NO: 6493 represents the cDNA sequence for clone AA524843.

[6533] SEQ ID NO: 6494 represents the cDNA sequence for clone AA525151.

[6534] SEQ ID NO: 6495 represents the cDNA sequence for clone AA525153.

[6535] SEQ ID NO: 6496 represents the cDNA sequence for clone AA525157.

[6536] SEQ ID NO: 6497 represents the cDNA sequence for clone AA525158.

[6537] SEQ ID NO: 6498 represents the cDNA sequence for clone AA525160.

[6538] SEQ ID NO: 6499 represents the cDNA sequence for clone AA525161.

[6539] SEQ ID NO: 6500 represents the cDNA sequence for clone AA525162.

[6540] SEQ ID NO: 6501 represents the cDNA sequence for clone AA525165.

[6541] SEQ ID NO: 6502 represents the cDNA sequence for clone AA525166.

[6542] SEQ ID NO: 6503 represents the cDNA sequence for clone AA525168.

[6543] SEQ ID NO: 6504 represents the cDNA sequence for clone AA525169.

[6544] SEQ ID NO: 6505 represents the cDNA sequence for clone AA525172.

[6545] SEQ ID NO: 6506 represents the cDNA sequence for clone AA525175.

[6546] SEQ ID NO: 6507 represents the cDNA sequence for clone AA525176.

[6547] SEQ ID NO: 6508 represents the cDNA sequence for clone AA525178.

[6548] SEQ ID NO: 6509 represents the cDNA sequence for clone AA525186.

[6549] SEQ ID NO: 6510 represents the cDNA sequence for clone AA525187.

[6550] SEQ ID NO: 6511 represents the cDNA sequence for clone AA525188.

[6551] SEQ ID NO: 6512 represents the cDNA sequence for clone AA525190.

[6552] SEQ ID NO: 6513 represents the cDNA sequence for clone AA525192.

[6553] SEQ ID NO: 6514 represents the cDNA sequence for clone AA525193.

[6554] SEQ ID NO: 6515 represents the cDNA sequence for clone AA525195.

[6555] SEQ ID NO: 6516 represents the cDNA sequence for clone AA525201.

[6556] SEQ ID NO: 6517 represents the cDNA sequence for clone AA525203.

[6557] SEQ ID NO: 6518 represents the cDNA sequence for clone AA525205.

[6558] SEQ ID NO: 6519 represents the cDNA sequence for clone AA525207.

[6559] SEQ ID NO: 6520 represents the cDNA sequence for clone AA525208.

[6560] SEQ ID NO: 6521 represents the cDNA sequence for clone AA525209.

[6561] SEQ ID NO: 6522 represents the cDNA sequence for clone AA525213.

[6562] SEQ ID NO: 6523 represents the cDNA sequence for clone AA525216.

[6563] SEQ ID NO: 6524 represents the cDNA sequence for clone AA525218.

[6564] SEQ ID NO: 6525 represents the cDNA sequence for clone AA525219.

[6565] SEQ ID NO: 6526 represents the cDNA sequence for clone AA525221.

[6566] SEQ ID NO: 6527 represents the cDNA sequence for clone AA525225.

[6567] SEQ ID NO: 6528 represents the cDNA sequence for clone AA525226.

[6568] SEQ ID NO: 6529 represents the cDNA sequence for clone AA525229.

[6569] SEQ ID NO: 6530 represents the cDNA sequence for clone AA525234.

[6570] SEQ ID NO: 6531 represents the cDNA sequence for clone AA525236.

[6571] SEQ ID NO: 6532 represents the cDNA sequence for clone AA525237.

[6572] SEQ ID NO: 6533 represents the cDNA sequence for clone AA525238.

[6573] SEQ ID NO: 6534 represents the cDNA sequence for clone AA525239.

[6574] SEQ ID NO: 6535 represents the cDNA sequence for clone AA525241.

[6575] SEQ ID NO: 6536 represents the cDNA sequence for clone AA525245.

[6576] SEQ ID NO: 6537 represents the cDNA sequence for clone AA525246.

[6577] SEQ ID NO: 6538 represents the cDNA sequence for clone AA525248.

[6578] SEQ ID NO: 6539 represents the cDNA sequence for clone AA525249.

[6579] SEQ ID NO: 6540 represents the cDNA sequence for clone AA525279.

[6580] SEQ ID NO: 6541 represents the cDNA sequence for clone AA525284.

[6581] SEQ ID NO: 6542 represents the cDNA sequence for clone AA525285.

[6582] SEQ ID NO: 6543 represents the cDNA sequence for clone AA525286.

[6583] SEQ ID NO: 6544 represents the cDNA sequence for clone AA525291.

[6584] SEQ ID NO: 6545 represents the cDNA sequence for clone AA525294.

[6585] SEQ ID NO: 6546 represents the cDNA sequence for clone AA525296.

[6586] SEQ ID NO: 6547 represents the cDNA sequence for clone AA525297.

[6587] SEQ ID NO: 6548 represents the cDNA sequence for clone AA525299.

[6588] SEQ ID NO: 6549 represents the cDNA sequence for clone AA525300.

[6589] SEQ ID NO: 6550 represents the cDNA sequence for clone AA525302.

[6590] SEQ ID NO: 6551 represents the cDNA sequence for clone AA525303.

[6591] SEQ ID NO: 6552 represents the cDNA sequence for clone AA525304.

[6592] SEQ ID NO: 6553 represents the cDNA sequence for clone AA525307.

[6593] SEQ ID NO: 6554 represents the cDNA sequence for clone AA525309.

[6594] SEQ ID NO: 6555 represents the cDNA sequence for clone AA525310.

[6595] SEQ ID NO: 6556 represents the cDNA sequence for clone AA525312.

[6596] SEQ ID NO: 6557 represents the cDNA sequence for clone AA525315.

[6597] SEQ ID NO: 6558 represents the cDNA sequence for clone AA525317.

[6598] SEQ ID NO: 6559 represents the cDNA sequence for clone AA525318.

[6599] SEQ ID NO: 6560 represents the cDNA sequence for clone AA525319.

[6600] SEQ ID NO: 6561 represents the cDNA sequence for clone AA525320.

[6601] SEQ ID NO: 6562 represents the cDNA sequence for clone AA525323.

[6602] SEQ ID NO: 6563 represents the cDNA sequence for clone AA525324.

[6603] SEQ ID NO: 6564 represents the cDNA sequence for clone AA525326.

[6604] SEQ ID NO: 6565 represents the cDNA sequence for clone AA525327.

[6605] SEQ ID NO: 6566 represents the cDNA sequence for clone AA525331.

[6606] SEQ ID NO: 6567 represents the cDNA sequence for clone AA525334.

[6607] SEQ ID NO: 6568 represents the cDNA sequence for clone AA525340.

[6608] SEQ ID NO: 6569 represents the cDNA sequence for clone AA525342.

[6609] SEQ ID NO: 6570 represents the cDNA sequence for clone AA525343.

[6610] SEQ ID NO: 6571 represents the cDNA sequence for clone AA525346.

[6611] SEQ ID NO: 6572 represents the cDNA sequence for clone AA525347.

[6612] SEQ ID NO: 6573 represents the cDNA sequence for clone AA525383.

[6613] SEQ ID NO: 6574 represents the cDNA sequence for clone AA525385.

[6614] SEQ ID NO: 6575 represents the cDNA sequence for clone AA525386.

[6615] SEQ ID NO: 6576 represents the cDNA sequence for clone AA525389.

[6616] SEQ ID NO: 6577 represents the cDNA sequence for clone AA525390.

[6617] SEQ ID NO: 6578 represents the cDNA sequence for clone AA525391.

[6618] SEQ ID NO: 6579 represents the cDNA sequence for clone AA525392.

[6619] SEQ ID NO: 6580 represents the cDNA sequence for clone AA525393.

[6620] SEQ ID NO: 6581 represents the cDNA sequence for clone AA525394.

[6621] SEQ ID NO: 6582 represents the cDNA sequence for clone AA525395.

[6622] SEQ ID NO: 6583 represents the cDNA sequence for clone AA525397.

[6623] SEQ ID NO: 6584 represents the cDNA sequence for clone AA525398.

[6624] SEQ ID NO: 6585 represents the cDNA sequence for clone AA525400.

[6625] SEQ ID NO: 6586 represents the cDNA sequence for clone AA525401.

[6626] SEQ ID NO: 6587 represents the cDNA sequence for clone AA525405.

[6627] SEQ ID NO: 6588 represents the cDNA sequence for clone AA525406.

[6628] SEQ ID NO: 6589 represents the cDNA sequence for clone AA525409.

[6629] SEQ ID NO: 6590 represents the cDNA sequence for clone AA525410.

[6630] SEQ ID NO: 6591 represents the cDNA sequence for clone AA525412.

[6631] SEQ ID NO: 6592 represents the cDNA sequence for clone AA525413.

[6632] SEQ ID NO: 6593 represents the cDNA sequence for clone AA525414.

[6633] SEQ ID NO: 6594 represents the cDNA sequence for clone AA525416.

[6634] SEQ ID NO: 6595 represents the cDNA sequence for clone AA525417.

[6635] SEQ ID NO: 6596 represents the cDNA sequence for clone AA525420.

[6636] SEQ ID NO: 6597 represents the cDNA sequence for clone AA525424.

[6637] SEQ ID NO: 6598 represents the cDNA sequence for clone AA525425.

[6638] SEQ ID NO: 6599 represents the cDNA sequence for clone AA525426.

[6639] SEQ ID NO: 6600 represents the cDNA sequence for clone AA525427.

[6640] SEQ ID NO: 6601 represents the cDNA sequence for clone AA525428.

[6641] SEQ ID NO: 6602 represents the cDNA sequence for clone AA525429.

[6642] SEQ ID NO: 6603 represents the cDNA sequence for clone AA525431.

[6643] SEQ ID NO: 6604 represents the cDNA sequence for clone AA525432.

[6644] SEQ ID NO: 6605 represents the cDNA sequence for clone AA525433.

[6645] SEQ ID NO: 6606 represents the cDNA sequence for clone AA525438.

[6646] SEQ ID NO: 6607 represents the cDNA sequence for clone AA525752.

[6647] SEQ ID NO: 6608 represents the cDNA sequence for clone AA525755.

[6648] SEQ ID NO: 6609 represents the cDNA sequence for clone AA525756.

[6649] SEQ ID NO: 6610 represents the cDNA sequence for clone AA525757.

[6650] SEQ ID NO: 6611 represents the cDNA sequence for clone AA525758.

[6651] SEQ ID NO: 6612 represents the cDNA sequence for clone AA525759.

[6652] SEQ ID NO: 6613 represents the cDNA sequence for clone AA525761.

[6653] SEQ ID NO: 6614 represents the cDNA sequence for clone AA525763.

[6654] SEQ ID NO: 6615 represents the cDNA sequence for clone AA525764.

[6655] SEQ ID NO: 6616 represents the cDNA sequence for clone AA525767.

[6656] SEQ ID NO: 6617 represents the cDNA sequence for clone AA525769.

[6657] SEQ ID NO: 6618 represents the cDNA sequence for clone AA525770.

[6658] SEQ ID NO: 6619 represents the cDNA sequence for clone AA525771.

[6659] SEQ ID NO: 6620 represents the cDNA sequence for clone AA525774.

[6660] SEQ ID NO: 6621 represents the cDNA sequence for clone AA525775.

[6661] SEQ ID NO: 6622 represents the cDNA sequence for clone AA525779.

[6662] SEQ ID NO: 6623 represents the cDNA sequence for clone AA525781.

[6663] SEQ ID NO: 6624 represents the cDNA sequence for clone AA525782.

[6664] SEQ ID NO: 6625 represents the cDNA sequence for clone AA525791.

[6665] SEQ ID NO: 6626 represents the cDNA sequence for clone AA525792.

[6666] SEQ ID NO: 6627 represents the cDNA sequence for clone AA525793.

[6667] SEQ ID NO: 6628 represents the cDNA sequence for clone AA525794.

[6668] SEQ ID NO: 6629 represents the cDNA sequence for clone AA525795.

[6669] SEQ ID NO: 6630 represents the cDNA sequence for clone AA525800.

[6670] SEQ ID NO: 6631 represents the cDNA sequence for clone AA525801.

[6671] SEQ ID NO: 6632 represents the cDNA sequence for clone AA525804.

[6672] SEQ ID NO: 6633 represents the cDNA sequence for clone AA525805.

[6673] SEQ ID NO: 6634 represents the cDNA sequence for clone AA525807.

[6674] SEQ ID NO: 6635 represents the cDNA sequence for clone AA525808.

[6675] SEQ ID NO: 6636 represents the cDNA sequence for clone AA525809.

[6676] SEQ ID NO: 6637 represents the cDNA sequence for clone AA525812.

[6677] SEQ ID NO: 6638 represents the cDNA sequence for clone AA525815.

[6678] SEQ ID NO: 6639 represents the cDNA sequence for clone AA525816.

[6679] SEQ ID NO: 6640 represents the cDNA sequence for clone AA525817.

[6680] SEQ ID NO: 6641 represents the cDNA sequence for clone AA525818.

[6681] SEQ ID NO: 6642 represents the cDNA sequence for clone AA525823.

[6682] SEQ ID NO: 6643 represents the cDNA sequence for clone AA525825.

[6683] SEQ ID NO: 6644 represents the cDNA sequence for clone AA525826.

[6684] SEQ ID NO: 6645 represents the cDNA sequence for clone AA525828.

[6685] SEQ ID NO: 6646 represents the cDNA sequence for clone AA525829.

[6686] SEQ ID NO: 6647 represents the cDNA sequence for clone AA525870.

[6687] SEQ ID NO: 6648 represents the cDNA sequence for clone AA525873.

[6688] SEQ ID NO: 6649 represents the cDNA sequence for clone AA525874.

[6689] SEQ ID NO: 6650 represents the cDNA sequence for clone AA525876.

[6690] SEQ ID NO: 6651 represents the cDNA sequence for clone AA525879.

[6691] SEQ ID NO: 6652 represents the cDNA sequence for clone AA525880.

[6692] SEQ ID NO: 6653 represents the cDNA sequence for clone AA525881.

[6693] SEQ ID NO: 6654 represents the cDNA sequence for clone AA525883.

[6694] SEQ ID NO: 6655 represents the cDNA sequence for clone AA525885.

[6695] SEQ ID NO: 6656 represents the cDNA sequence for clone AA525886.

[6696] SEQ ID NO: 6657 represents the cDNA sequence for clone AA525888.

[6697] SEQ ID NO: 6658 represents the cDNA sequence for clone AA525892.

[6698] SEQ ID NO: 6659 represents the cDNA sequence for clone AA525893.

[6699] SEQ ID NO: 6660 represents the cDNA sequence for clone AA525894.

[6700] SEQ ID NO: 6661 represents the cDNA sequence for clone AA525899.

[6701] SEQ ID NO: 6662 represents the cDNA sequence for clone AA525900.

[6702] SEQ ID NO: 6663 represents the cDNA sequence for clone AA525903.

[6703] SEQ ID NO: 6664 represents the cDNA sequence for clone AA525907.

[6704] SEQ ID NO: 6665 represents the cDNA sequence for clone AA525908.

[6705] SEQ ID NO: 6666 represents the cDNA sequence for clone AA525910.

[6706] SEQ ID NO: 6667 represents the cDNA sequence for clone AA525912.

[6707] SEQ ID NO: 6668 represents the cDNA sequence for clone AA525916.

[6708] SEQ ID NO: 6669 represents the cDNA sequence for clone AA525918.

[6709] SEQ ID NO: 6670 represents the cDNA sequence for clone AA525919.

[6710] SEQ ID NO: 6671 represents the cDNA sequence for clone AA525924.

[6711] SEQ ID NO: 6672 represents the cDNA sequence for clone AA525926.

[6712] SEQ ID NO: 6673 represents the cDNA sequence for clone AA525927.

[6713] SEQ ID NO: 6674 represents the cDNA sequence for clone AA525928.

[6714] SEQ ID NO: 6675 represents the cDNA sequence for clone AA525929.

[6715] SEQ ID NO: 6676 represents the cDNA sequence for clone AA525930.

[6716] SEQ ID NO: 6677 represents the cDNA sequence for clone AA525932.

[6717] SEQ ID NO: 6678 represents the cDNA sequence for clone AA525934.

[6718] SEQ ID NO: 6679 represents the cDNA sequence for clone AA525937.

[6719] SEQ ID NO: 6680 represents the cDNA sequence for clone AA525939.

[6720] SEQ ID NO: 6681 represents the cDNA sequence for clone AA525940.

[6721] SEQ ID NO: 6682 represents the cDNA sequence for clone AA525942.

[6722] SEQ ID NO: 6683 represents the cDNA sequence for clone AA525944.

[6723] SEQ ID NO: 6684 represents the cDNA sequence for clone AA525945.

[6724] SEQ ID NO: 6685 represents the cDNA sequence for clone AA525946.

[6725] SEQ ID NO: 6686 represents the cDNA sequence for clone AA525983.

[6726] SEQ ID NO: 6687 represents the cDNA sequence for clone AA525985.

[6727] SEQ ID NO: 6688 represents the cDNA sequence for clone AA525987.

[6728] SEQ ID NO: 6689 represents the cDNA sequence for clone AA525989.

[6729] SEQ ID NO: 6690 represents the cDNA sequence for clone AA525990.

[6730] SEQ ID NO: 6691 represents the cDNA sequence for clone AA525994.

[6731] SEQ ID NO: 6692 represents the cDNA sequence for clone AA525996.

[6732] SEQ ID NO: 6693 represents the cDNA sequence for clone AA525998.

[6733] SEQ ID NO: 6694 represents the cDNA sequence for clone AA525999.

[6734] SEQ ID NO: 6695 represents the cDNA sequence for clone AA526001.

[6735] SEQ ID NO: 6696 represents the cDNA sequence for clone AA526005.

[6736] SEQ ID NO: 6697 represents the cDNA sequence for clone AA526008.

[6737] SEQ ID NO: 6698 represents the cDNA sequence for clone AA526011.

[6738] SEQ ID NO: 6699 represents the cDNA sequence for clone AA526012.

[6739] SEQ ID NO: 6700 represents the cDNA sequence for clone AA526015.

[6740] SEQ ID NO: 6701 represents the cDNA sequence for clone AA526017.

[6741] SEQ ID NO: 6702 represents the cDNA sequence for clone AA526018.

[6742] SEQ ID NO: 6703 represents the cDNA sequence for clone AA526019.

[6743] SEQ ID NO: 6704 represents the cDNA sequence for clone AA526020.

[6744] SEQ ID NO: 6705 represents the cDNA sequence for clone AA526087.

[6745] SEQ ID NO: 6706 represents the cDNA sequence for clone AA526092.

[6746] SEQ ID NO: 6707 represents the cDNA sequence for clone AA526095.

[6747] SEQ ID NO: 6708 represents the cDNA sequence for clone AA526098.

[6748] SEQ ID NO: 6709 represents the cDNA sequence for clone AA526101.

[6749] SEQ ID NO: 6710 represents the cDNA sequence for clone AA526107.

[6750] SEQ ID NO: 6711 represents the cDNA sequence for clone AA526108.

[6751] SEQ ID NO: 6712 represents the cDNA sequence for clone AA526110.

[6752] SEQ ID NO: 6713 represents the cDNA sequence for clone AA526111.

[6753] SEQ ID NO: 6714 represents the cDNA sequence for clone AA526114.

[6754] SEQ ID NO: 6715 represents the cDNA sequence for clone AA526118.

[6755] SEQ ID NO: 6716 represents the cDNA sequence for clone AA526119.

[6756] SEQ ID NO: 6717 represents the cDNA sequence for clone AA526121.

[6757] SEQ ID NO: 6718 represents the cDNA sequence for clone AA526124.

[6758] SEQ ID NO: 6719 represents the cDNA sequence for clone AA526125.

[6759] SEQ ID NO: 6720 represents the cDNA sequence for clone AA526127.

[6760] SEQ ID NO: 6721 represents the cDNA sequence for clone AA526129.

[6761] SEQ ID NO: 6722 represents the cDNA sequence for clone AA526130.

[6762] SEQ ID NO: 6723 represents the cDNA sequence for clone AA526192.

[6763] SEQ ID NO: 6724 represents the cDNA sequence for clone AA526194.

[6764] SEQ ID NO: 6725 represents the cDNA sequence for clone AA526195.

[6765] SEQ ID NO: 6726 represents the cDNA sequence for clone AA526196.

[6766] SEQ ID NO: 6727 represents the cDNA sequence for clone AA526198.

[6767] SEQ ID NO: 6728 represents the cDNA sequence for clone AA526201.

[6768] SEQ ID NO: 6729 represents the cDNA sequence for clone AA526203.

[6769] SEQ ID NO: 6730 represents the cDNA sequence for clone AA526204.

[6770] SEQ ID NO: 6731 represents the cDNA sequence for clone AA526205.

[6771] SEQ ID NO: 6732 represents the cDNA sequence for clone AA526206.

[6772] SEQ ID NO: 6733 represents the cDNA sequence for clone AA526209.

[6773] SEQ ID NO: 6734 represents the cDNA sequence for clone AA526210.

[6774] SEQ ID NO: 6735 represents the cDNA sequence for clone AA526213.

[6775] SEQ ID NO: 6736 represents the cDNA sequence for clone AA526215.

[6776] SEQ ID NO: 6737 represents the cDNA sequence for clone AA526216.

[6777] SEQ ID NO: 6738 represents the cDNA sequence for clone AA526220.

[6778] SEQ ID NO: 6739 represents the cDNA sequence for clone AA526222.

[6779] SEQ ID NO: 6740 represents the cDNA sequence for clone AA526223.

[6780] SEQ ID NO: 6741 represents the cDNA sequence for clone AA526225.

[6781] SEQ ID NO: 6742 represents the cDNA sequence for clone AA526228.

[6782] SEQ ID NO: 6743 represents the cDNA sequence for clone AA526229.

[6783] SEQ ID NO: 6744 represents the cDNA sequence for clone AA526301.

[6784] SEQ ID NO: 6745 represents the cDNA sequence for clone AA526302.

[6785] SEQ ID NO: 6746 represents the cDNA sequence for clone AA526303.

[6786] SEQ ID NO: 6747 represents the cDNA sequence for clone AA526305.

[6787] SEQ ID NO: 6748 represents the cDNA sequence for clone AA526307.

[6788] SEQ ID NO: 6749 represents the cDNA sequence for clone AA526308.

[6789] SEQ ID NO: 6750 represents the cDNA sequence for clone AA526309.

[6790] SEQ ID NO: 6751 represents the cDNA sequence for clone AA526310.

[6791] SEQ ID NO: 6752 represents the cDNA sequence for clone AA526311.

[6792] SEQ ID NO: 6753 represents the cDNA sequence for clone AA526314.

[6793] SEQ ID NO: 6754 represents the cDNA sequence for clone AA526315.

[6794] SEQ ID NO: 6755 represents the cDNA sequence for clone AA526316.

[6795] SEQ ID NO: 6756 represents the cDNA sequence for clone AA526317.

[6796] SEQ ID NO: 6757 represents the cDNA sequence for clone AA526318.

[6797] SEQ ID NO: 6758 represents the cDNA sequence for clone AA526321.

[6798] SEQ ID NO: 6759 represents the cDNA sequence for clone AA526325.

[6799] SEQ ID NO: 6760 represents the cDNA sequence for clone AA526329.

[6800] SEQ ID NO: 6761 represents the cDNA sequence for clone AA526331.

[6801] SEQ ID NO: 6762 represents the cDNA sequence for clone AA526334.

[6802] SEQ ID NO: 6763 represents the cDNA sequence for clone AA526336.

[6803] SEQ ID NO: 6764 represents the cDNA sequence for clone AA526337.

[6804] SEQ ID NO: 6765 represents the cDNA sequence for clone AA526342.

[6805] SEQ ID NO: 6766 represents the cDNA sequence for clone AA526401.

[6806] SEQ ID NO: 6767 represents the cDNA sequence for clone AA526403.

[6807] SEQ ID NO: 6768 represents the cDNA sequence for clone AA526404.

[6808] SEQ ID NO: 6769 represents the cDNA sequence for clone AA526405.

[6809] SEQ ID NO: 6770 represents the cDNA sequence for clone AA526408.

[6810] SEQ ID NO: 6771 represents the cDNA sequence for clone AA526409.

[6811] SEQ ID NO: 6772 represents the cDNA sequence for clone AA526412.

[6812] SEQ ID NO: 6773 represents the cDNA sequence for clone AA526414.

[6813] SEQ ID NO: 6774 represents the cDNA sequence for clone AA526415.

[6814] SEQ ID NO: 6775 represents the cDNA sequence for clone AA526416.

[6815] SEQ ID NO: 6776 represents the cDNA sequence for clone AA526417.

[6816] SEQ ID NO: 6777 represents the cDNA sequence for clone AA526418.

[6817] SEQ ID NO: 6778 represents the cDNA sequence for clone AA526419.

[6818] SEQ ID NO: 6779 represents the cDNA sequence for clone AA526420.

[6819] SEQ ID NO: 6780 represents the cDNA sequence for clone AA526421.

[6820] SEQ ID NO: 6781 represents the cDNA sequence for clone AA526423.

[6821] SEQ ID NO: 6782 represents the cDNA sequence for clone AA526424.

[6822] SEQ ID NO: 6783 represents the cDNA sequence for clone AA526428.

[6823] SEQ ID NO: 6784 represents the cDNA sequence for clone AA526429.

[6824] SEQ ID NO: 6785 represents the cDNA sequence for clone AA526431.

[6825] SEQ ID NO: 6786 represents the cDNA sequence for clone AA526434.

[6826] SEQ ID NO: 6787 represents the cDNA sequence for clone AA526435.

[6827] SEQ ID NO: 6788 represents the cDNA sequence for clone AA526436.

[6828] SEQ ID NO: 6789 represents the cDNA sequence for clone AA526437.

[6829] SEQ ID NO: 6790 represents the cDNA sequence for clone AA526503.

[6830] SEQ ID NO: 6791 represents the cDNA sequence for clone AA526504.

[6831] SEQ ID NO: 6792 represents the cDNA sequence for clone AA526506.

[6832] SEQ ID NO: 6793 represents the cDNA sequence for clone AA526507.

[6833] SEQ ID NO: 6794 represents the cDNA sequence for clone AA526508.

[6834] SEQ ID NO: 6795 represents the cDNA sequence for clone AA526509.

[6835] SEQ ID NO: 6796 represents the cDNA sequence for clone AA526510.

[6836] SEQ ID NO: 6797 represents the cDNA sequence for clone AA526512.

[6837] SEQ ID NO: 6798 represents the cDNA sequence for clone AA526513.

[6838] SEQ ID NO: 6799 represents the cDNA sequence for clone AA526514.

[6839] SEQ ID NO: 6800 represents the cDNA sequence for clone AA526517.

[6840] SEQ ID NO: 6801 represents the cDNA sequence for clone AA526519.

[6841] SEQ ID NO: 6802 represents the cDNA sequence for clone AA526521.

[6842] SEQ ID NO: 6803 represents the cDNA sequence for clone AA526526.

[6843] SEQ ID NO: 6804 represents the cDNA sequence for clone AA526527.

[6844] SEQ ID NO: 6805 represents the cDNA sequence for clone AA526529.

[6845] SEQ ID NO: 6806 represents the cDNA sequence for clone AA526530.

[6846] SEQ ID NO: 6807 represents the cDNA sequence for clone AA526531.

[6847] SEQ ID NO: 6808 represents the cDNA sequence for clone AA526532.

[6848] SEQ ID NO: 6809 represents the cDNA sequence for clone AA526537.

[6849] SEQ ID NO: 6810 represents the cDNA sequence for clone AA526538.

[6850] SEQ ID NO: 6811 represents the cDNA sequence for clone AA526539.

[6851] SEQ ID NO: 6812 represents the cDNA sequence for clone AA526540.

[6852] SEQ ID NO: 6813 represents the cDNA sequence for clone AA526542.

[6853] SEQ ID NO: 6814 represents the cDNA sequence for clone AA526604.

[6854] SEQ ID NO: 6815 represents the cDNA sequence for clone AA526606.

[6855] SEQ ID NO: 6816 represents the cDNA sequence for clone AA526607.

[6856] SEQ ID NO: 6817 represents the cDNA sequence for clone AA526608.

[6857] SEQ ID NO: 6818 represents the cDNA sequence for clone AA526609.

[6858] SEQ ID NO: 6819 represents the cDNA sequence for clone AA526610.

[6859] SEQ ID NO: 6820 represents the cDNA sequence for clone AA526611.

[6860] SEQ ID NO: 6821 represents the cDNA sequence for clone AA526613.

[6861] SEQ ID NO: 6822 represents the cDNA sequence for clone AA526616.

[6862] SEQ ID NO: 6823 represents the cDNA sequence for clone AA526617.

[6863] SEQ ID NO: 6824 represents the cDNA sequence for clone AA526618.

[6864] SEQ ID NO: 6825 represents the cDNA sequence for clone AA526621.

[6865] SEQ ID NO: 6826 represents the cDNA sequence for clone AA526622.

[6866] SEQ ID NO: 6827 represents the cDNA sequence for clone AA526624.

[6867] SEQ ID NO: 6828 represents the cDNA sequence for clone AA526625.

[6868] SEQ ID NO: 6829 represents the cDNA sequence for clone AA526627.

[6869] SEQ ID NO: 6830 represents the cDNA sequence for clone AA526628.

[6870] SEQ ID NO: 6831 represents the cDNA sequence for clone AA526632.

[6871] SEQ ID NO: 6832 represents the cDNA sequence for clone AA526633.

[6872] SEQ ID NO: 6833 represents the cDNA sequence for clone AA526635.

[6873] SEQ ID NO: 6834 represents the cDNA sequence for clone AA526637.

[6874] SEQ ID NO: 6835 represents the cDNA sequence for clone AA526644.

[6875] SEQ ID NO: 6836 represents the cDNA sequence for clone AA526646.

[6876] SEQ ID NO: 6837 represents the cDNA sequence for clone AA526647.

[6877] SEQ ID NO: 6838 represents the cDNA sequence for clone AA526648.

[6878] SEQ ID NO: 6839 represents the cDNA sequence for clone AA526651.

[6879] SEQ ID NO: 6840 represents the cDNA sequence for clone AA526653.

[6880] SEQ ID NO: 6841 represents the cDNA sequence for clone AA526655.

[6881] SEQ ID NO: 6842 represents the cDNA sequence for clone AA526656.

[6882] SEQ ID NO: 6843 represents the cDNA sequence for clone AA526657.

[6883] SEQ ID NO: 6844 represents the cDNA sequence for clone AA526658.

[6884] SEQ ID NO: 6845 represents the cDNA sequence for clone AA526659.

[6885] SEQ ID NO: 6846 represents the cDNA sequence for clone AA526661.

[6886] SEQ ID NO: 6847 represents the cDNA sequence for clone AA526662.

[6887] SEQ ID NO: 6848 represents the cDNA sequence for clone AA526663.

[6888] SEQ ID NO: 6849 represents the cDNA sequence for clone AA526747.

[6889] SEQ ID NO: 6850 represents the cDNA sequence for clone AA526748.

[6890] SEQ ID NO: 6851 represents the cDNA sequence for clone AA526752.

[6891] SEQ ID NO: 6852 represents the cDNA sequence for clone AA526753.

[6892] SEQ ID NO: 6853 represents the cDNA sequence for clone AA526755.

[6893] SEQ ID NO: 6854 represents the cDNA sequence for clone AA526757.

[6894] SEQ ID NO: 6855 represents the cDNA sequence for clone AA526764.

[6895] SEQ ID NO: 6856 represents the cDNA sequence for clone AA526766.

[6896] SEQ ID NO: 6857 represents the cDNA sequence for clone AA526767.

[6897] SEQ ID NO: 6858 represents the cDNA sequence for clone AA526768.

[6898] SEQ ID NO: 6859 represents the cDNA sequence for clone AA526770.

[6899] SEQ ID NO: 6860 represents the cDNA sequence for clone AA526771.

[6900] SEQ ID NO: 6861 represents the cDNA sequence for clone AA526774.

[6901] SEQ ID NO: 6862 represents the cDNA sequence for clone AA526775.

[6902] SEQ ID NO: 6863 represents the cDNA sequence for clone AA526777.

[6903] SEQ ID NO: 6864 represents the cDNA sequence for clone AA526778.

[6904] SEQ ID NO: 6865 represents the cDNA sequence for clone AA526781.

[6905] SEQ ID NO: 6866 represents the cDNA sequence for clone AA526782.

[6906] SEQ ID NO: 6867 represents the cDNA sequence for clone AA526786.

[6907] SEQ ID NO: 6868 represents the cDNA sequence for clone AA526789.

[6908] SEQ ID NO: 6869 represents the cDNA sequence for clone AA526790.

[6909] SEQ ID NO: 6870 represents the cDNA sequence for clone AA526792.

[6910] SEQ ID NO: 6871 represents the cDNA sequence for clone AA526793.

[6911] SEQ ID NO: 6872 represents the cDNA sequence for clone AA526794.

[6912] SEQ ID NO: 6873 represents the cDNA sequence for clone AA526795.

[6913] SEQ ID NO: 6874 represents the cDNA sequence for clone AA526798.

[6914] SEQ ID NO: 6875 represents the cDNA sequence for clone AA526802.

[6915] SEQ ID NO: 6876 represents the cDNA sequence for clone AA526803.

[6916] SEQ ID NO: 6877 represents the cDNA sequence for clone AA526807.

[6917] SEQ ID NO: 6878 represents the cDNA sequence for clone AA526808.

[6918] SEQ ID NO: 6879 represents the cDNA sequence for clone AA533561.

[6919] SEQ ID NO: 6880 represents the cDNA sequence for clone AA533564.

[6920] SEQ ID NO: 6881 represents the cDNA sequence for clone AA533566.

[6921] SEQ ID NO: 6882 represents the cDNA sequence for clone AA533574.

[6922] SEQ ID NO: 6883 represents the cDNA sequence for clone AA533576.

[6923] SEQ ID NO: 6884 represents the cDNA sequence for clone AA542990.

[6924] SEQ ID NO: 6885 represents the cDNA sequence for clone AA542991.

[6925] SEQ ID NO: 6886 represents the cDNA sequence for clone AA542993.

[6926] SEQ ID NO: 6887 represents the cDNA sequence for clone AA542995.

[6927] SEQ ID NO: 6888 represents the cDNA sequence for clone AA542999.

[6928] SEQ ID NO: 6889 represents the cDNA sequence for clone AA543000.

[6929] SEQ ID NO: 6890 represents the cDNA sequence for clone AA543006.

[6930] SEQ ID NO: 6891 represents the cDNA sequence for clone AA543008.

[6931] SEQ ID NO: 6892 represents the cDNA sequence for clone AA543009.

[6932] SEQ ID NO: 6893 represents the cDNA sequence for clone AA543011.

[6933] SEQ ID NO: 6894 represents the cDNA sequence for clone AA543013.

[6934] SEQ ID NO: 6895 represents the cDNA sequence for clone AA543014.

[6935] SEQ ID NO: 6896 represents the cDNA sequence for clone AA543015.

[6936] SEQ ID NO: 6897 represents the cDNA sequence for clone AA543022.

[6937] SEQ ID NO: 6898 represents the cDNA sequence for clone AA543024.

[6938] SEQ ID NO: 6899 represents the cDNA sequence for clone AA543025.

[6939] SEQ ID NO: 6900 represents the cDNA sequence for clone AA581078.

[6940] SEQ ID NO: 6901 represents the cDNA sequence for clone AA581091.

[6941] SEQ ID NO: 6902 represents the cDNA sequence for clone AA581095.

[6942] SEQ ID NO: 6903 represents the cDNA sequence for clone AA581098.

[6943] SEQ ID NO: 6904 represents the cDNA sequence for clone AA581101.

[6944] SEQ ID NO: 6905 represents the cDNA sequence for clone AA581102.

[6945] SEQ ID NO: 6906 represents the cDNA sequence for clone AA581104.

[6946] SEQ ID NO: 6907 represents the cDNA sequence for clone AA581112.

[6947] SEQ ID NO: 6908 represents the cDNA sequence for clone AA581115.

[6948] SEQ ID NO: 6909 represents the cDNA sequence for clone AA581120.

[6949] SEQ ID NO: 6910 represents the cDNA sequence for clone AA581122.

[6950] SEQ ID NO: 6911 represents the cDNA sequence for clone AA581127.

[6951] SEQ ID NO: 6912 represents the cDNA sequence for clone AA581129.

[6952] SEQ ID NO: 6913 represents the cDNA sequence for clone AA581130.

[6953] SEQ ID NO: 6914 represents the cDNA sequence for clone AA581138.

[6954] SEQ ID NO: 6915 represents the cDNA sequence for clone AA581141.

[6955] SEQ ID NO: 6916 represents the cDNA sequence for clone AA581142.

[6956] SEQ ID NO: 6917 represents the cDNA sequence for clone AA581146.

[6957] SEQ ID NO: 6918 represents the cDNA sequence for clone AA581147.

[6958] SEQ ID NO: 6919 represents the cDNA sequence for clone AA581149.

[6959] SEQ ID NO: 6920 represents the cDNA sequence for clone AA581152.

[6960] SEQ ID NO: 6921 represents the cDNA sequence for clone AA581154.

[6961] SEQ ID NO: 6922 represents the cDNA sequence for clone AA581157.

[6962] SEQ ID NO: 6923 represents the cDNA sequence for clone AA581163.

[6963] SEQ ID NO: 6924 represents the cDNA sequence for clone AA581165.

[6964] SEQ ID NO: 6925 represents the cDNA sequence for clone AA581168.

[6965] SEQ ID NO: 6926 represents the cDNA sequence for clone AA581170.

[6966] SEQ ID NO: 6927 represents the cDNA sequence for clone AA581463.

[6967] SEQ ID NO: 6928 represents the cDNA sequence for clone AA581464.

[6968] SEQ ID NO: 6929 represents the cDNA sequence for clone AA581466.

[6969] SEQ ID NO: 6930 represents the cDNA sequence for clone AA581469.

[6970] SEQ ID NO: 6931 represents the cDNA sequence for clone AA581470.

[6971] SEQ ID NO: 6932 represents the cDNA sequence for clone AA581473.

[6972] SEQ ID NO: 6933 represents the cDNA sequence for clone AA581474.

[6973] SEQ ID NO: 6934 represents the cDNA sequence for clone AA581477.

[6974] SEQ ID NO: 6935 represents the cDNA sequence for clone AA581480.

[6975] SEQ ID NO: 6936 represents the cDNA sequence for clone AA581483.

[6976] SEQ ID NO: 6937 represents the cDNA sequence for clone AA581485.

[6977] SEQ ID NO: 6938 represents the cDNA sequence for clone AA581486.

[6978] SEQ ID NO: 6939 represents the cDNA sequence for clone AA581490.

[6979] SEQ ID NO: 6940 represents the cDNA sequence for clone AA581492.

[6980] SEQ ID NO: 6941 represents the cDNA sequence for clone AA581493.

[6981] SEQ ID NO: 6942 represents the cDNA sequence for clone AA581494.

[6982] SEQ ID NO: 6943 represents the cDNA sequence for clone AA581496.

[6983] SEQ ID NO: 6944 represents the cDNA sequence for clone AA581498.

[6984] SEQ ID NO: 6945 represents the cDNA sequence for clone AA581500.

[6985] SEQ ID NO: 6946 represents the cDNA sequence for clone AA581507.

[6986] SEQ ID NO: 6947 represents the cDNA sequence for clone AA581508.

[6987] SEQ ID NO: 6948 represents the cDNA sequence for clone AA587597.

[6988] SEQ ID NO: 6949 represents the cDNA sequence for clone AA587606.

[6989] SEQ ID NO: 6950 represents the cDNA sequence for clone AA586310.

[6990] SEQ ID NO: 6951 represents the cDNA sequence for clone AA586313.

[6991] SEQ ID NO: 6952 represents the cDNA sequence for clone AA586314.

[6992] SEQ ID NO: 6953 represents the cDNA sequence for clone AA586322.

[6993] SEQ ID NO: 6954 represents the cDNA sequence for clone AA586326.

[6994] SEQ ID NO: 6955 represents the cDNA sequence for clone AA586331.

[6995] SEQ ID NO: 6956 represents the cDNA sequence for clone AA586335.

[6996] SEQ ID NO: 6957 represents the cDNA sequence for clone AA627933.

[6997] SEQ ID NO: 6958 represents the cDNA sequence for clone AA628034.

[6998] SEQ ID NO: 6959 represents the cDNA sequence for clone AA628040.

[6999] SEQ ID NO: 6960 represents the cDNA sequence for clone AA627230.

[7000] SEQ ID NO: 6961 represents the cDNA sequence for clone AA627235.

[7001] SEQ ID NO: 6962 represents the cDNA sequence for clone AA627237.

[7002] SEQ ID NO: 6963 represents the cDNA sequence for clone AA627241.

[7003] SEQ ID NO: 6964 represents the cDNA sequence for clone AA627262.

[7004] SEQ ID NO: 6965 represents the cDNA sequence for clone AA627304.

[7005] SEQ ID NO: 6966 represents the cDNA sequence for clone AA627313.

[7006] SEQ ID NO: 6967 represents the cDNA sequence for clone AA627330.

[7007] SEQ ID NO: 6968 represents the cDNA sequence for clone AA627333.

[7008] SEQ ID NO: 6969 represents the cDNA sequence for clone AA627335.

[7009] SEQ ID NO: 6970 represents the cDNA sequence for clone AA627343.

[7010] SEQ ID NO: 6971 represents the cDNA sequence for clone AA629620.

[7011] SEQ ID NO: 6972 represents the cDNA sequence for clone AA629629.

[7012] SEQ ID NO: 6973 represents the cDNA sequence for clone AA629632.

[7013] SEQ ID NO: 6974 represents the cDNA sequence for clone AA629633.

[7014] SEQ ID NO: 6975 represents the cDNA sequence for clone AA629636.

[7015] SEQ ID NO: 6976 represents the cDNA sequence for clone AA629637.

[7016] SEQ ID NO: 6977 represents the cDNA sequence for clone AA629638.

[7017] SEQ ID NO: 6978 represents the cDNA sequence for clone AA629640.

[7018] SEQ ID NO: 6979 represents the cDNA sequence for clone AA629645.

[7019] SEQ ID NO: 6980 represents the cDNA sequence for clone AA633747.

[7020] SEQ ID NO: 6981 represents the cDNA sequence for clone AA633751.

[7021] SEQ ID NO: 6982 represents the cDNA sequence for clone AA633753.

[7022] SEQ ID NO: 6983 represents the cDNA sequence for clone AA633755.

[7023] SEQ ID NO: 6984 represents the cDNA sequence for clone AA633758.

[7024] SEQ ID NO: 6985 represents the cDNA sequence for clone AA633762.

[7025] SEQ ID NO: 6986 represents the cDNA sequence for clone AA633763.

[7026] SEQ ID NO: 6987 represents the cDNA sequence for clone AA633766.

[7027] SEQ ID NO: 6988 represents the cDNA sequence for clone AA633767.

[7028] SEQ ID NO: 6989 represents the cDNA sequence for clone AA633769.

[7029] SEQ ID NO: 6990 represents the cDNA sequence for clone AA633772.

[7030] SEQ ID NO: 6991 represents the cDNA sequence for clone AA633779.

[7031] SEQ ID NO: 6992 represents the cDNA sequence for clone AA633780.

[7032] SEQ ID NO: 6993 represents the cDNA sequence for clone AA633781.

[7033] SEQ ID NO: 6994 represents the cDNA sequence for clone AA633783.

[7034] SEQ ID NO: 6995 represents the cDNA sequence for clone AA642156.

[7035] SEQ ID NO: 6996 represents the cDNA sequence for clone AA642166.

[7036] SEQ ID NO: 6997 represents the cDNA sequence for clone AA643412.

[7037] SEQ ID NO: 6998 represents the cDNA sequence for clone AA643419.

[7038] SEQ ID NO: 6999 represents the cDNA sequence for clone AA643427.

[7039] SEQ ID NO: 7000 represents the cDNA sequence for clone AA643437.

[7040] SEQ ID NO: 7001 represents the cDNA sequence for clone AA643440.

[7041] SEQ ID NO: 7002 represents the cDNA sequence for clone AA643441.

[7042] SEQ ID NO: 7003 represents the cDNA sequence for clone AA643449.

[7043] SEQ ID NO: 7004 represents the cDNA sequence for clone AA643450.

[7044] SEQ ID NO: 7005 represents the cDNA sequence for clone AA643451.

[7045] SEQ ID NO: 7006 represents the cDNA sequence for clone AA643460.

[7046] SEQ ID NO: 7007 represents the cDNA sequence for clone AA643464.

[7047] SEQ ID NO: 7008 represents the cDNA sequence for clone AA643470.

[7048] SEQ ID NO: 7009 represents the cDNA sequence for clone AA643476.

[7049] SEQ ID NO: 7010 represents the cDNA sequence for clone AA643487.

[7050] SEQ ID NO: 7011 represents the cDNA sequence for clone AA650077.

[7051] SEQ ID NO: 7012 represents the cDNA sequence for clone AA650078.

[7052] SEQ ID NO: 7013 represents the cDNA sequence for clone AA650081.

[7053] SEQ ID NO: 7014 represents the cDNA sequence for clone AA650084.

[7054] SEQ ID NO: 7015 represents the cDNA sequence for clone AA650086.

[7055] SEQ ID NO: 7016 represents the cDNA sequence for clone AA650309.

[7056] SEQ ID NO: 7017 represents the cDNA sequence for clone AA650312.

[7057] SEQ ID NO: 7018 represents the cDNA sequence for clone AA650529.

[7058] SEQ ID NO: 7019 represents the cDNA sequence for clone AA650533.

[7059] SEQ ID NO: 7020 represents the cDNA sequence for clone AA650572.

[7060] SEQ ID NO: 7021 represents the cDNA sequence for clone AA650574.

[7061] SEQ ID NO: 7022 represents the cDNA sequence for clone AA650575.

[7062] SEQ ID NO: 7023 represents the cDNA sequence for clone AA650614.

[7063] SEQ ID NO: 7024 represents the cDNA sequence for clone AA650615.

[7064] SEQ ID NO: 7025 represents the cDNA sequence for clone AA650618.

[7065] SEQ ID NO: 7026 represents the cDNA sequence for clone AA650620.

[7066] SEQ ID NO: 7027 represents the cDNA sequence for clone AA653905.

[7067] SEQ ID NO: 7028 represents the cDNA sequence for clone AA653907.

[7068] SEQ ID NO: 7029 represents the cDNA sequence for clone AA654085.

[7069] SEQ ID NO: 7030 represents the cDNA sequence for clone AA654087.

[7070] SEQ ID NO: 7031 represents the cDNA sequence for clone AA658523.

[7071] SEQ ID NO: 7032 represents the cDNA sequence for clone AA658528.

[7072] SEQ ID NO: 7033 represents the cDNA sequence for clone AA658532.

[7073] SEQ ID NO: 7034 represents the cDNA sequence for clone AA658534.

[7074] SEQ ID NO: 7035 represents the cDNA sequence for clone AA658573.

[7075] SEQ ID NO: 7036 represents the cDNA sequence for clone AA658581.

[7076] SEQ ID NO: 7037 represents the cDNA sequence for clone AA658583.

[7077] SEQ ID NO: 7038 represents the cDNA sequence for clone AA658584.

[7078] SEQ ID NO: 7039 represents the cDNA sequence for clone AA668694.

[7079] SEQ ID NO: 7040 represents the cDNA sequence for clone AA668698.

[7080] SEQ ID NO: 7041 represents the cDNA sequence for clone AA668702.

[7081] SEQ ID NO: 7042 represents the cDNA sequence for clone AA668707.

[7082] SEQ ID NO: 7043 represents the cDNA sequence for clone AA668711.

[7083] SEQ ID NO: 7044 represents the cDNA sequence for clone AA668715.

[7084] SEQ ID NO: 7045 represents the cDNA sequence for clone AA668717.

[7085] SEQ ID NO: 7046 represents the cDNA sequence for clone AA668723.

[7086] SEQ ID NO: 7047 represents the cDNA sequence for clone AA669218.

[7087] SEQ ID NO: 7048 represents the cDNA sequence for clone AA669219.

[7088] SEQ ID NO: 7049 represents the cDNA sequence for clone AA669220.

[7089] SEQ ID NO: 7050 represents the cDNA sequence for clone AA669222.

[7090] SEQ ID NO: 7051 represents the cDNA sequence for clone AA669224.

[7091] SEQ ID NO: 7052 represents the cDNA sequence for clone AA669226.

[7092] SEQ ID NO: 7053 represents the cDNA sequence for clone AA669228.

[7093] SEQ ID NO: 7054 represents the cDNA sequence for clone AA669232.

[7094] SEQ ID NO: 7055 represents the cDNA sequence for clone AA669234.

[7095] SEQ ID NO: 7056 represents the cDNA sequence for clone AA669235.

[7096] SEQ ID NO: 7057 represents the cDNA sequence for clone AA669238.

[7097] SEQ ID NO: 7058 represents the cDNA sequence for clone AA669243.

[7098] SEQ ID NO: 7059 represents the cDNA sequence for clone AA669244.

[7099] SEQ ID NO: 7060 represents the cDNA sequence for clone AA669249.

[7100] SEQ ID NO: 7061 represents the cDNA sequence for clone AA669250.

[7101] SEQ ID NO: 7062 represents the cDNA sequence for clone AA669253.

[7102] SEQ ID NO: 7063 represents the cDNA sequence for clone AA669256.

[7103] SEQ ID NO: 7064 represents the cDNA sequence for clone AA669258.

[7104] SEQ ID NO: 7065 represents the cDNA sequence for clone AA669264.

[7105] SEQ ID NO: 7066 represents the cDNA sequence for clone AA669267.

[7106] SEQ ID NO: 7067 represents the cDNA sequence for clone AA669268.

[7107] SEQ ID NO: 7068 represents the cDNA sequence for clone AA669269.

[7108] SEQ ID NO: 7069 represents the cDNA sequence for clone AA669270.

[7109] SEQ ID NO: 7070 represents the cDNA sequence for clone AA669306.

[7110] SEQ ID NO: 7071 represents the cDNA sequence for clone AA669309.

[7111] SEQ ID NO: 7072 represents the cDNA sequence for clone AA669310.

[7112] SEQ ID NO: 7073 represents the cDNA sequence for clone AA669313.

[7113] SEQ ID NO: 7074 represents the cDNA sequence for clone AA669315.

[7114] SEQ ID NO: 7075 represents the cDNA sequence for clone AA669316.

[7115] SEQ ID NO: 7076 represents the cDNA sequence for clone AA669319.

[7116] SEQ ID NO: 7077 represents the cDNA sequence for clone AA669320.

[7117] SEQ ID NO: 7078 represents the cDNA sequence for clone AA669327.

[7118] SEQ ID NO: 7079 represents the cDNA sequence for clone AA669331.

[7119] SEQ ID NO: 7080 represents the cDNA sequence for clone AA669410.

[7120] SEQ ID NO: 7081 represents the cDNA sequence for clone AA669411.

[7121] SEQ ID NO: 7082 represents the cDNA sequence for clone AA669419.

[7122] SEQ ID NO: 7083 represents the cDNA sequence for clone AA669421.

[7123] SEQ ID NO: 7084 represents the cDNA sequence for clone AA669423.

[7124] SEQ ID NO: 7085 represents the cDNA sequence for clone AA669426.

[7125] SEQ ID NO: 7086 represents the cDNA sequence for clone AA669427.

[7126] SEQ ID NO: 7087 represents the cDNA sequence for clone AA669429.

[7127] SEQ ID NO: 7088 represents the cDNA sequence for clone AA669430.

[7128] SEQ ID NO: 7089 represents the cDNA sequence for clone AA669539.

[7129] SEQ ID NO: 7090 represents the cDNA sequence for clone AA669543.

[7130] SEQ ID NO: 7091 represents the cDNA sequence for clone AA669544.

[7131] SEQ ID NO: 7092 represents the cDNA sequence for clone AA669547.

[7132] SEQ ID NO: 7093 represents the cDNA sequence for clone AA669549.

[7133] SEQ ID NO: 7094 represents the cDNA sequence for clone AA669552.

[7134] SEQ ID NO: 7095 represents the cDNA sequence for clone AA669558.

[7135] SEQ ID NO: 7096 represents the cDNA sequence for clone AA669559.

[7136] SEQ ID NO: 7097 represents the cDNA sequence for clone AA669560.

[7137] SEQ ID NO: 7098 represents the cDNA sequence for clone AA669564.

[7138] SEQ ID NO: 7099 represents the cDNA sequence for clone AA669565.

[7139] SEQ ID NO: 7100 represents the cDNA sequence for clone AA669567.

[7140] SEQ ID NO: 7101 represents the cDNA sequence for clone AA669569.

[7141] SEQ ID NO: 7102 represents the cDNA sequence for clone AA669570.

[7142] SEQ ID NO: 7103 represents the cDNA sequence for clone AA669572.

[7143] SEQ ID NO: 7104 represents the cDNA sequence for clone AA669574.

[7144] SEQ ID NO: 7105 represents the cDNA sequence for clone AA669577.

[7145] SEQ ID NO: 7106 represents the cDNA sequence for clone AA669578.

[7146] SEQ ID NO: 7107 represents the cDNA sequence for clone AA669580.

[7147] SEQ ID NO: 7108 represents the cDNA sequence for clone AA669584.

[7148] SEQ ID NO: 7109 represents the cDNA sequence for clone AA669588.

[7149] SEQ ID NO: 7110 represents the cDNA sequence for clone AA669590.

[7150] SEQ ID NO: 7111 represents the cDNA sequence for clone AA669592.

[7151] SEQ ID NO: 7112 represents the cDNA sequence for clone AA669593.

[7152] SEQ ID NO: 7113 represents the cDNA sequence for clone AA669600.

[7153] SEQ ID NO: 7114 represents the cDNA sequence for clone AA669605.

[7154] SEQ ID NO: 7115 represents the cDNA sequence for clone AA669608.

[7155] SEQ ID NO: 7116 represents the cDNA sequence for clone AA669611.

[7156] SEQ ID NO: 7117 represents the cDNA sequence for clone AA669612.

[7157] SEQ ID NO: 7118 represents the cDNA sequence for clone AA669614.

[7158] SEQ ID NO: 7119 represents the cDNA sequence for clone AA669616.

[7159] SEQ ID NO: 7120 represents the cDNA sequence for clone AA669618.

[7160] SEQ ID NO: 7121 represents the cDNA sequence for clone AA669620.

[7161] SEQ ID NO: 7122 represents the cDNA sequence for clone AA669627.

[7162] SEQ ID NO: 7123 represents the cDNA sequence for clone AA669631.

[7163] SEQ ID NO: 7124 represents the cDNA sequence for clone AA669632.

[7164] SEQ ID NO: 7125 represents the cDNA sequence for clone AA669634.

[7165] SEQ ID NO: 7126 represents the cDNA sequence for clone AA669643.

[7166] SEQ ID NO: 7127 represents the cDNA sequence for clone AA669646.

[7167] SEQ ID NO: 7128 represents the cDNA sequence for clone AA669648.

[7168] SEQ ID NO: 7129 represents the cDNA sequence for clone AA669658.

[7169] SEQ ID NO: 7130 represents the cDNA sequence for clone AA669659.

[7170] SEQ ID NO: 7131 represents the cDNA sequence for clone AA669663.

[7171] SEQ ID NO: 7132 represents the cDNA sequence for clone AA669664.

[7172] SEQ ID NO: 7133 represents the cDNA sequence for clone AA669668.

[7173] SEQ ID NO: 7134 represents the cDNA sequence for clone AA669669.

[7174] SEQ ID NO: 7135 represents the cDNA sequence for clone AA669671.

[7175] SEQ ID NO: 7136 represents the cDNA sequence for clone AA669673.

[7176] SEQ ID NO: 7137 represents the cDNA sequence for clone AA669677.

[7177] SEQ ID NO: 7138 represents the cDNA sequence for clone AA669681.

[7178] SEQ ID NO: 7139 represents the cDNA sequence for clone AA669689.

[7179] SEQ ID NO: 7140 represents the cDNA sequence for clone AA669690.

[7180] SEQ ID NO: 7141 represents the cDNA sequence for clone AA669691.

[7181] SEQ ID NO: 7142 represents the cDNA sequence for clone AA669694.

[7182] SEQ ID NO: 7143 represents the cDNA sequence for clone AA669695.

[7183] SEQ ID NO: 7144 represents the cDNA sequence for clone AA669704.

[7184] SEQ ID NO: 7145 represents the cDNA sequence for clone AA669705.

[7185] SEQ ID NO: 7146 represents the cDNA sequence for clone AA669706.

[7186] SEQ ID NO: 7147 represents the cDNA sequence for clone AF034533.

[7187] SEQ ID NO: 7148 represents the cDNA sequence for clone AA680250.

[7188] SEQ ID NO: 7149 represents the cDNA sequence for clone AA680252.

[7189] SEQ ID NO: 7150 represents the cDNA sequence for clone AA680257.

[7190] SEQ ID NO: 7151 represents the cDNA sequence for clone AA680261.

[7191] SEQ ID NO: 7152 represents the cDNA sequence for clone AA680262.

[7192] SEQ ID NO: 7153 represents the cDNA sequence for clone AA680263.

[7193] SEQ ID NO: 7154 represents the cDNA sequence for clone AA680269.

[7194] SEQ ID NO: 7155 represents the cDNA sequence for clone AA680307.

[7195] SEQ ID NO: 7156 represents the cDNA sequence for clone AA680311.

[7196] SEQ ID NO: 7157 represents the cDNA sequence for clone AA680313.

[7197] SEQ ID NO: 7158 represents the cDNA sequence for clone AA680314.

[7198] SEQ ID NO: 7159 represents the cDNA sequence for clone AA680315.

[7199] SEQ ID NO: 7160 represents the cDNA sequence for clone AA680318.

[7200] SEQ ID NO: 7161 represents the cDNA sequence for clone AA680319.

[7201] SEQ ID NO: 7162 represents the cDNA sequence for clone AA680320.

[7202] SEQ ID NO: 7163 represents the cDNA sequence for clone AA680321.

[7203] SEQ ID NO: 7164 represents the cDNA sequence for clone AA680326.

[7204] SEQ ID NO: 7165 represents the cDNA sequence for clone AA679877.

[7205] SEQ ID NO: 7166 represents the cDNA sequence for clone AA679885.

[7206] SEQ ID NO: 7167 represents the cDNA sequence for clone AA679886.

[7207] SEQ ID NO: 7168 represents the cDNA sequence for clone AA679901.

[7208] SEQ ID NO: 7169 represents the cDNA sequence for clone AA679911.

[7209] SEQ ID NO: 7170 represents the cDNA sequence for clone AA679922.

[7210] SEQ ID NO: 7171 represents the cDNA sequence for clone AA679930.

[7211] SEQ ID NO: 7172 represents the cDNA sequence for clone AA679931.

[7212] SEQ ID NO: 7173 represents the cDNA sequence for clone AA679933.

[7213] SEQ ID NO: 7174 represents the cDNA sequence for clone AA679937.

[7214] SEQ ID NO: 7175 represents the cDNA sequence for clone AA679938.

[7215] SEQ ID NO: 7176 represents the cDNA sequence for clone AA679939.

[7216] SEQ ID NO: 7177 represents the cDNA sequence for clone AA679942.

[7217] SEQ ID NO: 7178 represents the cDNA sequence for clone AA679945.

[7218] SEQ ID NO: 7179 represents the cDNA sequence for clone AA679946.

[7219] SEQ ID NO: 7180 represents the cDNA sequence for clone AA679194.

[7220] SEQ ID NO: 7181 represents the cDNA sequence for clone AA679195.

[7221] SEQ ID NO: 7182 represents the cDNA sequence for clone AA679196.

[7222] SEQ ID NO: 7183 represents the cDNA sequence for clone AA679203.

[7223] SEQ ID NO: 7184 represents the cDNA sequence for clone AA679206.

[7224] SEQ ID NO: 7185 represents the cDNA sequence for clone AA679207.

[7225] SEQ ID NO: 7186 represents the cDNA sequence for clone AA679210.

[7226] SEQ ID NO: 7187 represents the cDNA sequence for clone AA679212.

[7227] SEQ ID NO: 7188 represents the cDNA sequence for clone AA679254.

[7228] SEQ ID NO: 7189 represents the cDNA sequence for clone AA679263.

[7229] SEQ ID NO: 7190 represents the cDNA sequence for clone AA679266.

[7230] SEQ ID NO: 7191 represents the cDNA sequence for clone AA679268.

[7231] SEQ ID NO: 7192 represents the cDNA sequence for clone AA679269.

[7232] SEQ ID NO: 7193 represents the cDNA sequence for clone AA679270.

[7233] SEQ ID NO: 7194 represents the cDNA sequence for clone AA679273.

[7234] SEQ ID NO: 7195 represents the cDNA sequence for clone AA773088.

[7235] SEQ ID NO: 7196 represents the cDNA sequence for clone AA773090.

[7236] SEQ ID NO: 7197 represents the cDNA sequence for clone AA773093.

[7237] SEQ ID NO: 7198 represents the cDNA sequence for clone AA773095.

[7238] SEQ ID NO: 7199 represents the cDNA sequence for clone AA773100.

[7239] SEQ ID NO: 7200 represents the cDNA sequence for clone AA773101.

[7240] SEQ ID NO: 7201 represents the cDNA sequence for clone AA773102.

[7241] SEQ ID NO: 7202 represents the cDNA sequence for clone AA773105.

[7242] SEQ ID NO: 7203 represents the cDNA sequence for clone AA773107.

[7243] SEQ ID NO: 7204 represents the cDNA sequence for clone AA773108.

[7244] SEQ ID NO: 7205 represents the cDNA sequence for clone AA773111.

[7245] SEQ ID NO: 7206 represents the cDNA sequence for clone AA773116.

[7246] SEQ ID NO: 7207 represents the cDNA sequence for clone AA773117.

[7247] SEQ ID NO: 7208 represents the cDNA sequence for clone AA773125.

[7248] SEQ ID NO: 7209 represents the cDNA sequence for clone AA773132.

[7249] SEQ ID NO: 7210 represents the cDNA sequence for clone AA773134.

[7250] SEQ ID NO: 7211 represents the cDNA sequence for clone AA773138.

[7251] SEQ ID NO: 7212 represents the cDNA sequence for clone AA773139.

[7252] SEQ ID NO: 7213 represents the cDNA sequence for clone AA773145.

[7253] SEQ ID NO: 7214 represents the cDNA sequence for clone AA773148.

[7254] SEQ ID NO: 7215 represents the cDNA sequence for clone AA773156.

[7255] SEQ ID NO: 7216 represents the cDNA sequence for clone AA775062.

[7256] SEQ ID NO: 7217 represents the cDNA sequence for clone AA775063.

[7257] SEQ ID NO: 7218 represents the cDNA sequence for clone AA775073.

[7258] SEQ ID NO: 7219 represents the cDNA sequence for clone AA782307.

[7259] SEQ ID NO: 7220 represents the cDNA sequence for clone AA782308.

[7260] SEQ ID NO: 7221 represents the cDNA sequence for clone AA782311.

[7261] SEQ ID NO: 7222 represents the cDNA sequence for clone AA782313.

[7262] SEQ ID NO: 7223 represents the cDNA sequence for clone AA782323.

[7263] SEQ ID NO: 7224 represents the cDNA sequence for clone AA782328.

[7264] SEQ ID NO: 7225 represents the cDNA sequence for clone AA782334.

[7265] SEQ ID NO: 7226 represents the cDNA sequence for clone AA782337.

[7266] SEQ ID NO: 7227 represents the cDNA sequence for clone AA782340.

[7267] SEQ ID NO: 7228 represents the cDNA sequence for clone AA782345.

[7268] SEQ ID NO: 7229 represents the cDNA sequence for clone AA782346.

[7269] SEQ ID NO: 7230 represents the cDNA sequence for clone AA782352.

[7270] SEQ ID NO: 7231 represents the cDNA sequence for clone AA782353.

[7271] SEQ ID NO: 7232 represents the cDNA sequence for clone AA782358.

[7272] SEQ ID NO: 7233 represents the cDNA sequence for clone AA782359.

[7273] SEQ ID NO: 7234 represents the cDNA sequence for clone AA782366.

[7274] SEQ ID NO: 7235 represents the cDNA sequence for clone AA782369.

[7275] SEQ ID NO: 7236 represents the cDNA sequence for clone AA782370.

[7276] SEQ ID NO: 7237 represents the cDNA sequence for clone AA782372.

[7277] SEQ ID NO: 7238 represents the cDNA sequence for clone AA782377.

[7278] SEQ ID NO: 7239 represents the cDNA sequence for clone AA782378.

[7279] SEQ ID NO: 7240 represents the cDNA sequence for clone AA782383.

[7280] SEQ ID NO: 7241 represents the cDNA sequence for clone AA782384.

[7281] SEQ ID NO: 7242 represents the cDNA sequence for clone AA782873.

[7282] SEQ ID NO: 7243 represents the cDNA sequence for clone AA782876.

[7283] SEQ ID NO: 7244 represents the cDNA sequence for clone AA782883.

[7284] SEQ ID NO: 7245 represents the cDNA sequence for clone AA782886.

[7285] SEQ ID NO: 7246 represents the cDNA sequence for clone AA782891.

[7286] SEQ ID NO: 7247 represents the cDNA sequence for clone AA782903.

[7287] SEQ ID NO: 7248 represents the cDNA sequence for clone AA808800.

[7288] SEQ ID NO: 7249 represents the cDNA sequence for clone AA808802.

[7289] SEQ ID NO: 7250 represents the cDNA sequence for clone AA808840.

[7290] SEQ ID NO: 7251 represents the cDNA sequence for clone AA808841.

[7291] SEQ ID NO: 7252 represents the cDNA sequence for clone AA808844.

[7292] SEQ ID NO: 7253 represents the cDNA sequence for clone AA808970.

[7293] SEQ ID NO: 7254 represents the cDNA sequence for clone AA809001.

[7294] SEQ ID NO: 7255 represents the cDNA sequence for clone AA825779.

[7295] SEQ ID NO: 7256 represents the cDNA sequence for clone AA825781.

[7296] SEQ ID NO: 7257 represents the cDNA sequence for clone AA825782.

[7297] SEQ ID NO: 7258 represents the cDNA sequence for clone AA825783.

[7298] SEQ ID NO: 7259 represents the cDNA sequence for clone AA825784.

[7299] SEQ ID NO: 7260 represents the cDNA sequence for clone AA825785.

[7300] SEQ ID NO: 7261 represents the cDNA sequence for clone AA825788.

[7301] SEQ ID NO: 7262 represents the cDNA sequence for clone AA825790.

[7302] SEQ ID NO: 7263 represents the cDNA sequence for clone AA825792.

[7303] SEQ ID NO: 7264 represents the cDNA sequence for clone AA825795.

[7304] SEQ ID NO: 7265 represents the cDNA sequence for clone AA825796.

[7305] SEQ ID NO: 7266 represents the cDNA sequence for clone AA825798.

[7306] SEQ ID NO: 7267 represents the cDNA sequence for clone AA825799.

[7307] SEQ ID NO: 7268 represents the cDNA sequence for clone AA825800.

[7308] SEQ ID NO: 7269 represents the cDNA sequence for clone AA825802.

[7309] SEQ ID NO: 7270 represents the cDNA sequence for clone AA825803.

[7310] SEQ ID NO: 7271 represents the cDNA sequence for clone AA825804.

[7311] SEQ ID NO: 7272 represents the cDNA sequence for clone AA825805.

[7312] SEQ ID NO: 7273 represents the cDNA sequence for clone AA825807.

[7313] SEQ ID NO: 7274 represents the cDNA sequence for clone AA825808.

[7314] SEQ ID NO: 7275 represents the cDNA sequence for clone AA825999.

[7315] SEQ ID NO: 7276 represents the cDNA sequence for clone AA826006.

[7316] SEQ ID NO: 7277 represents the cDNA sequence for clone AA826009.

[7317] SEQ ID NO: 7278 represents the cDNA sequence for clone AA826010.

[7318] SEQ ID NO: 7279 represents the cDNA sequence for clone AA826011.

[7319] SEQ ID NO: 7280 represents the cDNA sequence for clone AA826012.

[7320] SEQ ID NO: 7281 represents the cDNA sequence for clone AA826015.

[7321] SEQ ID NO: 7282 represents the cDNA sequence for clone AA826016.

[7322] SEQ ID NO: 7283 represents the cDNA sequence for clone AA826018.

[7323] SEQ ID NO: 7284 represents the cDNA sequence for clone AA826019.

[7324] SEQ ID NO: 7285 represents the cDNA sequence for clone AA826020.

[7325] SEQ ID NO: 7286 represents the cDNA sequence for clone AA826021.

[7326] SEQ ID NO: 7287 represents the cDNA sequence for clone AA826030.

[7327] SEQ ID NO: 7288 represents the cDNA sequence for clone AA826036.

[7328] SEQ ID NO: 7289 represents the cDNA sequence for clone AA826131.

[7329] SEQ ID NO: 7290 represents the cDNA sequence for clone AA826138.

[7330] SEQ ID NO: 7291 represents the cDNA sequence for clone AA826139.

[7331] SEQ ID NO: 7292 represents the cDNA sequence for clone AA826144.

[7332] SEQ ID NO: 7293 represents the cDNA sequence for clone AA826148.

[7333] SEQ ID NO: 7294 represents the cDNA sequence for clone AA826151.

[7334] SEQ ID NO: 7295 represents the cDNA sequence for clone AA826152.

[7335] SEQ ID NO: 7296 represents the cDNA sequence for clone AA826158.

[7336] SEQ ID NO: 7297 represents the cDNA sequence for clone AA826159.

[7337] SEQ ID NO: 7298 represents the cDNA sequence for clone AA826160.

[7338] SEQ ID NO: 7299 represents the cDNA sequence for clone AA826162.

[7339] SEQ ID NO: 7300 represents the cDNA sequence for clone AA826168.

[7340] SEQ ID NO: 7301 represents the cDNA sequence for clone AA826169.

[7341] SEQ ID NO: 7302 represents the cDNA sequence for clone AA826292.

[7342] SEQ ID NO: 7303 represents the cDNA sequence for clone AA826293.

[7343] SEQ ID NO: 7304 represents the cDNA sequence for clone AA826294.

[7344] SEQ ID NO: 7305 represents the cDNA sequence for clone AA826297.

[7345] SEQ ID NO: 7306 represents the cDNA sequence for clone AA826298.

[7346] SEQ ID NO: 7307 represents the cDNA sequence for clone AA826299.

[7347] SEQ ID NO: 7308 represents the cDNA sequence for clone AA826300.

[7348] SEQ ID NO: 7309 represents the cDNA sequence for clone AA826301.

[7349] SEQ ID NO: 7310 represents the cDNA sequence for clone AA826305.

[7350] SEQ ID NO: 7311 represents the cDNA sequence for clone AA826306.

[7351] SEQ ID NO: 7312 represents the cDNA sequence for clone AA826307.

[7352] SEQ ID NO: 7313 represents the cDNA sequence for clone AA826309.

[7353] SEQ ID NO: 7314 represents the cDNA sequence for clone AA826310.

[7354] SEQ ID NO: 7315 represents the cDNA sequence for clone AA826311.

[7355] SEQ ID NO: 7316 represents the cDNA sequence for clone AA826312.

[7356] SEQ ID NO: 7317 represents the cDNA sequence for clone AA826313.

[7357] SEQ ID NO: 7318 represents the cDNA sequence for clone AA826314.

[7358] SEQ ID NO: 7319 represents the cDNA sequence for clone AA826316.

[7359] SEQ ID NO: 7320 represents the cDNA sequence for clone AA826320.

[7360] SEQ ID NO: 7321 represents the cDNA sequence for clone AA827949.

[7361] SEQ ID NO: 7322 represents the cDNA sequence for clone AA827951.

[7362] SEQ ID NO: 7323 represents the cDNA sequence for clone AA827953.

[7363] SEQ ID NO: 7324 represents the cDNA sequence for clone AA827960.

[7364] SEQ ID NO: 7325 represents the cDNA sequence for clone AA827961.

[7365] SEQ ID NO: 7326 represents the cDNA sequence for clone AA827962.

[7366] SEQ ID NO: 7327 represents the cDNA sequence for clone AA827964.

[7367] SEQ ID NO: 7328 represents the cDNA sequence for clone AA827966.

[7368] SEQ ID NO: 7329 represents the cDNA sequence for clone AA827967.

[7369] SEQ ID NO: 7330 represents the cDNA sequence for clone AA827970.

[7370] SEQ ID NO: 7331 represents the cDNA sequence for clone AA827971.

[7371] SEQ ID NO: 7332 represents the cDNA sequence for clone AA827972.

[7372] SEQ ID NO: 7333 represents the cDNA sequence for clone AA827974.

[7373] SEQ ID NO: 7334 represents the cDNA sequence for clone AA827976.

[7374] SEQ ID NO: 7335 represents the cDNA sequence for clone AA827977.

[7375] SEQ ID NO: 7336 represents the cDNA sequence for clone AA827978.

[7376] SEQ ID NO: 7337 represents the cDNA sequence for clone AA827979.

[7377] SEQ ID NO: 7338 represents the cDNA sequence for clone AA827981.

[7378] SEQ ID NO: 7339 represents the cDNA sequence for clone AA828036.

[7379] SEQ ID NO: 7340 represents the cDNA sequence for clone AA828038.

[7380] SEQ ID NO: 7341 represents the cDNA sequence for clone AA828039.

[7381] SEQ ID NO: 7342 represents the cDNA sequence for clone AA828040.

[7382] SEQ ID NO: 7343 represents the cDNA sequence for clone AA828042.

[7383] SEQ ID NO: 7344 represents the cDNA sequence for clone AA828044.

[7384] SEQ ID NO: 7345 represents the cDNA sequence for clone AA828046.

[7385] SEQ ID NO: 7346 represents the cDNA sequence for clone AA828048.

[7386] SEQ ID NO: 7347 represents the cDNA sequence for clone AA828049.

[7387] SEQ ID NO: 7348 represents the cDNA sequence for clone AA828050.

[7388] SEQ ID NO: 7349 represents the cDNA sequence for clone AA828053.

[7389] SEQ ID NO: 7350 represents the cDNA sequence for clone AA828054.

[7390] SEQ ID NO: 7351 represents the cDNA sequence for clone AA828056.

[7391] SEQ ID NO: 7352 represents the cDNA sequence for clone AA828058.

[7392] SEQ ID NO: 7353 represents the cDNA sequence for clone AA828060.

[7393] SEQ ID NO: 7354 represents the cDNA sequence for clone AA828061.

[7394] SEQ ID NO: 7355 represents the cDNA sequence for clone AA828063.

[7395] SEQ ID NO: 7356 represents the cDNA sequence for clone AA828123.

[7396] SEQ ID NO: 7357 represents the cDNA sequence for clone AA828125.

[7397] SEQ ID NO: 7358 represents the cDNA sequence for clone AA828126.

[7398] SEQ ID NO: 7359 represents the cDNA sequence for clone AA828127.

[7399] SEQ ID NO: 7360 represents the cDNA sequence for clone AA828130.

[7400] SEQ ID NO: 7361 represents the cDNA sequence for clone AA828131.

[7401] SEQ ID NO: 7362 represents the cDNA sequence for clone AA828137.

[7402] SEQ ID NO: 7363 represents the cDNA sequence for clone AA828138.

[7403] SEQ ID NO: 7364 represents the cDNA sequence for clone AA828140.

[7404] SEQ ID NO: 7365 represents the cDNA sequence for clone AA828141.

[7405] SEQ ID NO: 7366 represents the cDNA sequence for clone AA828145.

[7406] SEQ ID NO: 7367 represents the cDNA sequence for clone AA828148.

[7407] SEQ ID NO: 7368 represents the cDNA sequence for clone AA828152.

[7408] SEQ ID NO: 7369 represents the cDNA sequence for clone AA828153.

[7409] SEQ ID NO: 7370 represents the cDNA sequence for clone AA828557.

[7410] SEQ ID NO: 7371 represents the cDNA sequence for clone AA828559.

[7411] SEQ ID NO: 7372 represents the cDNA sequence for clone AA828560.

[7412] SEQ ID NO: 7373 represents the cDNA sequence for clone AA828563.

[7413] SEQ ID NO: 7374 represents the cDNA sequence for clone AA828566.

[7414] SEQ ID NO: 7375 represents the cDNA sequence for clone AA828567.

[7415] SEQ ID NO: 7376 represents the cDNA sequence for clone AA828571.

[7416] SEQ ID NO: 7377 represents the cDNA sequence for clone AA828573.

[7417] SEQ ID NO: 7378 represents the cDNA sequence for clone AA828575.

[7418] SEQ ID NO: 7379 represents the cDNA sequence for clone AA828576.

[7419] SEQ ID NO: 7380 represents the cDNA sequence for clone AA828593.

[7420] SEQ ID NO: 7381 represents the cDNA sequence for clone AA828596.

[7421] SEQ ID NO: 7382 represents the cDNA sequence for clone AA828597.

[7422] SEQ ID NO: 7383 represents the cDNA sequence for clone AA828598.

[7423] SEQ ID NO: 7384 represents the cDNA sequence for clone AA828603.

[7424] SEQ ID NO: 7385 represents the cDNA sequence for clone AA828604.

[7425] SEQ ID NO: 7386 represents the cDNA sequence for clone AA828607.

[7426] SEQ ID NO: 7387 represents the cDNA sequence for clone AA828609.

[7427] SEQ ID NO: 7388 represents the cDNA sequence for clone AA828611.

[7428] SEQ ID NO: 7389 represents the cDNA sequence for clone AA828612.

[7429] SEQ ID NO: 7390 represents the cDNA sequence for clone AA828613.

[7430] SEQ ID NO: 7391 represents the cDNA sequence for clone AA828614.

[7431] SEQ ID NO: 7392 represents the cDNA sequence for clone AA828616.

[7432] SEQ ID NO: 7393 represents the cDNA sequence for clone AA828617.

[7433] SEQ ID NO: 7394 represents the cDNA sequence for clone AA828618.

[7434] SEQ ID NO: 7395 represents the cDNA sequence for clone AA828627.

[7435] SEQ ID NO: 7396 represents the cDNA sequence for clone AA828628.

[7436] SEQ ID NO: 7397 represents the cDNA sequence for clone AA828629.

[7437] SEQ ID NO: 7398 represents the cDNA sequence for clone AA828630.

[7438] SEQ ID NO: 7399 represents the cDNA sequence for clone AA828636.

[7439] SEQ ID NO: 7400 represents the cDNA sequence for clone AA828640.

[7440] SEQ ID NO: 7401 represents the cDNA sequence for clone AA828643.

[7441] SEQ ID NO: 7402 represents the cDNA sequence for clone AA828646.

[7442] SEQ ID NO: 7403 represents the cDNA sequence for clone AA828647.

[7443] SEQ ID NO: 7404 represents the cDNA sequence for clone AA828648.

[7444] SEQ ID NO: 7405 represents the cDNA sequence for clone AA828650.

[7445] SEQ ID NO: 7406 represents the cDNA sequence for clone AA828651.

[7446] SEQ ID NO: 7407 represents the cDNA sequence for clone AA828653.

[7447] SEQ ID NO: 7408 represents the cDNA sequence for clone AA828655.

[7448] SEQ ID NO: 7409 represents the cDNA sequence for clone AA828656.

[7449] SEQ ID NO: 7410 represents the cDNA sequence for clone AA828657.

[7450] SEQ ID NO: 7411 represents the cDNA sequence for clone AA828658.

[7451] SEQ ID NO: 7412 represents the cDNA sequence for clone AA828663.

[7452] SEQ ID NO: 7413 represents the cDNA sequence for clone AA828664.

[7453] SEQ ID NO: 7414 represents the cDNA sequence for clone AA828665.

[7454] SEQ ID NO: 7415 represents the cDNA sequence for clone AA828666.

[7455] SEQ ID NO: 7416 represents the cDNA sequence for clone AA828668.

[7456] SEQ ID NO: 7417 represents the cDNA sequence for clone AA828669.

[7457] SEQ ID NO: 7418 represents the cDNA sequence for clone AA828670.

[7458] SEQ ID NO: 7419 represents the cDNA sequence for clone AA828672.

[7459] SEQ ID NO: 7420 represents the cDNA sequence for clone AA828674.

[7460] SEQ ID NO: 7421 represents the cDNA sequence for clone AA828677.

[7461] SEQ ID NO: 7422 represents the cDNA sequence for clone AA828684.

[7462] SEQ ID NO: 7423 represents the cDNA sequence for clone AA828685.

[7463] SEQ ID NO: 7424 represents the cDNA sequence for clone AA828688.

[7464] SEQ ID NO: 7425 represents the cDNA sequence for clone AA828689.

[7465] SEQ ID NO: 7426 represents the cDNA sequence for clone AA828690.

[7466] SEQ ID NO: 7427 represents the cDNA sequence for clone AA828695.

[7467] SEQ ID NO: 7428 represents the cDNA sequence for clone AA828696.

[7468] SEQ ID NO: 7429 represents the cDNA sequence for clone AA828697.

[7469] SEQ ID NO: 7430 represents the cDNA sequence for clone AA828698.

[7470] SEQ ID NO: 7431 represents the cDNA sequence for clone AA828699.

[7471] SEQ ID NO: 7432 represents the cDNA sequence for clone AA828700.

[7472] SEQ ID NO: 7433 represents the cDNA sequence for clone AA828701.

[7473] SEQ ID NO: 7434 represents the cDNA sequence for clone AA828702.

[7474] SEQ ID NO: 7435 represents the cDNA sequence for clone AA828703.

[7475] SEQ ID NO: 7436 represents the cDNA sequence for clone AA828704.

[7476] SEQ ID NO: 7437 represents the cDNA sequence for clone AA828710.

[7477] SEQ ID NO: 7438 represents the cDNA sequence for clone AA828711.

[7478] SEQ ID NO: 7439 represents the cDNA sequence for clone AA828712.

[7479] SEQ ID NO: 7440 represents the cDNA sequence for clone AA828713.

[7480] SEQ ID NO: 7441 represents the cDNA sequence for clone AA828714.

[7481] SEQ ID NO: 7442 represents the cDNA sequence for clone AA828717.

[7482] SEQ ID NO: 7443 represents the cDNA sequence for clone AA828723.

[7483] SEQ ID NO: 7444 represents the cDNA sequence for clone AA828724.

[7484] SEQ ID NO: 7445 represents the cDNA sequence for clone AA828726.

[7485] SEQ ID NO: 7446 represents the cDNA sequence for clone AA828727.

[7486] SEQ ID NO: 7447 represents the cDNA sequence for clone AA828728.

[7487] SEQ ID NO: 7448 represents the cDNA sequence for clone AA828729.

[7488] SEQ ID NO: 7449 represents the cDNA sequence for clone AA828732.

[7489] SEQ ID NO: 7450 represents the cDNA sequence for clone AA828733.

[7490] SEQ ID NO: 7451 represents the cDNA sequence for clone AA828734.

[7491] SEQ ID NO: 7452 represents the cDNA sequence for clone AA828735.

[7492] SEQ ID NO: 7453 represents the cDNA sequence for clone AA828738.

[7493] SEQ ID NO: 7454 represents the cDNA sequence for clone AA828740.

[7494] SEQ ID NO: 7455 represents the cDNA sequence for clone AA828745.

[7495] SEQ ID NO: 7456 represents the cDNA sequence for clone AA828750.

[7496] SEQ ID NO: 7457 represents the cDNA sequence for clone AA828754.

[7497] SEQ ID NO: 7458 represents the cDNA sequence for clone AA828760.

[7498] SEQ ID NO: 7459 represents the cDNA sequence for clone AA828762.

[7499] SEQ ID NO: 7460 represents the cDNA sequence for clone AA828763.

[7500] SEQ ID NO: 7461 represents the cDNA sequence for clone AA828765.

[7501] SEQ ID NO: 7462 represents the cDNA sequence for clone AA828766.

[7502] SEQ ID NO: 7463 represents the cDNA sequence for clone AA828774.

[7503] SEQ ID NO: 7464 represents the cDNA sequence for clone AA828775.

[7504] SEQ ID NO: 7465 represents the cDNA sequence for clone AA828776.

[7505] SEQ ID NO: 7466 represents the cDNA sequence for clone AA828777.

[7506] SEQ ID NO: 7467 represents the cDNA sequence for clone AA828778.

[7507] SEQ ID NO: 7468 represents the cDNA sequence for clone AA828779.

[7508] SEQ ID NO: 7469 represents the cDNA sequence for clone AA828780.

[7509] SEQ ID NO: 7470 represents the cDNA sequence for clone AA828783.

[7510] SEQ ID NO: 7471 represents the cDNA sequence for clone AA828784.

[7511] SEQ ID NO: 7472 represents the cDNA sequence for clone AA828785.

[7512] SEQ ID NO: 7473 represents the cDNA sequence for clone AA828787.

[7513] SEQ ID NO: 7474 represents the cDNA sequence for clone AA828788.

[7514] SEQ ID NO: 7475 represents the cDNA sequence for clone AA828791.

[7515] SEQ ID NO: 7476 represents the cDNA sequence for clone AA828792.

[7516] SEQ ID NO: 7477 represents the cDNA sequence for clone AA828793.

[7517] SEQ ID NO: 7478 represents the cDNA sequence for clone AA828794.

[7518] SEQ ID NO: 7479 represents the cDNA sequence for clone AA828795.

[7519] SEQ ID NO: 7480 represents the cDNA sequence for clone AA828796.

[7520] SEQ ID NO: 7481 represents the cDNA sequence for clone AA828800.

[7521] SEQ ID NO: 7482 represents the cDNA sequence for clone AA828801.

[7522] SEQ ID NO: 7483 represents the cDNA sequence for clone AA828805.

[7523] SEQ ID NO: 7484 represents the cDNA sequence for clone AA828807.

[7524] SEQ ID NO: 7485 represents the cDNA sequence for clone AA828808.

[7525] SEQ ID NO: 7486 represents the cDNA sequence for clone AA828809.

[7526] SEQ ID NO: 7487 represents the cDNA sequence for clone AA828810.

[7527] SEQ ID NO: 7488 represents the cDNA sequence for clone AA828811.

[7528] SEQ ID NO: 7489 represents the cDNA sequence for clone AA828812.

[7529] SEQ ID NO: 7490 represents the cDNA sequence for clone AA828816.

[7530] SEQ ID NO: 7491 represents the cDNA sequence for clone AA828817.

[7531] SEQ ID NO: 7492 represents the cDNA sequence for clone AA828818.

[7532] SEQ ID NO: 7493 represents the cDNA sequence for clone AA828822.

[7533] SEQ ID NO: 7494 represents the cDNA sequence for clone AA828823.

[7534] SEQ ID NO: 7495 represents the cDNA sequence for clone AA828825.

[7535] SEQ ID NO: 7496 represents the cDNA sequence for clone AA828826.

[7536] SEQ ID NO: 7497 represents the cDNA sequence for clone AA828827.

[7537] SEQ ID NO: 7498 represents the cDNA sequence for clone AA828828.

[7538] SEQ ID NO: 7499 represents the cDNA sequence for clone AA828830.

[7539] SEQ ID NO: 7500 represents the cDNA sequence for clone AA828831.

[7540] SEQ ID NO: 7501 represents the cDNA sequence for clone AA828832.

[7541] SEQ ID NO: 7502 represents the cDNA sequence for clone AA828833.

[7542] SEQ ID NO: 7503 represents the cDNA sequence for clone AA828834.

[7543] SEQ ID NO: 7504 represents the cDNA sequence for clone AA828835.

[7544] SEQ ID NO: 7505 represents the cDNA sequence for clone AA828836.

[7545] SEQ ID NO: 7506 represents the cDNA sequence for clone AA828837.

[7546] SEQ ID NO: 7507 represents the cDNA sequence for clone AA828838.

[7547] SEQ ID NO: 7508 represents the cDNA sequence for clone AA828839.

[7548] SEQ ID NO: 7509 represents the cDNA sequence for clone AA828840.

[7549] SEQ ID NO: 7510 represents the cDNA sequence for clone AA828841.

[7550] SEQ ID NO: 7511 represents the cDNA sequence for clone AA828843.

[7551] SEQ ID NO: 7512 represents the cDNA sequence for clone AA828845.

[7552] SEQ ID NO: 7513 represents the cDNA sequence for clone AA828850.

[7553] SEQ ID NO: 7514 represents the cDNA sequence for clone AA828852.

[7554] SEQ ID NO: 7515 represents the cDNA sequence for clone AA828853.

[7555] SEQ ID NO: 7516 represents the cDNA sequence for clone AA828854.

[7556] SEQ ID NO: 7517 represents the cDNA sequence for clone AA828860.

[7557] SEQ ID NO: 7518 represents the cDNA sequence for clone AA828865.

[7558] SEQ ID NO: 7519 represents the cDNA sequence for clone AA828866.

[7559] SEQ ID NO: 7520 represents the cDNA sequence for clone AA828868.

[7560] SEQ ID NO: 7521 represents the cDNA sequence for clone AA828870.

[7561] SEQ ID NO: 7522 represents the cDNA sequence for clone AA828875.

[7562] SEQ ID NO: 7523 represents the cDNA sequence for clone AA828876.

[7563] SEQ ID NO: 7524 represents the cDNA sequence for clone AA828878.

[7564] SEQ ID NO: 7525 represents the cDNA sequence for clone AA828880.

[7565] SEQ ID NO: 7526 represents the cDNA sequence for clone AA828881.

[7566] SEQ ID NO: 7527 represents the cDNA sequence for clone AA828882.

[7567] SEQ ID NO: 7528 represents the cDNA sequence for clone AA828886.

[7568] SEQ ID NO: 7529 represents the cDNA sequence for clone AA828891.

[7569] SEQ ID NO: 7530 represents the cDNA sequence for clone AA828892.

[7570] SEQ ID NO: 7531 represents the cDNA sequence for clone AA828894.

[7571] SEQ ID NO: 7532 represents the cDNA sequence for clone AA828895.

[7572] SEQ ID NO: 7533 represents the cDNA sequence for clone AA828897.

[7573] SEQ ID NO: 7534 represents the cDNA sequence for clone AA828899.

[7574] SEQ ID NO: 7535 represents the cDNA sequence for clone AA828903.

[7575] SEQ ID NO: 7536 represents the cDNA sequence for clone AA828904.

[7576] SEQ ID NO: 7537 represents the cDNA sequence for clone AA828909.

[7577] SEQ ID NO: 7538 represents the cDNA sequence for clone AA828911.

[7578] SEQ ID NO: 7539 represents the cDNA sequence for clone AA828912.

[7579] SEQ ID NO: 7540 represents the cDNA sequence for clone AA828913.

[7580] SEQ ID NO: 7541 represents the cDNA sequence for clone AA828917.

[7581] SEQ ID NO: 7542 represents the cDNA sequence for clone AA828922.

[7582] SEQ ID NO: 7543 represents the cDNA sequence for clone AA828924.

[7583] SEQ ID NO: 7544 represents the cDNA sequence for clone AA828925.

[7584] SEQ ID NO: 7545 represents the cDNA sequence for clone AA828926.

[7585] SEQ ID NO: 7546 represents the cDNA sequence for clone AA828928.

[7586] SEQ ID NO: 7547 represents the cDNA sequence for clone AA828931.

[7587] SEQ ID NO: 7548 represents the cDNA sequence for clone AA828932.

[7588] SEQ ID NO: 7549 represents the cDNA sequence for clone AA828936.

[7589] SEQ ID NO: 7550 represents the cDNA sequence for clone AA828937.

[7590] SEQ ID NO: 7551 represents the cDNA sequence for clone AA828938.

[7591] SEQ ID NO: 7552 represents the cDNA sequence for clone AA828939.

[7592] SEQ ID NO: 7553 represents the cDNA sequence for clone AA828940.

[7593] SEQ ID NO: 7554 represents the cDNA sequence for clone AA828945.

[7594] SEQ ID NO: 7555 represents the cDNA sequence for clone AA828946.

[7595] SEQ ID NO: 7556 represents the cDNA sequence for clone AA828947.

[7596] SEQ ID NO: 7557 represents the cDNA sequence for clone AA828953.

[7597] SEQ ID NO: 7558 represents the cDNA sequence for clone AA828955.

[7598] SEQ ID NO: 7559 represents the cDNA sequence for clone AA828956.

[7599] SEQ ID NO: 7560 represents the cDNA sequence for clone AA828957.

[7600] SEQ ID NO: 7561 represents the cDNA sequence for clone AA828959.

[7601] SEQ ID NO: 7562 represents the cDNA sequence for clone AA828960.

[7602] SEQ ID NO: 7563 represents the cDNA sequence for clone AA828962.

[7603] SEQ ID NO: 7564 represents the cDNA sequence for clone AA828964.

[7604] SEQ ID NO: 7565 represents the cDNA sequence for clone AA828965.

[7605] SEQ ID NO: 7566 represents the cDNA sequence for clone AA828966.

[7606] SEQ ID NO: 7567 represents the cDNA sequence for clone AA828967.

[7607] SEQ ID NO: 7568 represents the cDNA sequence for clone AA828968.

[7608] SEQ ID NO: 7569 represents the cDNA sequence for clone AA828970.

[7609] SEQ ID NO: 7570 represents the cDNA sequence for clone AA828973.

[7610] SEQ ID NO: 7571 represents the cDNA sequence for clone AA828974.

[7611] SEQ ID NO: 7572 represents the cDNA sequence for clone AA828976.

[7612] SEQ ID NO: 7573 represents the cDNA sequence for clone AA828977.

[7613] SEQ ID NO: 7574 represents the cDNA sequence for clone AA828980.

[7614] SEQ ID NO: 7575 represents the cDNA sequence for clone AA828982.

[7615] SEQ ID NO: 7576 represents the cDNA sequence for clone AA828988.

[7616] SEQ ID NO: 7577 represents the cDNA sequence for clone AA828989.

[7617] SEQ ID NO: 7578 represents the cDNA sequence for clone AA828991.

[7618] SEQ ID NO: 7579 represents the cDNA sequence for clone AA828992.

[7619] SEQ ID NO: 7580 represents the cDNA sequence for clone AA828995.

[7620] SEQ ID NO: 7581 represents the cDNA sequence for clone AA828998.

[7621] SEQ ID NO: 7582 represents the cDNA sequence for clone AA828999.

[7622] SEQ ID NO: 7583 represents the cDNA sequence for clone AA829000.

[7623] SEQ ID NO: 7584 represents the cDNA sequence for clone AA829001.

[7624] SEQ ID NO: 7585 represents the cDNA sequence for clone AA829002.

[7625] SEQ ID NO: 7586 represents the cDNA sequence for clone AA829004.

[7626] SEQ ID NO: 7587 represents the cDNA sequence for clone AA829006.

[7627] SEQ ID NO: 7588 represents the cDNA sequence for clone AA829007.

[7628] SEQ ID NO: 7589 represents the cDNA sequence for clone AA829008.

[7629] SEQ ID NO: 7590 represents the cDNA sequence for clone AA829010.

[7630] SEQ ID NO: 7591 represents the cDNA sequence for clone AA829018.

[7631] SEQ ID NO: 7592 represents the cDNA sequence for clone AA829023.

[7632] SEQ ID NO: 7593 represents the cDNA sequence for clone AA829024.

[7633] SEQ ID NO: 7594 represents the cDNA sequence for clone AA829027.

[7634] SEQ ID NO: 7595 represents the cDNA sequence for clone AA829029.

[7635] SEQ ID NO: 7596 represents the cDNA sequence for clone AA829034.

[7636] SEQ ID NO: 7597 represents the cDNA sequence for clone AA829038.

[7637] SEQ ID NO: 7598 represents the cDNA sequence for clone AA829041.

[7638] SEQ ID NO: 7599 represents the cDNA sequence for clone AA829042.

[7639] SEQ ID NO: 7600 represents the cDNA sequence for clone AA829043.

[7640] SEQ ID NO: 7601 represents the cDNA sequence for clone AA829045.

[7641] SEQ ID NO: 7602 represents the cDNA sequence for clone AA829047.

[7642] SEQ ID NO: 7603 represents the cDNA sequence for clone AA829049.

[7643] SEQ ID NO: 7604 represents the cDNA sequence for clone AA829050.

[7644] SEQ ID NO: 7605 represents the cDNA sequence for clone AA829054.

[7645] SEQ ID NO: 7606 represents the cDNA sequence for clone AA829055.

[7646] SEQ ID NO: 7607 represents the cDNA sequence for clone AA829056.

[7647] SEQ ID NO: 7608 represents the cDNA sequence for clone AA829063.

[7648] SEQ ID NO: 7609 represents the cDNA sequence for clone AA829065.

[7649] SEQ ID NO: 7610 represents the cDNA sequence for clone AA829067.

[7650] SEQ ID NO: 7611 represents the cDNA sequence for clone AA829068.

[7651] SEQ ID NO: 7612 represents the cDNA sequence for clone AA829070.

[7652] SEQ ID NO: 7613 represents the cDNA sequence for clone AA829071.

[7653] SEQ ID NO: 7614 represents the cDNA sequence for clone AA829072.

[7654] SEQ ID NO: 7615 represents the cDNA sequence for clone AA829074.

[7655] SEQ ID NO: 7616 represents the cDNA sequence for clone AA829075.

[7656] SEQ ID NO: 7617 represents the cDNA sequence for clone AA829077.

[7657] SEQ ID NO: 7618 represents the cDNA sequence for clone AA829078.

[7658] SEQ ID NO: 7619 represents the cDNA sequence for clone AA829081.

[7659] SEQ ID NO: 7620 represents the cDNA sequence for clone AA829082.

[7660] SEQ ID NO: 7621 represents the cDNA sequence for clone AA829084.

[7661] SEQ ID NO: 7622 represents the cDNA sequence for clone AA829088.

[7662] SEQ ID NO: 7623 represents the cDNA sequence for clone AA829089.

[7663] SEQ ID NO: 7624 represents the cDNA sequence for clone AA829090.

[7664] SEQ ID NO: 7625 represents the cDNA sequence for clone AA829091.

[7665] SEQ ID NO: 7626 represents the cDNA sequence for clone AA829093.

[7666] SEQ ID NO: 7627 represents the cDNA sequence for clone AA829094.

[7667] SEQ ID NO: 7628 represents the cDNA sequence for clone AA829095.

[7668] SEQ ID NO: 7629 represents the cDNA sequence for clone AA829096.

[7669] SEQ ID NO: 7630 represents the cDNA sequence for clone AA829097.

[7670] SEQ ID NO: 7631 represents the cDNA sequence for clone AA829098.

[7671] SEQ ID NO: 7632 represents the cDNA sequence for clone AA829099.

[7672] SEQ ID NO: 7633 represents the cDNA sequence for clone AA829103.

[7673] SEQ ID NO: 7634 represents the cDNA sequence for clone AA829106.

[7674] SEQ ID NO: 7635 represents the cDNA sequence for clone AA829111.

[7675] SEQ ID NO: 7636 represents the cDNA sequence for clone AA829112.

[7676] SEQ ID NO: 7637 represents the cDNA sequence for clone AA829114.

[7677] SEQ ID NO: 7638 represents the cDNA sequence for clone AA829115.

[7678] SEQ ID NO: 7639 represents the cDNA sequence for clone AA829116.

[7679] SEQ ID NO: 7640 represents the cDNA sequence for clone AA829117.

[7680] SEQ ID NO: 7641 represents the cDNA sequence for clone AA829120.

[7681] SEQ ID NO: 7642 represents the cDNA sequence for clone AA829127.

[7682] SEQ ID NO: 7643 represents the cDNA sequence for clone AA829131.

[7683] SEQ ID NO: 7644 represents the cDNA sequence for clone AA829132.

[7684] SEQ ID NO: 7645 represents the cDNA sequence for clone AA829133.

[7685] SEQ ID NO: 7646 represents the cDNA sequence for clone AA829134.

[7686] SEQ ID NO: 7647 represents the cDNA sequence for clone AA829135.

[7687] SEQ ID NO: 7648 represents the cDNA sequence for clone AA829136.

[7688] SEQ ID NO: 7649 represents the cDNA sequence for clone AA829137.

[7689] SEQ ID NO: 7650 represents the cDNA sequence for clone AA829138.

[7690] SEQ ID NO: 7651 represents the cDNA sequence for clone AA829140.

[7691] SEQ ID NO: 7652 represents the cDNA sequence for clone AA829142.

[7692] SEQ ID NO: 7653 represents the cDNA sequence for clone AA829145.

[7693] SEQ ID NO: 7654 represents the cDNA sequence for clone AA829153.

[7694] SEQ ID NO: 7655 represents the cDNA sequence for clone AA829157.

[7695] SEQ ID NO: 7656 represents the cDNA sequence for clone AA829159.

[7696] SEQ ID NO: 7657 represents the cDNA sequence for clone AA829161.

[7697] SEQ ID NO: 7658 represents the cDNA sequence for clone AA829165.

[7698] SEQ ID NO: 7659 represents the cDNA sequence for clone AA829166.

[7699] SEQ ID NO: 7660 represents the cDNA sequence for clone AA829167.

[7700] SEQ ID NO: 7661 represents the cDNA sequence for clone AA829170.

[7701] SEQ ID NO: 7662 represents the cDNA sequence for clone AA829171.

[7702] SEQ ID NO: 7663 represents the cDNA sequence for clone AA829174.

[7703] SEQ ID NO: 7664 represents the cDNA sequence for clone AA829178.

[7704] SEQ ID NO: 7665 represents the cDNA sequence for clone AA829182.

[7705] SEQ ID NO: 7666 represents the cDNA sequence for clone AA829183.

[7706] SEQ ID NO: 7667 represents the cDNA sequence for clone AA829185.

[7707] SEQ ID NO: 7668 represents the cDNA sequence for clone AA829186.

[7708] SEQ ID NO: 7669 represents the cDNA sequence for clone AA829190.

[7709] SEQ ID NO: 7670 represents the cDNA sequence for clone AA829192.

[7710] SEQ ID NO: 7671 represents the cDNA sequence for clone AA829194.

[7711] SEQ ID NO: 7672 represents the cDNA sequence for clone AA829196.

[7712] SEQ ID NO: 7673 represents the cDNA sequence for clone AA829197.

[7713] SEQ ID NO: 7674 represents the cDNA sequence for clone AA829200.

[7714] SEQ ID NO: 7675 represents the cDNA sequence for clone AA829202.

[7715] SEQ ID NO: 7676 represents the cDNA sequence for clone AA829203.

[7716] SEQ ID NO: 7677 represents the cDNA sequence for clone AA829206.

[7717] SEQ ID NO: 7678 represents the cDNA sequence for clone AA829209.

[7718] SEQ ID NO: 7679 represents the cDNA sequence for clone AA829211.

[7719] SEQ ID NO: 7680 represents the cDNA sequence for clone AA829213.

[7720] SEQ ID NO: 7681 represents the cDNA sequence for clone AA829219.

[7721] SEQ ID NO: 7682 represents the cDNA sequence for clone AA829222.

[7722] SEQ ID NO: 7683 represents the cDNA sequence for clone AA829224.

[7723] SEQ ID NO: 7684 represents the cDNA sequence for clone AA829557.

[7724] SEQ ID NO: 7685 represents the cDNA sequence for clone AA829559.

[7725] SEQ ID NO: 7686 represents the cDNA sequence for clone AA829560.

[7726] SEQ ID NO: 7687 represents the cDNA sequence for clone AA829561.

[7727] SEQ ID NO: 7688 represents the cDNA sequence for clone AA829563.

[7728] SEQ ID NO: 7689 represents the cDNA sequence for clone AA829567.

[7729] SEQ ID NO: 7690 represents the cDNA sequence for clone AA829568.

[7730] SEQ ID NO: 7691 represents the cDNA sequence for clone AA829572.

[7731] SEQ ID NO: 7692 represents the cDNA sequence for clone AA829577.

[7732] SEQ ID NO: 7693 represents the cDNA sequence for clone AA829579.

[7733] SEQ ID NO: 7694 represents the cDNA sequence for clone AA829582.

[7734] SEQ ID NO: 7695 represents the cDNA sequence for clone AA829584.

[7735] SEQ ID NO: 7696 represents the cDNA sequence for clone AA829590.

[7736] SEQ ID NO: 7697 represents the cDNA sequence for clone AA829593.

[7737] SEQ ID NO: 7698 represents the cDNA sequence for clone AA829594.

[7738] SEQ ID NO: 7699 represents the cDNA sequence for clone AA829664.

[7739] SEQ ID NO: 7700 represents the cDNA sequence for clone AA829666.

[7740] SEQ ID NO: 7701 represents the cDNA sequence for clone AA829668.

[7741] SEQ ID NO: 7702 represents the cDNA sequence for clone AA829671.

[7742] SEQ ID NO: 7703 represents the cDNA sequence for clone AA829672.

[7743] SEQ ID NO: 7704 represents the cDNA sequence for clone AA829675.

[7744] SEQ ID NO: 7705 represents the cDNA sequence for clone AA829684.

[7745] SEQ ID NO: 7706 represents the cDNA sequence for clone AA829685.

[7746] SEQ ID NO: 7707 represents the cDNA sequence for clone AA829690.

[7747] SEQ ID NO: 7708 represents the cDNA sequence for clone AA829691.

[7748] SEQ ID NO: 7709 represents the cDNA sequence for clone AA829692.

[7749] SEQ ID NO: 7710 represents the cDNA sequence for clone AA829694.

[7750] SEQ ID NO: 7711 represents the cDNA sequence for clone AA829696.

[7751] SEQ ID NO: 7712 represents the cDNA sequence for clone AA829697.

[7752] SEQ ID NO: 7713 represents the cDNA sequence for clone AA834620.

[7753] SEQ ID NO: 7714 represents the cDNA sequence for clone AA834622.

[7754] SEQ ID NO: 7715 represents the cDNA sequence for clone AA834624.

[7755] SEQ ID NO: 7716 represents the cDNA sequence for clone AA834625.

[7756] SEQ ID NO: 7717 represents the cDNA sequence for clone AA834626.

[7757] SEQ ID NO: 7718 represents the cDNA sequence for clone AA834629.

[7758] SEQ ID NO: 7719 represents the cDNA sequence for clone AA834633.

[7759] SEQ ID NO: 7720 represents the cDNA sequence for clone AA834639.

[7760] SEQ ID NO: 7721 represents the cDNA sequence for clone AA834647.

[7761] SEQ ID NO: 7722 represents the cDNA sequence for clone AA834652.

[7762] SEQ ID NO: 7723 represents the cDNA sequence for clone AA834653.

[7763] SEQ ID NO: 7724 represents the cDNA sequence for clone AA834656.

[7764] SEQ ID NO: 7725 represents the cDNA sequence for clone AA834659.

[7765] SEQ ID NO: 7726 represents the cDNA sequence for clone AA834660.

[7766] SEQ ID NO: 7727 represents the cDNA sequence for clone AA834661.

[7767] SEQ ID NO: 7728 represents the cDNA sequence for clone AA834662.

[7768] SEQ ID NO: 7729 represents the cDNA sequence for clone AA834663.

[7769] SEQ ID NO: 7730 represents the cDNA sequence for clone AA834665.

[7770] SEQ ID NO: 7731 represents the cDNA sequence for clone AA834667.

[7771] SEQ ID NO: 7732 represents the cDNA sequence for clone AA834669.

[7772] SEQ ID NO: 7733 represents the cDNA sequence for clone AA834671.

[7773] SEQ ID NO: 7734 represents the cDNA sequence for clone AA834672.

[7774] SEQ ID NO: 7735 represents the cDNA sequence for clone AA834678.

[7775] SEQ ID NO: 7736 represents the cDNA sequence for clone AA834679.

[7776] SEQ ID NO: 7737 represents the cDNA sequence for clone AA834681.

[7777] SEQ ID NO: 7738 represents the cDNA sequence for clone AA834683.

[7778] SEQ ID NO: 7739 represents the cDNA sequence for clone AA834684.

[7779] SEQ ID NO: 7740 represents the cDNA sequence for clone AA834686.

[7780] SEQ ID NO: 7741 represents the cDNA sequence for clone AA834687.

[7781] SEQ ID NO: 7742 represents the cDNA sequence for clone AA834692.

[7782] SEQ ID NO: 7743 represents the cDNA sequence for clone AA834697.

[7783] SEQ ID NO: 7744 represents the cDNA sequence for clone AA834699.

[7784] SEQ ID NO: 7745 represents the cDNA sequence for clone AA834702.

[7785] SEQ ID NO: 7746 represents the cDNA sequence for clone AA834704.

[7786] SEQ ID NO: 7747 represents the cDNA sequence for clone AA834705.

[7787] SEQ ID NO: 7748 represents the cDNA sequence for clone AA834709.

[7788] SEQ ID NO: 7749 represents the cDNA sequence for clone AA834710.

[7789] SEQ ID NO: 7750 represents the cDNA sequence for clone AA834711.

[7790] SEQ ID NO: 7751 represents the cDNA sequence for clone AA834712.

[7791] SEQ ID NO: 7752 represents the cDNA sequence for clone AA834717.

[7792] SEQ ID NO: 7753 represents the cDNA sequence for clone AA834718.

[7793] SEQ ID NO: 7754 represents the cDNA sequence for clone AA834721.

[7794] SEQ ID NO: 7755 represents the cDNA sequence for clone AA834723.

[7795] SEQ ID NO: 7756 represents the cDNA sequence for clone AA834724.

[7796] SEQ ID NO: 7757 represents the cDNA sequence for clone AA834728.

[7797] SEQ ID NO: 7758 represents the cDNA sequence for clone AA834729.

[7798] SEQ ID NO: 7759 represents the cDNA sequence for clone AA834730.

[7799] SEQ ID NO: 7760 represents the cDNA sequence for clone AA834731.

[7800] SEQ ID NO: 7761 represents the cDNA sequence for clone AA834732.

[7801] SEQ ID NO: 7762 represents the cDNA sequence for clone AA834734.

[7802] SEQ ID NO: 7763 represents the cDNA sequence for clone AA834739.

[7803] SEQ ID NO: 7764 represents the cDNA sequence for clone AA834740.

[7804] SEQ ID NO: 7765 represents the cDNA sequence for clone AA834741.

[7805] SEQ ID NO: 7766 represents the cDNA sequence for clone AA834742.

[7806] SEQ ID NO: 7767 represents the cDNA sequence for clone AA834743.

[7807] SEQ ID NO: 7768 represents the cDNA sequence for clone AA834744.

[7808] SEQ ID NO: 7769 represents the cDNA sequence for clone AA834746.

[7809] SEQ ID NO: 7770 represents the cDNA sequence for clone AA834747.

[7810] SEQ ID NO: 7771 represents the cDNA sequence for clone AA834748.

[7811] SEQ ID NO: 7772 represents the cDNA sequence for clone AA834750.

[7812] SEQ ID NO: 7773 represents the cDNA sequence for clone AA834752.

[7813] SEQ ID NO: 7774 represents the cDNA sequence for clone AA834757.

[7814] SEQ ID NO: 7775 represents the cDNA sequence for clone AA834758.

[7815] SEQ ID NO: 7776 represents the cDNA sequence for clone AA834759.

[7816] SEQ ID NO: 7777 represents the cDNA sequence for clone AA834761.

[7817] SEQ ID NO: 7778 represents the cDNA sequence for clone AA834762.

[7818] SEQ ID NO: 7779 represents the cDNA sequence for clone AA834763.

[7819] SEQ ID NO: 7780 represents the cDNA sequence for clone AA834764.

[7820] SEQ ID NO: 7781 represents the cDNA sequence for clone AA834765.

[7821] SEQ ID NO: 7782 represents the cDNA sequence for clone AA834769.

[7822] SEQ ID NO: 7783 represents the cDNA sequence for clone AA834770.

[7823] SEQ ID NO: 7784 represents the cDNA sequence for clone AA834775.

[7824] SEQ ID NO: 7785 represents the cDNA sequence for clone AA834778.

[7825] SEQ ID NO: 7786 represents the cDNA sequence for clone AA834780.

[7826] SEQ ID NO: 7787 represents the cDNA sequence for clone AA834781.

[7827] SEQ ID NO: 7788 represents the cDNA sequence for clone AA834782.

[7828] SEQ ID NO: 7789 represents the cDNA sequence for clone AA834785.

[7829] SEQ ID NO: 7790 represents the cDNA sequence for clone AA834786.

[7830] SEQ ID NO: 7791 represents the cDNA sequence for clone AA834787.

[7831] SEQ ID NO: 7792 represents the cDNA sequence for clone AA834789.

[7832] SEQ ID NO: 7793 represents the cDNA sequence for clone AA834793.

[7833] SEQ ID NO: 7794 represents the cDNA sequence for clone AA834795.

[7834] SEQ ID NO: 7795 represents the cDNA sequence for clone AA834796.

[7835] SEQ ID NO: 7796 represents the cDNA sequence for clone AA834797.

[7836] SEQ ID NO: 7797 represents the cDNA sequence for clone AA834800.

[7837] SEQ ID NO: 7798 represents the cDNA sequence for clone AA834802.

[7838] SEQ ID NO: 7799 represents the cDNA sequence for clone AA834803.

[7839] SEQ ID NO: 7800 represents the cDNA sequence for clone AA834805.

[7840] SEQ ID NO: 7801 represents the cDNA sequence for clone AA834806.

[7841] SEQ ID NO: 7802 represents the cDNA sequence for clone AA834809.

[7842] SEQ ID NO: 7803 represents the cDNA sequence for clone AA834810.

[7843] SEQ ID NO: 7804 represents the cDNA sequence for clone AA834812.

[7844] SEQ ID NO: 7805 represents the cDNA sequence for clone AA834813.

[7845] SEQ ID NO: 7806 represents the cDNA sequence for clone AA834814.

[7846] SEQ ID NO: 7807 represents the cDNA sequence for clone AA834815.

[7847] SEQ ID NO: 7808 represents the cDNA sequence for clone AA834817.

[7848] SEQ ID NO: 7809 represents the cDNA sequence for clone AA834820.

[7849] SEQ ID NO: 7810 represents the cDNA sequence for clone AA834823.

[7850] SEQ ID NO: 7811 represents the cDNA sequence for clone AA834825.

[7851] SEQ ID NO: 7812 represents the cDNA sequence for clone AA834829.

[7852] SEQ ID NO: 7813 represents the cDNA sequence for clone AA834832.

[7853] SEQ ID NO: 7814 represents the cDNA sequence for clone AA834833.

[7854] SEQ ID NO: 7815 represents the cDNA sequence for clone AA834834.

[7855] SEQ ID NO: 7816 represents the cDNA sequence for clone AA834838.

[7856] SEQ ID NO: 7817 represents the cDNA sequence for clone AA834841.

[7857] SEQ ID NO: 7818 represents the cDNA sequence for clone AA834842.

[7858] SEQ ID NO: 7819 represents the cDNA sequence for clone AA834844.

[7859] SEQ ID NO: 7820 represents the cDNA sequence for clone AA834851.

[7860] SEQ ID NO: 7821 represents the cDNA sequence for clone AA834854.

[7861] SEQ ID NO: 7822 represents the cDNA sequence for clone AA834856.

[7862] SEQ ID NO: 7823 represents the cDNA sequence for clone AA834857.

[7863] SEQ ID NO: 7824 represents the cDNA sequence for clone AA834858.

[7864] SEQ ID NO: 7825 represents the cDNA sequence for clone AA834859.

[7865] SEQ ID NO: 7826 represents the cDNA sequence for clone AA834860.

[7866] SEQ ID NO: 7827 represents the cDNA sequence for clone AA834861.

[7867] SEQ ID NO: 7828 represents the cDNA sequence for clone AA834862.

[7868] SEQ ID NO: 7829 represents the cDNA sequence for clone AA834869.

[7869] SEQ ID NO: 7830 represents the cDNA sequence for clone AA834870.

[7870] SEQ ID NO: 7831 represents the cDNA sequence for clone AA834874.

[7871] SEQ ID NO: 7832 represents the cDNA sequence for clone AA834876.

[7872] SEQ ID NO: 7833 represents the cDNA sequence for clone AA834878.

[7873] SEQ ID NO: 7834 represents the cDNA sequence for clone AA834879.

[7874] SEQ ID NO: 7835 represents the cDNA sequence for clone AA834880.

[7875] SEQ ID NO: 7836 represents the cDNA sequence for clone AA834883.

[7876] SEQ ID NO: 7837 represents the cDNA sequence for clone AA834887.

[7877] SEQ ID NO: 7838 represents the cDNA sequence for clone AA834889.

[7878] SEQ ID NO: 7839 represents the cDNA sequence for clone AA834892.

[7879] SEQ ID NO: 7840 represents the cDNA sequence for clone AA834893.

[7880] SEQ ID NO: 7841 represents the cDNA sequence for clone AA834895.

[7881] SEQ ID NO: 7842 represents the cDNA sequence for clone AA834896.

[7882] SEQ ID NO: 7843 represents the cDNA sequence for clone AA834898.

[7883] SEQ ID NO: 7844 represents the cDNA sequence for clone AA834901.

[7884] SEQ ID NO: 7845 represents the cDNA sequence for clone AA837215.

[7885] SEQ ID NO: 7846 represents the cDNA sequence for clone AA837221.

[7886] SEQ ID NO: 7847 represents the cDNA sequence for clone AA837224.

[7887] SEQ ID NO: 7848 represents the cDNA sequence for clone AA837225.

[7888] SEQ ID NO: 7849 represents the cDNA sequence for clone AA837226.

[7889] SEQ ID NO: 7850 represents the cDNA sequence for clone AA837227.

[7890] SEQ ID NO: 7851 represents the cDNA sequence for clone AA837228.

[7891] SEQ ID NO: 7852 represents the cDNA sequence for clone AA837229.

[7892] SEQ ID NO: 7853 represents the cDNA sequence for clone AA837232.

[7893] SEQ ID NO: 7854 represents the cDNA sequence for clone AA837233.

[7894] SEQ ID NO: 7855 represents the cDNA sequence for clone AA837234.

[7895] SEQ ID NO: 7856 represents the cDNA sequence for clone AA837238.

[7896] SEQ ID NO: 7857 represents the cDNA sequence for clone AA837239.

[7897] SEQ ID NO: 7858 represents the cDNA sequence for clone AA837242.

[7898] SEQ ID NO: 7859 represents the cDNA sequence for clone AA837243.

[7899] SEQ ID NO: 7860 represents the cDNA sequence for clone AA837245.

[7900] SEQ ID NO: 7861 represents the cDNA sequence for clone AA837328.

[7901] SEQ ID NO: 7862 represents the cDNA sequence for clone AA837331.

[7902] SEQ ID NO: 7863 represents the cDNA sequence for clone AA837332.

[7903] SEQ ID NO: 7864 represents the cDNA sequence for clone AA837336.

[7904] SEQ ID NO: 7865 represents the cDNA sequence for clone AA837339.

[7905] SEQ ID NO: 7866 represents the cDNA sequence for clone AA837341.

[7906] SEQ ID NO: 7867 represents the cDNA sequence for clone AA837346.

[7907] SEQ ID NO: 7868 represents the cDNA sequence for clone AA837349.

[7908] SEQ ID NO: 7869 represents the cDNA sequence for clone AA837354.

[7909] SEQ ID NO: 7870 represents the cDNA sequence for clone AA837357.

[7910] SEQ ID NO: 7871 represents the cDNA sequence for clone AA837358.

[7911] SEQ ID NO: 7872 represents the cDNA sequence for clone AA837583.

[7912] SEQ ID NO: 7873 represents the cDNA sequence for clone AA837584.

[7913] SEQ ID NO: 7874 represents the cDNA sequence for clone AA837588.

[7914] SEQ ID NO: 7875 represents the cDNA sequence for clone AA837592.

[7915] SEQ ID NO: 7876 represents the cDNA sequence for clone AA837594.

[7916] SEQ ID NO: 7877 represents the cDNA sequence for clone AA837596.

[7917] SEQ ID NO: 7878 represents the cDNA sequence for clone AA837597.

[7918] SEQ ID NO: 7879 represents the cDNA sequence for clone AA837599.

[7919] SEQ ID NO: 7880 represents the cDNA sequence for clone AA837600.

[7920] SEQ ID NO: 7881 represents the cDNA sequence for clone AA837606.

[7921] SEQ ID NO: 7882 represents the cDNA sequence for clone AA837608.

[7922] SEQ ID NO: 7883 represents the cDNA sequence for clone AA837610.

[7923] SEQ ID NO: 7884 represents the cDNA sequence for clone AA837612.

[7924] SEQ ID NO: 7885 represents the cDNA sequence for clone AA837613.

[7925] SEQ ID NO: 7886 represents the cDNA sequence for clone AA837615.

[7926] SEQ ID NO: 7887 represents the cDNA sequence for clone AA837616.

[7927] SEQ ID NO: 7888 represents the cDNA sequence for clone AA837618.

[7928] SEQ ID NO: 7889 represents the cDNA sequence for clone AA837621.

[7929] SEQ ID NO: 7890 represents the cDNA sequence for clone AA837622.

[7930] SEQ ID NO: 7891 represents the cDNA sequence for clone AA837623.

[7931] SEQ ID NO: 7892 represents the cDNA sequence for clone AA837624.

[7932] SEQ ID NO: 7893 represents the cDNA sequence for clone AA837625.

[7933] SEQ ID NO: 7894 represents the cDNA sequence for clone AA837630.

[7934] SEQ ID NO: 7895 represents the cDNA sequence for clone AA837634.

[7935] SEQ ID NO: 7896 represents the cDNA sequence for clone AA837635.

[7936] SEQ ID NO: 7897 represents the cDNA sequence for clone AA837638.

[7937] SEQ ID NO: 7898 represents the cDNA sequence for clone AA837640.

[7938] SEQ ID NO: 7899 represents the cDNA sequence for clone AA837641.

[7939] SEQ ID NO: 7900 represents the cDNA sequence for clone AA837644.

[7940] SEQ ID NO: 7901 represents the cDNA sequence for clone AA837646.

[7941] SEQ ID NO: 7902 represents the cDNA sequence for clone AA837647.

[7942] SEQ ID NO: 7903 represents the cDNA sequence for clone AA837649.

[7943] SEQ ID NO: 7904 represents the cDNA sequence for clone AA837652.

[7944] SEQ ID NO: 7905 represents the cDNA sequence for clone AA837653.

[7945] SEQ ID NO: 7906 represents the cDNA sequence for clone AA837654.

[7946] SEQ ID NO: 7907 represents the cDNA sequence for clone AA837656.

[7947] SEQ ID NO: 7908 represents the cDNA sequence for clone AA837659.

[7948] SEQ ID NO: 7909 represents the cDNA sequence for clone AA837661.

[7949] SEQ ID NO: 7910 represents the cDNA sequence for clone AA837662.

[7950] SEQ ID NO: 7911 represents the cDNA sequence for clone AA837663.

[7951] SEQ ID NO: 7912 represents the cDNA sequence for clone AA837664.

[7952] SEQ ID NO: 7913 represents the cDNA sequence for clone AA837665.

[7953] SEQ ID NO: 7914 represents the cDNA sequence for clone AA837666.

[7954] SEQ ID NO: 7915 represents the cDNA sequence for clone AA837668.

[7955] SEQ ID NO: 7916 represents the cDNA sequence for clone AA837669.

[7956] SEQ ID NO: 7917 represents the cDNA sequence for clone AA837670.

[7957] SEQ ID NO: 7918 represents the cDNA sequence for clone AA837674.

[7958] SEQ ID NO: 7919 represents the cDNA sequence for clone AA837676.

[7959] SEQ ID NO: 7920 represents the cDNA sequence for clone AA837679.

[7960] SEQ ID NO: 7921 represents the cDNA sequence for clone AA837680.

[7961] SEQ ID NO: 7922 represents the cDNA sequence for clone AA837681.

[7962] SEQ ID NO: 7923 represents the cDNA sequence for clone AA837683.

[7963] SEQ ID NO: 7924 represents the cDNA sequence for clone AA837685.

[7964] SEQ ID NO: 7925 represents the cDNA sequence for clone AA837686.

[7965] SEQ ID NO: 7926 represents the cDNA sequence for clone AA837687.

[7966] SEQ ID NO: 7927 represents the cDNA sequence for clone AA837689.

[7967] SEQ ID NO: 7928 represents the cDNA sequence for clone AA837694.

[7968] SEQ ID NO: 7929 represents the cDNA sequence for clone AA837700.

[7969] SEQ ID NO: 7930 represents the cDNA sequence for clone AA837703.

[7970] SEQ ID NO: 7931 represents the cDNA sequence for clone AA837704.

[7971] SEQ ID NO: 7932 represents the cDNA sequence for clone AA837705.

[7972] SEQ ID NO: 7933 represents the cDNA sequence for clone AA837706.

[7973] SEQ ID NO: 7934 represents the cDNA sequence for clone AA837709.

[7974] SEQ ID NO: 7935 represents the cDNA sequence for clone AA837710.

[7975] SEQ ID NO: 7936 represents the cDNA sequence for clone AA837711.

[7976] SEQ ID NO: 7937 represents the cDNA sequence for clone AA837714.

[7977] SEQ ID NO: 7938 represents the cDNA sequence for clone AA837716.

[7978] SEQ ID NO: 7939 represents the cDNA sequence for clone AA837720.

[7979] SEQ ID NO: 7940 represents the cDNA sequence for clone AA837721.

[7980] SEQ ID NO: 7941 represents the cDNA sequence for clone AA837722.

[7981] SEQ ID NO: 7942 represents the cDNA sequence for clone AA837724.

[7982] SEQ ID NO: 7943 represents the cDNA sequence for clone AA837725.

[7983] SEQ ID NO: 7944 represents the cDNA sequence for clone AA837726.

[7984] SEQ ID NO: 7945 represents the cDNA sequence for clone AA837731.

[7985] SEQ ID NO: 7946 represents the cDNA sequence for clone AA837734.

[7986] SEQ ID NO: 7947 represents the cDNA sequence for clone AA837735.

[7987] SEQ ID NO: 7948 represents the cDNA sequence for clone AA837737.

[7988] SEQ ID NO: 7949 represents the cDNA sequence for clone AA837738.

[7989] SEQ ID NO: 7950 represents the cDNA sequence for clone AA837741.

[7990] SEQ ID NO: 7951 represents the cDNA sequence for clone AA837742.

[7991] SEQ ID NO: 7952 represents the cDNA sequence for clone AA837743.

[7992] SEQ ID NO: 7953 represents the cDNA sequence for clone AA837744.

[7993] SEQ ID NO: 7954 represents the cDNA sequence for clone AA837747.

[7994] SEQ ID NO: 7955 represents the cDNA sequence for clone AA837748.

[7995] SEQ ID NO: 7956 represents the cDNA sequence for clone AA837750.

[7996] SEQ ID NO: 7957 represents the cDNA sequence for clone AA837754.

[7997] SEQ ID NO: 7958 represents the cDNA sequence for clone AA837755.

[7998] SEQ ID NO: 7959 represents the cDNA sequence for clone AA837759.

[7999] SEQ ID NO: 7960 represents the cDNA sequence for clone AA837760.

[8000] SEQ ID NO: 7961 represents the cDNA sequence for clone AA837762.

[8001] SEQ ID NO: 7962 represents the cDNA sequence for clone AA837765.

[8002] SEQ ID NO: 7963 represents the cDNA sequence for clone AA837766.

[8003] SEQ ID NO: 7964 represents the cDNA sequence for clone AA837770.

[8004] SEQ ID NO: 7965 represents the cDNA sequence for clone AA837771.

[8005] SEQ ID NO: 7966 represents the cDNA sequence for clone AA837772.

[8006] SEQ ID NO: 7967 represents the cDNA sequence for clone AA837774.

[8007] SEQ ID NO: 7968 represents the cDNA sequence for clone AA837775.

[8008] SEQ ID NO: 7969 represents the cDNA sequence for clone AA837777.

[8009] SEQ ID NO: 7970 represents the cDNA sequence for clone AA837779.

[8010] SEQ ID NO: 7971 represents the cDNA sequence for clone AA837782.

[8011] SEQ ID NO: 7972 represents the cDNA sequence for clone AA837783.

[8012] SEQ ID NO: 7973 represents the cDNA sequence for clone AA837784.

[8013] SEQ ID NO: 7974 represents the cDNA sequence for clone AA837785.

[8014] SEQ ID NO: 7975 represents the cDNA sequence for clone AA837790.

[8015] SEQ ID NO: 7976 represents the cDNA sequence for clone AA837794.

[8016] SEQ ID NO: 7977 represents the cDNA sequence for clone AA837795.

[8017] SEQ ID NO: 7978 represents the cDNA sequence for clone AA837797.

[8018] SEQ ID NO: 7979 represents the cDNA sequence for clone AA837798.

[8019] SEQ ID NO: 7980 represents the cDNA sequence for clone AA837799.

[8020] SEQ ID NO: 7981 represents the cDNA sequence for clone AA837800.

[8021] SEQ ID NO: 7982 represents the cDNA sequence for clone AA837802.

[8022] SEQ ID NO: 7983 represents the cDNA sequence for clone AA838083.

[8023] SEQ ID NO: 7984 represents the cDNA sequence for clone AA838090.

[8024] SEQ ID NO: 7985 represents the cDNA sequence for clone AA838092.

[8025] SEQ ID NO: 7986 represents the cDNA sequence for clone AA838093.

[8026] SEQ ID NO: 7987 represents the cDNA sequence for clone AA838095.

[8027] SEQ ID NO: 7988 represents the cDNA sequence for clone AA838096.

[8028] SEQ ID NO: 7989 represents the cDNA sequence for clone AA838097.

[8029] SEQ ID NO: 7990 represents the cDNA sequence for clone AA838098.

[8030] SEQ ID NO: 7991 represents the cDNA sequence for clone AA838099.

[8031] SEQ ID NO: 7992 represents the cDNA sequence for clone AA838101.

[8032] SEQ ID NO: 7993 represents the cDNA sequence for clone AA838102.

[8033] SEQ ID NO: 7994 represents the cDNA sequence for clone AA838103.

[8034] SEQ ID NO: 7995 represents the cDNA sequence for clone AA838104.

[8035] SEQ ID NO: 7996 represents the cDNA sequence for clone AA838106.

[8036] SEQ ID NO: 7997 represents the cDNA sequence for clone AA838107.

[8037] SEQ ID NO: 7998 represents the cDNA sequence for clone AA838108.

[8038] SEQ ID NO: 7999 represents the cDNA sequence for clone AA838110.

[8039] SEQ ID NO: 8000 represents the cDNA sequence for clone AA838113.

[8040] SEQ ID NO: 8001 represents the cDNA sequence for clone AA838114.

[8041] SEQ ID NO: 8002 represents the cDNA sequence for clone AA838116.

[8042] SEQ ID NO: 8003 represents the cDNA sequence for clone AA838119.

[8043] SEQ ID NO: 8004 represents the cDNA sequence for clone AA838120.

[8044] SEQ ID NO: 8005 represents the cDNA sequence for clone AA838122.

[8045] SEQ ID NO: 8006 represents the cDNA sequence for clone AA838124.

[8046] SEQ ID NO: 8007 represents the cDNA sequence for clone AA838125.

[8047] SEQ ID NO: 8008 represents the cDNA sequence for clone AA838128.

[8048] SEQ ID NO: 8009 represents the cDNA sequence for clone AA838136.

[8049] SEQ ID NO: 8010 represents the cDNA sequence for clone AA838138.

[8050] SEQ ID NO: 8011 represents the cDNA sequence for clone AA838139.

[8051] SEQ ID NO: 8012 represents the cDNA sequence for clone AA838141.

[8052] SEQ ID NO: 8013 represents the cDNA sequence for clone AA838143.

[8053] SEQ ID NO: 8014 represents the cDNA sequence for clone AA838145.

[8054] SEQ ID NO: 8015 represents the cDNA sequence for clone AA838146.

[8055] SEQ ID NO: 8016 represents the cDNA sequence for clone AA838149.

[8056] SEQ ID NO: 8017 represents the cDNA sequence for clone AA838151.

[8057] SEQ ID NO: 8018 represents the cDNA sequence for clone AA838156.

[8058] SEQ ID NO: 8019 represents the cDNA sequence for clone AA838160.

[8059] SEQ ID NO: 8020 represents the cDNA sequence for clone AA838162.

[8060] SEQ ID NO: 8021 represents the cDNA sequence for clone AA838166.

[8061] SEQ ID NO: 8022 represents the cDNA sequence for clone AA838167.

[8062] SEQ ID NO: 8023 represents the cDNA sequence for clone AA838169.

[8063] SEQ ID NO: 8024 represents the cDNA sequence for clone AA838172.

[8064] SEQ ID NO: 8025 represents the cDNA sequence for clone AA838175.

[8065] SEQ ID NO: 8026 represents the cDNA sequence for clone AA838176.

[8066] SEQ ID NO: 8027 represents the cDNA sequence for clone AA838177.

[8067] SEQ ID NO: 8028 represents the cDNA sequence for clone AA838184.

[8068] SEQ ID NO: 8029 represents the cDNA sequence for clone AA838186.

[8069] SEQ ID NO: 8030 represents the cDNA sequence for clone AA838187.

[8070] SEQ ID NO: 8031 represents the cDNA sequence for clone AA838188.

[8071] SEQ ID NO: 8032 represents the cDNA sequence for clone AA838192.

[8072] SEQ ID NO: 8033 represents the cDNA sequence for clone AA838194.

[8073] SEQ ID NO: 8034 represents the cDNA sequence for clone AA838200.

[8074] SEQ ID NO: 8035 represents the cDNA sequence for clone AA838201.

[8075] SEQ ID NO: 8036 represents the cDNA sequence for clone AA838202.

[8076] SEQ ID NO: 8037 represents the cDNA sequence for clone AA838203.

[8077] SEQ ID NO: 8038 represents the cDNA sequence for clone AA838204.

[8078] SEQ ID NO: 8039 represents the cDNA sequence for clone AA838205.

[8079] SEQ ID NO: 8040 represents the cDNA sequence for clone AA838206.

[8080] SEQ ID NO: 8041 represents the cDNA sequence for clone AA838207.

[8081] SEQ ID NO: 8042 represents the cDNA sequence for clone AA838208.

[8082] SEQ ID NO: 8043 represents the cDNA sequence for clone AA846893.

[8083] SEQ ID NO: 8044 represents the cDNA sequence for clone AA846894.

[8084] SEQ ID NO: 8045 represents the cDNA sequence for clone AA846895.

[8085] SEQ ID NO: 8046 represents the cDNA sequence for clone AA846900.

[8086] SEQ ID NO: 8047 represents the cDNA sequence for clone AA846901.

[8087] SEQ ID NO: 8048 represents the cDNA sequence for clone AA846903.

[8088] SEQ ID NO: 8049 represents the cDNA sequence for clone AA846905.

[8089] SEQ ID NO: 8050 represents the cDNA sequence for clone AA846914.

[8090] SEQ ID NO: 8051 represents the cDNA sequence for clone AA846917.

[8091] SEQ ID NO: 8052 represents the cDNA sequence for clone AA846918.

[8092] SEQ ID NO: 8053 represents the cDNA sequence for clone AA846919.

[8093] SEQ ID NO: 8054 represents the cDNA sequence for clone AA846921.

[8094] SEQ ID NO: 8055 represents the cDNA sequence for clone AA846922.

[8095] SEQ ID NO: 8056 represents the cDNA sequence for clone AA846925.

[8096] SEQ ID NO: 8057 represents the cDNA sequence for clone AA846926.

[8097] SEQ ID NO: 8058 represents the cDNA sequence for clone AA846927.

[8098] SEQ ID NO: 8059 represents the cDNA sequence for clone AA846932.

[8099] SEQ ID NO: 8060 represents the cDNA sequence for clone AA846934.

[8100] SEQ ID NO: 8061 represents the cDNA sequence for clone AA846938.

[8101] SEQ ID NO: 8062 represents the cDNA sequence for clone AA846942.

[8102] SEQ ID NO: 8063 represents the cDNA sequence for clone AA846944.

[8103] SEQ ID NO: 8064 represents the cDNA sequence for clone AA846946.

[8104] SEQ ID NO: 8065 represents the cDNA sequence for clone AA846947.

[8105] SEQ ID NO: 8066 represents the cDNA sequence for clone AA846950.

[8106] SEQ ID NO: 8067 represents the cDNA sequence for clone AA846951.

[8107] SEQ ID NO: 8068 represents the cDNA sequence for clone AA846954.

[8108] SEQ ID NO: 8069 represents the cDNA sequence for clone AA846955.

[8109] SEQ ID NO: 8070 represents the cDNA sequence for clone AA846958.

[8110] SEQ ID NO: 8071 represents the cDNA sequence for clone AA846962.

[8111] SEQ ID NO: 8072 represents the cDNA sequence for clone AA846964.

[8112] SEQ ID NO: 8073 represents the cDNA sequence for clone AA846966.

[8113] SEQ ID NO: 8074 represents the cDNA sequence for clone AA846967.

[8114] SEQ ID NO: 8075 represents the cDNA sequence for clone AA846968.

[8115] SEQ ID NO: 8076 represents the cDNA sequence for clone AA846971.

[8116] SEQ ID NO: 8077 represents the cDNA sequence for clone AA846973.

[8117] SEQ ID NO: 8078 represents the cDNA sequence for clone AA846974.

[8118] SEQ ID NO: 8079 represents the cDNA sequence for clone AA846977.

[8119] SEQ ID NO: 8080 represents the cDNA sequence for clone AA846978.

[8120] SEQ ID NO: 8081 represents the cDNA sequence for clone AA846980.

[8121] SEQ ID NO: 8082 represents the cDNA sequence for clone AA846981.

[8122] SEQ ID NO: 8083 represents the cDNA sequence for clone AA846984.

[8123] SEQ ID NO: 8084 represents the cDNA sequence for clone AA846988.

[8124] SEQ ID NO: 8085 represents the cDNA sequence for clone AA846992.

[8125] SEQ ID NO: 8086 represents the cDNA sequence for clone AA846994.

[8126] SEQ ID NO: 8087 represents the cDNA sequence for clone AA846997.

[8127] SEQ ID NO: 8088 represents the cDNA sequence for clone AA847006.

[8128] SEQ ID NO: 8089 represents the cDNA sequence for clone AA847007.

[8129] SEQ ID NO: 8090 represents the cDNA sequence for clone AA847010.

[8130] SEQ ID NO: 8091 represents the cDNA sequence for clone AA847013.

[8131] SEQ ID NO: 8092 represents the cDNA sequence for clone AA847014.

[8132] SEQ ID NO: 8093 represents the cDNA sequence for clone AA847015.

[8133] SEQ ID NO: 8094 represents the cDNA sequence for clone AA847019.

[8134] SEQ ID NO: 8095 represents the cDNA sequence for clone AA847021.

[8135] SEQ ID NO: 8096 represents the cDNA sequence for clone AA847023.

[8136] SEQ ID NO: 8097 represents the cDNA sequence for clone AA847024.

[8137] SEQ ID NO: 8098 represents the cDNA sequence for clone AA847025.

[8138] SEQ ID NO: 8099 represents the cDNA sequence for clone AA847027.

[8139] SEQ ID NO: 8100 represents the cDNA sequence for clone AA847028.

[8140] SEQ ID NO: 8101 represents the cDNA sequence for clone AA847029.

[8141] SEQ ID NO: 8102 represents the cDNA sequence for clone AA847030.

[8142] SEQ ID NO: 8103 represents the cDNA sequence for clone AA847037.

[8143] SEQ ID NO: 8104 represents the cDNA sequence for clone AA847039.

[8144] SEQ ID NO: 8105 represents the cDNA sequence for clone AA847040.

[8145] SEQ ID NO: 8106 represents the cDNA sequence for clone AA847041.

[8146] SEQ ID NO: 8107 represents the cDNA sequence for clone AA847042.

[8147] SEQ ID NO: 8108 represents the cDNA sequence for clone AA847043.

[8148] SEQ ID NO: 8109 represents the cDNA sequence for clone AA847044.

[8149] SEQ ID NO: 8110 represents the cDNA sequence for clone AA847045.

[8150] SEQ ID NO: 8111 represents the cDNA sequence for clone AA847047.

[8151] SEQ ID NO: 8112 represents the cDNA sequence for clone AA847050.

[8152] SEQ ID NO: 8113 represents the cDNA sequence for clone AA847051.

[8153] SEQ ID NO: 8114 represents the cDNA sequence for clone AA847053.

[8154] SEQ ID NO: 8115 represents the cDNA sequence for clone AA847054.

[8155] SEQ ID NO: 8116 represents the cDNA sequence for clone AA847055.

[8156] SEQ ID NO: 8117 represents the cDNA sequence for clone AA847058.

[8157] SEQ ID NO: 8118 represents the cDNA sequence for clone AA847060.

[8158] SEQ ID NO: 8119 represents the cDNA sequence for clone AA847061.

[8159] SEQ ID NO: 8120 represents the cDNA sequence for clone AA847062.

[8160] SEQ ID NO: 8121 represents the cDNA sequence for clone AA847064.

[8161] SEQ ID NO: 8122 represents the cDNA sequence for clone AA847067.

[8162] SEQ ID NO: 8123 represents the cDNA sequence for clone AA847068.

[8163] SEQ ID NO: 8124 represents the cDNA sequence for clone AA847070.

[8164] SEQ ID NO: 8125 represents the cDNA sequence for clone AA847071.

[8165] SEQ ID NO: 8126 represents the cDNA sequence for clone AA847073.

[8166] SEQ ID NO: 8127 represents the cDNA sequence for clone AA847075.

[8167] SEQ ID NO: 8128 represents the cDNA sequence for clone AA847076.

[8168] SEQ ID NO: 8129 represents the cDNA sequence for clone AA847077.

[8169] SEQ ID NO: 8130 represents the cDNA sequence for clone AA847078.

[8170] SEQ ID NO: 8131 represents the cDNA sequence for clone AA847081.

[8171] SEQ ID NO: 8132 represents the cDNA sequence for clone AA847082.

[8172] SEQ ID NO: 8133 represents the cDNA sequence for clone AA847083.

[8173] SEQ ID NO: 8134 represents the cDNA sequence for clone AA847085.

[8174] SEQ ID NO: 8135 represents the cDNA sequence for clone AA847086.

[8175] SEQ ID NO: 8136 represents the cDNA sequence for clone AA847088.

[8176] SEQ ID NO: 8137 represents the cDNA sequence for clone AA847091.

[8177] SEQ ID NO: 8138 represents the cDNA sequence for clone AA847092.

[8178] SEQ ID NO: 8139 represents the cDNA sequence for clone AA847095.

[8179] SEQ ID NO: 8140 represents the cDNA sequence for clone AA847096.

[8180] SEQ ID NO: 8141 represents the cDNA sequence for clone AA847097.

[8181] SEQ ID NO: 8142 represents the cDNA sequence for clone AA847099.

[8182] SEQ ID NO: 8143 represents the cDNA sequence for clone AA847102.

[8183] SEQ ID NO: 8144 represents the cDNA sequence for clone AA847103.

[8184] SEQ ID NO: 8145 represents the cDNA sequence for clone AA847105.

[8185] SEQ ID NO: 8146 represents the cDNA sequence for clone AA847111.

[8186] SEQ ID NO: 8147 represents the cDNA sequence for clone AA847115.

[8187] SEQ ID NO: 8148 represents the cDNA sequence for clone AA847116.

[8188] SEQ ID NO: 8149 represents the cDNA sequence for clone AA847117.

[8189] SEQ ID NO: 8150 represents the cDNA sequence for clone AA847119.

[8190] SEQ ID NO: 8151 represents the cDNA sequence for clone AA847122.

[8191] SEQ ID NO: 8152 represents the cDNA sequence for clone AA847128.

[8192] SEQ ID NO: 8153 represents the cDNA sequence for clone AA847211.

[8193] SEQ ID NO: 8154 represents the cDNA sequence for clone AA847212.

[8194] SEQ ID NO: 8155 represents the cDNA sequence for clone AA847213.

[8195] SEQ ID NO: 8156 represents the cDNA sequence for clone AA847215.

[8196] SEQ ID NO: 8157 represents the cDNA sequence for clone AA847216.

[8197] SEQ ID NO: 8158 represents the cDNA sequence for clone AA847223.

[8198] SEQ ID NO: 8159 represents the cDNA sequence for clone AA847264.

[8199] SEQ ID NO: 8160 represents the cDNA sequence for clone AA847265.

[8200] SEQ ID NO: 8161 represents the cDNA sequence for clone AA847271.

[8201] SEQ ID NO: 8162 represents the cDNA sequence for clone AA847273.

[8202] SEQ ID NO: 8163 represents the cDNA sequence for clone AA847274.

[8203] SEQ ID NO: 8164 represents the cDNA sequence for clone AA847316.

[8204] SEQ ID NO: 8165 represents the cDNA sequence for clone AA847317.

[8205] SEQ ID NO: 8166 represents the cDNA sequence for clone AA847318.

[8206] SEQ ID NO: 8167 represents the cDNA sequence for clone AA847319.

[8207] SEQ ID NO: 8168 represents the cDNA sequence for clone AA847321.

[8208] SEQ ID NO: 8169 represents the cDNA sequence for clone AA847323.

[8209] SEQ ID NO: 8170 represents the cDNA sequence for clone AA847324.

[8210] SEQ ID NO: 8171 represents the cDNA sequence for clone AA847325.

[8211] SEQ ID NO: 8172 represents the cDNA sequence for clone AA847327.

[8212] SEQ ID NO: 8173 represents the cDNA sequence for clone AA847333.

[8213] SEQ ID NO: 8174 represents the cDNA sequence for clone AA847335.

[8214] SEQ ID NO: 8175 represents the cDNA sequence for clone AA847338.

[8215] SEQ ID NO: 8176 represents the cDNA sequence for clone AA847339.

[8216] SEQ ID NO: 8177 represents the cDNA sequence for clone AA847342.

[8217] SEQ ID NO: 8178 represents the cDNA sequence for clone AA847345.

[8218] SEQ ID NO: 8179 represents the cDNA sequence for clone AA847387.

[8219] SEQ ID NO: 8180 represents the cDNA sequence for clone AA847389.

[8220] SEQ ID NO: 8181 represents the cDNA sequence for clone AA847390.

[8221] SEQ ID NO: 8182 represents the cDNA sequence for clone AA847392.

[8222] SEQ ID NO: 8183 represents the cDNA sequence for clone AA847393.

[8223] SEQ ID NO: 8184 represents the cDNA sequence for clone AA847395.

[8224] SEQ ID NO: 8185 represents the cDNA sequence for clone AA847396.

[8225] SEQ ID NO: 8186 represents the cDNA sequence for clone AA847397.

[8226] SEQ ID NO: 8187 represents the cDNA sequence for clone AA847398.

[8227] SEQ ID NO: 8188 represents the cDNA sequence for clone AA847400.

[8228] SEQ ID NO: 8189 represents the cDNA sequence for clone AA847401.

[8229] SEQ ID NO: 8190 represents the cDNA sequence for clone AA847402.

[8230] SEQ ID NO: 8191 represents the cDNA sequence for clone AA847403.

[8231] SEQ ID NO: 8192 represents the cDNA sequence for clone AA847406.

[8232] SEQ ID NO: 8193 represents the cDNA sequence for clone AA847410.

[8233] SEQ ID NO: 8194 represents the cDNA sequence for clone AA847412.

[8234] SEQ ID NO: 8195 represents the cDNA sequence for clone AA847413.

[8235] SEQ ID NO: 8196 represents the cDNA sequence for clone AA847414.

[8236] SEQ ID NO: 8197 represents the cDNA sequence for clone AA847417.

[8237] SEQ ID NO: 8198 represents the cDNA sequence for clone AA847418.

[8238] SEQ ID NO: 8199 represents the cDNA sequence for clone AA847419.

[8239] SEQ ID NO: 8200 represents the cDNA sequence for clone AA847422.

[8240] SEQ ID NO: 8201 represents the cDNA sequence for clone AA847423.

[8241] SEQ ID NO: 8202 represents the cDNA sequence for clone AA847425.

[8242] SEQ ID NO: 8203 represents the cDNA sequence for clone AA847429.

[8243] SEQ ID NO: 8204 represents the cDNA sequence for clone AA847500.

[8244] SEQ ID NO: 8205 represents the cDNA sequence for clone AA847505.

[8245] SEQ ID NO: 8206 represents the cDNA sequence for clone AA847509.

[8246] SEQ ID NO: 8207 represents the cDNA sequence for clone AA847510.

[8247] SEQ ID NO: 8208 represents the cDNA sequence for clone AA847511.

[8248] SEQ ID NO: 8209 represents the cDNA sequence for clone AA847512.

[8249] SEQ ID NO: 8210 represents the cDNA sequence for clone AA847513.

[8250] SEQ ID NO: 8211 represents the cDNA sequence for clone AA847514.

[8251] SEQ ID NO: 8212 represents the cDNA sequence for clone AA847515.

[8252] SEQ ID NO: 8213 represents the cDNA sequence for clone AA847517.

[8253] SEQ ID NO: 8214 represents the cDNA sequence for clone AA847518.

[8254] SEQ ID NO: 8215 represents the cDNA sequence for clone AA847525.

[8255] SEQ ID NO: 8216 represents the cDNA sequence for clone AA847608.

[8256] SEQ ID NO: 8217 represents the cDNA sequence for clone AA847611.

[8257] SEQ ID NO: 8218 represents the cDNA sequence for clone AA847612.

[8258] SEQ ID NO: 8219 represents the cDNA sequence for clone AA847614.

[8259] SEQ ID NO: 8220 represents the cDNA sequence for clone AA847619.

[8260] SEQ ID NO: 8221 represents the cDNA sequence for clone AA847620.

[8261] SEQ ID NO: 8222 represents the cDNA sequence for clone AA847624.

[8262] SEQ ID NO: 8223 represents the cDNA sequence for clone AA847691.

[8263] SEQ ID NO: 8224 represents the cDNA sequence for clone AA847694.

[8264] SEQ ID NO: 8225 represents the cDNA sequence for clone AA847696.

[8265] SEQ ID NO: 8226 represents the cDNA sequence for clone AA847697.

[8266] SEQ ID NO: 8227 represents the cDNA sequence for clone AA847698.

[8267] SEQ ID NO: 8228 represents the cDNA sequence for clone AA847704.

[8268] SEQ ID NO: 8229 represents the cDNA sequence for clone AA847706.

[8269] SEQ ID NO: 8230 represents the cDNA sequence for clone AA847707.

[8270] SEQ ID NO: 8231 represents the cDNA sequence for clone AA847708.

[8271] SEQ ID NO: 8232 represents the cDNA sequence for clone AA847710.

[8272] SEQ ID NO: 8233 represents the cDNA sequence for clone AA847712.

[8273] SEQ ID NO: 8234 represents the cDNA sequence for clone AA847713.

[8274] SEQ ID NO: 8235 represents the cDNA sequence for clone AA847714.

[8275] SEQ ID NO: 8236 represents the cDNA sequence for clone AA847715.

[8276] SEQ ID NO: 8237 represents the cDNA sequence for clone AA847718.

[8277] SEQ ID NO: 8238 represents the cDNA sequence for clone AA847719.

[8278] SEQ ID NO: 8239 represents the cDNA sequence for clone AA847722.

[8279] SEQ ID NO: 8240 represents the cDNA sequence for clone AA847725.

[8280] SEQ ID NO: 8241 represents the cDNA sequence for clone AA847726.

[8281] SEQ ID NO: 8242 represents the cDNA sequence for clone AA847727.

[8282] SEQ ID NO: 8243 represents the cDNA sequence for clone AA847730.

[8283] SEQ ID NO: 8244 represents the cDNA sequence for clone AA847731.

[8284] SEQ ID NO: 8245 represents the cDNA sequence for clone AA847732.

[8285] SEQ ID NO: 8246 represents the cDNA sequence for clone AA847733.

[8286] SEQ ID NO: 8247 represents the cDNA sequence for clone AA847734.

[8287] SEQ ID NO: 8248 represents the cDNA sequence for clone AA847735.

[8288] SEQ ID NO: 8249 represents the cDNA sequence for clone AA847740.

[8289] SEQ ID NO: 8250 represents the cDNA sequence for clone AA847743.

[8290] SEQ ID NO: 8251 represents the cDNA sequence for clone AA847744.

[8291] SEQ ID NO: 8252 represents the cDNA sequence for clone AA847745.

[8292] SEQ ID NO: 8253 represents the cDNA sequence for clone AA847747.

[8293] SEQ ID NO: 8254 represents the cDNA sequence for clone AA847748.

[8294] SEQ ID NO: 8255 represents the cDNA sequence for clone AA847751.

[8295] SEQ ID NO: 8256 represents the cDNA sequence for clone AA847752.

[8296] SEQ ID NO: 8257 represents the cDNA sequence for clone AA847754.

[8297] SEQ ID NO: 8258 represents the cDNA sequence for clone AA847947.

[8298] SEQ ID NO: 8259 represents the cDNA sequence for clone AA847949.

[8299] SEQ ID NO: 8260 represents the cDNA sequence for clone AA847950.

[8300] SEQ ID NO: 8261 represents the cDNA sequence for clone AA847951.

[8301] SEQ ID NO: 8262 represents the cDNA sequence for clone AA847954.

[8302] SEQ ID NO: 8263 represents the cDNA sequence for clone AA847958.

[8303] SEQ ID NO: 8264 represents the cDNA sequence for clone AA847959.

[8304] SEQ ID NO: 8265 represents the cDNA sequence for clone AA847960.

[8305] SEQ ID NO: 8266 represents the cDNA sequence for clone AA847961.

[8306] SEQ ID NO: 8267 represents the cDNA sequence for clone AA847962.

[8307] SEQ ID NO: 8268 represents the cDNA sequence for clone AA847968.

[8308] SEQ ID NO: 8269 represents the cDNA sequence for clone AA847970.

[8309] SEQ ID NO: 8270 represents the cDNA sequence for clone AA847973.

[8310] SEQ ID NO: 8271 represents the cDNA sequence for clone AA847974.

[8311] SEQ ID NO: 8272 represents the cDNA sequence for clone AA847975.

[8312] SEQ ID NO: 8273 represents the cDNA sequence for clone AA847976.

[8313] SEQ ID NO: 8274 represents the cDNA sequence for clone AA847979.

[8314] SEQ ID NO: 8275 represents the cDNA sequence for clone AA847981.

[8315] SEQ ID NO: 8276 represents the cDNA sequence for clone AA847983.

[8316] SEQ ID NO: 8277 represents the cDNA sequence for clone AA847984.

[8317] SEQ ID NO: 8278 represents the cDNA sequence for clone AA847986.

[8318] SEQ ID NO: 8279 represents the cDNA sequence for clone AA847988.

[8319] SEQ ID NO: 8280 represents the cDNA sequence for clone AA847991.

[8320] SEQ ID NO: 8281 represents the cDNA sequence for clone AA847996.

[8321] SEQ ID NO: 8282 represents the cDNA sequence for clone AA847997.

[8322] SEQ ID NO: 8283 represents the cDNA sequence for clone AA847998.

[8323] SEQ ID NO: 8284 represents the cDNA sequence for clone AA847999.

[8324] SEQ ID NO: 8285 represents the cDNA sequence for clone AA848000.

[8325] SEQ ID NO: 8286 represents the cDNA sequence for clone AA848002.

[8326] SEQ ID NO: 8287 represents the cDNA sequence for clone AA848058.

[8327] SEQ ID NO: 8288 represents the cDNA sequence for clone AA848062.

[8328] SEQ ID NO: 8289 represents the cDNA sequence for clone AA848063.

[8329] SEQ ID NO: 8290 represents the cDNA sequence for clone AA848119.

[8330] SEQ ID NO: 8291 represents the cDNA sequence for clone AA848124.

[8331] SEQ ID NO: 8292 represents the cDNA sequence for clone AA848125.

[8332] SEQ ID NO: 8293 represents the cDNA sequence for clone AA848127.

[8333] SEQ ID NO: 8294 represents the cDNA sequence for clone AA848128.

[8334] SEQ ID NO: 8295 represents the cDNA sequence for clone AA848130.

[8335] SEQ ID NO: 8296 represents the cDNA sequence for clone AA848132.

[8336] SEQ ID NO: 8297 represents the cDNA sequence for clone AA848133.

[8337] SEQ ID NO: 8298 represents the cDNA sequence for clone AA848135.

[8338] SEQ ID NO: 8299 represents the cDNA sequence for clone AA848136.

[8339] SEQ ID NO: 8300 represents the cDNA sequence for clone AA848137.

[8340] SEQ ID NO: 8301 represents the cDNA sequence for clone AA848138.

[8341] SEQ ID NO: 8302 represents the cDNA sequence for clone AA848140.

[8342] SEQ ID NO: 8303 represents the cDNA sequence for clone AA848142.

[8343] SEQ ID NO: 8304 represents the cDNA sequence for clone AA848143.

[8344] SEQ ID NO: 8305 represents the cDNA sequence for clone AA848145.

[8345] SEQ ID NO: 8306 represents the cDNA sequence for clone AA848146.

[8346] SEQ ID NO: 8307 represents the cDNA sequence for clone AA848147.

[8347] SEQ ID NO: 8308 represents the cDNA sequence for clone AA848155.

[8348] SEQ ID NO: 8309 represents the cDNA sequence for clone AA848158.

[8349] SEQ ID NO: 8310 represents the cDNA sequence for clone AA848161.

[8350] SEQ ID NO: 8311 represents the cDNA sequence for clone AA848163.

[8351] SEQ ID NO: 8312 represents the cDNA sequence for clone AA848164.

[8352] SEQ ID NO: 8313 represents the cDNA sequence for clone AA848167.

[8353] SEQ ID NO: 8314 represents the cDNA sequence for clone AA848170.

[8354] SEQ ID NO: 8315 represents the cDNA sequence for clone AA848171.

[8355] SEQ ID NO: 8316 represents the cDNA sequence for clone AA848173.

[8356] SEQ ID NO: 8317 represents the cDNA sequence for clone AA848174.

[8357] SEQ ID NO: 8318 represents the cDNA sequence for clone AA848175.

[8358] SEQ ID NO: 8319 represents the cDNA sequence for clone AA856815.

[8359] SEQ ID NO: 8320 represents the cDNA sequence for clone AA856817.

[8360] SEQ ID NO: 8321 represents the cDNA sequence for clone AA856818.

[8361] SEQ ID NO: 8322 represents the cDNA sequence for clone AA856819.

[8362] SEQ ID NO: 8323 represents the cDNA sequence for clone AA856824.

[8363] SEQ ID NO: 8324 represents the cDNA sequence for clone AA856826.

[8364] SEQ ID NO: 8325 represents the cDNA sequence for clone AA856827.

[8365] SEQ ID NO: 8326 represents the cDNA sequence for clone AA856828.

[8366] SEQ ID NO: 8327 represents the cDNA sequence for clone AA856833.

[8367] SEQ ID NO: 8328 represents the cDNA sequence for clone AA856835.

[8368] SEQ ID NO: 8329 represents the cDNA sequence for clone AA856836.

[8369] SEQ ID NO: 8330 represents the cDNA sequence for clone AA856838.

[8370] SEQ ID NO: 8331 represents the cDNA sequence for clone AA856839.

[8371] SEQ ID NO: 8332 represents the cDNA sequence for clone AA856840.

[8372] SEQ ID NO: 8333 represents the cDNA sequence for clone AA856842.

[8373] SEQ ID NO: 8334 represents the cDNA sequence for clone AA856843.

[8374] SEQ ID NO: 8335 represents the cDNA sequence for clone AA856844.

[8375] SEQ ID NO: 8336 represents the cDNA sequence for clone AA856845.

[8376] SEQ ID NO: 8337 represents the cDNA sequence for clone AA856849.

[8377] SEQ ID NO: 8338 represents the cDNA sequence for clone AA856850.

[8378] SEQ ID NO: 8339 represents the cDNA sequence for clone AA856852.

[8379] SEQ ID NO: 8340 represents the cDNA sequence for clone AA856853.

[8380] SEQ ID NO: 8341 represents the cDNA sequence for clone AA856856.

[8381] SEQ ID NO: 8342 represents the cDNA sequence for clone AA856860.

[8382] SEQ ID NO: 8343 represents the cDNA sequence for clone AA856861.

[8383] SEQ ID NO: 8344 represents the cDNA sequence for clone AA856863.

[8384] SEQ ID NO: 8345 represents the cDNA sequence for clone AA856864.

[8385] SEQ ID NO: 8346 represents the cDNA sequence for clone AA856865.

[8386] SEQ ID NO: 8347 represents the cDNA sequence for clone AA856866.

[8387] SEQ ID NO: 8348 represents the cDNA sequence for clone AA856875.

[8388] SEQ ID NO: 8349 represents the cDNA sequence for clone AA856921.

[8389] SEQ ID NO: 8350 represents the cDNA sequence for clone AA856922.

[8390] SEQ ID NO: 8351 represents the cDNA sequence for clone AA856923.

[8391] SEQ ID NO: 8352 represents the cDNA sequence for clone AA856925.

[8392] SEQ ID NO: 8353 represents the cDNA sequence for clone AA856927.

[8393] SEQ ID NO: 8354 represents the cDNA sequence for clone AA856928.

[8394] SEQ ID NO: 8355 represents the cDNA sequence for clone AA856929.

[8395] SEQ ID NO: 8356 represents the cDNA sequence for clone AA856933.

[8396] SEQ ID NO: 8357 represents the cDNA sequence for clone AA856934.

[8397] SEQ ID NO: 8358 represents the cDNA sequence for clone AA856935.

[8398] SEQ ID NO: 8359 represents the cDNA sequence for clone AA856936.

[8399] SEQ ID NO: 8360 represents the cDNA sequence for clone AA856938.

[8400] SEQ ID NO: 8361 represents the cDNA sequence for clone AA856940.

[8401] SEQ ID NO: 8362 represents the cDNA sequence for clone AA856941.

[8402] SEQ ID NO: 8363 represents the cDNA sequence for clone AA856945.

[8403] SEQ ID NO: 8364 represents the cDNA sequence for clone AA856946.

[8404] SEQ ID NO: 8365 represents the cDNA sequence for clone AA856953.

[8405] SEQ ID NO: 8366 represents the cDNA sequence for clone AA856956.

[8406] SEQ ID NO: 8367 represents the cDNA sequence for clone AA856958.

[8407] SEQ ID NO: 8368 represents the cDNA sequence for clone AA856961.

[8408] SEQ ID NO: 8369 represents the cDNA sequence for clone AA856962.

[8409] SEQ ID NO: 8370 represents the cDNA sequence for clone AA856965.

[8410] SEQ ID NO: 8371 represents the cDNA sequence for clone AA856966.

[8411] SEQ ID NO: 8372 represents the cDNA sequence for clone AA856972.

[8412] SEQ ID NO: 8373 represents the cDNA sequence for clone AA856976.

[8413] SEQ ID NO: 8374 represents the cDNA sequence for clone AA856978.

[8414] SEQ ID NO: 8375 represents the cDNA sequence for clone AA856979.

[8415] SEQ ID NO: 8376 represents the cDNA sequence for clone AA856980.

[8416] SEQ ID NO: 8377 represents the cDNA sequence for clone AA856981.

[8417] SEQ ID NO: 8378 represents the cDNA sequence for clone AA857367.

[8418] SEQ ID NO: 8379 represents the cDNA sequence for clone AA857372.

[8419] SEQ ID NO: 8380 represents the cDNA sequence for clone AA857374.

[8420] SEQ ID NO: 8381 represents the cDNA sequence for clone AA857375.

[8421] SEQ ID NO: 8382 represents the cDNA sequence for clone AA857377.

[8422] SEQ ID NO: 8383 represents the cDNA sequence for clone AA857379.

[8423] SEQ ID NO: 8384 represents the cDNA sequence for clone AA857380.

[8424] SEQ ID NO: 8385 represents the cDNA sequence for clone AA857381.

[8425] SEQ ID NO: 8386 represents the cDNA sequence for clone AA857383.

[8426] SEQ ID NO: 8387 represents the cDNA sequence for clone AA857385.

[8427] SEQ ID NO: 8388 represents the cDNA sequence for clone AA857386.

[8428] SEQ ID NO: 8389 represents the cDNA sequence for clone AA857387.

[8429] SEQ ID NO: 8390 represents the cDNA sequence for clone AA857389.

[8430] SEQ ID NO: 8391 represents the cDNA sequence for clone AA857485.

[8431] SEQ ID NO: 8392 represents the cDNA sequence for clone AA857487.

[8432] SEQ ID NO: 8393 represents the cDNA sequence for clone AA857489.

[8433] SEQ ID NO: 8394 represents the cDNA sequence for clone AA857491.

[8434] SEQ ID NO: 8395 represents the cDNA sequence for clone AA857492.

[8435] SEQ ID NO: 8396 represents the cDNA sequence for clone AA857493.

[8436] SEQ ID NO: 8397 represents the cDNA sequence for clone AA857494.

[8437] SEQ ID NO: 8398 represents the cDNA sequence for clone AA857496.

[8438] SEQ ID NO: 8399 represents the cDNA sequence for clone AA857501.

[8439] SEQ ID NO: 8400 represents the cDNA sequence for clone AA857503.

[8440] SEQ ID NO: 8401 represents the cDNA sequence for clone AA862175.

[8441] SEQ ID NO: 8402 represents the cDNA sequence for clone AA862176.

[8442] SEQ ID NO: 8403 represents the cDNA sequence for clone AA862178.

[8443] SEQ ID NO: 8404 represents the cDNA sequence for clone AA862181.

[8444] SEQ ID NO: 8405 represents the cDNA sequence for clone AA862183.

[8445] SEQ ID NO: 8406 represents the cDNA sequence for clone AA862185.

[8446] SEQ ID NO: 8407 represents the cDNA sequence for clone AA862188.

[8447] SEQ ID NO: 8408 represents the cDNA sequence for clone AA862189.

[8448] SEQ ID NO: 8409 represents the cDNA sequence for clone AA862191.

[8449] SEQ ID NO: 8410 represents the cDNA sequence for clone AA862192.

[8450] SEQ ID NO: 8411 represents the cDNA sequence for clone AA862193.

[8451] SEQ ID NO: 8412 represents the cDNA sequence for clone AA862194.

[8452] SEQ ID NO: 8413 represents the cDNA sequence for clone AA862195.

[8453] SEQ ID NO: 8414 represents the cDNA sequence for clone AA862196.

[8454] SEQ ID NO: 8415 represents the cDNA sequence for clone AA862197.

[8455] SEQ ID NO: 8416 represents the cDNA sequence for clone AA862199.

[8456] SEQ ID NO: 8417 represents the cDNA sequence for clone AA862201.

[8457] SEQ ID NO: 8418 represents the cDNA sequence for clone AA862204.

[8458] SEQ ID NO: 8419 represents the cDNA sequence for clone AA862208.

[8459] SEQ ID NO: 8420 represents the cDNA sequence for clone AA862211.

[8460] SEQ ID NO: 8421 represents the cDNA sequence for clone AA862212.

[8461] SEQ ID NO: 8422 represents the cDNA sequence for clone AA862214.

[8462] SEQ ID NO: 8423 represents the cDNA sequence for clone AA862215.

[8463] SEQ ID NO: 8424 represents the cDNA sequence for clone AA862216.

[8464] SEQ ID NO: 8425 represents the cDNA sequence for clone AA862217.

[8465] SEQ ID NO: 8426 represents the cDNA sequence for clone AA862218.

[8466] SEQ ID NO: 8427 represents the cDNA sequence for clone AA862219.

[8467] SEQ ID NO: 8428 represents the cDNA sequence for clone AA862220.

[8468] SEQ ID NO: 8429 represents the cDNA sequence for clone AA862221.

[8469] SEQ ID NO: 8430 represents the cDNA sequence for clone AA862223.

[8470] SEQ ID NO: 8431 represents the cDNA sequence for clone AA862224.

[8471] SEQ ID NO: 8432 represents the cDNA sequence for clone AA862225.

[8472] SEQ ID NO: 8433 represents the cDNA sequence for clone AA862226.

[8473] SEQ ID NO: 8434 represents the cDNA sequence for clone AA862228.

[8474] SEQ ID NO: 8435 represents the cDNA sequence for clone AA862229.

[8475] SEQ ID NO: 8436 represents the cDNA sequence for clone AA862230.

[8476] SEQ ID NO: 8437 represents the cDNA sequence for clone AA862235.

[8477] SEQ ID NO: 8438 represents the cDNA sequence for clone AA862238.

[8478] SEQ ID NO: 8439 represents the cDNA sequence for clone AA862239.

[8479] SEQ ID NO: 8440 represents the cDNA sequence for clone AA862241.

[8480] SEQ ID NO: 8441 represents the cDNA sequence for clone AA862242.

[8481] SEQ ID NO: 8442 represents the cDNA sequence for clone AA862249.

[8482] SEQ ID NO: 8443 represents the cDNA sequence for clone AA873651.

[8483] SEQ ID NO: 8444 represents the cDNA sequence for clone AA873652.

[8484] SEQ ID NO: 8445 represents the cDNA sequence for clone AA873654.

[8485] SEQ ID NO: 8446 represents the cDNA sequence for clone AA873664.

[8486] SEQ ID NO: 8447 represents the cDNA sequence for clone AA873665.

[8487] SEQ ID NO: 8448 represents the cDNA sequence for clone AA873666.

[8488] SEQ ID NO: 8449 represents the cDNA sequence for clone AA873667.

[8489] SEQ ID NO: 8450 represents the cDNA sequence for clone AA873670.

[8490] SEQ ID NO: 8451 represents the cDNA sequence for clone AA873671.

[8491] SEQ ID NO: 8452 represents the cDNA sequence for clone AA873672.

[8492] SEQ ID NO: 8453 represents the cDNA sequence for clone AA878332.

[8493] SEQ ID NO: 8454 represents the cDNA sequence for clone AA878337.

[8494] SEQ ID NO: 8455 represents the cDNA sequence for clone AA878343.

[8495] SEQ ID NO: 8456 represents the cDNA sequence for clone AA878346.

[8496] SEQ ID NO: 8457 represents the cDNA sequence for clone AA878348.

[8497] SEQ ID NO: 8458 represents the cDNA sequence for clone AA878349.

[8498] SEQ ID NO: 8459 represents the cDNA sequence for clone AA878350.

[8499] SEQ ID NO: 8460 represents the cDNA sequence for clone AA878351.

[8500] SEQ ID NO: 8461 represents the cDNA sequence for clone AA878354.

[8501] SEQ ID NO: 8462 represents the cDNA sequence for clone AA878356.

[8502] SEQ ID NO: 8463 represents the cDNA sequence for clone AA878357.

[8503] SEQ ID NO: 8464 represents the cDNA sequence for clone AA878358.

[8504] SEQ ID NO: 8465 represents the cDNA sequence for clone AA878359.

[8505] SEQ ID NO: 8466 represents the cDNA sequence for clone AA878362.

[8506] SEQ ID NO: 8467 represents the cDNA sequence for clone AA878403.

[8507] SEQ ID NO: 8468 represents the cDNA sequence for clone AA878407.

[8508] SEQ ID NO: 8469 represents the cDNA sequence for clone AA878410.

[8509] SEQ ID NO: 8470 represents the cDNA sequence for clone AA878413.

[8510] SEQ ID NO: 8471 represents the cDNA sequence for clone AA878415.

[8511] SEQ ID NO: 8472 represents the cDNA sequence for clone AA878416.

[8512] SEQ ID NO: 8473 represents the cDNA sequence for clone AA878418.

[8513] SEQ ID NO: 8474 represents the cDNA sequence for clone AA878419.

[8514] SEQ ID NO: 8475 represents the cDNA sequence for clone AA878420.

[8515] SEQ ID NO: 8476 represents the cDNA sequence for clone AA878423.

[8516] SEQ ID NO: 8477 represents the cDNA sequence for clone AA878424.

[8517] SEQ ID NO: 8478 represents the cDNA sequence for clone AA878433.

[8518] SEQ ID NO: 8479 represents the cDNA sequence for clone AA878436.

[8519] SEQ ID NO: 8480 represents the cDNA sequence for clone AA878439.

[8520] SEQ ID NO: 8481 represents the cDNA sequence for clone AA878440.

[8521] SEQ ID NO: 8482 represents the cDNA sequence for clone AA878442.

[8522] SEQ ID NO: 8483 represents the cDNA sequence for clone AA878484.

[8523] SEQ ID NO: 8484 represents the cDNA sequence for clone AA878487.

[8524] SEQ ID NO: 8485 represents the cDNA sequence for clone AA878491.

[8525] SEQ ID NO: 8486 represents the cDNA sequence for clone AA878493.

[8526] SEQ ID NO: 8487 represents the cDNA sequence for clone AA878495.

[8527] SEQ ID NO: 8488 represents the cDNA sequence for clone AA878498.

[8528] SEQ ID NO: 8489 represents the cDNA sequence for clone AA878499.

[8529] SEQ ID NO: 8490 represents the cDNA sequence for clone AA878502.

[8530] SEQ ID NO: 8491 represents the cDNA sequence for clone AA902676.

[8531] SEQ ID NO: 8492 represents the cDNA sequence for clone AA909822.

[8532] SEQ ID NO: 8493 represents the cDNA sequence for clone AA909830.

[8533] SEQ ID NO: 8494 represents the cDNA sequence for clone AA908312.

[8534] SEQ ID NO: 8495 represents the cDNA sequence for clone AA908317.

[8535] SEQ ID NO: 8496 represents the cDNA sequence for clone AA908323.

[8536] SEQ ID NO: 8497 represents the cDNA sequence for clone AA908324.

[8537] SEQ ID NO: 8498 represents the cDNA sequence for clone AA908328.

[8538] SEQ ID NO: 8499 represents the cDNA sequence for clone AA908332.

[8539] SEQ ID NO: 8500 represents the cDNA sequence for clone AA908339.

[8540] SEQ ID NO: 8501 represents the cDNA sequence for clone AA908348.

[8541] SEQ ID NO: 8502 represents the cDNA sequence for clone AA908349.

[8542] SEQ ID NO: 8503 represents the cDNA sequence for clone AA908351.

[8543] SEQ ID NO: 8504 represents the cDNA sequence for clone AA908354.

[8544] SEQ ID NO: 8505 represents the cDNA sequence for clone AA908361.

[8545] SEQ ID NO: 8506 represents the cDNA sequence for clone AA908377.

[8546] SEQ ID NO: 8507 represents the cDNA sequence for clone AA908383.

[8547] SEQ ID NO: 8508 represents the cDNA sequence for clone AA908389.

[8548] SEQ ID NO: 8509 represents the cDNA sequence for clone AA908390.

[8549] SEQ ID NO: 8510 represents the cDNA sequence for clone AA908396.

[8550] SEQ ID NO: 8511 represents the cDNA sequence for clone AA908400.

[8551] SEQ ID NO: 8512 represents the cDNA sequence for clone AA908404.

[8552] SEQ ID NO: 8513 represents the cDNA sequence for clone AA908407.

[8553] SEQ ID NO: 8514 represents the cDNA sequence for clone AA908415.

[8554] SEQ ID NO: 8515 represents the cDNA sequence for clone AA908417.

[8555] SEQ ID NO: 8516 represents the cDNA sequence for clone AA908419.

[8556] SEQ ID NO: 8517 represents the cDNA sequence for clone AA908431.

[8557] SEQ ID NO: 8518 represents the cDNA sequence for clone AA908433.

[8558] SEQ ID NO: 8519 represents the cDNA sequence for clone AA908440.

[8559] SEQ ID NO: 8520 represents the cDNA sequence for clone AA908452.

[8560] SEQ ID NO: 8521 represents the cDNA sequence for clone AA908470.

[8561] SEQ ID NO: 8522 represents the cDNA sequence for clone AA908474.

[8562] SEQ ID NO: 8523 represents the cDNA sequence for clone AA908491.

[8563] SEQ ID NO: 8524 represents the cDNA sequence for clone AA908494.

[8564] SEQ ID NO: 8525 represents the cDNA sequence for clone AA908496.

[8565] SEQ ID NO: 8526 represents the cDNA sequence for clone AA908499.

[8566] SEQ ID NO: 8527 represents the cDNA sequence for clone AA908516.

[8567] SEQ ID NO: 8528 represents the cDNA sequence for clone AA908532.

[8568] SEQ ID NO: 8529 represents the cDNA sequence for clone AA908537.

[8569] SEQ ID NO: 8530 represents the cDNA sequence for clone AA908554.

[8570] SEQ ID NO: 8531 represents the cDNA sequence for clone AA908555.

[8571] SEQ ID NO: 8532 represents the cDNA sequence for clone AA908560.

[8572] SEQ ID NO: 8533 represents the cDNA sequence for clone AA908561.

[8573] SEQ ID NO: 8534 represents the cDNA sequence for clone AA908563.

[8574] SEQ ID NO: 8535 represents the cDNA sequence for clone AA908567.

[8575] SEQ ID NO: 8536 represents the cDNA sequence for clone AA908576.

[8576] SEQ ID NO: 8537 represents the cDNA sequence for clone AA908580.

[8577] SEQ ID NO: 8538 represents the cDNA sequence for clone AA908582.

[8578] SEQ ID NO: 8539 represents the cDNA sequence for clone AA908592.

[8579] SEQ ID NO: 8540 represents the cDNA sequence for clone AA908593.

[8580] SEQ ID NO: 8541 represents the cDNA sequence for clone AA908602.

[8581] SEQ ID NO: 8542 represents the cDNA sequence for clone AA908603.

[8582] SEQ ID NO: 8543 represents the cDNA sequence for clone AA908604.

[8583] SEQ ID NO: 8544 represents the cDNA sequence for clone AA908606.

[8584] SEQ ID NO: 8545 represents the cDNA sequence for clone AA908607.

[8585] SEQ ID NO: 8546 represents the cDNA sequence for clone AA908610.

[8586] SEQ ID NO: 8547 represents the cDNA sequence for clone AA908614.

[8587] SEQ ID NO: 8548 represents the cDNA sequence for clone AA908638.

[8588] SEQ ID NO: 8549 represents the cDNA sequence for clone AA908733.

[8589] SEQ ID NO: 8550 represents the cDNA sequence for clone AA908738.

[8590] SEQ ID NO: 8551 represents the cDNA sequence for clone AA908739.

[8591] SEQ ID NO: 8552 represents the cDNA sequence for clone AA908744.

[8592] SEQ ID NO: 8553 represents the cDNA sequence for clone AA908747.

[8593] SEQ ID NO: 8554 represents the cDNA sequence for clone AA908753.

[8594] SEQ ID NO: 8555 represents the cDNA sequence for clone AA908756.

[8595] SEQ ID NO: 8556 represents the cDNA sequence for clone AA908805.

[8596] SEQ ID NO: 8557 represents the cDNA sequence for clone AA908806.

[8597] SEQ ID NO: 8558 represents the cDNA sequence for clone AA908810.

[8598] SEQ ID NO: 8559 represents the cDNA sequence for clone AA908812.

[8599] SEQ ID NO: 8560 represents the cDNA sequence for clone AA908813.

[8600] SEQ ID NO: 8561 represents the cDNA sequence for clone AA908819.

[8601] SEQ ID NO: 8562 represents the cDNA sequence for clone AA910288.

[8602] SEQ ID NO: 8563 represents the cDNA sequence for clone AA910290.

[8603] SEQ ID NO: 8564 represents the cDNA sequence for clone AA937561.

[8604] SEQ ID NO: 8565 represents the cDNA sequence for clone AA937572.

[8605] SEQ ID NO: 8566 represents the cDNA sequence for clone AA937574.

[8606] SEQ ID NO: 8567 represents the cDNA sequence for clone AA948725.

[8607] SEQ ID NO: 8568 represents the cDNA sequence for clone AA948726.

[8608] SEQ ID NO: 8569 represents the cDNA sequence for clone AA948727.

[8609] SEQ ID NO: 8570 represents the cDNA sequence for clone AA948731.

[8610] SEQ ID NO: 8571 represents the cDNA sequence for clone AA948732.

[8611] SEQ ID NO: 8572 represents the cDNA sequence for clone AA948735.

[8612] SEQ ID NO: 8573 represents the cDNA sequence for clone AA948736.

[8613] SEQ ID NO: 8574 represents the cDNA sequence for clone AA948738.

[8614] SEQ ID NO: 8575 represents the cDNA sequence for clone AA947254.

[8615] SEQ ID NO: 8576 represents the cDNA sequence for clone AA947255.

[8616] SEQ ID NO: 8577 represents the cDNA sequence for clone AA947257.

[8617] SEQ ID NO: 8578 represents the cDNA sequence for clone AA947258.

[8618] SEQ ID NO: 8579 represents the cDNA sequence for clone AA947259.

[8619] SEQ ID NO: 8580 represents the cDNA sequence for clone AA947262.

[8620] SEQ ID NO: 8581 represents the cDNA sequence for clone AA947264.

[8621] SEQ ID NO: 8582 represents the cDNA sequence for clone AA947265.

[8622] SEQ ID NO: 8583 represents the cDNA sequence for clone AA947266.

[8623] SEQ ID NO: 8584 represents the cDNA sequence for clone AA947348.

[8624] SEQ ID NO: 8585 represents the cDNA sequence for clone AA947349.

[8625] SEQ ID NO: 8586 represents the cDNA sequence for clone AA947351.

[8626] SEQ ID NO: 8587 represents the cDNA sequence for clone AA947353.

[8627] SEQ ID NO: 8588 represents the cDNA sequence for clone AA947354.

[8628] SEQ ID NO: 8589 represents the cDNA sequence for clone AA947356.

[8629] SEQ ID NO: 8590 represents the cDNA sequence for clone AA947366.

[8630] SEQ ID NO: 8591 represents the cDNA sequence for clone AA947367.

[8631] SEQ ID NO: 8592 represents the cDNA sequence for clone AA947368.

[8632] SEQ ID NO: 8593 represents the cDNA sequence for clone AA947371.

[8633] SEQ ID NO: 8594 represents the cDNA sequence for clone AA947374.

[8634] SEQ ID NO: 8595 represents the cDNA sequence for clone AA947375.

[8635] SEQ ID NO: 8596 represents the cDNA sequence for clone AA947383.

[8636] SEQ ID NO: 8597 represents the cDNA sequence for clone AA947384.

[8637] SEQ ID NO: 8598 represents the cDNA sequence for clone AA947385.

[8638] SEQ ID NO: 8599 represents the cDNA sequence for clone AA947386.

[8639] SEQ ID NO: 8600 represents the cDNA sequence for clone AA947388.

[8640] SEQ ID NO: 8601 represents the cDNA sequence for clone AA947526.

[8641] SEQ ID NO: 8602 represents the cDNA sequence for clone AA947527.

[8642] SEQ ID NO: 8603 represents the cDNA sequence for clone AA947528.

[8643] SEQ ID NO: 8604 represents the cDNA sequence for clone AA947529.

[8644] SEQ ID NO: 8605 represents the cDNA sequence for clone AA947531.

[8645] SEQ ID NO: 8606 represents the cDNA sequence for clone AA947532.

[8646] SEQ ID NO: 8607 represents the cDNA sequence for clone AA947533.

[8647] SEQ ID NO: 8608 represents the cDNA sequence for clone AA947536.

[8648] SEQ ID NO: 8609 represents the cDNA sequence for clone AA947538.

[8649] SEQ ID NO: 8610 represents the cDNA sequence for clone AA947539.

[8650] SEQ ID NO: 8611 represents the cDNA sequence for clone AA947548.

[8651] SEQ ID NO: 8612 represents the cDNA sequence for clone AA947550.

[8652] SEQ ID NO: 8613 represents the cDNA sequence for clone AA947552.

[8653] SEQ ID NO: 8614 represents the cDNA sequence for clone AA947558.

[8654] SEQ ID NO: 8615 represents the cDNA sequence for clone AA947562.

[8655] SEQ ID NO: 8616 represents the cDNA sequence for clone AA947563.

[8656] SEQ ID NO: 8617 represents the cDNA sequence for clone AA947564.

[8657] SEQ ID NO: 8618 represents the cDNA sequence for clone AA947565.

[8658] SEQ ID NO: 8619 represents the cDNA sequence for clone AA947799.

[8659] SEQ ID NO: 8620 represents the cDNA sequence for clone AA947801.

[8660] SEQ ID NO: 8621 represents the cDNA sequence for clone AA947802.

[8661] SEQ ID NO: 8622 represents the cDNA sequence for clone AA947803.

[8662] SEQ ID NO: 8623 represents the cDNA sequence for clone AA947804.

[8663] SEQ ID NO: 8624 represents the cDNA sequence for clone AA947807.

[8664] SEQ ID NO: 8625 represents the cDNA sequence for clone AA947808.

[8665] SEQ ID NO: 8626 represents the cDNA sequence for clone AA947810.

[8666] SEQ ID NO: 8627 represents the cDNA sequence for clone AA947812.

[8667] SEQ ID NO: 8628 represents the cDNA sequence for clone AA947813.

[8668] SEQ ID NO: 8629 represents the cDNA sequence for clone AA947816.

[8669] SEQ ID NO: 8630 represents the cDNA sequence for clone AA947817.

[8670] SEQ ID NO: 8631 represents the cDNA sequence for clone AA947818.

[8671] SEQ ID NO: 8632 represents the cDNA sequence for clone AA947819.

[8672] SEQ ID NO: 8633 represents the cDNA sequence for clone AA947824.

[8673] SEQ ID NO: 8634 represents the cDNA sequence for clone AA947826.

[8674] SEQ ID NO: 8635 represents the cDNA sequence for clone AA947827.

[8675] SEQ ID NO: 8636 represents the cDNA sequence for clone AA947828.

[8676] SEQ ID NO: 8637 represents the cDNA sequence for clone AA947830.

[8677] SEQ ID NO: 8638 represents the cDNA sequence for clone AA947831.

[8678] SEQ ID NO: 8639 represents the cDNA sequence for clone AA947834.

[8679] SEQ ID NO: 8640 represents the cDNA sequence for clone AA947837.

[8680] SEQ ID NO: 8641 represents the cDNA sequence for clone AI053400.

[8681] SEQ ID NO: 8642 represents the cDNA sequence for clone AI053406.

[8682] SEQ ID NO: 8643 represents the cDNA sequence for clone AI053407.

[8683] SEQ ID NO: 8644 represents the cDNA sequence for clone AI053410.

[8684] SEQ ID NO: 8645 represents the cDNA sequence for clone AI053428.

[8685] SEQ ID NO: 8646 represents the cDNA sequence for clone AI053430.

[8686] SEQ ID NO: 8647 represents the cDNA sequence for clone AI053431.

[8687] SEQ ID NO: 8648 represents the cDNA sequence for clone AI053433.

[8688] SEQ ID NO: 8649 represents the cDNA sequence for clone AI053434.

[8689] SEQ ID NO: 8650 represents the cDNA sequence for clone AI053438.

[8690] SEQ ID NO: 8651 represents the cDNA sequence for clone AI053439.

[8691] SEQ ID NO: 8652 represents the cDNA sequence for clone AI053441.

[8692] SEQ ID NO: 8653 represents the cDNA sequence for clone AI053443.

[8693] SEQ ID NO: 8654 represents the cDNA sequence for clone AI053446.

[8694] SEQ ID NO: 8655 represents the cDNA sequence for clone AI053449.

[8695] SEQ ID NO: 8656 represents the cDNA sequence for clone AI053452.

[8696] SEQ ID NO: 8657 represents the cDNA sequence for clone AI053455.

[8697] SEQ ID NO: 8658 represents the cDNA sequence for clone AI053461.

[8698] SEQ ID NO: 8659 represents the cDNA sequence for clone AI053462.

[8699] SEQ ID NO: 8660 represents the cDNA sequence for clone AI053466.

[8700] SEQ ID NO: 8661 represents the cDNA sequence for clone AI053469.

[8701] SEQ ID NO: 8662 represents the cDNA sequence for clone AI053472.

[8702] SEQ ID NO: 8663 represents the cDNA sequence for clone AI053480.

[8703] SEQ ID NO: 8664 represents the cDNA sequence for clone AI053481.

[8704] SEQ ID NO: 8665 represents the cDNA sequence for clone AI053482.

[8705] SEQ ID NO: 8666 represents the cDNA sequence for clone AI053484.

[8706] SEQ ID NO: 8667 represents the cDNA sequence for clone AI053485.

[8707] SEQ ID NO: 8668 represents the cDNA sequence for clone AI053486.

[8708] SEQ ID NO: 8669 represents the cDNA sequence for clone AI053489.

[8709] SEQ ID NO: 8670 represents the cDNA sequence for clone AI053492.

[8710] SEQ ID NO: 8671 represents the cDNA sequence for clone AI053496.

[8711] SEQ ID NO: 8672 represents the cDNA sequence for clone AI053501.

[8712] SEQ ID NO: 8673 represents the cDNA sequence for clone AI053503.

[8713] SEQ ID NO: 8674 represents the cDNA sequence for clone AI053514.

[8714] SEQ ID NO: 8675 represents the cDNA sequence for clone AI053519.

[8715] SEQ ID NO: 8676 represents the cDNA sequence for clone AI053520.

[8716] SEQ ID NO: 8677 represents the cDNA sequence for clone AI053529.

[8717] SEQ ID NO: 8678 represents the cDNA sequence for clone AI053536.

[8718] SEQ ID NO: 8679 represents the cDNA sequence for clone AI053538.

[8719] SEQ ID NO: 8680 represents the cDNA sequence for clone AI053540.

[8720] SEQ ID NO: 8681 represents the cDNA sequence for clone AI053543.

[8721] SEQ ID NO: 8682 represents the cDNA sequence for clone AI053545.

[8722] SEQ ID NO: 8683 represents the cDNA sequence for clone AI053547.

[8723] SEQ ID NO: 8684 represents the cDNA sequence for clone AI053551.

[8724] SEQ ID NO: 8685 represents the cDNA sequence for clone AI053552.

[8725] SEQ ID NO: 8686 represents the cDNA sequence for clone AI053555.

[8726] SEQ ID NO: 8687 represents the cDNA sequence for clone AI053568.

[8727] SEQ ID NO: 8688 represents the cDNA sequence for clone AI053570.

[8728] SEQ ID NO: 8689 represents the cDNA sequence for clone AI053572.

[8729] SEQ ID NO: 8690 represents the cDNA sequence for clone AI053582.

[8730] SEQ ID NO: 8691 represents the cDNA sequence for clone AI053585.

[8731] SEQ ID NO: 8692 represents the cDNA sequence for clone AI053586.

[8732] SEQ ID NO: 8693 represents the cDNA sequence for clone AI053588.

[8733] SEQ ID NO: 8694 represents the cDNA sequence for clone AI053589.

[8734] SEQ ID NO: 8695 represents the cDNA sequence for clone AI053590.

[8735] SEQ ID NO: 8696 represents the cDNA sequence for clone AI053591.

[8736] SEQ ID NO: 8697 represents the cDNA sequence for clone AI053594.

[8737] SEQ ID NO: 8698 represents the cDNA sequence for clone AI053595.

[8738] SEQ ID NO: 8699 represents the cDNA sequence for clone AI053596.

[8739] SEQ ID NO: 8700 represents the cDNA sequence for clone AI053597.

[8740] SEQ ID NO: 8701 represents the cDNA sequence for clone AI053600.

[8741] SEQ ID NO: 8702 represents the cDNA sequence for clone AI053602.

[8742] SEQ ID NO: 8703 represents the cDNA sequence for clone AI053605.

[8743] SEQ ID NO: 8704 represents the cDNA sequence for clone AI053612.

[8744] SEQ ID NO: 8705 represents the cDNA sequence for clone AI053613.

[8745] SEQ ID NO: 8706 represents the cDNA sequence for clone AI053614.

[8746] SEQ ID NO: 8707 represents the cDNA sequence for clone AI053617.

[8747] SEQ ID NO: 8708 represents the cDNA sequence for clone AI053619.

[8748] SEQ ID NO: 8709 represents the cDNA sequence for clone AI053622.

[8749] SEQ ID NO: 8710 represents the cDNA sequence for clone AI053623.

[8750] SEQ ID NO: 8711 represents the cDNA sequence for clone AI053625.

[8751] SEQ ID NO: 8712 represents the cDNA sequence for clone AI053629.

[8752] SEQ ID NO: 8713 represents the cDNA sequence for clone AI053640.

[8753] SEQ ID NO: 8714 represents the cDNA sequence for clone AI053641.

[8754] SEQ ID NO: 8715 represents the cDNA sequence for clone AI053643.

[8755] SEQ ID NO: 8716 represents the cDNA sequence for clone AI053645.

[8756] SEQ ID NO: 8717 represents the cDNA sequence for clone AI053647.

[8757] SEQ ID NO: 8718 represents the cDNA sequence for clone AI053650.

[8758] SEQ ID NO: 8719 represents the cDNA sequence for clone AI053651.

[8759] SEQ ID NO: 8720 represents the cDNA sequence for clone AI053653.

[8760] SEQ ID NO: 8721 represents the cDNA sequence for clone AI053659.

[8761] SEQ ID NO: 8722 represents the cDNA sequence for clone AI053662.

[8762] SEQ ID NO: 8723 represents the cDNA sequence for clone AI053663.

[8763] SEQ ID NO: 8724 represents the cDNA sequence for clone AI053674.

[8764] SEQ ID NO: 8725 represents the cDNA sequence for clone AI053684.

[8765] SEQ ID NO: 8726 represents the cDNA sequence for clone AI053694.

[8766] SEQ ID NO: 8727 represents the cDNA sequence for clone AI053707.

[8767] SEQ ID NO: 8728 represents the cDNA sequence for clone AI053710.

[8768] SEQ ID NO: 8729 represents the cDNA sequence for clone AI053711.

[8769] SEQ ID NO: 8730 represents the cDNA sequence for clone AI053713.

[8770] SEQ ID NO: 8731 represents the cDNA sequence for clone AI053715.

[8771] SEQ ID NO: 8732 represents the cDNA sequence for clone AI053719.

[8772] SEQ ID NO: 8733 represents the cDNA sequence for clone AI053725.

[8773] SEQ ID NO: 8734 represents the cDNA sequence for clone AI053729.

[8774] SEQ ID NO: 8735 represents the cDNA sequence for clone AI053731.

[8775] SEQ ID NO: 8736 represents the cDNA sequence for clone AI053738.

[8776] SEQ ID NO: 8737 represents the cDNA sequence for clone AI053741.

[8777] SEQ ID NO: 8738 represents the cDNA sequence for clone AI053743.

[8778] SEQ ID NO: 8739 represents the cDNA sequence for clone AI053745.

[8779] SEQ ID NO: 8740 represents the cDNA sequence for clone AI053751.

[8780] SEQ ID NO: 8741 represents the cDNA sequence for clone AI053753.

[8781] SEQ ID NO: 8742 represents the cDNA sequence for clone AI053755.

[8782] SEQ ID NO: 8743 represents the cDNA sequence for clone AI053759.

[8783] SEQ ID NO: 8744 represents the cDNA sequence for clone AI053763.

[8784] SEQ ID NO: 8745 represents the cDNA sequence for clone AI053764.

[8785] SEQ ID NO: 8746 represents the cDNA sequence for clone AI053765.

[8786] SEQ ID NO: 8747 represents the cDNA sequence for clone AI053768.

[8787] SEQ ID NO: 8748 represents the cDNA sequence for clone AI053769.

[8788] SEQ ID NO: 8749 represents the cDNA sequence for clone AI053771.

[8789] SEQ ID NO: 8750 represents the cDNA sequence for clone AI053773.

[8790] SEQ ID NO: 8751 represents the cDNA sequence for clone AI053776.

[8791] SEQ ID NO: 8752 represents the cDNA sequence for clone AI053777.

[8792] SEQ ID NO: 8753 represents the cDNA sequence for clone AI053778.

[8793] SEQ ID NO: 8754 represents the cDNA sequence for clone AI053779.

[8794] SEQ ID NO: 8755 represents the cDNA sequence for clone AI053780.

[8795] SEQ ID NO: 8756 represents the cDNA sequence for clone AI053784.

[8796] SEQ ID NO: 8757 represents the cDNA sequence for clone AI053786.

[8797] SEQ ID NO: 8758 represents the cDNA sequence for clone AI053788.

[8798] SEQ ID NO: 8759 represents the cDNA sequence for clone AI053791.

[8799] SEQ ID NO: 8760 represents the cDNA sequence for clone AI053795.

[8800] SEQ ID NO: 8761 represents the cDNA sequence for clone AI053796.

[8801] SEQ ID NO: 8762 represents the cDNA sequence for clone AI053797.

[8802] SEQ ID NO: 8763 represents the cDNA sequence for clone AI053799.

[8803] SEQ ID NO: 8764 represents the cDNA sequence for clone AI053800.

[8804] SEQ ID NO: 8765 represents the cDNA sequence for clone AI053801.

[8805] SEQ ID NO: 8766 represents the cDNA sequence for clone AI053802.

[8806] SEQ ID NO: 8767 represents the cDNA sequence for clone AI053806.

[8807] SEQ ID NO: 8768 represents the cDNA sequence for clone AI053807.

[8808] SEQ ID NO: 8769 represents the cDNA sequence for clone AI053808.

[8809] SEQ ID NO: 8770 represents the cDNA sequence for clone AI053816.

[8810] SEQ ID NO: 8771 represents the cDNA sequence for clone AI053820.

[8811] SEQ ID NO: 8772 represents the cDNA sequence for clone AI053831.

[8812] SEQ ID NO: 8773 represents the cDNA sequence for clone AI053834.

[8813] SEQ ID NO: 8774 represents the cDNA sequence for clone AI053836.

[8814] SEQ ID NO: 8775 represents the cDNA sequence for clone AI053837.

[8815] SEQ ID NO: 8776 represents the cDNA sequence for clone AI053841.

[8816] SEQ ID NO: 8777 represents the cDNA sequence for clone AI053842.

[8817] SEQ ID NO: 8778 represents the cDNA sequence for clone AI053846.

[8818] SEQ ID NO: 8779 represents the cDNA sequence for clone AI053848.

[8819] SEQ ID NO: 8780 represents the cDNA sequence for clone AI053851.

[8820] SEQ ID NO: 8781 represents the cDNA sequence for clone AI053852.

[8821] SEQ ID NO: 8782 represents the cDNA sequence for clone AI053853.

[8822] SEQ ID NO: 8783 represents the cDNA sequence for clone AI053860.

[8823] SEQ ID NO: 8784 represents the cDNA sequence for clone AI053862.

[8824] SEQ ID NO: 8785 represents the cDNA sequence for clone AI053866.

[8825] SEQ ID NO: 8786 represents the cDNA sequence for clone AI053870.

[8826] SEQ ID NO: 8787 represents the cDNA sequence for clone AI053871.

[8827] SEQ ID NO: 8788 represents the cDNA sequence for clone AI053874.

[8828] SEQ ID NO: 8789 represents the cDNA sequence for clone AI053879.

[8829] SEQ ID NO: 8790 represents the cDNA sequence for clone AI053882.

[8830] SEQ ID NO: 8791 represents the cDNA sequence for clone AI053883.

[8831] SEQ ID NO: 8792 represents the cDNA sequence for clone AI053884.

[8832] SEQ ID NO: 8793 represents the cDNA sequence for clone AI053890.

[8833] SEQ ID NO: 8794 represents the cDNA sequence for clone AI053891.

[8834] SEQ ID NO: 8795 represents the cDNA sequence for clone AI053893.

[8835] SEQ ID NO: 8796 represents the cDNA sequence for clone AI053895.

[8836] SEQ ID NO: 8797 represents the cDNA sequence for clone AI053898.

[8837] SEQ ID NO: 8798 represents the cDNA sequence for clone AI053905.

[8838] SEQ ID NO: 8799 represents the cDNA sequence for clone AI053908.

[8839] SEQ ID NO: 8800 represents the cDNA sequence for clone AI053910.

[8840] SEQ ID NO: 8801 represents the cDNA sequence for clone AI053912.

[8841] SEQ ID NO: 8802 represents the cDNA sequence for clone AI053918.

[8842] SEQ ID NO: 8803 represents the cDNA sequence for clone AI053934.

[8843] SEQ ID NO: 8804 represents the cDNA sequence for clone AI053935.

[8844] SEQ ID NO: 8805 represents the cDNA sequence for clone AI053936.

[8845] SEQ ID NO: 8806 represents the cDNA sequence for clone AI053940.

[8846] SEQ ID NO: 8807 represents the cDNA sequence for clone AI053941.

[8847] SEQ ID NO: 8808 represents the cDNA sequence for clone AI053942.

[8848] SEQ ID NO: 8809 represents the cDNA sequence for clone AI053946.

[8849] SEQ ID NO: 8810 represents the cDNA sequence for clone AI053949.

[8850] SEQ ID NO: 8811 represents the cDNA sequence for clone AI053950.

[8851] SEQ ID NO: 8812 represents the cDNA sequence for clone AI053951.

[8852] SEQ ID NO: 8813 represents the cDNA sequence for clone AI053952.

[8853] SEQ ID NO: 8814 represents the cDNA sequence for clone AI053955.

[8854] SEQ ID NO: 8815 represents the cDNA sequence for clone AI053961.

[8855] SEQ ID NO: 8816 represents the cDNA sequence for clone AI053963.

[8856] SEQ ID NO: 8817 represents the cDNA sequence for clone AI053964.

[8857] SEQ ID NO: 8818 represents the cDNA sequence for clone AI053970.

[8858] SEQ ID NO: 8819 represents the cDNA sequence for clone AI053972.

[8859] SEQ ID NO: 8820 represents the cDNA sequence for clone AI053974.

[8860] SEQ ID NO: 8821 represents the cDNA sequence for clone AI053978.

[8861] SEQ ID NO: 8822 represents the cDNA sequence for clone AI053983.

[8862] SEQ ID NO: 8823 represents the cDNA sequence for clone AI053987.

[8863] SEQ ID NO: 8824 represents the cDNA sequence for clone AI053992.

[8864] SEQ ID NO: 8825 represents the cDNA sequence for clone AI053994.

[8865] SEQ ID NO: 8826 represents the cDNA sequence for clone AI054003.

[8866] SEQ ID NO: 8827 represents the cDNA sequence for clone AI054011.

[8867] SEQ ID NO: 8828 represents the cDNA sequence for clone AI054014.

[8868] SEQ ID NO: 8829 represents the cDNA sequence for clone AI054019.

[8869] SEQ ID NO: 8830 represents the cDNA sequence for clone AI054020.

[8870] SEQ ID NO: 8831 represents the cDNA sequence for clone AI054023.

[8871] SEQ ID NO: 8832 represents the cDNA sequence for clone AI054024.

[8872] SEQ ID NO: 8833 represents the cDNA sequence for clone AI054032.

[8873] SEQ ID NO: 8834 represents the cDNA sequence for clone AI054036.

[8874] SEQ ID NO: 8835 represents the cDNA sequence for clone AI054038.

[8875] SEQ ID NO: 8836 represents the cDNA sequence for clone AI054039.

[8876] SEQ ID NO: 8837 represents the cDNA sequence for clone AI054041.

[8877] SEQ ID NO: 8838 represents the cDNA sequence for clone AI054046.

[8878] SEQ ID NO: 8839 represents the cDNA sequence for clone AI054048.

[8879] SEQ ID NO: 8840 represents the cDNA sequence for clone AI054052.

[8880] SEQ ID NO: 8841 represents the cDNA sequence for clone AI054055.

[8881] SEQ ID NO: 8842 represents the cDNA sequence for clone AI054056.

[8882] SEQ ID NO: 8843 represents the cDNA sequence for clone AI054058.

[8883] SEQ ID NO: 8844 represents the cDNA sequence for clone AI054068.

[8884] SEQ ID NO: 8845 represents the cDNA sequence for clone AI054069.

[8885] SEQ ID NO: 8846 represents the cDNA sequence for clone AI054074.

[8886] SEQ ID NO: 8847 represents the cDNA sequence for clone AI054081.

[8887] SEQ ID NO: 8848 represents the cDNA sequence for clone AI054084.

[8888] SEQ ID NO: 8849 represents the cDNA sequence for clone AI054087.

[8889] SEQ ID NO: 8850 represents the cDNA sequence for clone AI054091.

[8890] SEQ ID NO: 8851 represents the cDNA sequence for clone AI054093.

[8891] SEQ ID NO: 8852 represents the cDNA sequence for clone AI054095.

[8892] SEQ ID NO: 8853 represents the cDNA sequence for clone AI054096.

[8893] SEQ ID NO: 8854 represents the cDNA sequence for clone AI054102.

[8894] SEQ ID NO: 8855 represents the cDNA sequence for clone AI054103.

[8895] SEQ ID NO: 8856 represents the cDNA sequence for clone AI054105.

[8896] SEQ ID NO: 8857 represents the cDNA sequence for clone AI054106.

[8897] SEQ ID NO: 8858 represents the cDNA sequence for clone AI054107.

[8898] SEQ ID NO: 8859 represents the cDNA sequence for clone AI054108.

[8899] SEQ ID NO: 8860 represents the cDNA sequence for clone AI054114.

[8900] SEQ ID NO: 8861 represents the cDNA sequence for clone AI054120.

[8901] SEQ ID NO: 8862 represents the cDNA sequence for clone AI054127.

[8902] SEQ ID NO: 8863 represents the cDNA sequence for clone AI054131.

[8903] SEQ ID NO: 8864 represents the cDNA sequence for clone AI054134.

[8904] SEQ ID NO: 8865 represents the cDNA sequence for clone AI054141.

[8905] SEQ ID NO: 8866 represents the cDNA sequence for clone AI054143.

[8906] SEQ ID NO: 8867 represents the cDNA sequence for clone AI054145.

[8907] SEQ ID NO: 8868 represents the cDNA sequence for clone AI054148.

[8908] SEQ ID NO: 8869 represents the cDNA sequence for clone AI054149.

[8909] SEQ ID NO: 8870 represents the cDNA sequence for clone AI054151.

[8910] SEQ ID NO: 8871 represents the cDNA sequence for clone AI054153.

[8911] SEQ ID NO: 8872 represents the cDNA sequence for clone AI054159.

[8912] SEQ ID NO: 8873 represents the cDNA sequence for clone AI054174.

[8913] SEQ ID NO: 8874 represents the cDNA sequence for clone AI054180.

[8914] SEQ ID NO: 8875 represents the cDNA sequence for clone AI054182.

[8915] SEQ ID NO: 8876 represents the cDNA sequence for clone AI054184.

[8916] SEQ ID NO: 8877 represents the cDNA sequence for clone AI054192.

[8917] SEQ ID NO: 8878 represents the cDNA sequence for clone AI054195.

[8918] SEQ ID NO: 8879 represents the cDNA sequence for clone AI054198.

[8919] SEQ ID NO: 8880 represents the cDNA sequence for clone AI054200.

[8920] SEQ ID NO: 8881 represents the cDNA sequence for clone AI054208.

[8921] SEQ ID NO: 8882 represents the cDNA sequence for clone AI054213.

[8922] SEQ ID NO: 8883 represents the cDNA sequence for clone AI054216.

[8923] SEQ ID NO: 8884 represents the cDNA sequence for clone AI054219.

[8924] SEQ ID NO: 8885 represents the cDNA sequence for clone AI054220.

[8925] SEQ ID NO: 8886 represents the cDNA sequence for clone AI054221.

[8926] SEQ ID NO: 8887 represents the cDNA sequence for clone AI054222.

[8927] SEQ ID NO: 8888 represents the cDNA sequence for clone AI054223.

[8928] SEQ ID NO: 8889 represents the cDNA sequence for clone AI054225.

[8929] SEQ ID NO: 8890 represents the cDNA sequence for clone AI054226.

[8930] SEQ ID NO: 8891 represents the cDNA sequence for clone AI054229.

[8931] SEQ ID NO: 8892 represents the cDNA sequence for clone AI054231.

[8932] SEQ ID NO: 8893 represents the cDNA sequence for clone AI054232.

[8933] SEQ ID NO: 8894 represents the cDNA sequence for clone AI054234.

[8934] SEQ ID NO: 8895 represents the cDNA sequence for clone AI054235.

[8935] SEQ ID NO: 8896 represents the cDNA sequence for clone AI054244.

[8936] SEQ ID NO: 8897 represents the cDNA sequence for clone AI054246.

[8937] SEQ ID NO: 8898 represents the cDNA sequence for clone AI054251.

[8938] SEQ ID NO: 8899 represents the cDNA sequence for clone AI054252.

[8939] SEQ ID NO: 8900 represents the cDNA sequence for clone AI054256.

[8940] SEQ ID NO: 8901 represents the cDNA sequence for clone AI054258.

[8941] SEQ ID NO: 8902 represents the cDNA sequence for clone AI054260.

[8942] SEQ ID NO: 8903 represents the cDNA sequence for clone AI054269.

[8943] SEQ ID NO: 8904 represents the cDNA sequence for clone AI054272.

[8944] SEQ ID NO: 8905 represents the cDNA sequence for clone AI054275.

[8945] SEQ ID NO: 8906 represents the cDNA sequence for clone AI054276.

[8946] SEQ ID NO: 8907 represents the cDNA sequence for clone AI054280.

[8947] SEQ ID NO: 8908 represents the cDNA sequence for clone AI054299.

[8948] SEQ ID NO: 8909 represents the cDNA sequence for clone AI054306.

[8949] SEQ ID NO: 8910 represents the cDNA sequence for clone AI054310.

[8950] SEQ ID NO: 8911 represents the cDNA sequence for clone AI054314.

[8951] SEQ ID NO: 8912 represents the cDNA sequence for clone AI054317.

[8952] SEQ ID NO: 8913 represents the cDNA sequence for clone AI054320.

[8953] SEQ ID NO: 8914 represents the cDNA sequence for clone AI054323.

[8954] SEQ ID NO: 8915 represents the cDNA sequence for clone AI054325.

[8955] SEQ ID NO: 8916 represents the cDNA sequence for clone AI054326.

[8956] SEQ ID NO: 8917 represents the cDNA sequence for clone AI054327.

[8957] SEQ ID NO: 8918 represents the cDNA sequence for clone AI054328.

[8958] SEQ ID NO: 8919 represents the cDNA sequence for clone AI054331.

[8959] SEQ ID NO: 8920 represents the cDNA sequence for clone AI054333.

[8960] SEQ ID NO: 8921 represents the cDNA sequence for clone AI054340.

[8961] SEQ ID NO: 8922 represents the cDNA sequence for clone AI054343.

[8962] SEQ ID NO: 8923 represents the cDNA sequence for clone AI054345.

[8963] SEQ ID NO: 8924 represents the cDNA sequence for clone AI054351.

[8964] SEQ ID NO: 8925 represents the cDNA sequence for clone AI054352.

[8965] SEQ ID NO: 8926 represents the cDNA sequence for clone AI054353.

[8966] SEQ ID NO: 8927 represents the cDNA sequence for clone AI054354.

[8967] SEQ ID NO: 8928 represents the cDNA sequence for clone AI054360.

[8968] SEQ ID NO: 8929 represents the cDNA sequence for clone AI054361.

[8969] SEQ ID NO: 8930 represents the cDNA sequence for clone AI054366.

[8970] SEQ ID NO: 8931 represents the cDNA sequence for clone AI054367.

[8971] SEQ ID NO: 8932 represents the cDNA sequence for clone AI054372.

[8972] SEQ ID NO: 8933 represents the cDNA sequence for clone AI054375.

[8973] SEQ ID NO: 8934 represents the cDNA sequence for clone AI054378.

[8974] SEQ ID NO: 8935 represents the cDNA sequence for clone AI054381.

[8975] SEQ ID NO: 8936 represents the cDNA sequence for clone AI054383.

[8976] SEQ ID NO: 8937 represents the cDNA sequence for clone AI054384.

[8977] SEQ ID NO: 8938 represents the cDNA sequence for clone AI054387.

[8978] SEQ ID NO: 8939 represents the cDNA sequence for clone AI054391.

[8979] SEQ ID NO: 8940 represents the cDNA sequence for clone AI054393.

[8980] SEQ ID NO: 8941 represents the cDNA sequence for clone AI054397.

[8981] SEQ ID NO: 8942 represents the cDNA sequence for clone AI054398.

[8982] SEQ ID NO: 8943 represents the cDNA sequence for clone AI054399.

[8983] SEQ ID NO: 8944 represents the cDNA sequence for clone AI054402.

[8984] SEQ ID NO: 8945 represents the cDNA sequence for clone AI054405.

[8985] SEQ ID NO: 8946 represents the cDNA sequence for clone AI054406.

[8986] SEQ ID NO: 8947 represents the cDNA sequence for clone AI054408.

[8987] SEQ ID NO: 8948 represents the cDNA sequence for clone AI054409.

[8988] SEQ ID NO: 8949 represents the cDNA sequence for clone AI054411.

[8989] SEQ ID NO: 8950 represents the cDNA sequence for clone AI054416.

[8990] SEQ ID NO: 8951 represents the cDNA sequence for clone AI054419.

[8991] SEQ ID NO: 8952 represents the cDNA sequence for clone AI054422.

[8992] SEQ ID NO: 8953 represents the cDNA sequence for clone AI044023.

[8993] SEQ ID NO: 8954 represents the cDNA sequence for clone AI044024.

[8994] SEQ ID NO: 8955 represents the cDNA sequence for clone AI144025.

[8995] SEQ ID NO: 8956 represents the cDNA sequence for clone AI144026.

[8996] SEQ ID NO: 8957 represents the cDNA sequence for clone AI144029.

[8997] SEQ ID NO: 8958 represents the cDNA sequence for clone AI144032.

[8998] SEQ ID NO: 8959 represents the cDNA sequence for clone AI144034.

[8999] SEQ ID NO: 8960 represents the cDNA sequence for clone AI144036.

[9000] SEQ ID NO: 8961 represents the cDNA sequence for clone AI144039.

[9001] SEQ ID NO: 8962 represents the cDNA sequence for clone AI144041.

[9002] SEQ ID NO: 8963 represents the cDNA sequence for clone AI144042.

[9003] SEQ ID NO: 8964 represents the cDNA sequence for clone AI144047.

[9004] SEQ ID NO: 8965 represents the cDNA sequence for clone AI144056.

[9005] SEQ ID NO: 8966 represents the cDNA sequence for clone AI144058.

[9006] SEQ ID NO: 8967 represents the cDNA sequence for clone AI144059.

[9007] SEQ ID NO: 8968 represents the cDNA sequence for clone AI144063.

[9008] SEQ ID NO: 8969 represents the cDNA sequence for clone AI144066.

[9009] SEQ ID NO: 8970 represents the cDNA sequence for clone AI144067.

[9010] SEQ ID NO: 8971 represents the cDNA sequence for clone AI144068.

[9011] SEQ ID NO: 8972 represents the cDNA sequence for clone AI144070.

[9012] SEQ ID NO: 8973 represents the cDNA sequence for clone AI144071.

[9013] SEQ ID NO: 8974 represents the cDNA sequence for clone AI144072.

[9014] SEQ ID NO: 8975 represents the cDNA sequence for clone AI144076.

[9015] SEQ ID NO: 8976 represents the cDNA sequence for clone AI144077.

[9016] SEQ ID NO: 8977 represents the cDNA sequence for clone AI144078.

[9017] SEQ ID NO: 8978 represents the cDNA sequence for clone AI144083.

[9018] SEQ ID NO: 8979 represents the cDNA sequence for clone AI144097.

[9019] SEQ ID NO: 8980 represents the cDNA sequence for clone AI144101.

[9020] SEQ ID NO: 8981 represents the cDNA sequence for clone AI144102.

[9021] SEQ ID NO: 8982 represents the cDNA sequence for clone AI144104.

[9022] SEQ ID NO: 8983 represents the cDNA sequence for clone AI144106.

[9023] SEQ ID NO: 8984 represents the cDNA sequence for clone AI144108.

[9024] SEQ ID NO: 8985 represents the cDNA sequence for clone AI223469.

[9025] SEQ ID NO: 8986 represents the cDNA sequence for clone AI223470.

[9026] SEQ ID NO: 8987 represents the cDNA sequence for clone AI223475.

[9027] SEQ ID NO: 8988 represents the cDNA sequence for clone AI223489.

[9028] SEQ ID NO: 8989 represents the cDNA sequence for clone AI223493.

[9029] SEQ ID NO: 8990 represents the cDNA sequence for clone AI223503.

[9030] SEQ ID NO: 8991 represents the cDNA sequence for clone AI223506.

[9031] SEQ ID NO: 8992 represents the cDNA sequence for clone AI223508.

[9032] SEQ ID NO: 8993 represents the cDNA sequence for clone AI223511.

[9033] SEQ ID NO: 8994 represents the cDNA sequence for clone AI223515.

[9034] SEQ ID NO: 8995 represents the cDNA sequence for clone AI223518.

[9035] SEQ ID NO: 8996 represents the cDNA sequence for clone AI223543.

[9036] SEQ ID NO: 8997 represents the cDNA sequence for clone AI223548.

[9037] SEQ ID NO: 8998 represents the cDNA sequence for clone AI223555.

[9038] SEQ ID NO: 8999 represents the cDNA sequence for clone AI223558.

[9039] SEQ ID NO: 9000 represents the cDNA sequence for clone AI223576.

[9040] SEQ ID NO: 9001 represents the cDNA sequence for clone AI223586.

[9041] SEQ ID NO: 9002 represents the cDNA sequence for clone AI223590.

[9042] SEQ ID NO: 9003 represents the cDNA sequence for clone AI223597.

[9043] SEQ ID NO: 9004 represents the cDNA sequence for clone AI223600.

[9044] SEQ ID NO: 9005 represents the cDNA sequence for clone AI223609.

[9045] SEQ ID NO: 9006 represents the cDNA sequence for clone AI223615.

[9046] SEQ ID NO: 9007 represents the cDNA sequence for clone AI223629.

[9047] SEQ ID NO: 9008 represents the cDNA sequence for clone AI223642.

[9048] SEQ ID NO: 9009 represents the cDNA sequence for clone AI223653.

[9049] SEQ ID NO: 9010 represents the cDNA sequence for clone AI223666.

[9050] SEQ ID NO: 9011 represents the cDNA sequence for clone AI223676.

[9051] SEQ ID NO: 9012 represents the cDNA sequence for clone AI223677.

[9052] SEQ ID NO: 9013 represents the cDNA sequence for clone AI223678.

[9053] SEQ ID NO: 9014 represents the cDNA sequence for clone AI223698.

[9054] SEQ ID NO: 9015 represents the cDNA sequence for clone AI223700.

[9055] SEQ ID NO: 9016 represents the cDNA sequence for clone AI223706.

[9056] SEQ ID NO: 9017 represents the cDNA sequence for clone AI223739.

[9057] SEQ ID NO: 9018 represents the cDNA sequence for clone AI223752.

[9058] SEQ ID NO: 9019 represents the cDNA sequence for clone AI223756.

[9059] SEQ ID NO: 9020 represents the cDNA sequence for clone AI223757.

[9060] SEQ ID NO: 9021 represents the cDNA sequence for clone AI223766.

[9061] SEQ ID NO: 9022 represents the cDNA sequence for clone AI223784.

[9062] SEQ ID NO: 9023 represents the cDNA sequence for clone AI224180.

[9063] SEQ ID NO: 9024 represents the cDNA sequence for clone AI224187.

[9064] SEQ ID NO: 9025 represents the cDNA sequence for clone AI224205.

[9065] SEQ ID NO: 9026 represents the cDNA sequence for clone AI224227.

[9066] SEQ ID NO: 9027 represents the cDNA sequence for clone AI224232.

[9067] SEQ ID NO: 9028 represents the cDNA sequence for clone AI224233.

[9068] SEQ ID NO: 9029 represents the cDNA sequence for clone AI224248.

[9069] SEQ ID NO: 9030 represents the cDNA sequence for clone AI224270.

[9070] SEQ ID NO: 9031 represents the cDNA sequence for clone AI224711.

[9071] SEQ ID NO: 9032 represents the cDNA sequence for clone AI224718.

[9072] SEQ ID NO: 9033 represents the cDNA sequence for clone AI224735.

[9073] SEQ ID NO: 9034 represents the cDNA sequence for clone AI224736.

[9074] SEQ ID NO: 9035 represents the cDNA sequence for clone AI224738.

[9075] SEQ ID NO: 9036 represents the cDNA sequence for clone AI224751.

[9076] SEQ ID NO: 9037 represents the cDNA sequence for clone AI224757.

[9077] SEQ ID NO: 9038 represents the cDNA sequence for clone AI224760.

[9078] SEQ ID NO: 9039 represents the cDNA sequence for clone AI224765.

[9079] SEQ ID NO: 9040 represents the cDNA sequence for clone AI224777.

[9080] SEQ ID NO: 9041 represents the cDNA sequence for clone AI224800.

[9081] SEQ ID NO: 9042 represents the cDNA sequence for clone AI224819.

[9082] SEQ ID NO: 9043 represents the cDNA sequence for clone AI241970.

[9083] SEQ ID NO: 9044 represents the cDNA sequence for clone AI241981.

[9084] SEQ ID NO: 9045 represents the cDNA sequence for clone AI241985.

[9085] SEQ ID NO: 9046 represents the cDNA sequence for clone AI241987.

[9086] SEQ ID NO: 9047 represents the cDNA sequence for clone AI241990.

[9087] SEQ ID NO: 9048 represents the cDNA sequence for clone AI241992.

[9088] SEQ ID NO: 9049 represents the cDNA sequence for clone AI241993.

[9089] SEQ ID NO: 9050 represents the cDNA sequence for clone AI241998.

[9090] SEQ ID NO: 9051 represents the cDNA sequence for clone AI242000.

[9091] SEQ ID NO: 9052 represents the cDNA sequence for clone AI242006.

[9092] SEQ ID NO: 9053 represents the cDNA sequence for clone AI242014.

[9093] SEQ ID NO: 9054 represents the cDNA sequence for clone AI242019.

[9094] SEQ ID NO: 9055 represents the cDNA sequence for clone AI242020.

[9095] SEQ ID NO: 9056 represents the cDNA sequence for clone AI242227.

[9096] SEQ ID NO: 9057 represents the cDNA sequence for clone AI242236.

[9097] SEQ ID NO: 9058 represents the cDNA sequence for clone AI242240.

[9098] SEQ ID NO: 9059 represents the cDNA sequence for clone AI242241.

[9099] SEQ ID NO: 9060 represents the cDNA sequence for clone AI242250.

[9100] SEQ ID NO: 9061 represents the cDNA sequence for clone AI242255.

[9101] SEQ ID NO: 9062 represents the cDNA sequence for clone AI242256.

[9102] SEQ ID NO: 9063 represents the cDNA sequence for clone AI242261.

[9103] SEQ ID NO: 9064 represents the cDNA sequence for clone AI242263.

[9104] SEQ ID NO: 9065 represents the cDNA sequence for clone AI242268.

[9105] SEQ ID NO: 9066 represents the cDNA sequence for clone AI246059.

[9106] SEQ ID NO: 9067 represents the cDNA sequence for clone AI246069.

[9107] SEQ ID NO: 9068 represents the cDNA sequence for clone AI246088.

[9108] SEQ ID NO: 9069 represents the cDNA sequence for clone AI246796.

[9109] SEQ ID NO: 9070 represents the cDNA sequence for clone AI246809.

[9110] SEQ ID NO: 9071 represents the cDNA sequence for clone AI246816.

[9111] SEQ ID NO: 9072 represents the cDNA sequence for clone AI246819.

[9112] SEQ ID NO: 9073 represents the cDNA sequence for clone AI246821.

[9113] SEQ ID NO: 9074 represents the cDNA sequence for clone AI246833.

[9114] SEQ ID NO: 9075 represents the cDNA sequence for clone AI246856.

[9115] SEQ ID NO: 9076 represents the cDNA sequence for clone AI246860.

[9116] SEQ ID NO: 9077 represents the cDNA sequence for clone AI246864.

[9117] SEQ ID NO: 9078 represents the cDNA sequence for clone AI246928.

[9118] SEQ ID NO: 9079 represents the cDNA sequence for clone AI246934.

[9119] SEQ ID NO: 9080 represents the cDNA sequence for clone AI246962.

[9120] SEQ ID NO: 9081 represents the cDNA sequence for clone AI246971.

[9121] SEQ ID NO: 9082 represents the cDNA sequence for clone AI246986.

[9122] SEQ ID NO: 9083 represents the cDNA sequence for clone AI247034.

[9123] SEQ ID NO: 9084 represents the cDNA sequence for clone AI247066.

[9124] SEQ ID NO: 9085 represents the cDNA sequence for clone AI247150.

[9125] SEQ ID NO: 9086 represents the cDNA sequence for clone AI247160.

[9126] SEQ ID NO: 9087 represents the cDNA sequence for clone AI249277.

[9127] SEQ ID NO: 9088 represents the cDNA sequence for clone AI249279.

[9128] SEQ ID NO: 9089 represents the cDNA sequence for clone AI249285.

[9129] SEQ ID NO: 9090 represents the cDNA sequence for clone AI249312.

[9130] SEQ ID NO: 9091 represents the cDNA sequence for clone AI249317.

[9131] SEQ ID NO: 9092 represents the cDNA sequence for clone AI249402.

[9132] SEQ ID NO: 9093 represents the cDNA sequence for clone AI249412.

[9133] SEQ ID NO: 9094 represents the cDNA sequence for clone AI249415.

[9134] SEQ ID NO: 9095 represents the cDNA sequence for clone AI249422.

[9135] SEQ ID NO: 9096 represents the cDNA sequence for clone AI249531.

[9136] SEQ ID NO: 9097 represents the cDNA sequence for clone AI249535.

[9137] SEQ ID NO: 9098 represents the cDNA sequence for clone AI249542.

[9138] SEQ ID NO: 9099 represents the cDNA sequence for clone AI249544.

[9139] SEQ ID NO: 9100 represents the cDNA sequence for clone AI249547.

[9140] SEQ ID NO: 9101 represents the cDNA sequence for clone AI249556.

[9141] SEQ ID NO: 9102 represents the cDNA sequence for clone AI249562.

[9142] SEQ ID NO: 9103 represents the cDNA sequence for clone AI249572.

[9143] SEQ ID NO: 9104 represents the cDNA sequence for clone AI249576.

[9144] SEQ ID NO: 9105 represents the cDNA sequence for clone AI249638.

[9145] SEQ ID NO: 9106 represents the cDNA sequence for clone AI249647.

[9146] SEQ ID NO: 9107 represents the cDNA sequence for clone AI249654.

[9147] SEQ ID NO: 9108 represents the cDNA sequence for clone AI249835.

[9148] SEQ ID NO: 9109 represents the cDNA sequence for clone AI249843.

[9149] SEQ ID NO: 9110 represents the cDNA sequence for clone AI249848.

[9150] SEQ ID NO: 9111 represents the cDNA sequence for clone AI249849.

[9151] SEQ ID NO: 9112 represents the cDNA sequence for clone AI249867.

[9152] SEQ ID NO: 9113 represents the cDNA sequence for clone AI249993.

[9153] SEQ ID NO: 9114 represents the cDNA sequence for clone AI249998.

[9154] SEQ ID NO: 9115 represents the cDNA sequence for clone AI250002.

[9155] SEQ ID NO: 9116 represents the cDNA sequence for clone AI250006.

[9156] SEQ ID NO: 9117 represents the cDNA sequence for clone AI250020.

[9157] SEQ ID NO: 9118 represents the cDNA sequence for clone AI250027.

[9158] SEQ ID NO: 9119 represents the cDNA sequence for clone AI250030.

[9159] SEQ ID NO: 9120 represents the cDNA sequence for clone AI250081.

[9160] SEQ ID NO: 9121 represents the cDNA sequence for clone AI250101.

[9161] SEQ ID NO: 9122 represents the cDNA sequence for clone AI250122.

[9162] SEQ ID NO: 9123 represents the cDNA sequence for clone AI250139.

[9163] SEQ ID NO: 9124 represents the cDNA sequence for clone AI250222.

[9164] SEQ ID NO: 9125 represents the cDNA sequence for clone AI250225.

[9165] SEQ ID NO: 9126 represents the cDNA sequence for clone AI250375.

[9166] SEQ ID NO: 9127 represents the cDNA sequence for clone AI250376.

[9167] SEQ ID NO: 9128 represents the cDNA sequence for clone AI250428.

[9168] SEQ ID NO: 9129 represents the cDNA sequence for clone AI250451.

[9169] SEQ ID NO: 9130 represents the cDNA sequence for clone AI250463.

[9170] SEQ ID NO: 9131 represents the cDNA sequence for clone AI250509.

[9171] SEQ ID NO: 9132 represents the cDNA sequence for clone AI250515.

[9172] SEQ ID NO: 9133 represents the cDNA sequence for clone AI250518.

[9173] SEQ ID NO: 9134 represents the cDNA sequence for clone AI250523.

[9174] SEQ ID NO: 9135 represents the cDNA sequence for clone AI250527.

[9175] SEQ ID NO: 9136 represents the cDNA sequence for clone AI250539.

[9176] SEQ ID NO: 9137 represents the cDNA sequence for clone AI250548.

[9177] SEQ ID NO: 9138 represents the cDNA sequence for clone AI250559.

[9178] SEQ ID NO: 9139 represents the cDNA sequence for clone AI250569.

[9179] SEQ ID NO: 9140 represents the cDNA sequence for clone AI250584.

[9180] SEQ ID NO: 9141 represents the cDNA sequence for clone AI250589.

[9181] SEQ ID NO: 9142 represents the cDNA sequence for clone AI250594.

[9182] SEQ ID NO: 9143 represents the cDNA sequence for clone AI250597.

[9183] SEQ ID NO: 9144 represents the cDNA sequence for clone AI250710.

[9184] SEQ ID NO: 9145 represents the cDNA sequence for clone AI250712.

[9185] SEQ ID NO: 9146 represents the cDNA sequence for clone AI250718.

[9186] SEQ ID NO: 9147 represents the cDNA sequence for clone AI250742.

[9187] SEQ ID NO: 9148 represents the cDNA sequence for clone AI250953.

[9188] SEQ ID NO: 9149 represents the cDNA sequence for clone AI250965.

[9189] SEQ ID NO: 9150 represents the cDNA sequence for clone AI250966.

[9190] SEQ ID NO: 9151 represents the cDNA sequence for clone AI250974.

[9191] SEQ ID NO: 9152 represents the cDNA sequence for clone AI250984.

[9192] SEQ ID NO: 9153 represents the cDNA sequence for clone AI251037.

[9193] SEQ ID NO: 9154 represents the cDNA sequence for clone AI251040.

[9194] SEQ ID NO: 9155 represents the cDNA sequence for clone AI251066.

[9195] SEQ ID NO: 9156 represents the cDNA sequence for clone AI251068.

[9196] SEQ ID NO: 9157 represents the cDNA sequence for clone AI251083.

[9197] SEQ ID NO: 9158 represents the cDNA sequence for clone AI251089.

[9198] SEQ ID NO: 9159 represents the cDNA sequence for clone AI251135.

[9199] SEQ ID NO: 9160 represents the cDNA sequence for clone AI251139.

[9200] SEQ ID NO: 9161 represents the cDNA sequence for clone AI251140.

[9201] SEQ ID NO: 9162 represents the cDNA sequence for clone AI251145.

[9202] SEQ ID NO: 9163 represents the cDNA sequence for clone AI251148.

[9203] SEQ ID NO: 9164 represents the cDNA sequence for clone AI251149.

[9204] SEQ ID NO: 9165 represents the cDNA sequence for clone AI251151.

[9205] SEQ ID NO: 9166 represents the cDNA sequence for clone AI251157.

[9206] SEQ ID NO: 9167 represents the cDNA sequence for clone AI251159.

[9207] SEQ ID NO: 9168 represents the cDNA sequence for clone AI251164.

[9208] SEQ ID NO: 9169 represents the cDNA sequence for clone AI251165.

[9209] SEQ ID NO: 9170 represents the cDNA sequence for clone AI251167.

[9210] SEQ ID NO: 9171 represents the cDNA sequence for clone AI251170.

[9211] SEQ ID NO: 9172 represents the cDNA sequence for clone AI251179.

[9212] SEQ ID NO: 9173 represents the cDNA sequence for clone AI251182.

[9213] SEQ ID NO: 9174 represents the cDNA sequence for clone AI251183.

[9214] SEQ ID NO: 9175 represents the cDNA sequence for clone AI251185.

[9215] SEQ ID NO: 9176 represents the cDNA sequence for clone AI251192.

[9216] SEQ ID NO: 9177 represents the cDNA sequence for clone AI251207.

[9217] SEQ ID NO: 9178 represents the cDNA sequence for clone AI251214.

[9218] SEQ ID NO: 9179 represents the cDNA sequence for clone AI251217.

[9219] SEQ ID NO: 9180 represents the cDNA sequence for clone AI251219.

[9220] SEQ ID NO: 9181 represents the cDNA sequence for clone AI251223.

[9221] SEQ ID NO: 9182 represents the cDNA sequence for clone AI251225.

[9222] SEQ ID NO: 9183 represents the cDNA sequence for clone AI251234.

[9223] SEQ ID NO: 9184 represents the cDNA sequence for clone AI251235.

[9224] SEQ ID NO: 9185 represents the cDNA sequence for clone AI251238.

[9225] SEQ ID NO: 9186 represents the cDNA sequence for clone AI251241.

[9226] SEQ ID NO: 9187 represents the cDNA sequence for clone AI251253.

[9227] SEQ ID NO: 9188 represents the cDNA sequence for clone AI251255.

[9228] SEQ ID NO: 9189 represents the cDNA sequence for clone AI251259.

[9229] SEQ ID NO: 9190 represents the cDNA sequence for clone AI251276.

[9230] SEQ ID NO: 9191 represents the cDNA sequence for clone AI251277.

[9231] SEQ ID NO: 9192 represents the cDNA sequence for clone AI251283.

[9232] SEQ ID NO: 9193 represents the cDNA sequence for clone AI251291.

[9233] SEQ ID NO: 9194 represents the cDNA sequence for clone AI251294.

[9234] SEQ ID NO: 9195 represents the cDNA sequence for clone AI251298.

[9235] SEQ ID NO: 9196 represents the cDNA sequence for clone AI251299.

[9236] SEQ ID NO: 9197 represents the cDNA sequence for clone AI251305.

[9237] SEQ ID NO: 9198 represents the cDNA sequence for clone AI251307.

[9238] SEQ ID NO: 9199 represents the cDNA sequence for clone AI251310.

[9239] SEQ ID NO: 9200 represents the cDNA sequence for clone AI251317.

[9240] SEQ ID NO: 9201 represents the cDNA sequence for clone AI251321.

[9241] SEQ ID NO: 9202 represents the cDNA sequence for clone AI251322.

[9242] SEQ ID NO: 9203 represents the cDNA sequence for clone AI251329.

[9243] SEQ ID NO: 9204 represents the cDNA sequence for clone AI251331.

[9244] SEQ ID NO: 9205 represents the cDNA sequence for clone AI251336.

[9245] SEQ ID NO: 9206 represents the cDNA sequence for clone AI251339.

[9246] SEQ ID NO: 9207 represents the cDNA sequence for clone AI251343.

[9247] SEQ ID NO: 9208 represents the cDNA sequence for clone AI251353.

[9248] SEQ ID NO: 9209 represents the cDNA sequence for clone AI251355.

[9249] SEQ ID NO: 9210 represents the cDNA sequence for clone AI251359.

[9250] SEQ ID NO: 9211 represents the cDNA sequence for clone AI251369.

[9251] SEQ ID NO: 9212 represents the cDNA sequence for clone AI251370.

[9252] SEQ ID NO: 9213 represents the cDNA sequence for clone AI251376.

[9253] SEQ ID NO: 9214 represents the cDNA sequence for clone AI251380.

[9254] SEQ ID NO: 9215 represents the cDNA sequence for clone AI251381.

[9255] SEQ ID NO: 9216 represents the cDNA sequence for clone AI251385.

[9256] SEQ ID NO: 9217 represents the cDNA sequence for clone AI251386.

[9257] SEQ ID NO: 9218 represents the cDNA sequence for clone AI251390.

[9258] SEQ ID NO: 9219 represents the cDNA sequence for clone AI251395.

[9259] SEQ ID NO: 9220 represents the cDNA sequence for clone AI251398.

[9260] SEQ ID NO: 9221 represents the cDNA sequence for clone AI251399.

[9261] SEQ ID NO: 9222 represents the cDNA sequence for clone AI251403.

[9262] SEQ ID NO: 9223 represents the cDNA sequence for clone AI251424.

[9263] SEQ ID NO: 9224 represents the cDNA sequence for clone AI251426.

[9264] SEQ ID NO: 9225 represents the cDNA sequence for clone AI251495.

[9265] SEQ ID NO: 9226 represents the cDNA sequence for clone AI251497.

[9266] SEQ ID NO: 9227 represents the cDNA sequence for clone AI251499.

[9267] SEQ ID NO: 9228 represents the cDNA sequence for clone AI251518.

[9268] SEQ ID NO: 9229 represents the cDNA sequence for clone AI251536.

[9269] SEQ ID NO: 9230 represents the cDNA sequence for clone AI251537.

[9270] SEQ ID NO: 9231 represents the cDNA sequence for clone AI251542.

[9271] SEQ ID NO: 9232 represents the cDNA sequence for clone AI251549.

[9272] SEQ ID NO: 9233 represents the cDNA sequence for clone AI251552.

[9273] SEQ ID NO: 9234 represents the cDNA sequence for clone AI251553.

[9274] SEQ ID NO: 9235 represents the cDNA sequence for clone AI251559.

[9275] SEQ ID NO: 9236 represents the cDNA sequence for clone AI251563.

[9276] SEQ ID NO: 9237 represents the cDNA sequence for clone AI251568.

[9277] SEQ ID NO: 9238 represents the cDNA sequence for clone AI251570.

[9278] SEQ ID NO: 9239 represents the cDNA sequence for clone AI251572.

[9279] SEQ ID NO: 9240 represents the cDNA sequence for clone AI251574.

[9280] SEQ ID NO: 9241 represents the cDNA sequence for clone AI251581.

[9281] SEQ ID NO: 9242 represents the cDNA sequence for clone AI251583.

[9282] SEQ ID NO: 9243 represents the cDNA sequence for clone AI251589.

[9283] SEQ ID NO: 9244 represents the cDNA sequence for clone AI251590.

[9284] SEQ ID NO: 9245 represents the cDNA sequence for clone AI251594.

[9285] SEQ ID NO: 9246 represents the cDNA sequence for clone AI251596.

[9286] SEQ ID NO: 9247 represents the cDNA sequence for clone AI251598.

[9287] SEQ ID NO: 9248 represents the cDNA sequence for clone AI251611.

[9288] SEQ ID NO: 9249 represents the cDNA sequence for clone AI251613.

[9289] SEQ ID NO: 9250 represents the cDNA sequence for clone AI251615.

[9290] SEQ ID NO: 9251 represents the cDNA sequence for clone AI251622.

[9291] SEQ ID NO: 9252 represents the cDNA sequence for clone AI251623.

[9292] SEQ ID NO: 9253 represents the cDNA sequence for clone AI251636.

[9293] SEQ ID NO: 9254 represents the cDNA sequence for clone AI251638.

[9294] SEQ ID NO: 9255 represents the cDNA sequence for clone AI251639.

[9295] SEQ ID NO: 9256 represents the cDNA sequence for clone AI251640.

[9296] SEQ ID NO: 9257 represents the cDNA sequence for clone AI251642.

[9297] SEQ ID NO: 9258 represents the cDNA sequence for clone AI251649.

[9298] SEQ ID NO: 9259 represents the cDNA sequence for clone AI251672.

[9299] SEQ ID NO: 9260 represents the cDNA sequence for clone AI251681.

[9300] SEQ ID NO: 9261 represents the cDNA sequence for clone AI251686.

[9301] SEQ ID NO: 9262 represents the cDNA sequence for clone AI251690.

[9302] SEQ ID NO: 9263 represents the cDNA sequence for clone AI251692.

[9303] SEQ ID NO: 9264 represents the cDNA sequence for clone AI251700.

[9304] SEQ ID NO: 9265 represents the cDNA sequence for clone AI251703.

[9305] SEQ ID NO: 9266 represents the cDNA sequence for clone AI251705.

[9306] SEQ ID NO: 9267 represents the cDNA sequence for clone AI251710.

[9307] SEQ ID NO: 9268 represents the cDNA sequence for clone AI251711.

[9308] SEQ ID NO: 9269 represents the cDNA sequence for clone AI251712.

[9309] SEQ ID NO: 9270 represents the cDNA sequence for clone AI251715.

[9310] SEQ ID NO: 9271 represents the cDNA sequence for clone AI251722.

[9311] SEQ ID NO: 9272 represents the cDNA sequence for clone AI251724.

[9312] SEQ ID NO: 9273 represents the cDNA sequence for clone AI251726.

[9313] SEQ ID NO: 9274 represents the cDNA sequence for clone AI251944.

[9314] SEQ ID NO: 9275 represents the cDNA sequence for clone AI251948.

[9315] SEQ ID NO: 9276 represents the cDNA sequence for clone AI251949.

[9316] SEQ ID NO: 9277 represents the cDNA sequence for clone AI251959.

[9317] SEQ ID NO: 9278 represents the cDNA sequence for clone AI251966.

[9318] SEQ ID NO: 9279 represents the cDNA sequence for clone AI251968.

[9319] SEQ ID NO: 9280 represents the cDNA sequence for clone AI251969.

[9320] SEQ ID NO: 9281 represents the cDNA sequence for clone AI251971.

[9321] SEQ ID NO: 9282 represents the cDNA sequence for clone AI251976.

[9322] SEQ ID NO: 9283 represents the cDNA sequence for clone AI251978.

[9323] SEQ ID NO: 9284 represents the cDNA sequence for clone AI251979.

[9324] SEQ ID NO: 9285 represents the cDNA sequence for clone AI251980.

[9325] SEQ ID NO: 9286 represents the cDNA sequence for clone AI251981.

[9326] SEQ ID NO: 9287 represents the cDNA sequence for clone AI251983.

[9327] SEQ ID NO: 9288 represents the cDNA sequence for clone AI251987.

[9328] SEQ ID NO: 9289 represents the cDNA sequence for clone AI251988.

[9329] SEQ ID NO: 9290 represents the cDNA sequence for clone AI251990.

[9330] SEQ ID NO: 9291 represents the cDNA sequence for clone AI251991.

[9331] SEQ ID NO: 9292 represents the cDNA sequence for clone AI251992.

[9332] SEQ ID NO: 9293 represents the cDNA sequence for clone AI251996.

[9333] SEQ ID NO: 9294 represents the cDNA sequence for clone AI251999.

[9334] SEQ ID NO: 9295 represents the cDNA sequence for clone AI252004.

[9335] SEQ ID NO: 9296 represents the cDNA sequence for clone AI252009.

[9336] SEQ ID NO: 9297 represents the cDNA sequence for clone AI252010.

[9337] SEQ ID NO: 9298 represents the cDNA sequence for clone AI252013.

[9338] SEQ ID NO: 9299 represents the cDNA sequence for clone AI252014.

[9339] SEQ ID NO: 9300 represents the cDNA sequence for clone AI252015.

[9340] SEQ ID NO: 9301 represents the cDNA sequence for clone AI252025.

[9341] SEQ ID NO: 9302 represents the cDNA sequence for clone AI252035.

[9342] SEQ ID NO: 9303 represents the cDNA sequence for clone AI252053.

[9343] SEQ ID NO: 9304 represents the cDNA sequence for clone AI252054.

[9344] SEQ ID NO: 9305 represents the cDNA sequence for clone AI252062.

[9345] SEQ ID NO: 9306 represents the cDNA sequence for clone AI252065.

[9346] SEQ ID NO: 9307 represents the cDNA sequence for clone AI252070.

[9347] SEQ ID NO: 9308 represents the cDNA sequence for clone AI252072.

[9348] SEQ ID NO: 9309 represents the cDNA sequence for clone AI252073.

[9349] SEQ ID NO: 9310 represents the cDNA sequence for clone AI252076.

[9350] SEQ ID NO: 9311 represents the cDNA sequence for clone AI252079.

[9351] SEQ ID NO: 9312 represents the cDNA sequence for clone AI252080.

[9352] SEQ ID NO: 9313 represents the cDNA sequence for clone AI252081.

[9353] SEQ ID NO: 9314 represents the cDNA sequence for clone AI252085.

[9354] SEQ ID NO: 9315 represents the cDNA sequence for clone AI252086.

[9355] SEQ ID NO: 9316 represents the cDNA sequence for clone AI252087.

[9356] SEQ ID NO: 9317 represents the cDNA sequence for clone AI252092.

[9357] SEQ ID NO: 9318 represents the cDNA sequence for clone AI252093.

[9358] SEQ ID NO: 9319 represents the cDNA sequence for clone AI252098.

[9359] SEQ ID NO: 9320 represents the cDNA sequence for clone AI252105.

[9360] SEQ ID NO: 9321 represents the cDNA sequence for clone AI252107.

[9361] SEQ ID NO: 9322 represents the cDNA sequence for clone AI252109.

[9362] SEQ ID NO: 9323 represents the cDNA sequence for clone AI252111.

[9363] SEQ ID NO: 9324 represents the cDNA sequence for clone AI252112.

[9364] SEQ ID NO: 9325 represents the cDNA sequence for clone AI252113.

[9365] SEQ ID NO: 9326 represents the cDNA sequence for clone AI252114.

[9366] SEQ ID NO: 9327 represents the cDNA sequence for clone AI252122.

[9367] SEQ ID NO: 9328 represents the cDNA sequence for clone AI252125.

[9368] SEQ ID NO: 9329 represents the cDNA sequence for clone AI252129.

[9369] SEQ ID NO: 9330 represents the cDNA sequence for clone AI252130.

[9370] SEQ ID NO: 9331 represents the cDNA sequence for clone AI252132.

[9371] SEQ ID NO: 9332 represents the cDNA sequence for clone AI252133.

[9372] SEQ ID NO: 9333 represents the cDNA sequence for clone AI252136.

[9373] SEQ ID NO: 9334 represents the cDNA sequence for clone AI252139.

[9374] SEQ ID NO: 9335 represents the cDNA sequence for clone AI252141.

[9375] SEQ ID NO: 9336 represents the cDNA sequence for clone AI252154.

[9376] SEQ ID NO: 9337 represents the cDNA sequence for clone AI252157.

[9377] SEQ ID NO: 9338 represents the cDNA sequence for clone AI252171.

[9378] SEQ ID NO: 9339 represents the cDNA sequence for clone AI252175.

[9379] SEQ ID NO: 9340 represents the cDNA sequence for clone AI252180.

[9380] SEQ ID NO: 9341 represents the cDNA sequence for clone AI252186.

[9381] SEQ ID NO: 9342 represents the cDNA sequence for clone AI252188.

[9382] SEQ ID NO: 9343 represents the cDNA sequence for clone AI252190.

[9383] SEQ ID NO: 9344 represents the cDNA sequence for clone AI252191.

[9384] SEQ ID NO: 9345 represents the cDNA sequence for clone AI252192.

[9385] SEQ ID NO: 9346 represents the cDNA sequence for clone AI252197.

[9386] SEQ ID NO: 9347 represents the cDNA sequence for clone AI252199.

[9387] SEQ ID NO: 9348 represents the cDNA sequence for clone AI252200.

[9388] SEQ ID NO: 9349 represents the cDNA sequence for clone AI252207.

[9389] SEQ ID NO: 9350 represents the cDNA sequence for clone AI252245.

[9390] SEQ ID NO: 9351 represents the cDNA sequence for clone AI252272.

[9391] SEQ ID NO: 9352 represents the cDNA sequence for clone AI252273.

[9392] SEQ ID NO: 9353 represents the cDNA sequence for clone AI252285.

[9393] SEQ ID NO: 9354 represents the cDNA sequence for clone AI252287.

[9394] SEQ ID NO: 9355 represents the cDNA sequence for clone AI252294.

[9395] SEQ ID NO: 9356 represents the cDNA sequence for clone AI252295.

[9396] SEQ ID NO: 9357 represents the cDNA sequence for clone AI252309.

[9397] SEQ ID NO: 9358 represents the cDNA sequence for clone AI252315.

[9398] SEQ ID NO: 9359 represents the cDNA sequence for clone AI252324.

[9399] SEQ ID NO: 9360 represents the cDNA sequence for clone AI252336.

[9400] SEQ ID NO: 9361 represents the cDNA sequence for clone AI252339.

[9401] SEQ ID NO: 9362 represents the cDNA sequence for clone AI252343.

[9402] SEQ ID NO: 9363 represents the cDNA sequence for clone AI252382.

[9403] SEQ ID NO: 9364 represents the cDNA sequence for clone AI252383.

[9404] SEQ ID NO: 9365 represents the cDNA sequence for clone AI252399.

[9405] SEQ ID NO: 9366 represents the cDNA sequence for clone AI252419.

[9406] SEQ ID NO: 9367 represents the cDNA sequence for clone AI252422.

[9407] SEQ ID NO: 9368 represents the cDNA sequence for clone AI252429.

[9408] SEQ ID NO: 9369 represents the cDNA sequence for clone AI252430.

[9409] SEQ ID NO: 9370 represents the cDNA sequence for clone AI252431.

[9410] SEQ ID NO: 9371 represents the cDNA sequence for clone AI252438.

[9411] SEQ ID NO: 9372 represents the cDNA sequence for clone AI252442.

[9412] SEQ ID NO: 9373 represents the cDNA sequence for clone AI252456.

[9413] SEQ ID NO: 9374 represents the cDNA sequence for clone AI252458.

[9414] SEQ ID NO: 9375 represents the cDNA sequence for clone AI252466.

[9415] SEQ ID NO: 9376 represents the cDNA sequence for clone AI252476.

[9416] SEQ ID NO: 9377 represents the cDNA sequence for clone AI252490.

[9417] SEQ ID NO: 9378 represents the cDNA sequence for clone AI252492.

[9418] SEQ ID NO: 9379 represents the cDNA sequence for clone AI252496.

[9419] SEQ ID NO: 9380 represents the cDNA sequence for clone AI252497.

[9420] SEQ ID NO: 9381 represents the cDNA sequence for clone AI252504.

[9421] SEQ ID NO: 9382 represents the cDNA sequence for clone AI252526.

[9422] SEQ ID NO: 9383 represents the cDNA sequence for clone AI252530.

[9423] SEQ ID NO: 9384 represents the cDNA sequence for clone AI252547.

[9424] SEQ ID NO: 9385 represents the cDNA sequence for clone AI252549.

[9425] SEQ ID NO: 9386 represents the cDNA sequence for clone AI252551.

[9426] SEQ ID NO: 9387 represents the cDNA sequence for clone AI252554.

[9427] SEQ ID NO: 9388 represents the cDNA sequence for clone AI252573.

[9428] SEQ ID NO: 9389 represents the cDNA sequence for clone AI252580.

[9429] SEQ ID NO: 9390 represents the cDNA sequence for clone AI252584.

[9430] SEQ ID NO: 9391 represents the cDNA sequence for clone AI252586.

[9431] SEQ ID NO: 9392 represents the cDNA sequence for clone AI252594.

[9432] SEQ ID NO: 9393 represents the cDNA sequence for clone AI252609.

[9433] SEQ ID NO: 9394 represents the cDNA sequence for clone AI252688.

[9434] SEQ ID NO: 9395 represents the cDNA sequence for clone AI252695.

[9435] SEQ ID NO: 9396 represents the cDNA sequence for clone AI252700.

[9436] SEQ ID NO: 9397 represents the cDNA sequence for clone AI252701.

[9437] SEQ ID NO: 9398 represents the cDNA sequence for clone AI252710.

[9438] SEQ ID NO: 9399 represents the cDNA sequence for clone AI252712.

[9439] SEQ ID NO: 9400 represents the cDNA sequence for clone AI252721.

[9440] SEQ ID NO: 9401 represents the cDNA sequence for clone AI252724.

[9441] SEQ ID NO: 9402 represents the cDNA sequence for clone AI252738.

[9442] SEQ ID NO: 9403 represents the cDNA sequence for clone AI252746.

[9443] SEQ ID NO: 9404 represents the cDNA sequence for clone AI252748.

[9444] SEQ ID NO: 9405 represents the cDNA sequence for clone AI252823.

[9445] SEQ ID NO: 9406 represents the cDNA sequence for clone AI252827.

[9446] SEQ ID NO: 9407 represents the cDNA sequence for clone AI252828.

[9447] SEQ ID NO: 9408 represents the cDNA sequence for clone AI252832.

[9448] SEQ ID NO: 9409 represents the cDNA sequence for clone AI252836.

[9449] SEQ ID NO: 9410 represents the cDNA sequence for clone AI252838.

[9450] SEQ ID NO: 9411 represents the cDNA sequence for clone AI252843.

[9451] SEQ ID NO: 9412 represents the cDNA sequence for clone AI252845.

[9452] SEQ ID NO: 9413 represents the cDNA sequence for clone AI252849.

[9453] SEQ ID NO: 9414 represents the cDNA sequence for clone AI252851.

[9454] SEQ ID NO: 9415 represents the cDNA sequence for clone AI252857.

[9455] SEQ ID NO: 9416 represents the cDNA sequence for clone AI252858.

[9456] SEQ ID NO: 9417 represents the cDNA sequence for clone AI252861.

[9457] SEQ ID NO: 9418 represents the cDNA sequence for clone AI252863.

[9458] SEQ ID NO: 9419 represents the cDNA sequence for clone AI252869.

[9459] SEQ ID NO: 9420 represents the cDNA sequence for clone AI252871.

[9460] SEQ ID NO: 9421 represents the cDNA sequence for clone AI252878.

[9461] SEQ ID NO: 9422 represents the cDNA sequence for clone AI252880.

[9462] SEQ ID NO: 9423 represents the cDNA sequence for clone AI252886.

[9463] SEQ ID NO: 9424 represents the cDNA sequence for clone AI252890.

[9464] SEQ ID NO: 9425 represents the cDNA sequence for clone AI252892.

[9465] SEQ ID NO: 9426 represents the cDNA sequence for clone AI252899.

[9466] SEQ ID NO: 9427 represents the cDNA sequence for clone AI252903.

[9467] SEQ ID NO: 9428 represents the cDNA sequence for clone AI252905.

[9468] SEQ ID NO: 9429 represents the cDNA sequence for clone AI252911.

[9469] SEQ ID NO: 9430 represents the cDNA sequence for clone AI252915.

[9470] SEQ ID NO: 9431 represents the cDNA sequence for clone AI252918.

[9471] SEQ ID NO: 9432 represents the cDNA sequence for clone AI252922.

[9472] SEQ ID NO: 9433 represents the cDNA sequence for clone AI252924.

[9473] SEQ ID NO: 9434 represents the cDNA sequence for clone AI252925.

[9474] SEQ ID NO: 9435 represents the cDNA sequence for clone AI252933.

[9475] SEQ ID NO: 9436 represents the cDNA sequence for clone AI252934.

[9476] SEQ ID NO: 9437 represents the cDNA sequence for clone AI252935.

[9477] SEQ ID NO: 9438 represents the cDNA sequence for clone AI252938.

[9478] SEQ ID NO: 9439 represents the cDNA sequence for clone AI252940.

[9479] SEQ ID NO: 9440 represents the cDNA sequence for clone AI252942.

[9480] SEQ ID NO: 9441 represents the cDNA sequence for clone AI252943.

[9481] SEQ ID NO: 9442 represents the cDNA sequence for clone AI252945.

[9482] SEQ ID NO: 9443 represents the cDNA sequence for clone AI252958.

[9483] SEQ ID NO: 9444 represents the cDNA sequence for clone AI252960.

[9484] SEQ ID NO: 9445 represents the cDNA sequence for clone AI252963.

[9485] SEQ ID NO: 9446 represents the cDNA sequence for clone AI252967.

[9486] SEQ ID NO: 9447 represents the cDNA sequence for clone AI252969.

[9487] SEQ ID NO: 9448 represents the cDNA sequence for clone AI252971.

[9488] SEQ ID NO: 9449 represents the cDNA sequence for clone AI252976.

[9489] SEQ ID NO: 9450 represents the cDNA sequence for clone AI252978.

[9490] SEQ ID NO: 9451 represents the cDNA sequence for clone AI252979.

[9491] SEQ ID NO: 9452 represents the cDNA sequence for clone AI252985.

[9492] SEQ ID NO: 9453 represents the cDNA sequence for clone AI252987.

[9493] SEQ ID NO: 9454 represents the cDNA sequence for clone AI253000.

[9494] SEQ ID NO: 9455 represents the cDNA sequence for clone AI253007.

[9495] SEQ ID NO: 9456 represents the cDNA sequence for clone AI253010.

[9496] SEQ ID NO: 9457 represents the cDNA sequence for clone AI253970.

[9497] SEQ ID NO: 9458 represents the cDNA sequence for clone AI253971.

[9498] SEQ ID NO: 9459 represents the cDNA sequence for clone AI253983.

[9499] SEQ ID NO: 9460 represents the cDNA sequence for clone AI253986.

[9500] SEQ ID NO: 9461 represents the cDNA sequence for clone AI253989.

[9501] SEQ ID NO: 9462 represents the cDNA sequence for clone AI253990.

[9502] SEQ ID NO: 9463 represents the cDNA sequence for clone AI254008.

[9503] SEQ ID NO: 9464 represents the cDNA sequence for clone AI254013.

[9504] SEQ ID NO: 9465 represents the cDNA sequence for clone AI254018.

[9505] SEQ ID NO: 9466 represents the cDNA sequence for clone AI254027.

[9506] SEQ ID NO: 9467 represents the cDNA sequence for clone AI254029.

[9507] SEQ ID NO: 9468 represents the cDNA sequence for clone AI254031.

[9508] SEQ ID NO: 9469 represents the cDNA sequence for clone AI254039.

[9509] SEQ ID NO: 9470 represents the cDNA sequence for clone AI254051.

[9510] SEQ ID NO: 9471 represents the cDNA sequence for clone AI254054.

[9511] SEQ ID NO: 9472 represents the cDNA sequence for clone AI254063.

[9512] SEQ ID NO: 9473 represents the cDNA sequence for clone AI254071.

[9513] SEQ ID NO: 9474 represents the cDNA sequence for clone AI254077.

[9514] SEQ ID NO: 9475 represents the cDNA sequence for clone AI254078.

[9515] SEQ ID NO: 9476 represents the cDNA sequence for clone AI254079.

[9516] SEQ ID NO: 9477 represents the cDNA sequence for clone AI254083.

[9517] SEQ ID NO: 9478 represents the cDNA sequence for clone AI254085.

[9518] SEQ ID NO: 9479 represents the cDNA sequence for clone AI254088.

[9519] SEQ ID NO: 9480 represents the cDNA sequence for clone AI254095.

[9520] SEQ ID NO: 9481 represents the cDNA sequence for clone AI254098.

[9521] SEQ ID NO: 9482 represents the cDNA sequence for clone AI254099.

[9522] SEQ ID NO: 9483 represents the cDNA sequence for clone AI254102.

[9523] SEQ ID NO: 9484 represents the cDNA sequence for clone AI254104.

[9524] SEQ ID NO: 9485 represents the cDNA sequence for clone AI254106.

[9525] SEQ ID NO: 9486 represents the cDNA sequence for clone AI254129.

[9526] SEQ ID NO: 9487 represents the cDNA sequence for clone AI254131.

[9527] SEQ ID NO: 9488 represents the cDNA sequence for clone AI254136.

[9528] SEQ ID NO: 9489 represents the cDNA sequence for clone AI254137.

[9529] SEQ ID NO: 9490 represents the cDNA sequence for clone AI254141.

[9530] SEQ ID NO: 9491 represents the cDNA sequence for clone AI254142.

[9531] SEQ ID NO: 9492 represents the cDNA sequence for clone AI254145.

[9532] SEQ ID NO: 9493 represents the cDNA sequence for clone AI254146.

[9533] SEQ ID NO: 9494 represents the cDNA sequence for clone AI254147.

[9534] SEQ ID NO: 9495 represents the cDNA sequence for clone AI254149.

[9535] SEQ ID NO: 9496 represents the cDNA sequence for clone AI254150.

[9536] SEQ ID NO: 9497 represents the cDNA sequence for clone AI254151.

[9537] SEQ ID NO: 9498 represents the cDNA sequence for clone AI254153.

[9538] SEQ ID NO: 9499 represents the cDNA sequence for clone AI254158.

[9539] SEQ ID NO: 9500 represents the cDNA sequence for clone AI254164.

[9540] SEQ ID NO: 9501 represents the cDNA sequence for clone AI254165.

[9541] SEQ ID NO: 9502 represents the cDNA sequence for clone AI254168.

[9542] SEQ ID NO: 9503 represents the cDNA sequence for clone AI254173.

[9543] SEQ ID NO: 9504 represents the cDNA sequence for clone AI254175.

[9544] SEQ ID NO: 9505 represents the cDNA sequence for clone AI254176.

[9545] SEQ ID NO: 9506 represents the cDNA sequence for clone AI254180.

[9546] SEQ ID NO: 9507 represents the cDNA sequence for clone AI254183.

[9547] SEQ ID NO: 9508 represents the cDNA sequence for clone AI254188.

[9548] SEQ ID NO: 9509 represents the cDNA sequence for clone AI254190.

[9549] SEQ ID NO: 9510 represents the cDNA sequence for clone AI254194.

[9550] SEQ ID NO: 9511 represents the cDNA sequence for clone AI254253.

[9551] SEQ ID NO: 9512 represents the cDNA sequence for clone AI254255.

[9552] SEQ ID NO: 9513 represents the cDNA sequence for clone AI254266.

[9553] SEQ ID NO: 9514 represents the cDNA sequence for clone AI254278.

[9554] SEQ ID NO: 9515 represents the cDNA sequence for clone AI254279.

[9555] SEQ ID NO: 9516 represents the cDNA sequence for clone AI254298.

[9556] SEQ ID NO: 9517 represents the cDNA sequence for clone AI254302.

[9557] SEQ ID NO: 9518 represents the cDNA sequence for clone AI254303.

[9558] SEQ ID NO: 9519 represents the cDNA sequence for clone AI254305.

[9559] SEQ ID NO: 9520 represents the cDNA sequence for clone AI254306.

[9560] SEQ ID NO: 9521 represents the cDNA sequence for clone AI254310.

[9561] SEQ ID NO: 9522 represents the cDNA sequence for clone AI254313.

[9562] SEQ ID NO: 9523 represents the cDNA sequence for clone AI254317.

[9563] SEQ ID NO: 9524 represents the cDNA sequence for clone AI254318.

[9564] SEQ ID NO: 9525 represents the cDNA sequence for clone AI254325.

[9565] SEQ ID NO: 9526 represents the cDNA sequence for clone AI254331.

[9566] SEQ ID NO: 9527 represents the cDNA sequence for clone AI254368.

[9567] SEQ ID NO: 9528 represents the cDNA sequence for clone AI254379.

[9568] SEQ ID NO: 9529 represents the cDNA sequence for clone AI254396.

[9569] SEQ ID NO: 9530 represents the cDNA sequence for clone AI254397.

[9570] SEQ ID NO: 9531 represents the cDNA sequence for clone AI254406.

[9571] SEQ ID NO: 9532 represents the cDNA sequence for clone AI254420.

[9572] SEQ ID NO: 9533 represents the cDNA sequence for clone AI254440.

[9573] SEQ ID NO: 9534 represents the cDNA sequence for clone AI254446.

[9574] SEQ ID NO: 9535 represents the cDNA sequence for clone AI254450.

[9575] SEQ ID NO: 9536 represents the cDNA sequence for clone AI254451.

[9576] SEQ ID NO: 9537 represents the cDNA sequence for clone AI254452.

[9577] SEQ ID NO: 9538 represents the cDNA sequence for clone AI254455.

[9578] SEQ ID NO: 9539 represents the cDNA sequence for clone AI254460.

[9579] SEQ ID NO: 9540 represents the cDNA sequence for clone AI254462.

[9580] SEQ ID NO: 9541 represents the cDNA sequence for clone AI254471.

[9581] SEQ ID NO: 9542 represents the cDNA sequence for clone AI254472.

[9582] SEQ ID NO: 9543 represents the cDNA sequence for clone AI254473.

[9583] SEQ ID NO: 9544 represents the cDNA sequence for clone AI254474.

[9584] SEQ ID NO: 9545 represents the cDNA sequence for clone AI254480.

[9585] SEQ ID NO: 9546 represents the cDNA sequence for clone AI254485.

[9586] SEQ ID NO: 9547 represents the cDNA sequence for clone AI254490.

[9587] SEQ ID NO: 9548 represents the cDNA sequence for clone AI254493.

[9588] SEQ ID NO: 9549 represents the cDNA sequence for clone AI254507.

[9589] SEQ ID NO: 9550 represents the cDNA sequence for clone AI254509.

[9590] SEQ ID NO: 9551 represents the cDNA sequence for clone AI254510.

[9591] SEQ ID NO: 9552 represents the cDNA sequence for clone AI254511.

[9592] SEQ ID NO: 9553 represents the cDNA sequence for clone AI254513.

[9593] SEQ ID NO: 9554 represents the cDNA sequence for clone AI254514.

[9594] SEQ ID NO: 9555 represents the cDNA sequence for clone AI254520.

[9595] SEQ ID NO: 9556 represents the cDNA sequence for clone AI254521.

[9596] SEQ ID NO: 9557 represents the cDNA sequence for clone AI254524.

[9597] SEQ ID NO: 9558 represents the cDNA sequence for clone AI254526.

[9598] SEQ ID NO: 9559 represents the cDNA sequence for clone AI254527.

[9599] SEQ ID NO: 9560 represents the cDNA sequence for clone AI254528.

[9600] SEQ ID NO: 9561 represents the cDNA sequence for clone AI254529.

[9601] SEQ ID NO: 9562 represents the cDNA sequence for clone AI254532.

[9602] SEQ ID NO: 9563 represents the cDNA sequence for clone AI254543.

[9603] SEQ ID NO: 9564 represents the cDNA sequence for clone AI254547.

[9604] SEQ ID NO: 9565 represents the cDNA sequence for clone AI254550.

[9605] SEQ ID NO: 9566 represents the cDNA sequence for clone AI254553.

[9606] SEQ ID NO: 9567 represents the cDNA sequence for clone AI254561.

[9607] SEQ ID NO: 9568 represents the cDNA sequence for clone AI254565.

[9608] SEQ ID NO: 9569 represents the cDNA sequence for clone AI254567.

[9609] SEQ ID NO: 9570 represents the cDNA sequence for clone AI254569.

[9610] SEQ ID NO: 9571 represents the cDNA sequence for clone AI254573.

[9611] SEQ ID NO: 9572 represents the cDNA sequence for clone AI254582.

[9612] SEQ ID NO: 9573 represents the cDNA sequence for clone AI254586.

[9613] SEQ ID NO: 9574 represents the cDNA sequence for clone AI254588.

[9614] SEQ ID NO: 9575 represents the cDNA sequence for clone AI254589.

[9615] SEQ ID NO: 9576 represents the cDNA sequence for clone AI254597.

[9616] SEQ ID NO: 9577 represents the cDNA sequence for clone AI254602.

[9617] SEQ ID NO: 9578 represents the cDNA sequence for clone AI254609.

[9618] SEQ ID NO: 9579 represents the cDNA sequence for clone AI254618.

[9619] SEQ ID NO: 9580 represents the cDNA sequence for clone AI254622.

[9620] SEQ ID NO: 9581 represents the cDNA sequence for clone AI254625.

[9621] SEQ ID NO: 9582 represents the cDNA sequence for clone AI254626.

[9622] SEQ ID NO: 9583 represents the cDNA sequence for clone AI254627.

[9623] SEQ ID NO: 9584 represents the cDNA sequence for clone AI254633.

[9624] SEQ ID NO: 9585 represents the cDNA sequence for clone AI254640.

[9625] SEQ ID NO: 9586 represents the cDNA sequence for clone AI254644.

[9626] SEQ ID NO: 9587 represents the cDNA sequence for clone AI254651.

[9627] SEQ ID NO: 9588 represents the cDNA sequence for clone AI254657.

[9628] SEQ ID NO: 9589 represents the cDNA sequence for clone AI254658.

[9629] SEQ ID NO: 9590 represents the cDNA sequence for clone AI254660.

[9630] SEQ ID NO: 9591 represents the cDNA sequence for clone AI254669.

[9631] SEQ ID NO: 9592 represents the cDNA sequence for clone AI254673.

[9632] SEQ ID NO: 9593 represents the cDNA sequence for clone AI254674.

[9633] SEQ ID NO: 9594 represents the cDNA sequence for clone AI254676.

[9634] SEQ ID NO: 9595 represents the cDNA sequence for clone AI254682.

[9635] SEQ ID NO: 9596 represents the cDNA sequence for clone AI254684.

[9636] SEQ ID NO: 9597 represents the cDNA sequence for clone AI254692.

[9637] SEQ ID NO: 9598 represents the cDNA sequence for clone AI254694.

[9638] SEQ ID NO: 9599 represents the cDNA sequence for clone AI254696.

[9639] SEQ ID NO: 9600 represents the cDNA sequence for clone AI254763.

[9640] SEQ ID NO: 9601 represents the cDNA sequence for clone AI254765.

[9641] SEQ ID NO: 9602 represents the cDNA sequence for clone AI254767.

[9642] SEQ ID NO: 9603 represents the cDNA sequence for clone AI254775.

[9643] SEQ ID NO: 9604 represents the cDNA sequence for clone AI254777.

[9644] SEQ ID NO: 9605 represents the cDNA sequence for clone AI254781.

[9645] SEQ ID NO: 9606 represents the cDNA sequence for clone AI254786.

[9646] SEQ ID NO: 9607 represents the cDNA sequence for clone AI254787.

[9647] SEQ ID NO: 9608 represents the cDNA sequence for clone AI254791.

[9648] SEQ ID NO: 9609 represents the cDNA sequence for clone AI254793.

[9649] SEQ ID NO: 9610 represents the cDNA sequence for clone AI254798.

[9650] SEQ ID NO: 9611 represents the cDNA sequence for clone AI254810.

[9651] SEQ ID NO: 9612 represents the cDNA sequence for clone AI254812.

[9652] SEQ ID NO: 9613 represents the cDNA sequence for clone AI254813.

[9653] SEQ ID NO: 9614 represents the cDNA sequence for clone AI254817.

[9654] SEQ ID NO: 9615 represents the cDNA sequence for clone AI254819.

[9655] SEQ ID NO: 9616 represents the cDNA sequence for clone AI254822.

[9656] SEQ ID NO: 9617 represents the cDNA sequence for clone AI254831.

[9657] SEQ ID NO: 9618 represents the cDNA sequence for clone AI254846.

[9658] SEQ ID NO: 9619 represents the cDNA sequence for clone AI254849.

[9659] SEQ ID NO: 9620 represents the cDNA sequence for clone AI254866.

[9660] SEQ ID NO: 9621 represents the cDNA sequence for clone AI254871.

[9661] SEQ ID NO: 9622 represents the cDNA sequence for clone AI254872.

[9662] SEQ ID NO: 9623 represents the cDNA sequence for clone AI254873.

[9663] SEQ ID NO: 9624 represents the cDNA sequence for clone AI254897.

[9664] SEQ ID NO: 9625 represents the cDNA sequence for clone AI254898.

[9665] SEQ ID NO: 9626 represents the cDNA sequence for clone AI254906.

[9666] SEQ ID NO: 9627 represents the cDNA sequence for clone AI254907.

[9667] SEQ ID NO: 9628 represents the cDNA sequence for clone AI254909.

[9668] SEQ ID NO: 9629 represents the cDNA sequence for clone AI254910.

[9669] SEQ ID NO: 9630 represents the cDNA sequence for clone AI254913.

[9670] SEQ ID NO: 9631 represents the cDNA sequence for clone AI254914.

[9671] SEQ ID NO: 9632 represents the cDNA sequence for clone AI254916.

[9672] SEQ ID NO: 9633 represents the cDNA sequence for clone AI254921.

[9673] SEQ ID NO: 9634 represents the cDNA sequence for clone AI254926.

[9674] SEQ ID NO: 9635 represents the cDNA sequence for clone AI254927.

[9675] SEQ ID NO: 9636 represents the cDNA sequence for clone AI254928.

[9676] SEQ ID NO: 9637 represents the cDNA sequence for clone AI254929.

[9677] SEQ ID NO: 9638 represents the cDNA sequence for clone AI254935.

[9678] SEQ ID NO: 9639 represents the cDNA sequence for clone AI254937.

[9679] SEQ ID NO: 9640 represents the cDNA sequence for clone AI254938.

[9680] SEQ ID NO: 9641 represents the cDNA sequence for clone AI254939.

[9681] SEQ ID NO: 9642 represents the cDNA sequence for clone AI254941.

[9682] SEQ ID NO: 9643 represents the cDNA sequence for clone AI254943.

[9683] SEQ ID NO: 9644 represents the cDNA sequence for clone AI254952.

[9684] SEQ ID NO: 9645 represents the cDNA sequence for clone AI254953.

[9685] SEQ ID NO: 9646 represents the cDNA sequence for clone AI254955.

[9686] SEQ ID NO: 9647 represents the cDNA sequence for clone AI254958.

[9687] SEQ ID NO: 9648 represents the cDNA sequence for clone AI254963.

[9688] SEQ ID NO: 9649 represents the cDNA sequence for clone AI254969.

[9689] SEQ ID NO: 9650 represents the cDNA sequence for clone AI254973.

[9690] SEQ ID NO: 9651 represents the cDNA sequence for clone AI254975.

[9691] SEQ ID NO: 9652 represents the cDNA sequence for clone AI254976.

[9692] SEQ ID NO: 9653 represents the cDNA sequence for clone AI254978.

[9693] SEQ ID NO: 9654 represents the cDNA sequence for clone AI254982.

[9694] SEQ ID NO: 9655 represents the cDNA sequence for clone AI254986.

[9695] SEQ ID NO: 9656 represents the cDNA sequence for clone AI254989.

[9696] SEQ ID NO: 9657 represents the cDNA sequence for clone AI254999.

[9697] SEQ ID NO: 9658 represents the cDNA sequence for clone AI255003.

[9698] SEQ ID NO: 9659 represents the cDNA sequence for clone AI255005.

[9699] SEQ ID NO: 9660 represents the cDNA sequence for clone AI255012.

[9700] SEQ ID NO: 9661 represents the cDNA sequence for clone AI255019.

[9701] SEQ ID NO: 9662 represents the cDNA sequence for clone AI255023.

[9702] SEQ ID NO: 9663 represents the cDNA sequence for clone AI255029.

[9703] SEQ ID NO: 9664 represents the cDNA sequence for clone AI255034.

[9704] SEQ ID NO: 9665 represents the cDNA sequence for clone AI255037.

[9705] SEQ ID NO: 9666 represents the cDNA sequence for clone AI255049.

[9706] SEQ ID NO: 9667 represents the cDNA sequence for clone AI255050.

[9707] SEQ ID NO: 9668 represents the cDNA sequence for clone AI255053.

[9708] SEQ ID NO: 9669 represents the cDNA sequence for clone AI255058.

[9709] SEQ ID NO: 9670 represents the cDNA sequence for clone AI255059.

[9710] SEQ ID NO: 9671 represents the cDNA sequence for clone AI255062.

[9711] SEQ ID NO: 9672 represents the cDNA sequence for clone AI255064.

[9712] SEQ ID NO: 9673 represents the cDNA sequence for clone AI255074.

[9713] SEQ ID NO: 9674 represents the cDNA sequence for clone AI255076.

[9714] SEQ ID NO: 9675 represents the cDNA sequence for clone AI255078.

[9715] SEQ ID NO: 9676 represents the cDNA sequence for clone AI255080.

[9716] SEQ ID NO: 9677 represents the cDNA sequence for clone AI255082.

[9717] SEQ ID NO: 9678 represents the cDNA sequence for clone AI255085.

[9718] SEQ ID NO: 9679 represents the cDNA sequence for clone AI255089.

[9719] SEQ ID NO: 9680 represents the cDNA sequence for clone AI255090.

[9720] SEQ ID NO: 9681 represents the cDNA sequence for clone AI255095.

[9721] SEQ ID NO: 9682 represents the cDNA sequence for clone AI255101.

[9722] SEQ ID NO: 9683 represents the cDNA sequence for clone AI255107.

[9723] SEQ ID NO: 9684 represents the cDNA sequence for clone AI255108.

[9724] SEQ ID NO: 9685 represents the cDNA sequence for clone AI255115.

[9725] SEQ ID NO: 9686 represents the cDNA sequence for clone AI255120.

[9726] SEQ ID NO: 9687 represents the cDNA sequence for clone AI255122.

[9727] SEQ ID NO: 9688 represents the cDNA sequence for clone AI255127.

[9728] SEQ ID NO: 9689 represents the cDNA sequence for clone AI255133.

[9729] SEQ ID NO: 9690 represents the cDNA sequence for clone AI255143.

[9730] SEQ ID NO: 9691 represents the cDNA sequence for clone AI255145.

[9731] SEQ ID NO: 9692 represents the cDNA sequence for clone AI263659.

[9732] SEQ ID NO: 9693 represents the cDNA sequence for clone AI263665.

[9733] SEQ ID NO: 9694 represents the cDNA sequence for clone AI263669.

[9734] SEQ ID NO: 9695 represents the cDNA sequence for clone AI263673.

[9735] SEQ ID NO: 9696 represents the cDNA sequence for clone AI263674.

[9736] SEQ ID NO: 9697 represents the cDNA sequence for clone AI263687.

[9737] SEQ ID NO: 9698 represents the cDNA sequence for clone AI264833.

[9738] SEQ ID NO: 9699 represents the cDNA sequence for clone AI264835.

[9739] SEQ ID NO: 9700 represents the cDNA sequence for clone AI264845.

[9740] SEQ ID NO: 9701 represents the cDNA sequence for clone AI264852.

[9741] SEQ ID NO: 9702 represents the cDNA sequence for clone AI264856.

[9742] SEQ ID NO: 9703 represents the cDNA sequence for clone AI264935.

[9743] SEQ ID NO: 9704 represents the cDNA sequence for clone AI264941.

[9744] SEQ ID NO: 9705 represents the cDNA sequence for clone AI264951.

[9745] SEQ ID NO: 9706 represents the cDNA sequence for clone AI264966.

[9746] SEQ ID NO: 9707 represents the cDNA sequence for clone AI265778.

[9747] SEQ ID NO: 9708 represents the cDNA sequence for clone AI265784.

[9748] SEQ ID NO: 9709 represents the cDNA sequence for clone AI265791.

[9749] SEQ ID NO: 9710 represents the cDNA sequence for clone AI265799.

[9750] SEQ ID NO: 9711 represents the cDNA sequence for clone AI265818.

[9751] SEQ ID NO: 9712 represents the cDNA sequence for clone AI265819.

[9752] SEQ ID NO: 9713 represents the cDNA sequence for clone AI265821.

[9753] SEQ ID NO: 9714 represents the cDNA sequence for clone AI265803.

[9754] SEQ ID NO: 9715 represents the cDNA sequence for clone AI265824.

[9755] SEQ ID NO: 9716 represents the cDNA sequence for clone AI265902.

[9756] SEQ ID NO: 9717 represents the cDNA sequence for clone AI265904.

[9757] SEQ ID NO: 9718 represents the cDNA sequence for clone AI265908.

[9758] SEQ ID NO: 9719 represents the cDNA sequence for clone AI265909.

[9759] SEQ ID NO: 9720 represents the cDNA sequence for clone AI265914.

[9760] SEQ ID NO: 9721 represents the cDNA sequence for clone AI266250.

[9761] SEQ ID NO: 9722 represents the cDNA sequence for clone AI266254.

[9762] SEQ ID NO: 9723 represents the cDNA sequence for clone AI266255.

[9763] SEQ ID NO: 9724 represents the cDNA sequence for clone AI266271.

[9764] SEQ ID NO: 9725 represents the cDNA sequence for clone AI266275.

[9765] SEQ ID NO: 9726 represents the cDNA sequence for clone AI266280.

[9766] SEQ ID NO: 9727 represents the cDNA sequence for clone AI266282.

[9767] SEQ ID NO: 9728 represents the cDNA sequence for clone AI270142.

[9768] SEQ ID NO: 9729 represents the cDNA sequence for clone AI270143.

[9769] SEQ ID NO: 9730 represents the cDNA sequence for clone AI270144.

[9770] SEQ ID NO: 9731 represents the cDNA sequence for clone AI270147.

[9771] SEQ ID NO: 9732 represents the cDNA sequence for clone AI270149.

[9772] SEQ ID NO: 9733 represents the cDNA sequence for clone AI270160.

[9773] SEQ ID NO: 9734 represents the cDNA sequence for clone AI270163.

[9774] SEQ ID NO: 9735 represents the cDNA sequence for clone AI270747.

[9775] SEQ ID NO: 9736 represents the cDNA sequence for clone AI270754.

[9776] SEQ ID NO: 9737 represents the cDNA sequence for clone AI270755.

[9777] SEQ ID NO: 9738 represents the cDNA sequence for clone AI270758.

[9778] SEQ ID NO: 9739 represents the cDNA sequence for clone AI270759.

[9779] SEQ ID NO: 9740 represents the cDNA sequence for clone AI270760.

[9780] SEQ ID NO: 9741 represents the cDNA sequence for clone AI270768.

[9781] SEQ ID NO: 9742 represents the cDNA sequence for clone AI270779.

[9782] SEQ ID NO: 9743 represents the cDNA sequence for clone AI270784.

[9783] SEQ ID NO: 9744 represents the cDNA sequence for clone AI270849.

[9784] SEQ ID NO: 9745 represents the cDNA sequence for clone AI270864.

[9785] SEQ ID NO: 9746 represents the cDNA sequence for clone AI270877.

[9786] SEQ ID NO: 9747 represents the cDNA sequence for clone AI270878.

[9787] SEQ ID NO: 9748 represents the cDNA sequence for clone AI270891.

[9788] SEQ ID NO: 9749 represents the cDNA sequence for clone AI270892.

[9789] SEQ ID NO: 9750 represents the cDNA sequence for clone AI270899.

[9790] SEQ ID NO: 9751 represents the cDNA sequence for clone AI270906.

[9791] SEQ ID NO: 9752 represents the cDNA sequence for clone AI271007.

[9792] SEQ ID NO: 9753 represents the cDNA sequence for clone AI271016.

[9793] SEQ ID NO: 9754 represents the cDNA sequence for clone AI271079.

[9794] SEQ ID NO: 9755 represents the cDNA sequence for clone AI271096.

[9795] SEQ ID NO: 9756 represents the cDNA sequence for clone AI271118.

[9796] SEQ ID NO: 9757 represents the cDNA sequence for clone AI271124.

[9797] SEQ ID NO: 9758 represents the cDNA sequence for clone AI271164.

[9798] SEQ ID NO: 9759 represents the cDNA sequence for clone AI271175.

[9799] SEQ ID NO: 9760 represents the cDNA sequence for clone AI271176.

[9800] SEQ ID NO: 9761 represents the cDNA sequence for clone AI271203.

[9801] SEQ ID NO: 9762 represents the cDNA sequence for clone AI271300.

[9802] SEQ ID NO: 9763 represents the cDNA sequence for clone AI271313.

[9803] SEQ ID NO: 9764 represents the cDNA sequence for clone AI273774.

[9804] SEQ ID NO: 9765 represents the cDNA sequence for clone AI273776.

[9805] SEQ ID NO: 9766 represents the cDNA sequence for clone AI273786.

[9806] SEQ ID NO: 9767 represents the cDNA sequence for clone AI273793.

[9807] SEQ ID NO: 9768 represents the cDNA sequence for clone AI273795.

[9808] SEQ ID NO: 9769 represents the cDNA sequence for clone AI273800.

[9809] SEQ ID NO: 9770 represents the cDNA sequence for clone AI273805.

[9810] SEQ ID NO: 9771 represents the cDNA sequence for clone AI273810.

[9811] SEQ ID NO: 9772 represents the cDNA sequence for clone AI273812.

[9812] SEQ ID NO: 9773 represents the cDNA sequence for clone AI273821.

[9813] SEQ ID NO: 9774 represents the cDNA sequence for clone AI273830.

[9814] SEQ ID NO: 9775 represents the cDNA sequence for clone AI273834.

[9815] SEQ ID NO: 9776 represents the cDNA sequence for clone AI273835.

[9816] SEQ ID NO: 9777 represents the cDNA sequence for clone AI273840.

[9817] SEQ ID NO: 9778 represents the cDNA sequence for clone AI273842.

[9818] SEQ ID NO: 9779 represents the cDNA sequence for clone AI273858.

[9819] SEQ ID NO: 9780 represents the cDNA sequence for clone AI273862.

[9820] SEQ ID NO: 9781 represents the cDNA sequence for clone AI273875.

[9821] SEQ ID NO: 9782 represents the cDNA sequence for clone AI273878.

[9822] SEQ ID NO: 9783 represents the cDNA sequence for clone AI273880.

[9823] SEQ ID NO: 9784 represents the cDNA sequence for clone AI273889.

[9824] SEQ ID NO: 9785 represents the cDNA sequence for clone AI273890.

[9825] SEQ ID NO: 9786 represents the cDNA sequence for clone AI273897.

[9826] SEQ ID NO: 9787 represents the cDNA sequence for clone AI273899.

[9827] SEQ ID NO: 9788 represents the cDNA sequence for clone AI275340.

[9828] SEQ ID NO: 9789 represents the cDNA sequence for clone AI275349.

[9829] SEQ ID NO: 9790 represents the cDNA sequence for clone AI275357.

[9830] SEQ ID NO: 9791 represents the cDNA sequence for clone AI275361.

[9831] SEQ ID NO: 9792 represents the cDNA sequence for clone AI279381.

[9832] SEQ ID NO: 9793 represents the cDNA sequence for clone AI279382.

[9833] SEQ ID NO: 9794 represents the cDNA sequence for clone AI279387.

[9834] SEQ ID NO: 9795 represents the cDNA sequence for clone AI279388.

[9835] SEQ ID NO: 9796 represents the cDNA sequence for clone AI279389.

[9836] SEQ ID NO: 9797 represents the cDNA sequence for clone AI279390.

[9837] SEQ ID NO: 9798 represents the cDNA sequence for clone AI279392.

[9838] SEQ ID NO: 9799 represents the cDNA sequence for clone AI279399.

[9839] SEQ ID NO: 9800 represents the cDNA sequence for clone AI279404.

[9840] SEQ ID NO: 9801 represents the cDNA sequence for clone AI279405.

[9841] SEQ ID NO: 9802 represents the cDNA sequence for clone AI279408.

[9842] SEQ ID NO: 9803 represents the cDNA sequence for clone AI280487.

[9843] SEQ ID NO: 9804 represents the cDNA sequence for clone AI280489.

[9844] SEQ ID NO: 9805 represents the cDNA sequence for clone AI280491.

[9845] SEQ ID NO: 9806 represents the cDNA sequence for clone AI280493.

[9846] SEQ ID NO: 9807 represents the cDNA sequence for clone AI280508.

[9847] SEQ ID NO: 9808 represents the cDNA sequence for clone AI280509.

[9848] SEQ ID NO: 9809 represents the cDNA sequence for clone AI280511.

[9849] SEQ ID NO: 9810 represents the cDNA sequence for clone AI280512.

[9850] SEQ ID NO: 9811 represents the cDNA sequence for clone AI280522.

[9851] SEQ ID NO: 9812 represents the cDNA sequence for clone AI280524.

[9852] SEQ ID NO: 9813 represents the cDNA sequence for clone AI280528.

[9853] SEQ ID NO: 9814 represents the cDNA sequence for clone AI280530.

[9854] SEQ ID NO: 9815 represents the cDNA sequence for clone AI280533.

[9855] SEQ ID NO: 9816 represents the cDNA sequence for clone AI280534.

[9856] SEQ ID NO: 9817 represents the cDNA sequence for clone AI280535.

[9857] SEQ ID NO: 9818 represents the cDNA sequence for clone AI280544.

[9858] SEQ ID NO: 9819 represents the cDNA sequence for clone AI280566.

[9859] SEQ ID NO: 9820 represents the cDNA sequence for clone AI280567.

[9860] SEQ ID NO: 9821 represents the cDNA sequence for clone AI280571.

[9861] SEQ ID NO: 9822 represents the cDNA sequence for clone AI280608.

[9862] SEQ ID NO: 9823 represents the cDNA sequence for clone AI280612.

[9863] SEQ ID NO: 9824 represents the cDNA sequence for clone AI280614.

[9864] SEQ ID NO: 9825 represents the cDNA sequence for clone AI280620.

[9865] SEQ ID NO: 9826 represents the cDNA sequence for clone AI280622.

[9866] SEQ ID NO: 9827 represents the cDNA sequence for clone AI280624.

[9867] SEQ ID NO: 9828 represents the cDNA sequence for clone AI280626.

[9868] SEQ ID NO: 9829 represents the cDNA sequence for clone AI280628.

[9869] SEQ ID NO: 9830 represents the cDNA sequence for clone AI280630.

[9870] SEQ ID NO: 9831 represents the cDNA sequence for clone AI280634.

[9871] SEQ ID NO: 9832 represents the cDNA sequence for clone AI280639.

[9872] SEQ ID NO: 9833 represents the cDNA sequence for clone AI280641.

[9873] SEQ ID NO: 9834 represents the cDNA sequence for clone AI280646.

[9874] SEQ ID NO: 9835 represents the cDNA sequence for clone AI280649.

[9875] SEQ ID NO: 9836 represents the cDNA sequence for clone AI280656.

[9876] SEQ ID NO: 9837 represents the cDNA sequence for clone AI280668.

[9877] SEQ ID NO: 9838 represents the cDNA sequence for clone AI280674.

[9878] SEQ ID NO: 9839 represents the cDNA sequence for clone AI280675.

[9879] SEQ ID NO: 9840 represents the cDNA sequence for clone AI283279.

[9880] SEQ ID NO: 9841 represents the cDNA sequence for clone AI283286.

[9881] SEQ ID NO: 9842 represents the cDNA sequence for clone AI283289.

[9882] SEQ ID NO: 9843 represents the cDNA sequence for clone AI283290.

[9883] SEQ ID NO: 9844 represents the cDNA sequence for clone AI283295.

[9884] SEQ ID NO: 9845 represents the cDNA sequence for clone AI283300.

[9885] SEQ ID NO: 9846 represents the cDNA sequence for clone AI283302.

[9886] SEQ ID NO: 9847 represents the cDNA sequence for clone AI283303.

[9887] SEQ ID NO: 9848 represents the cDNA sequence for clone AI283304.

[9888] SEQ ID NO: 9849 represents the cDNA sequence for clone AI283308.

[9889] SEQ ID NO: 9850 represents the cDNA sequence for clone AI283310.

[9890] SEQ ID NO: 9851 represents the cDNA sequence for clone AI283312.

[9891] SEQ ID NO: 9852 represents the cDNA sequence for clone AI283317.

[9892] SEQ ID NO: 9853 represents the cDNA sequence for clone AI283319.

[9893] SEQ ID NO: 9854 represents the cDNA sequence for clone AI283322.

[9894] SEQ ID NO: 9855 represents the cDNA sequence for clone AI283324.

[9895] SEQ ID NO: 9856 represents the cDNA sequence for clone AI283328.

[9896] SEQ ID NO: 9857 represents the cDNA sequence for clone AI283330.

[9897] SEQ ID NO: 9858 represents the cDNA sequence for clone AI283331.

[9898] SEQ ID NO: 9859 represents the cDNA sequence for clone AI283332.

[9899] SEQ ID NO: 9860 represents the cDNA sequence for clone AI283335.

[9900] SEQ ID NO: 9861 represents the cDNA sequence for clone AI283336.

[9901] SEQ ID NO: 9862 represents the cDNA sequence for clone AI283352.

[9902] SEQ ID NO: 9863 represents the cDNA sequence for clone AI283353.

[9903] SEQ ID NO: 9864 represents the cDNA sequence for clone AI283365.

[9904] SEQ ID NO: 9865 represents the cDNA sequence for clone AI283370.

[9905] SEQ ID NO: 9866 represents the cDNA sequence for clone AI283374.

[9906] SEQ ID NO: 9867 represents the cDNA sequence for clone AI284589.

[9907] SEQ ID NO: 9868 represents the cDNA sequence for clone AI284599.

[9908] SEQ ID NO: 9869 represents the cDNA sequence for clone AI284647.

[9909] SEQ ID NO: 9870 represents the cDNA sequence for clone AI284654.

[9910] SEQ ID NO: 9871 represents the cDNA sequence for clone AI284660.

[9911] SEQ ID NO: 9872 represents the cDNA sequence for clone AI284670.

[9912] SEQ ID NO: 9873 represents the cDNA sequence for clone AI284713.

[9913] SEQ ID NO: 9874 represents the cDNA sequence for clone AI284718.

[9914] SEQ ID NO: 9875 represents the cDNA sequence for clone AI284724.

[9915] SEQ ID NO: 9876 represents the cDNA sequence for clone AI284727.

[9916] SEQ ID NO: 9877 represents the cDNA sequence for clone AI284731.

[9917] SEQ ID NO: 9878 represents the cDNA sequence for clone AI284776.

[9918] SEQ ID NO: 9879 represents the cDNA sequence for clone AI284786.

[9919] SEQ ID NO: 9880 represents the cDNA sequence for clone AI284790.

[9920] SEQ ID NO: 9881 represents the cDNA sequence for clone AI284793.

[9921] SEQ ID NO: 9882 represents the cDNA sequence for clone AI284801.

[9922] SEQ ID NO: 9883 represents the cDNA sequence for clone AI284847.

[9923] SEQ ID NO: 9884 represents the cDNA sequence for clone AI284849.

[9924] SEQ ID NO: 9885 represents the cDNA sequence for clone AI284850.

[9925] SEQ ID NO: 9886 represents the cDNA sequence for clone AI284861.

[9926] SEQ ID NO: 9887 represents the cDNA sequence for clone AI284862.

[9927] SEQ ID NO: 9888 represents the cDNA sequence for clone AI284866.

[9928] SEQ ID NO: 9889 represents the cDNA sequence for clone AI284869.

[9929] SEQ ID NO: 9890 represents the cDNA sequence for clone AI284870.

[9930] SEQ ID NO: 9891 represents the cDNA sequence for clone AI284874.

[9931] SEQ ID NO: 9892 represents the cDNA sequence for clone AI287698.

[9932] SEQ ID NO: 9893 represents the cDNA sequence for clone AI287702.

[9933] SEQ ID NO: 9894 represents the cDNA sequence for clone AI287703.

[9934] SEQ ID NO: 9895 represents the cDNA sequence for clone AI287705.

[9935] SEQ ID NO: 9896 represents the cDNA sequence for clone AI287717.

[9936] SEQ ID NO: 9897 represents the cDNA sequence for clone AI287725.

[9937] SEQ ID NO: 9898 represents the cDNA sequence for clone AI287897.

[9938] SEQ ID NO: 9899 represents the cDNA sequence for clone AI287898.

[9939] SEQ ID NO: 9900 represents the cDNA sequence for clone AI287907.

[9940] SEQ ID NO: 9901 represents the cDNA sequence for clone AI287911.

[9941] SEQ ID NO: 9902 represents the cDNA sequence for clone AI287912.

[9942] SEQ ID NO: 9903 represents the cDNA sequence for clone AI287917.

[9943] SEQ ID NO: 9904 represents the cDNA sequence for clone AI287920.

[9944] SEQ ID NO: 9905 represents the cDNA sequence for clone AI287921.

[9945] SEQ ID NO: 9906 represents the cDNA sequence for clone AI305913.

[9946] SEQ ID NO: 9907 represents the cDNA sequence for clone AI305996.

[9947] SEQ ID NO: 9908 represents the cDNA sequence for clone AI306003.

[9948] SEQ ID NO: 9909 represents the cDNA sequence for clone AI306018.

[9949] SEQ ID NO: 9910 represents the cDNA sequence for clone AI306022.

[9950] SEQ ID NO: 9911 represents the cDNA sequence for clone AI306211.

[9951] SEQ ID NO: 9912 represents the cDNA sequence for clone AI306310.

[9952] SEQ ID NO: 9913 represents the cDNA sequence for clone AI306323.

[9953] SEQ ID NO: 9914 represents the cDNA sequence for clone AI306325.

[9954] SEQ ID NO: 9915 represents the cDNA sequence for clone AI306331.

[9955] SEQ ID NO: 9916 represents the cDNA sequence for clone AI306966.

[9956] SEQ ID NO: 9917 represents the cDNA sequence for clone AI306979.

[9957] SEQ ID NO: 9918 represents the cDNA sequence for clone AI306990.

[9958] SEQ ID NO: 9919 represents the cDNA sequence for clone AI307037.

[9959] SEQ ID NO: 9920 represents the cDNA sequence for clone AI307084.

[9960] SEQ ID NO: 9921 represents the cDNA sequence for clone AI307086.

[9961] SEQ ID NO: 9922 represents the cDNA sequence for clone AI307094.

[9962] SEQ ID NO: 9923 represents the cDNA sequence for clone AI305310.

[9963] SEQ ID NO: 9924 represents the cDNA sequence for clone AI305393.

[9964] SEQ ID NO: 9925 represents the cDNA sequence for clone AI305502.

[9965] SEQ ID NO: 9926 represents the cDNA sequence for clone AI305507.

[9966] SEQ ID NO: 9927 represents the cDNA sequence for clone AI305509.

[9967] SEQ ID NO: 9928 represents the cDNA sequence for clone AI305623.

[9968] SEQ ID NO: 9929 represents the cDNA sequence for clone AI305644.

[9969] SEQ ID NO: 9930 represents the cDNA sequence for clone AI305766.

[9970] SEQ ID NO: 9931 represents the cDNA sequence for clone AI307407.

[9971] SEQ ID NO: 9932 represents the cDNA sequence for clone AI307410.

[9972] SEQ ID NO: 9933 represents the cDNA sequence for clone AI307416.

[9973] SEQ ID NO: 9934 represents the cDNA sequence for clone AI307421.

[9974] SEQ ID NO: 9935 represents the cDNA sequence for clone AI307424.

[9975] SEQ ID NO: 9936 represents the cDNA sequence for clone AI307426.

[9976] SEQ ID NO: 9937 represents the cDNA sequence for clone AI307430.

[9977] SEQ ID NO: 9938 represents the cDNA sequence for clone AI307433.

[9978] SEQ ID NO: 9939 represents the cDNA sequence for clone AI307602.

[9979] SEQ ID NO: 9940 represents the cDNA sequence for clone AI308002.

[9980] SEQ ID NO: 9941 represents the cDNA sequence for clone AI308006.

[9981] SEQ ID NO: 9942 represents the cDNA sequence for clone AI308015.

[9982] SEQ ID NO: 9943 represents the cDNA sequence for clone AI308041.

[9983] SEQ ID NO: 9944 represents the cDNA sequence for clone AI318117.

[9984] SEQ ID NO: 9945 represents the cDNA sequence for clone AI318121.

[9985] SEQ ID NO: 9946 represents the cDNA sequence for clone AI318142.

[9986] SEQ ID NO: 9947 represents the cDNA sequence for clone AI318162.

[9987] SEQ ID NO: 9948 represents the cDNA sequence for clone AI318167.

[9988] SEQ ID NO: 9949 represents the cDNA sequence for clone AI318168.

[9989] SEQ ID NO: 9950 represents the cDNA sequence for clone AI318173.

[9990] SEQ ID NO: 9951 represents the cDNA sequence for clone AI318174.

[9991] SEQ ID NO: 9952 represents the cDNA sequence for clone AI318176.

[9992] SEQ ID NO: 9953 represents the cDNA sequence for clone AI318183.

[9993] SEQ ID NO: 9954 represents the cDNA sequence for clone AI318250.

[9994] SEQ ID NO: 9955 represents the cDNA sequence for clone AI318251.

[9995] SEQ ID NO: 9956 represents the cDNA sequence for clone AI318253.

[9996] SEQ ID NO: 9957 represents the cDNA sequence for clone AI318255.

[9997] SEQ ID NO: 9958 represents the cDNA sequence for clone AI318282.

[9998] SEQ ID NO: 9959 represents the cDNA sequence for clone AI318285.

[9999] SEQ ID NO: 9960 represents the cDNA sequence for clone AI318286.

[10000] SEQ ID NO: 9961 represents the cDNA sequence for clone AI318288.

[10001] SEQ ID NO: 9962 represents the cDNA sequence for clone AI318289.

[10002] SEQ ID NO: 9963 represents the cDNA sequence for clone AI318291.

[10003] SEQ ID NO: 9964 represents the cDNA sequence for clone AI318294.

[10004] SEQ ID NO: 9965 represents the cDNA sequence for clone AI318304.

[10005] SEQ ID NO: 9966 represents the cDNA sequence for clone AI318308.

[10006] SEQ ID NO: 9967 represents the cDNA sequence for clone AI318549.

[10007] SEQ ID NO: 9968 represents the cDNA sequence for clone AI318551.

[10008] SEQ ID NO: 9969 represents the cDNA sequence for clone AI318570.

[10009] SEQ ID NO: 9970 represents the cDNA sequence for clone AI318571.

[10010] SEQ ID NO: 9971 represents the cDNA sequence for clone AI318604.

[10011] SEQ ID NO: 9972 represents the cDNA sequence for clone AI318614.

[10012] SEQ ID NO: 9973 represents the cDNA sequence for clone AI318624.

[10013] SEQ ID NO: 9974 represents the cDNA sequence for clone AI318627.

[10014] SEQ ID NO: 9975 represents the cDNA sequence for clone AI344787.

[10015] SEQ ID NO: 9976 represents the cDNA sequence for clone AI344805.

[10016] SEQ ID NO: 9977 represents the cDNA sequence for clone AI344896.

[10017] SEQ ID NO: 9978 represents the cDNA sequence for clone AI344909.

[10018] SEQ ID NO: 9979 represents the cDNA sequence for clone AI344912.

[10019] SEQ ID NO: 9980 represents the cDNA sequence for clone AI344917.

[10020] SEQ ID NO: 9981 represents the cDNA sequence for clone AI354410.

[10021] SEQ ID NO: 9982 represents the cDNA sequence for clone AI354411.

[10022] SEQ ID NO: 9983 represents the cDNA sequence for clone AI354414.

[10023] SEQ ID NO: 9984 represents the cDNA sequence for clone AI354415.

[10024] SEQ ID NO: 9985 represents the cDNA sequence for clone AI354419.

[10025] SEQ ID NO: 9986 represents the cDNA sequence for clone AI354423.

[10026] SEQ ID NO: 9987 represents the cDNA sequence for clone AI354425.

[10027] SEQ ID NO: 9988 represents the cDNA sequence for clone AI354426.

[10028] SEQ ID NO: 9989 represents the cDNA sequence for clone AI354431.

[10029] SEQ ID NO: 9990 represents the cDNA sequence for clone AI354434.

[10030] SEQ ID NO: 9991 represents the cDNA sequence for clone AI354435.

[10031] SEQ ID NO: 9992 represents the cDNA sequence for clone AI354444.

[10032] SEQ ID NO: 9993 represents the cDNA sequence for clone AI354451.

[10033] SEQ ID NO: 9994 represents the cDNA sequence for clone AI354453.

[10034] SEQ ID NO: 9995 represents the cDNA sequence for clone AI354458.

[10035] SEQ ID NO: 9996 represents the cDNA sequence for clone AI354459.

[10036] SEQ ID NO: 9997 represents the cDNA sequence for clone AI354461.

[10037] SEQ ID NO: 9998 represents the cDNA sequence for clone AI354989.

[10038] SEQ ID NO: 9999 represents the cDNA sequence for clone AI354991.

[10039] SEQ ID NO: 10000 represents the cDNA sequence for clone AI354993.

[10040] SEQ ID NO: 10001 represents the cDNA sequence for clone AI354996.

[10041] SEQ ID NO: 10002 represents the cDNA sequence for clone AI354997.

[10042] SEQ ID NO: 10003 represents the cDNA sequence for clone AI355000.

[10043] SEQ ID NO: 10004 represents the cDNA sequence for clone AI355001.

[10044] SEQ ID NO: 10005 represents the cDNA sequence for clone AI355004.

[10045] SEQ ID NO: 10006 represents the cDNA sequence for clone AI355005.

[10046] SEQ ID NO: 10007 represents the cDNA sequence for clone AI355007.

[10047] SEQ ID NO: 10008 represents the cDNA sequence for clone AI355009.

[10048] SEQ ID NO: 10009 represents the cDNA sequence for clone AI355012.

[10049] SEQ ID NO: 10010 represents the cDNA sequence for clone AI355055.

[10050] SEQ ID NO: 10011 represents the cDNA sequence for clone AI355056.

[10051] SEQ ID NO: 10012 represents the cDNA sequence for clone AI355057.

[10052] SEQ ID NO: 10013 represents the cDNA sequence for clone AI355063.

[10053] SEQ ID NO: 10014 represents the cDNA sequence for clone AI355069.

[10054] SEQ ID NO: 10015 represents the cDNA sequence for clone AI355070.

[10055] SEQ ID NO: 10016 represents the cDNA sequence for clone AI355075.

[10056] SEQ ID NO: 10017 represents the cDNA sequence for clone AI355077.

[10057] SEQ ID NO: 10018 represents the cDNA sequence for clone AI355483.

[10058] SEQ ID NO: 10019 represents the cDNA sequence for clone AI355489.

[10059] SEQ ID NO: 10020 represents the cDNA sequence for clone AI355519.

[10060] SEQ ID NO: 10021 represents the cDNA sequence for clone AI355520.

[10061] SEQ ID NO: 10022 represents the cDNA sequence for clone AI355521.

[10062] SEQ ID NO: 10023 represents the cDNA sequence for clone AI355523.

[10063] SEQ ID NO: 10024 represents the cDNA sequence for clone AI355540.

[10064] SEQ ID NO: 10025 represents the cDNA sequence for clone AI355541.

[10065] SEQ ID NO: 10026 represents the cDNA sequence for clone AI355546.

[10066] SEQ ID NO: 10027 represents the cDNA sequence for clone AI355547.

[10067] SEQ ID NO: 10028 represents the cDNA sequence for clone AI356590.

[10068] SEQ ID NO: 10029 represents the cDNA sequence for clone AI356595.

[10069] SEQ ID NO: 10030 represents the cDNA sequence for clone AI356599.

[10070] SEQ ID NO: 10031 represents the cDNA sequence for clone AI356605.

[10071] SEQ ID NO: 10032 represents the cDNA sequence for clone AI357533.

[10072] SEQ ID NO: 10033 represents the cDNA sequence for clone AI357534.

[10073] SEQ ID NO: 10034 represents the cDNA sequence for clone AI357539.

[10074] SEQ ID NO: 10035 represents the cDNA sequence for clone AI357541.

[10075] SEQ ID NO: 10036 represents the cDNA sequence for clone AI357542.

[10076] SEQ ID NO: 10037 represents the cDNA sequence for clone AI357543.

[10077] SEQ ID NO: 10038 represents the cDNA sequence for clone AI357545.

[10078] SEQ ID NO: 10039 represents the cDNA sequence for clone AI357547.

[10079] SEQ ID NO: 10040 represents the cDNA sequence for clone AI357551.

[10080] SEQ ID NO: 10041 represents the cDNA sequence for clone AI357556.

[10081] SEQ ID NO: 10042 represents the cDNA sequence for clone AI357561.

[10082] SEQ ID NO: 10043 represents the cDNA sequence for clone AI357600.

[10083] SEQ ID NO: 10044 represents the cDNA sequence for clone AI357605.

[10084] SEQ ID NO: 10045 represents the cDNA sequence for clone AI357614.

[10085] SEQ ID NO: 10046 represents the cDNA sequence for clone AI357620.

[10086] SEQ ID NO: 10047 represents the cDNA sequence for clone AI357622.

[10087] SEQ ID NO: 10048 represents the cDNA sequence for clone AI357623.

[10088] SEQ ID NO: 10049 represents the cDNA sequence for clone AI357626.

[10089] SEQ ID NO: 10050 represents the cDNA sequence for clone AI357628.

[10090] SEQ ID NO: 10051 represents the cDNA sequence for clone AI357630.

[10091] SEQ ID NO: 10052 represents the cDNA sequence for clone AI357673.

[10092] SEQ ID NO: 10053 represents the cDNA sequence for clone AI357676.

[10093] SEQ ID NO: 10054 represents the cDNA sequence for clone AI357688.

[10094] SEQ ID NO: 10055 represents the cDNA sequence for clone AI357690.

[10095] SEQ ID NO: 10056 represents the cDNA sequence for clone AI357691.

[10096] SEQ ID NO: 10057 represents the cDNA sequence for clone AI364753.

[10097] SEQ ID NO: 10058 represents the cDNA sequence for clone AI364758.

[10098] SEQ ID NO: 10059 represents the cDNA sequence for clone AI364759.

[10099] SEQ ID NO: 10060 represents the cDNA sequence for clone AI364761.

[10100] SEQ ID NO: 10061 represents the cDNA sequence for clone AI364772.

[10101] SEQ ID NO: 10062 represents the cDNA sequence for clone AI364775.

[10102] SEQ ID NO: 10063 represents the cDNA sequence for clone AI364777.

[10103] SEQ ID NO: 10064 represents the cDNA sequence for clone AI364781.

[10104] SEQ ID NO: 10065 represents the cDNA sequence for clone AI364789.

[10105] SEQ ID NO: 10066 represents the cDNA sequence for clone AI364792.

[10106] SEQ ID NO: 10067 represents the cDNA sequence for clone AI364798.

[10107] SEQ ID NO: 10068 represents the cDNA sequence for clone AI364800.

[10108] SEQ ID NO: 10069 represents the cDNA sequence for clone AI364801.

[10109] SEQ ID NO: 10070 represents the cDNA sequence for clone AI364802.

[10110] SEQ ID NO: 10071 represents the cDNA sequence for clone AI364803.

[10111] SEQ ID NO: 10072 represents the cDNA sequence for clone AI364805.

[10112] SEQ ID NO: 10073 represents the cDNA sequence for clone AI364813.

[10113] SEQ ID NO: 10074 represents the cDNA sequence for clone AI364815.

[10114] SEQ ID NO: 10075 represents the cDNA sequence for clone AI364825.

[10115] SEQ ID NO: 10076 represents the cDNA sequence for clone AI364832.

[10116] SEQ ID NO: 10077 represents the cDNA sequence for clone AI364837.

[10117] SEQ ID NO: 10078 represents the cDNA sequence for clone AI364842.

[10118] SEQ ID NO: 10079 represents the cDNA sequence for clone AI364849.

[10119] SEQ ID NO: 10080 represents the cDNA sequence for clone AI364850.

[10120] SEQ ID NO: 10081 represents the cDNA sequence for clone AI364851.

[10121] SEQ ID NO: 10082 represents the cDNA sequence for clone AI364852.

[10122] SEQ ID NO: 10083 represents the cDNA sequence for clone AI364854.

[10123] SEQ ID NO: 10084 represents the cDNA sequence for clone AI364858.

[10124] SEQ ID NO: 10085 represents the cDNA sequence for clone AI364860.

[10125] SEQ ID NO: 10086 represents the cDNA sequence for clone AI364862.

[10126] SEQ ID NO: 10087 represents the cDNA sequence for clone AI364864.

[10127] SEQ ID NO: 10088 represents the cDNA sequence for clone AI364865.

[10128] SEQ ID NO: 10089 represents the cDNA sequence for clone AI364875.

[10129] SEQ ID NO: 10090 represents the cDNA sequence for clone AI364872.

[10130] SEQ ID NO: 10091 represents the cDNA sequence for clone AI364874.

[10131] SEQ ID NO: 10092 represents the cDNA sequence for clone AI370141.

[10132] SEQ ID NO: 10093 represents the cDNA sequence for clone AI370147.

[10133] SEQ ID NO: 10094 represents the cDNA sequence for clone AI370153.

[10134] SEQ ID NO: 10095 represents the cDNA sequence for clone AI370155.

[10135] SEQ ID NO: 10096 represents the cDNA sequence for clone AI370156.

[10136] SEQ ID NO: 10097 represents the cDNA sequence for clone AI370160.

[10137] SEQ ID NO: 10098 represents the cDNA sequence for clone AI370162.

[10138] SEQ ID NO: 10099 represents the cDNA sequence for clone AI436625.

[10139] SEQ ID NO: 10100 represents the cDNA sequence for clone AI436631.

[10140] SEQ ID NO: 10101 represents the cDNA sequence for clone AI436632.

[10141] SEQ ID NO: 10102 represents the cDNA sequence for clone AI436635.

[10142] SEQ ID NO: 10103 represents the cDNA sequence for clone AI436636.

[10143] SEQ ID NO: 10104 represents the cDNA sequence for clone AI436638.

[10144] SEQ ID NO: 10104 represents the cDNA sequence for clone AI521398.

[10145] SEQ ID NO: 10106 represents the cDNA sequence for clone AI521399.

[10146] SEQ ID NO: 10107 represents the cDNA sequence for clone AI521401.

[10147] SEQ ID NO: 10108 represents the cDNA sequence for clone AI521402.

[10148] SEQ ID NO: 10109 represents the cDNA sequence for clone AI521403.

[10149] SEQ ID NO: 10110 represents the cDNA sequence for clone AI521408.

[10150] SEQ ID NO: 10111 represents the cDNA sequence for clone AI521410.

[10151] SEQ ID NO: 10112 represents the cDNA sequence for clone AI521416.

[10152] SEQ ID NO: 10113 represents the cDNA sequence for clone AI521417.

[10153] SEQ ID NO: 10114 represents the cDNA sequence for clone AI521420.

[10154] SEQ ID NO: 10115 represents the cDNA sequence for clone AI521425.

[10155] SEQ ID NO: 10116 represents the cDNA sequence for clone AI521430.

[10156] SEQ ID NO: 10117 represents the cDNA sequence for clone AI521435.

[10157] SEQ ID NO: 10118 represents the cDNA sequence for clone AI521438.

[10158] SEQ ID NO: 10119 represents the cDNA sequence for clone AI521443.

[10159] SEQ ID NO: 10120 represents the cDNA sequence for clone AI521444.

[10160] SEQ ID NO: 10121 represents the cDNA sequence for clone AI521445.

[10161] SEQ ID NO: 10122 represents the cDNA sequence for clone AI521447.

[10162] SEQ ID NO: 10123 represents the cDNA sequence for clone AI521461.

[10163] SEQ ID NO: 10124 represents the cDNA sequence for clone AI521471.

[10164] SEQ ID NO: 10125 represents the cDNA sequence for clone AI521472.

[10165] SEQ ID NO: 10126 represents the cDNA sequence for clone AI567090.

[10166] SEQ ID NO: 10127 represents the cDNA sequence for clone AI567097.

[10167] SEQ ID NO: 10128 represents the cDNA sequence for clone AI567106.

[10168] SEQ ID NO: 10129 represents the cDNA sequence for clone AI567108.

[10169] SEQ ID NO: 10130 represents the cDNA sequence for clone AI567113.

[10170] SEQ ID NO: 10131 represents the cDNA sequence for clone AI567114.

[10171] SEQ ID NO: 10132 represents the cDNA sequence for clone AI567119.

[10172] SEQ ID NO: 10133 represents the cDNA sequence for clone AI567120.

[10173] SEQ ID NO: 10134 represents the cDNA sequence for clone AI567129.

[10174] SEQ ID NO: 10135 represents the cDNA sequence for clone AI567140.

[10175] SEQ ID NO: 10136 represents the cDNA sequence for clone AI567141.

[10176] SEQ ID NO: 10137 represents the cDNA sequence for clone AI567142.

[10177] SEQ ID NO: 10138 represents the cDNA sequence for clone AI567143.

[10178] SEQ ID NO: 10139 represents the cDNA sequence for clone AI567144.

[10179] SEQ ID NO: 10140 represents the cDNA sequence for clone AI567149.

[10180] SEQ ID NO: 10141 represents the cDNA sequence for clone AI567237.

[10181] SEQ ID NO: 10142 represents the cDNA sequence for clone AI567240.

[10182] SEQ ID NO: 10143 represents the cDNA sequence for clone AI567241.

[10183] SEQ ID NO: 10144 represents the cDNA sequence for clone AI567243.

[10184] SEQ ID NO: 10145 represents the cDNA sequence for clone AI567245.

[10185] SEQ ID NO: 10146 represents the cDNA sequence for clone AI567247.

[10186] SEQ ID NO: 10147 represents the cDNA sequence for clone AI567250.

[10187] SEQ ID NO: 10148 represents the cDNA sequence for clone AI567251.

[10188] SEQ ID NO: 10149 represents the cDNA sequence for clone AI567255.

[10189] SEQ ID NO: 10150 represents the cDNA sequence for clone AI567258.

[10190] SEQ ID NO: 10151 represents the cDNA sequence for clone AI567262.

[10191] SEQ ID NO: 10152 represents the cDNA sequence for clone AI567263.

[10192] SEQ ID NO: 10153 represents the cDNA sequence for clone AI567264.

[10193] SEQ ID NO: 10154 represents the cDNA sequence for clone AI567269.

[10194] SEQ ID NO: 10155 represents the cDNA sequence for clone AI567274.

[10195] SEQ ID NO: 10156 represents the cDNA sequence for clone AI567276.

[10196] SEQ ID NO: 10157 represents the cDNA sequence for clone AI567287.

[10197] SEQ ID NO: 10158 represents the cDNA sequence for clone AI567290.

[10198] SEQ ID NO: 10159 represents the cDNA sequence for clone AI567293.

[10199] SEQ ID NO: 10160 represents the cDNA sequence for clone AI567300.

[10200] SEQ ID NO: 10161 represents the cDNA sequence for clone AI567821.

[10201] SEQ ID NO: 10162 represents the cDNA sequence for clone AI567824.

[10202] SEQ ID NO: 10163 represents the cDNA sequence for clone AI567827.

[10203] SEQ ID NO: 10164 represents the cDNA sequence for clone AI567829.

[10204] SEQ ID NO: 10165 represents the cDNA sequence for clone AI567830.

[10205] SEQ ID NO: 10166 represents the cDNA sequence for clone AI567832.

[10206] SEQ ID NO: 10167 represents the cDNA sequence for clone AI567833.

[10207] SEQ ID NO: 10168 represents the cDNA sequence for clone AI567837.

[10208] SEQ ID NO: 10169 represents the cDNA sequence for clone AI567839.

[10209] SEQ ID NO: 10170 represents the cDNA sequence for clone AI567847.

[10210] SEQ ID NO: 10171 represents the cDNA sequence for clone AI567850.

[10211] SEQ ID NO: 10172 represents the cDNA sequence for clone AI567858.

[10212] SEQ ID NO: 10173 represents the cDNA sequence for clone AI567860.

[10213] SEQ ID NO: 10174 represents the cDNA sequence for clone AI567861.

[10214] SEQ ID NO: 10175 represents the cDNA sequence for clone AI567863.

[10215] SEQ ID NO: 10176 represents the cDNA sequence for clone AI567868.

[10216] SEQ ID NO: 10177 represents the cDNA sequence for clone AI567869.

[10217] SEQ ID NO: 10178 represents the cDNA sequence for clone AI567871.

[10218] SEQ ID NO: 10179 represents the cDNA sequence for clone AI567873.

[10219] SEQ ID NO: 10180 represents the cDNA sequence for clone AI567935.

[10220] SEQ ID NO: 10181 represents the cDNA sequence for clone AI567939.

[10221] SEQ ID NO: 10182 represents the cDNA sequence for clone AI567941.

[10222] SEQ ID NO: 10183 represents the cDNA sequence for clone AI567943.

[10223] SEQ ID NO: 10184 represents the cDNA sequence for clone AI567945.

[10224] SEQ ID NO: 10185 represents the cDNA sequence for clone AI567947.

[10225] SEQ ID NO: 10186 represents the cDNA sequence for clone AI567948.

[10226] SEQ ID NO: 10187 represents the cDNA sequence for clone AI567958.

[10227] SEQ ID NO: 10188 represents the cDNA sequence for clone AI567960.

[10228] SEQ ID NO: 10189 represents the cDNA sequence for clone AI567961.

[10229] SEQ ID NO: 10190 represents the cDNA sequence for clone AI567967.

[10230] SEQ ID NO: 10191 represents the cDNA sequence for clone AI567976.

[10231] SEQ ID NO: 10192 represents the cDNA sequence for clone AI567979.

[10232] SEQ ID NO: 10193 represents the cDNA sequence for clone AI567983.

[10233] SEQ ID NO: 10194 represents the cDNA sequence for clone AI567983.

[10234] SEQ ID NO: 10195 represents the cDNA sequence for clone AI567986.

[10235] SEQ ID NO: 10196 represents the cDNA sequence for clone AI567988.

[10236] SEQ ID NO: 10197 represents the cDNA sequence for clone AI567984.

[10237] SEQ ID NO: 10198 represents the cDNA sequence for clone AI567994.

[10238] SEQ ID NO: 10199 represents the cDNA sequence for clone AI580229.

[10239] SEQ ID NO: 10200 represents the cDNA sequence for clone AI580232.

[10240] SEQ ID NO: 10201 represents the cDNA sequence for clone AI580237.

[10241] SEQ ID NO: 10202 represents the cDNA sequence for clone AI580237.

[10242] SEQ ID NO: 10203 represents the cDNA sequence for clone AI580238.

[10243] SEQ ID NO: 10204 represents the cDNA sequence for clone AI580244.

[10244] SEQ ID NO: 10205 represents the cDNA sequence for clone AI580248.

[10245] SEQ ID NO: 10206 represents the cDNA sequence for clone AI580249.

[10246] SEQ ID NO: 10207 represents the cDNA sequence for clone AI580252.

[10247] SEQ ID NO: 10208 represents the cDNA sequence for clone AI580254.

[10248] SEQ ID NO: 10209 represents the cDNA sequence for clone AI580261.

[10249] SEQ ID NO: 10210 represents the cDNA sequence for clone AI590577.

[10250] SEQ ID NO: 10211 represents the cDNA sequence for clone AI590578.

[10251] SEQ ID NO: 10212 represents the cDNA sequence for clone AI590580.

[10252] SEQ ID NO: 10213 represents the cDNA sequence for clone AI590584.

[10253] SEQ ID NO: 10214 represents the cDNA sequence for clone AI590592.

[10254] SEQ ID NO: 10215 represents the cDNA sequence for clone AI590593.

[10255] SEQ ID NO: 10216 represents the cDNA sequence for clone AI590596.

[10256] SEQ ID NO: 10217 represents the cDNA sequence for clone AI590599.

[10257] SEQ ID NO: 10218 represents the cDNA sequence for clone AI590600.

[10258] SEQ ID NO: 10219 represents the cDNA sequence for clone AI590602.

[10259] SEQ ID NO: 10220 represents the cDNA sequence for clone AI590604.

[10260] SEQ ID NO: 10221 represents the cDNA sequence for clone AI590605.

[10261] SEQ ID NO: 10222 represents the cDNA sequence for clone AI590606.

[10262] SEQ ID NO: 10223 represents the cDNA sequence for clone AI590610.

[10263] SEQ ID NO: 10224 represents the cDNA sequence for clone AI590613.

[10264] SEQ ID NO: 10225 represents the cDNA sequence for clone AI590615.

[10265] SEQ ID NO: 10226 represents the cDNA sequence for clone AI590616.

[10266] SEQ ID NO: 10227 represents the cDNA sequence for clone AI590617.

[10267] SEQ ID NO: 10228 represents the cDNA sequence for clone AI590618.

[10268] SEQ ID NO: 10229 represents the cDNA sequence for clone AI590621.

[10269] SEQ ID NO: 10230 represents the cDNA sequence for clone AI590623.

[10270] SEQ ID NO: 10231 represents the cDNA sequence for clone AI590629.

[10271] SEQ ID NO: 10232 represents the cDNA sequence for clone AI590631.

[10272] SEQ ID NO: 10233 represents the cDNA sequence for clone AI590636.

[10273] SEQ ID NO: 10234 represents the cDNA sequence for clone AI590642.

[10274] SEQ ID NO: 10235 represents the cDNA sequence for clone AI590643.

[10275] SEQ ID NO: 10236 represents the cDNA sequence for clone AI590646.

[10276] SEQ ID NO: 10237 represents the cDNA sequence for clone AI590648.

[10277] SEQ ID NO: 10238 represents the cDNA sequence for clone AI590649.

[10278] SEQ ID NO: 10239 represents the cDNA sequence for clone AI590757.

[10279] SEQ ID NO: 10240 represents the cDNA sequence for clone AI590759.

[10280] SEQ ID NO: 10241 represents the cDNA sequence for clone AI590760.

[10281] SEQ ID NO: 10242 represents the cDNA sequence for clone AI590765.

[10282] SEQ ID NO: 10243 represents the cDNA sequence for clone AI590766.

[10283] SEQ ID NO: 10244 represents the cDNA sequence for clone AI590770.

[10284] SEQ ID NO: 10245 represents the cDNA sequence for clone AI590771.

[10285] SEQ ID NO: 10246 represents the cDNA sequence for clone AI590772.

[10286] SEQ ID NO: 10247 represents the cDNA sequence for clone AI590781.

[10287] SEQ ID NO: 10248 represents the cDNA sequence for clone AI590784.

[10288] SEQ ID NO: 10249 represents the cDNA sequence for clone AI590786.

[10289] SEQ ID NO: 10250 represents the cDNA sequence for clone AI590788.

[10290] SEQ ID NO: 10251 represents the cDNA sequence for clone AI590790.

[10291] SEQ ID NO: 10252 represents the cDNA sequence for clone AI590791.

[10292] SEQ ID NO: 10253 represents the cDNA sequence for clone AI590795.

[10293] SEQ ID NO: 10254 represents the cDNA sequence for clone AI590798.

[10294] SEQ ID NO: 10255 represents the cDNA sequence for clone AI590799.

[10295] SEQ ID NO: 10256 represents the cDNA sequence for clone AI590800.

[10296] SEQ ID NO: 10257 represents the cDNA sequence for clone AI590804.

[10297] SEQ ID NO: 10258 represents the cDNA sequence for clone AI590806.

[10298] SEQ ID NO: 10259 represents the cDNA sequence for clone AI590809.

[10299] SEQ ID NO: 10260 represents the cDNA sequence for clone AI590887.

[10300] SEQ ID NO: 10261 represents the cDNA sequence for clone AI590888.

[10301] SEQ ID NO: 10262 represents the cDNA sequence for clone AI590890.

[10302] SEQ ID NO: 10263 represents the cDNA sequence for clone AI590892.

[10303] SEQ ID NO: 10264 represents the cDNA sequence for clone AI590893.

[10304] SEQ ID NO: 10265 represents the cDNA sequence for clone AI590895.

[10305] SEQ ID NO: 10266 represents the cDNA sequence for clone AI590899.

[10306] SEQ ID NO: 10267 represents the cDNA sequence for clone AI590903.

[10307] SEQ ID NO: 10268 represents the cDNA sequence for clone AI590904.

[10308] SEQ ID NO: 10269 represents the cDNA sequence for clone AI590905.

[10309] SEQ ID NO: 10270 represents the cDNA sequence for clone AI590914.

[10310] SEQ ID NO: 10271 represents the cDNA sequence for clone AI590997.

[10311] SEQ ID NO: 10272 represents the cDNA sequence for clone AI590998.

[10312] SEQ ID NO: 10273 represents the cDNA sequence for clone AI591001.

[10313] SEQ ID NO: 10274 represents the cDNA sequence for clone AI591003.

[10314] SEQ ID NO: 10275 represents the cDNA sequence for clone AI591004.

[10315] SEQ ID NO: 10276 represents the cDNA sequence for clone AI591005.

[10316] SEQ ID NO: 10277 represents the cDNA sequence for clone AI591007.

[10317] SEQ ID NO: 10278 represents the cDNA sequence for clone AI591008.

[10318] SEQ ID NO: 10279 represents the cDNA sequence for clone AI591009.

[10319] SEQ ID NO: 10280 represents the cDNA sequence for clone AI591011.

[10320] SEQ ID NO: 10281 represents the cDNA sequence for clone AI591016.

[10321] SEQ ID NO: 10282 represents the cDNA sequence for clone AI591018.

[10322] SEQ ID NO: 10283 represents the cDNA sequence for clone AI591021.

[10323] SEQ ID NO: 10284 represents the cDNA sequence for clone AI591022.

[10324] SEQ ID NO: 10285 represents the cDNA sequence for clone AI591027.

[10325] SEQ ID NO: 10286 represents the cDNA sequence for clone AI591029.

[10326] SEQ ID NO: 10287 represents the cDNA sequence for clone AI591032.

[10327] SEQ ID NO: 10288 represents the cDNA sequence for clone AI591033.

[10328] SEQ ID NO: 10289 represents the cDNA sequence for clone AI591035.

[10329] SEQ ID NO: 10290 represents the cDNA sequence for clone AI591038.

[10330] SEQ ID NO: 10291 represents the cDNA sequence for clone AI591046.

[10331] SEQ ID NO: 10292 represents the cDNA sequence for clone AI591049.

[10332] SEQ ID NO: 10293 represents the cDNA sequence for clone AI591050.

[10333] SEQ ID NO: 10294 represents the cDNA sequence for clone AI591051.

[10334] SEQ ID NO: 10295 represents the cDNA sequence for clone AI591053.

[10335] SEQ ID NO: 10296 represents the cDNA sequence for clone AI591055.

[10336] SEQ ID NO: 10297 represents the cDNA sequence for clone AI591056.

[10337] SEQ ID NO: 10298 represents the cDNA sequence for clone AI591060.

[10338] SEQ ID NO: 10299 represents the cDNA sequence for clone AI591064.

[10339] SEQ ID NO: 10300 represents the cDNA sequence for clone AI591065.

[10340] SEQ ID NO: 10301 represents the cDNA sequence for clone AI591068.

[10341] SEQ ID NO: 10302 represents the cDNA sequence for clone AI591070.

[10342] SEQ ID NO: 10303 represents the cDNA sequence for clone AI591072.

[10343] SEQ ID NO: 10304 represents the cDNA sequence for clone AI591117.

[10344] SEQ ID NO: 10305 represents the cDNA sequence for clone AI591118.

[10345] SEQ ID NO: 10306 represents the cDNA sequence for clone AI591121.

[10346] SEQ ID NO: 10307 represents the cDNA sequence for clone AI591127.

[10347] SEQ ID NO: 10308 represents the cDNA sequence for clone AI591128.

[10348] SEQ ID NO: 10309 represents the cDNA sequence for clone AI591129.

[10349] SEQ ID NO: 10310 represents the cDNA sequence for clone AI591131.

[10350] SEQ ID NO: 10311 represents the cDNA sequence for clone AI591134.

[10351] SEQ ID NO: 10312 represents the cDNA sequence for clone AI591135.

[10352] SEQ ID NO: 10313 represents the cDNA sequence for clone AI591136.

[10353] SEQ ID NO: 10314 represents the cDNA sequence for clone AI591140.

[10354] SEQ ID NO: 10315 represents the cDNA sequence for clone AI591141.

[10355] SEQ ID NO: 10316 represents the cDNA sequence for clone AI591143.

[10356] SEQ ID NO: 10317 represents the cDNA sequence for clone AI608688.

[10357] SEQ ID NO: 10318 represents the cDNA sequence for clone AI608690.

[10358] SEQ ID NO: 10319 represents the cDNA sequence for clone AI608695.

[10359] SEQ ID NO: 10320 represents the cDNA sequence for clone AI608696.

[10360] SEQ ID NO: 10321 represents the cDNA sequence for clone AI608698.

[10361] SEQ ID NO: 10322 represents the cDNA sequence for clone AI608699.

[10362] SEQ ID NO: 10323 represents the cDNA sequence for clone AI608700.

[10363] SEQ ID NO: 10324 represents the cDNA sequence for clone AI608701.

[10364] SEQ ID NO: 10325 represents the cDNA sequence for clone AI608704.

[10365] SEQ ID NO: 10326 represents the cDNA sequence for clone AI608708.

[10366] SEQ ID NO: 10327 represents the cDNA sequence for clone AI608709.

[10367] SEQ ID NO: 10328 represents the cDNA sequence for clone AI608710.

[10368] SEQ ID NO: 10329 represents the cDNA sequence for clone AI609057.

[10369] SEQ ID NO: 10330 represents the cDNA sequence for clone AI609060.

[10370] SEQ ID NO: 10331 represents the cDNA sequence for clone AI609064.

[10371] SEQ ID NO: 10332 represents the cDNA sequence for clone AI609067.

[10372] SEQ ID NO: 10333 represents the cDNA sequence for clone AI609070.

[10373] SEQ ID NO: 10334 represents the cDNA sequence for clone AI609073.

[10374] SEQ ID NO: 10335 represents the cDNA sequence for clone AI609075.

[10375] SEQ ID NO: 10336 represents the cDNA sequence for clone AI609076.

[10376] SEQ ID NO: 10337 represents the cDNA sequence for clone AI609324.

[10377] SEQ ID NO: 10338 represents the cDNA sequence for clone AI609325.

[10378] SEQ ID NO: 10339 represents the cDNA sequence for clone AI609327.

[10379] SEQ ID NO: 10340 represents the cDNA sequence for clone AI609329.

[10380] SEQ ID NO: 10341 represents the cDNA sequence for clone AI609334.

[10381] SEQ ID NO: 10342 represents the cDNA sequence for clone AI609335.

[10382] SEQ ID NO: 10343 represents the cDNA sequence for clone AI609337.

[10383] SEQ ID NO: 10344 represents the cDNA sequence for clone AI609338.

[10384] SEQ ID NO: 10345 represents the cDNA sequence for clone AI609342.

[10385] SEQ ID NO: 10346 represents the cDNA sequence for clone AI609343.

[10386] SEQ ID NO: 10347 represents the cDNA sequence for clone AI609345.

[10387] SEQ ID NO: 10348 represents the cDNA sequence for clone AI609346.

[10388] SEQ ID NO: 10349 represents the cDNA sequence for clone AI609349.

[10389] SEQ ID NO: 10350 represents the cDNA sequence for clone AI609351.

[10390] SEQ ID NO: 10351 represents the cDNA sequence for clone AI609352.

[10391] SEQ ID NO: 10352 represents the cDNA sequence for clone AI609353.

[10392] SEQ ID NO: 10353 represents the cDNA sequence for clone AI609355.

[10393] SEQ ID NO: 10354 represents the cDNA sequence for clone AI609356.

[10394] SEQ ID NO: 10355 represents the cDNA sequence for clone AI609359.

[10395] SEQ ID NO: 10356 represents the cDNA sequence for clone AI609361.

[10396] SEQ ID NO: 10357 represents the cDNA sequence for clone AI609367.

[10397] SEQ ID NO: 10358 represents the cDNA sequence for clone AI609369.

[10398] SEQ ID NO: 10359 represents the cDNA sequence for clone AI609370.

[10399] SEQ ID NO: 10360 represents the cDNA sequence for clone AI609373.

[10400] SEQ ID NO: 10361 represents the cDNA sequence for clone AI609374.

[10401] SEQ ID NO: 10362 represents the cDNA sequence for clone AI609377.

[10402] SEQ ID NO: 10363 represents the cDNA sequence for clone AI609573.

[10403] SEQ ID NO: 10364 represents the cDNA sequence for clone AI609576.

[10404] SEQ ID NO: 10365 represents the cDNA sequence for clone AI609578.

[10405] SEQ ID NO: 10366 represents the cDNA sequence for clone AI609587.

[10406] SEQ ID NO: 10367 represents the cDNA sequence for clone AI609590.

[10407] SEQ ID NO: 10368 represents the cDNA sequence for clone AI609591.

[10408] SEQ ID NO: 10369 represents the cDNA sequence for clone AI609595.

[10409] SEQ ID NO: 10370 represents the cDNA sequence for clone AI609667.

[10410] SEQ ID NO: 10371 represents the cDNA sequence for clone AI609669.

[10411] SEQ ID NO: 10372 represents the cDNA sequence for clone AI609676.

[10412] SEQ ID NO: 10373 represents the cDNA sequence for clone AI609681.

[10413] SEQ ID NO: 10374 represents the cDNA sequence for clone AI609682.

[10414] SEQ ID NO: 10375 represents the cDNA sequence for clone AI609683.

[10415] SEQ ID NO: 10376 represents the cDNA sequence for clone AI609689.

[10416] SEQ ID NO: 10377 represents the cDNA sequence for clone AI612817.

[10417] SEQ ID NO: 10378 represents the cDNA sequence for clone AI612820.

[10418] SEQ ID NO: 10379 represents the cDNA sequence for clone AI612822.

[10419] SEQ ID NO: 10380 represents the cDNA sequence for clone AI612825.

[10420] SEQ ID NO: 10381 represents the cDNA sequence for clone AI612826.

[10421] SEQ ID NO: 10382 represents the cDNA sequence for clone AI612828.

[10422] SEQ ID NO: 10383 represents the cDNA sequence for clone AI612833.

[10423] SEQ ID NO: 10384 represents the cDNA sequence for clone AI612834.

[10424] SEQ ID NO: 10385 represents the cDNA sequence for clone AI612842.

[10425] SEQ ID NO: 10386 represents the cDNA sequence for clone AI612844.

[10426] SEQ ID NO: 10387 represents the cDNA sequence for clone AI612846.

[10427] SEQ ID NO: 10388 represents the cDNA sequence for clone AI612849.

[10428] SEQ ID NO: 10389 represents the cDNA sequence for clone AI612850.

[10429] SEQ ID NO: 10390 represents the cDNA sequence for clone AI612851.

[10430] SEQ ID NO: 10391 represents the cDNA sequence for clone AI612853.

[10431] SEQ ID NO: 10392 represents the cDNA sequence for clone AI612854.

[10432] SEQ ID NO: 10393 represents the cDNA sequence for clone AI612857.

[10433] SEQ ID NO: 10394 represents the cDNA sequence for clone AI612867.

[10434] SEQ ID NO: 10395 represents the cDNA sequence for clone AI633439.

[10435] SEQ ID NO: 10396 represents the cDNA sequence for clone AI633442.

[10436] SEQ ID NO: 10397 represents the cDNA sequence for clone AI633468.

[10437] SEQ ID NO: 10398 represents the cDNA sequence for clone AI633474.

[10438] SEQ ID NO: 10399 represents the cDNA sequence for clone AI633475.

[10439] SEQ ID NO: 10400 represents the cDNA sequence for clone AI633478.

[10440] SEQ ID NO: 10401 represents the cDNA sequence for clone AI633481.

[10441] SEQ ID NO: 10402 represents the cDNA sequence for clone AI633494.

[10442] SEQ ID NO: 10403 represents the cDNA sequence for clone AI633495.

[10443] SEQ ID NO: 10404 represents the cDNA sequence for clone AI648453.

[10444] SEQ ID NO: 10405 represents the cDNA sequence for clone AI648459.

[10445] SEQ ID NO: 10406 represents the cDNA sequence for clone AI648461.

[10446] SEQ ID NO: 10407 represents the cDNA sequence for clone AI648462.

[10447] SEQ ID NO: 10408 represents the cDNA sequence for clone AI648465.

[10448] SEQ ID NO: 10409 represents the cDNA sequence for clone AI648468.

[10449] SEQ ID NO: 10410 represents the cDNA sequence for clone AI648470.

[10450] SEQ ID NO: 10411 represents the cDNA sequence for clone AI648471.

[10451] SEQ ID NO: 10412 represents the cDNA sequence for clone AI648481.

[10452] SEQ ID NO: 10413 represents the cDNA sequence for clone AI648483.

[10453] SEQ ID NO: 10414 represents the cDNA sequence for clone AI648488.

[10454] SEQ ID NO: 10415 represents the cDNA sequence for clone AI648489.

[10455] SEQ ID NO: 10416 represents the cDNA sequence for clone AI648495.

[10456] SEQ ID NO: 10417 represents the cDNA sequence for clone AI648497.

[10457] SEQ ID NO: 10418 represents the cDNA sequence for clone AI648501.

[10458] SEQ ID NO: 10419 represents the cDNA sequence for clone AI648504.

[10459] SEQ ID NO: 10420 represents the cDNA sequence for clone AI648505.

[10460] SEQ ID NO: 10421 represents the cDNA sequence for clone AI648506.

[10461] SEQ ID NO: 10422 represents the cDNA sequence for clone AI648510.

[10462] SEQ ID NO: 10423 represents the cDNA sequence for clone AI648511.

[10463] SEQ ID NO: 10424 represents the cDNA sequence for clone AI648512.

[10464] SEQ ID NO: 10425 represents the cDNA sequence for clone AI648513.

[10465] SEQ ID NO: 10426 represents the cDNA sequence for clone AI648518.

[10466] SEQ ID NO: 10427 represents the cDNA sequence for clone AI648519.

[10467] SEQ ID NO: 10428 represents the cDNA sequence for clone AI648527.

[10468] SEQ ID NO: 10429 represents the cDNA sequence for clone AI648530.

[10469] SEQ ID NO: 10430 represents the cDNA sequence for clone AI648532.

[10470] SEQ ID NO: 10431 represents the cDNA sequence for clone AI648533.

[10471] SEQ ID NO: 10432 represents the cDNA sequence for clone AI648534.

[10472] SEQ ID NO: 10433 represents the cDNA sequence for clone AI648535.

[10473] SEQ ID NO: 10434 represents the cDNA sequence for clone AI648536.

[10474] SEQ ID NO: 10435 represents the cDNA sequence for clone AI648545.

[10475] SEQ ID NO: 10436 represents the cDNA sequence for clone AI648546.

[10476] SEQ ID NO: 10437 represents the cDNA sequence for clone AI648548.

[10477] SEQ ID NO: 10438 represents the cDNA sequence for clone AI648550.

[10478] SEQ ID NO: 10439 represents the cDNA sequence for clone AI648552.

[10479] SEQ ID NO: 10440 represents the cDNA sequence for clone AI648554.

[10480] SEQ ID NO: 10441 represents the cDNA sequence for clone AI648558.

[10481] SEQ ID NO: 10442 represents the cDNA sequence for clone AI648563.

[10482] SEQ ID NO: 10443 represents the cDNA sequence for clone AI648564.

[10483] SEQ ID NO: 10444 represents the cDNA sequence for clone AI648565.

[10484] SEQ ID NO: 10445 represents the cDNA sequence for clone AI648566.

[10485] SEQ ID NO: 10446 represents the cDNA sequence for clone AI648576.

[10486] SEQ ID NO: 10447 represents the cDNA sequence for clone AI648578.

[10487] SEQ ID NO: 10448 represents the cDNA sequence for clone AI648579.

[10488] SEQ ID NO: 10449 represents the cDNA sequence for clone AI648580.

[10489] SEQ ID NO: 10450 represents the cDNA sequence for clone AI648584.

[10490] SEQ ID NO: 10451 represents the cDNA sequence for clone AI648585.

[10491] SEQ ID NO: 10452 represents the cDNA sequence for clone AI648586.

[10492] SEQ ID NO: 10453 represents the cDNA sequence for clone AI648588.

[10493] SEQ ID NO: 10454 represents the cDNA sequence for clone AI648593.

[10494] SEQ ID NO: 10455 represents the cDNA sequence for clone AI648596.

[10495] SEQ ID NO: 10456 represents the cDNA sequence for clone AI648600.

[10496] SEQ ID NO: 10457 represents the cDNA sequence for clone AI653439.

[10497] SEQ ID NO: 10458 represents the cDNA sequence for clone AI653445.

[10498] SEQ ID NO: 10459 represents the cDNA sequence for clone AI653457.

[10499] SEQ ID NO: 10460 represents the cDNA sequence for clone AI653459.

[10500] SEQ ID NO: 10461 represents the cDNA sequence for clone AI653460.

[10501] SEQ ID NO: 10462 represents the cDNA sequence for clone AI653464.

[10502] SEQ ID NO: 10463 represents the cDNA sequence for clone AI653472.

[10503] SEQ ID NO: 10464 represents the cDNA sequence for clone AI653482.

[10504] SEQ ID NO: 10465 represents the cDNA sequence for clone AI653487.

[10505] SEQ ID NO: 10466 represents the cDNA sequence for clone AI653489.

[10506] SEQ ID NO: 10467 represents the cDNA sequence for clone AI653490.

[10507] SEQ ID NO; 10468 represents the cDNA sequence for clone AI653493.

[10508] SEQ ID NO: 10469 represents the cDNA sequence for clone AI653499.

[10509] SEQ ID NO: 10470 represents the cDNA sequence for clone AI653502.

[10510] SEQ ID NO: 10471 represents the cDNA sequence for clone AI653506.

[10511] SEQ ID NO: 10472 represents the cDNA sequence for clone AI653508.

[10512] SEQ ID NO: 10473 represents the cDNA sequence for clone AI653511.

[10513] SEQ ID NO: 10474 represents the cDNA sequence for clone AI653512.

[10514] SEQ ID NO: 10475 represents the cDNA sequence for clone AI653520.

[10515] SEQ ID NO: 10476 represents the cDNA sequence for clone AI653524.

[10516] SEQ ID NO: 10477 represents the cDNA sequence for clone AI653533.

[10517] SEQ ID NO: 10478 represents the cDNA sequence for clone AI653538.

[10518] SEQ ID NO: 10479 represents the cDNA sequence for clone AI653547.

[10519] SEQ ID NO: 10480 represents the cDNA sequence for clone AI653551.

[10520] SEQ ID NO: 10481 represents the cDNA sequence for clone AI653555.

[10521] SEQ ID NO: 10482 represents the cDNA sequence for clone AI653558.

[10522] SEQ ID NO: 10483 represents the cDNA sequence for clone AI653559.

[10523] SEQ ID NO: 10484 represents the cDNA sequence for clone AI653564.

[10524] SEQ ID NO: 10485 represents the cDNA sequence for clone AI653567.

[10525] SEQ ID NO: 10486 represents the cDNA sequence for clone AI653594.

[10526] SEQ ID NO: 10487 represents the cDNA sequence for clone AI654241.

[10527] SEQ ID NO: 10488 represents the cDNA sequence for clone AI654242.

[10528] SEQ ID NO: 10489 represents the cDNA sequence for clone AI654245.

[10529] SEQ ID NO: 10490 represents the cDNA sequence for clone AI654251.

[10530] SEQ ID NO: 10491 represents the cDNA sequence for clone AI654256.

[10531] SEQ ID NO: 10492 represents the cDNA sequence for clone AI654257.

[10532] SEQ ID NO: 10493 represents the cDNA sequence for clone AI654258.

[10533] SEQ ID NO: 10494 represents the cDNA sequence for clone AI654261.

[10534] SEQ ID NO: 10495 represents the cDNA sequence for clone AI654268.

[10535] SEQ ID NO: 10496 represents the cDNA sequence for clone AI654291.

[10536] SEQ ID NO: 10497 represents the cDNA sequence for clone AI654292.

[10537] SEQ ID NO: 10498 represents the cDNA sequence for clone AI654298.

[10538] SEQ ID NO: 10499 represents the cDNA sequence for clone AI654299.

[10539] SEQ ID NO: 10500 represents the cDNA sequence for clone AI654300.

[10540] SEQ ID NO: 10501 represents the cDNA sequence for clone AI654306.

[10541] SEQ ID NO: 10502 represents the cDNA sequence for clone AI654313.

[10542] SEQ ID NO: 10503 represents the cDNA sequence for clone AI654316.

[10543] SEQ ID NO: 10504 represents the cDNA sequence for clone AI654321.

[10544] SEQ ID NO: 10505 represents the cDNA sequence for clone AI654322.

[10545] SEQ ID NO: 10506 represents the cDNA sequence for clone AI654383.

[10546] SEQ ID NO: 10507 represents the cDNA sequence for clone AI654387.

[10547] SEQ ID NO: 10508 represents the cDNA sequence for clone AI654400.

[10548] SEQ ID NO: 10509 represents the cDNA sequence for clone AI654403.

[10549] SEQ ID NO: 10510 represents the cDNA sequence for clone AI654450.

[10550] SEQ ID NO: 10511 represents the cDNA sequence for clone AI654452.

[10551] SEQ ID NO: 10512 represents the cDNA sequence for clone AI654453.

[10552] SEQ ID NO: 10513 represents the cDNA sequence for clone AI654454.

[10553] SEQ ID NO: 10514 represents the cDNA sequence for clone AI654459.

[10554] SEQ ID NO: 10515 represents the cDNA sequence for clone AI654462.

[10555] SEQ ID NO: 10516 represents the cDNA sequence for clone AI654470.

[10556] SEQ ID NO: 10517 represents the cDNA sequence for clone AI654471.

[10557] SEQ ID NO: 10518 represents the cDNA sequence for clone AI654472.

[10558] SEQ ID NO: 10519 represents the cDNA sequence for clone AI654477.

[10559] SEQ ID NO: 10520 represents the cDNA sequence for clone AI654478.

[10560] SEQ ID NO: 10521 represents the cDNA sequence for clone AI654517.

[10561] SEQ ID NO: 10522 represents the cDNA sequence for clone AI654518.

[10562] SEQ ID NO: 10523 represents the cDNA sequence for clone AI654519.

[10563] SEQ ID NO: 10524 represents the cDNA sequence for clone AI654522.

[10564] SEQ ID NO: 10525 represents the cDNA sequence for clone AI654529.

[10565] SEQ ID NO: 10526 represents the cDNA sequence for clone AI654530.

[10566] SEQ ID NO: 10527 represents the cDNA sequence for clone AI654533.

[10567] SEQ ID NO: 10528 represents the cDNA sequence for clone AI654592.

[10568] SEQ ID NO: 10529 represents the cDNA sequence for clone AI654600.

[10569] SEQ ID NO: 10530 represents the cDNA sequence for clone AI654652.

[10570] SEQ ID NO: 10531 represents the cDNA sequence for clone AI654654.

[10571] SEQ ID NO: 10532 represents the cDNA sequence for clone AI654659.

[10572] SEQ ID NO: 10533 represents the cDNA sequence for clone AI654660.

[10573] SEQ ID NO: 10534 represents the cDNA sequence for clone AI654663.

[10574] SEQ ID NO: 10535 represents the cDNA sequence for clone AI654671.

[10575] SEQ ID NO: 10536 represents the cDNA sequence for clone AI654673.

[10576] SEQ ID NO: 10537 represents the cDNA sequence for clone AI654674.

[10577] SEQ ID NO: 10538 represents the cDNA sequence for clone AI654675.

[10578] SEQ ID NO: 10539 represents the cDNA sequence for clone AI654677.

[10579] SEQ ID NO: 10540 represents the cDNA sequence for clone AI654678.

[10580] SEQ ID NO: 10541 represents the cDNA sequence for clone AI654734.

[10581] SEQ ID NO: 10542 represents the cDNA sequence for clone AI654737.

[10582] SEQ ID NO: 10543 represents the cDNA sequence for clone AI654738.

[10583] SEQ ID NO: 10544 represents the cDNA sequence for clone AI654739.

[10584] SEQ ID NO: 10545 represents the cDNA sequence for clone AI654740.

[10585] SEQ ID NO: 10546 represents the cDNA sequence for clone AI654744.

[10586] SEQ ID NO: 10547 represents the cDNA sequence for clone AI654745.

[10587] SEQ ID NO: 10548 represents the cDNA sequence for clone AI654748.

[10588] SEQ ID NO: 10549 represents the cDNA sequence for clone AI654749.

[10589] SEQ ID NO: 10550 represents the cDNA sequence for clone AI654752.

[10590] SEQ ID NO: 10551 represents the cDNA sequence for clone AI654757.

[10591] SEQ ID NO: 10552 represents the cDNA sequence for clone AI654758.

[10592] SEQ ID NO: 10553 represents the cDNA sequence for clone AI672105.

[10593] SEQ ID NO: 10554 represents the cDNA sequence for clone AI672108.

[10594] SEQ ID NO: 10555 represents the cDNA sequence for clone AI672110.

[10595] SEQ ID NO: 10556 represents the cDNA sequence for clone AI672115.

[10596] SEQ ID NO: 10557 represents the cDNA sequence for clone AI672117.

[10597] SEQ ID NO: 10558 represents the cDNA sequence for clone AI672119.

[10598] SEQ ID NO: 10559 represents the cDNA sequence for clone AI672122.

[10599] SEQ ID NO: 10560 represents the cDNA sequence for clone AI672123.

[10600] SEQ ID NO: 10561 represents the cDNA sequence for clone AI672130.

[10601] SEQ ID NO: 10562 represents the cDNA sequence for clone AF126507.

[10602] SEQ ID NO: 10563 represents the cDNA sequence for clone AF136410.

[10603] SEQ ID NO: 10564 represents the cDNA sequence for clone AF136412.

[10604] SEQ ID NO: 10565 represents the cDNA sequence for clone AF136413.

[10605] SEQ ID NO: 10566 represents the cDNA sequence for clone AF136414.

[10606] SEQ ID NO: 10567 represents the cDNA sequence for clone AF136415.

[10607] SEQ ID NO: 10568 represents the cDNA sequence for clone AF136416.

[10608] SEQ ID NO: 10569 represents the cDNA sequence for clone AF136417.

[10609] SEQ ID NO: 10570 represents the cDNA sequence for clone AI732121.

[10610] SEQ ID NO: 10571 represents the cDNA sequence for clone AI732179.

[10611] SEQ ID NO: 10572 represents the cDNA sequence for clone AI732347.

[10612] SEQ ID NO: 10573 represents the cDNA sequence for clone AI732348.

[10613] SEQ ID NO: 10574 represents the cDNA sequence for clone AI732349.

[10614] SEQ ID NO: 10575 represents the cDNA sequence for clone AI732379.

[10615] SEQ ID NO: 10576 represents the cDNA sequence for clone AI732495.

[10616] SEQ ID NO: 10577 represents the cDNA sequence for clone AI732496.

[10617] SEQ ID NO: 10578 represents the cDNA sequence for clone AI732497.

[10618] SEQ ID NO: 10579 represents the cDNA sequence for clone AI732498.

[10619] SEQ ID NO: 10580 represents the cDNA sequence for clone AI732499.

[10620] SEQ ID NO: 10581 represents the cDNA sequence for clone AI732500.

[10621] SEQ ID NO: 10582 represents the cDNA sequence for clone AI732501.

[10622] SEQ ID NO: 10583 represents the cDNA sequence for clone AI732502.

[10623] SEQ ID NO: 10584 represents the cDNA sequence for clone AI732543.

[10624] SEQ ID NO: 10585 represents the cDNA sequence for clone AI732544.

[10625] SEQ ID NO: 10586 represents the cDNA sequence for clone AI732545.

[10626] SEQ ID NO: 10587 represents the cDNA sequence for clone AI732575.

[10627] SEQ ID NO: 10588 represents the cDNA sequence for clone AI732576.

[10628] SEQ ID NO: 10589 represents the cDNA sequence for clone AI732577.

[10629] SEQ ID NO: 10590 represents the cDNA sequence for clone AI732578.

[10630] SEQ ID NO: 10591 represents the cDNA sequence for clone AI732579.

[10631] SEQ ID NO: 10592 represents the cDNA sequence for clone AI732580.

[10632] SEQ ID NO: 10593 represents the cDNA sequence for clone AI732581.

[10633] SEQ ID NO: 10594 represents the cDNA sequence for clone AI732582.

[10634] SEQ ID NO: 10595 represents the cDNA sequence for clone AI732583.

[10635] SEQ ID NO: 10596 represents the cDNA sequence for clone AI732584.

[10636] SEQ ID NO: 10597 represents the cDNA sequence for clone AI732585.

[10637] SEQ ID NO: 10598 represents the cDNA sequence for clone AI732586.

[10638] SEQ ID NO: 10599 represents the cDNA sequence for clone AI732587.

[10639] SEQ ID NO: 10600 represents the cDNA sequence for clone AI732609.

[10640] SEQ ID NO: 10601 represents the cDNA sequence for clone AI732610.

[10641] SEQ ID NO: 10602 represents the cDNA sequence for clone AI732611.

[10642] SEQ ID NO: 10603 represents the cDNA sequence for clone AI732612.

[10643] SEQ ID NO: 10604 represents the cDNA sequence for clone AI732613.

[10644] SEQ ID NO: 10605 represents the cDNA sequence for clone AI732614.

[10645] SEQ ID NO: 10606 represents the cDNA sequence for clone AI732615.

[10646] SEQ ID NO: 10607 represents the cDNA sequence for clone AI732616.

[10647] SEQ ID NO: 10608 represents the cDNA sequence for clone AI732617.

[10648] SEQ ID NO: 10609 represents the cDNA sequence for clone AI732618.

[10649] SEQ ID NO: 10610 represents the cDNA sequence for clone AI732619.

[10650] SEQ ID NO: 10611 represents the cDNA sequence for clone AI732620.

[10651] SEQ ID NO: 10612 represents the cDNA sequence for clone AI732621.

[10652] SEQ ID NO: 10613 represents the cDNA sequence for clone AI732622.

[10653] SEQ ID NO: 10614 represents the cDNA sequence for clone AI732623.

[10654] SEQ ID NO: 10615 represents the cDNA sequence for clone AI732624.

[10655] SEQ ID NO: 10616 represents the cDNA sequence for clone AI732625.

[10656] SEQ ID NO: 10617 represents the cDNA sequence for clone AI732692.

[10657] SEQ ID NO: 10618 represents the cDNA sequence for clone AI732693.

[10658] SEQ ID NO: 10619 represents the cDNA sequence for clone AI732694.

[10659] SEQ ID NO: 10620 represents the cDNA sequence for clone AI732695.

[10660] SEQ ID NO: 10621 represents the cDNA sequence for clone AI732697.

[10661] SEQ ID NO: 10622 represents the cDNA sequence for clone AI732698.

[10662] SEQ ID NO: 10623 represents the cDNA sequence for clone AI732699.

[10663] SEQ ID NO: 10624 represents the cDNA sequence for clone AI732700.

[10664] SEQ ID NO: 10625 represents the cDNA sequence for clone AI732702.

[10665] SEQ ID NO: 10626 represents the cDNA sequence for clone AI732705.

[10666] SEQ ID NO: 10627 represents the cDNA sequence for clone AI732706.

[10667] SEQ ID NO: 10628 represents the cDNA sequence for clone AI732727.

[10668] SEQ ID NO: 10629 represents the cDNA sequence for clone AI732728.

[10669] SEQ ID NO: 10630 represents the cDNA sequence for clone AI732729.

[10670] SEQ ID NO: 10631 represents the cDNA sequence for clone AI732730.

[10671] SEQ ID NO: 10632 represents the cDNA sequence for clone AI732731.

[10672] SEQ ID NO: 10633 represents the cDNA sequence for clone AI732732.

[10673] SEQ ID NO: 10634 represents the cDNA sequence for clone AI732733.

[10674] SEQ ID NO: 10635 represents the cDNA sequence for clone AI732734.

[10675] SEQ ID NO: 10636 represents the cDNA sequence for clone AI732736.

[10676] SEQ ID NO: 10637 represents the cDNA sequence for clone AI732737.

[10677] SEQ ID NO: 10638 represents the cDNA sequence for clone AI732738.

[10678] SEQ ID NO: 10639 represents the cDNA sequence for clone AI732739.

[10679] SEQ ID NO: 10640 represents the cDNA sequence for clone AI732740.

[10680] SEQ ID NO: 10641 represents the cDNA sequence for clone AI732741.

[10681] SEQ ID NO: 10642 represents the cDNA sequence for clone AI732742.

[10682] SEQ ID NO: 10643 represents the cDNA sequence for clone AI732744.

[10683] SEQ ID NO: 10644 represents the cDNA sequence for clone AI732746.

[10684] SEQ ID NO: 10645 represents the cDNA sequence for clone AI732747.

[10685] SEQ ID NO: 10646 represents the cDNA sequence for clone AI732749.

[10686] SEQ ID NO: 10647 represents the cDNA sequence for clone AI732763.

[10687] SEQ ID NO: 10648 represents the cDNA sequence for clone AI732764.

[10688] SEQ ID NO: 10649 represents the cDNA sequence for clone AI732765.

[10689] SEQ ID NO: 10650 represents the cDNA sequence for clone AI732766.

[10690] SEQ ID NO: 10651 represents the cDNA sequence for clone AI732767.

[10691] SEQ ID NO: 10652 represents the cDNA sequence for clone AI732768.

[10692] SEQ ID NO: 10653 represents the cDNA sequence for clone AI732769.

[10693] SEQ ID NO: 10654 represents the cDNA sequence for clone AI732770.

[10694] SEQ ID NO: 10655 represents the cDNA sequence for clone AI732773.

[10695] SEQ ID NO: 10656 represents the cDNA sequence for clone AI732774.

[10696] SEQ ID NO: 10657 represents the cDNA sequence for clone AI732776.

[10697] SEQ ID NO: 10658 represents the cDNA sequence for clone AI732777.

[10698] SEQ ID NO: 10659 represents the cDNA sequence for clone AI732778.

[10699] SEQ ID NO: 10660 represents the cDNA sequence for clone AI732779.

[10700] SEQ ID NO: 10661 represents the cDNA sequence for clone AI732780.

[10701] SEQ ID NO: 10662 represents the cDNA sequence for clone AI732781.

[10702] SEQ ID NO: 10663 represents the cDNA sequence for clone AI732782.

[10703] SEQ ID NO: 10664 represents the cDNA sequence for clone AI732783.

[10704] SEQ ID NO: 10665 represents the cDNA sequence for clone AI732784.

[10705] SEQ ID NO: 10666 represents the cDNA sequence for clone AI732807.

[10706] SEQ ID NO: 10667 represents the cDNA sequence for clone AI732808.

[10707] SEQ ID NO: 10668 represents the cDNA sequence for clone AI732810.

[10708] SEQ ID NO: 10669 represents the cDNA sequence for clone AI732812.

[10709] SEQ ID NO: 10670 represents the cDNA sequence for clone AI732813.

[10710] SEQ ID NO: 10671 represents the cDNA sequence for clone AI732814.

[10711] SEQ ID NO: 10672 represents the cDNA sequence for clone AI732816.

[10712] SEQ ID NO: 10673 represents the cDNA sequence for clone AI732817.

[10713] SEQ ID NO: 10674 represents the cDNA sequence for clone AI732819.

[10714] SEQ ID NO: 10675 represents the cDNA sequence for clone AI732820.

[10715] SEQ ID NO: 10676 represents the cDNA sequence for clone AI732821.

[10716] SEQ ID NO: 10677 represents the cDNA sequence for clone AI732823.

[10717] SEQ ID NO: 10678 represents the cDNA sequence for clone AI732824.

[10718] SEQ ID NO: 10679 represents the cDNA sequence for clone AI732825.

[10719] SEQ ID NO: 10680 represents the cDNA sequence for clone AI732826.

[10720] SEQ ID NO: 10681 represents the cDNA sequence for clone AI732827.

[10721] SEQ ID NO: 10682 represents the cDNA sequence for clone AI732828.

[10722] SEQ ID NO: 10683 represents the cDNA sequence for clone AI732856.

[10723] SEQ ID NO: 10684 represents the cDNA sequence for clone AI732858

[10724] SEQ ID NO: 10685 represents the cDNA sequence for clone AI732859.

[10725] SEQ ID NO: 10686 represents the cDNA sequence for clone AI732861.

[10726] SEQ ID NO: 10687 represents the cDNA sequence for clone AI732862.

[10727] SEQ ID NO: 10688 represents the cDNA sequence for clone AI732863.

[10728] SEQ ID NO: 10689 represents the cDNA sequence for clone AI732864.

[10729] SEQ ID NO: 10690 represents the cDNA sequence for clone AI732865.

[10730] SEQ ID NO: 10691 represents the cDNA sequence for clone AI732866.

[10731] SEQ ID NO: 10692 represents the cDNA sequence for clone AI732867.

[10732] SEQ ID NO: 10693 represents the cDNA sequence for clone AI732868.

[10733] SEQ ID NO: 10694 represents the cDNA sequence for clone AI732869.

[10734] SEQ ID NO: 10695 represents the cDNA sequence for clone AI732908.

[10735] SEQ ID NO: 10696 represents the cDNA sequence for clone AI732910.

[10736] SEQ ID NO: 10697 represents the cDNA sequence for clone AI733712.

[10737] SEQ ID NO: 10698 represents the cDNA sequence for clone AI733713.

[10738] SEQ ID NO: 10699 represents the cDNA sequence for clone AI733716.

[10739] SEQ ID NO: 10700 represents the cDNA sequence for clone AI733871.

[10740] SEQ ID NO: 10701 represents the cDNA sequence for clone AI733872.

[10741] SEQ ID NO: 10702 represents the cDNA sequence for clone AI733873.

[10742] SEQ ID NO: 10703 represents the cDNA sequence for clone AI733874.

[10743] SEQ ID NO: 10704 represents the cDNA sequence for clone AI733875.

[10744] SEQ ID NO: 10705 represents the cDNA sequence for clone AI733876.

[10745] SEQ ID NO: 10706 represents the cDNA sequence for clone AI733877.

[10746] SEQ ID NO: 10707 represents the cDNA sequence for clone AI733878.

[10747] SEQ ID NO: 10708 represents the cDNA sequence for clone AI733879.

[10748] SEQ ID NO: 10709 represents the cDNA sequence for clone AI733880.

[10749] SEQ ID NO: 10710 represents the cDNA sequence for clone AI733881.

[10750] SEQ ID NO: 10711 represents the cDNA sequence for clone AI733883.

[10751] SEQ ID NO: 10712 represents the cDNA sequence for clone AI733902.

[10752] SEQ ID NO: 10713 represents the cDNA sequence for clone AI733903.

[10753] SEQ ID NO: 10714 represents the cDNA sequence for clone AI733904.

[10754] SEQ ID NO: 10715 represents the cDNA sequence for clone AI733905.

[10755] SEQ ID NO: 10716 represents the cDNA sequence for clone AI733906.

[10756] SEQ ID NO: 10717 represents the cDNA sequence for clone AI733907.

[10757] SEQ ID NO: 10718 represents the cDNA sequence for clone AI733908.

[10758] SEQ ID NO: 10719 represents the cDNA sequence for clone AI733909

[10759] SEQ ID NO: 10720 represents the cDNA sequence for clone AI733910.

[10760] SEQ ID NO: 10721 represents the cDNA sequence for clone AI733911.

[10761] SEQ ID NO: 10722 represents the cDNA sequence for clone AI733912.

[10762] SEQ ID NO: 10723 represents the cDNA sequence for clone AI733914.

[10763] SEQ ID NO: 10724 represents the cDNA sequence for clone AI733915.

[10764] SEQ ID NO: 10725 represents the cDNA sequence for clone AI733916.

[10765] SEQ ID NO: 10726 represents the cDNA sequence for clone AI733917.

[10766] SEQ ID NO: 10727 represents the cDNA sequence for clone AI733918.

[10767] SEQ ID NO: 10728 represents the cDNA sequence for clone AI733919.

[10768] SEQ ID NO: 10729 represents the cDNA sequence for clone AI733921.

[10769] SEQ ID NO: 10730 represents the cDNA sequence for clone AI733922.

[10770] SEQ ID NO: 10731 represents the cDNA sequence for clone AI733923.

[10771] SEQ ID NO: 10732 represents the cDNA sequence for clone AI733926.

[10772] SEQ ID NO: 10733 represents the cDNA sequence for clone AI733927.

[10773] SEQ ID NO: 10734 represents the cDNA sequence for clone AI733928.

[10774] SEQ ID NO: 10735 represents the cDNA sequence for clone AI733930.

[10775] SEQ ID NO: 10736 represents the cDNA sequence for clone AI733931.

[10776] SEQ ID NO: 10737 represents the cDNA sequence for clone AI733932.

[10777] SEQ ID NO: 10738 represents the cDNA sequence for clone AI733933.

[10778] SEQ ID NO: 10739 represents the cDNA sequence for clone AI733934.

[10779] SEQ ID NO: 10740 represents the cDNA sequence for clone AI733935.

[10780] SEQ ID NO: 10741 represents the cDNA sequence for clone AI733936.

[10781] SEQ ID NO: 10742 represents the cDNA sequence for clone AI733937.

[10782] SEQ ID NO: 10743 represents the cDNA sequence for clone AI733938.

[10783] SEQ ID NO: 10744 represents the cDNA sequence for clone AI733939.

[10784] SEQ ID NO: 10745 represents the cDNA sequence for clone AI733941.

[10785] SEQ ID NO: 10746 represents the cDNA sequence for clone AI733942.

[10786] SEQ ID NO: 10747 represents the cDNA sequence for clone AI733943.

[10787] SEQ ID NO: 10748 represents the cDNA sequence for clone AI733944.

[10788] SEQ ID NO: 10749 represents the cDNA sequence for clone AI733946.

[10789] SEQ ID NO: 10750 represents the cDNA sequence for clone AI733947.

[10790] SEQ ID NO: 10751 represents the cDNA sequence for clone AI733950.

[10791] SEQ ID NO: 10752 represents the cDNA sequence for clone AI733951.

[10792] SEQ ID NO: 10753 represents the cDNA sequence for clone AI733952.

[10793] SEQ ID NO: 10754 represents the cDNA sequence for clone AI733953.

[10794] SEQ ID NO: 10755 represents the cDNA sequence for clone AI733954.

[10795] SEQ ID NO: 10756 represents the cDNA sequence for clone AI733955.

[10796] SEQ ID NO: 10757 represents the cDNA sequence for clone AI733957.

[10797] SEQ ID NO: 10758 represents the cDNA sequence for clone AI733958.

[10798] SEQ ID NO: 10759 represents the cDNA sequence for clone AI733959.

[10799] SEQ ID NO: 10760 represents the cDNA sequence for clone AI733960.

[10800] SEQ ID NO: 10761 represents the cDNA sequence for clone AI733961.

[10801] SEQ ID NO: 10762 represents the cDNA sequence for clone AI733962.

[10802] SEQ ID NO: 10763 represents the cDNA sequence for clone AI733964.

[10803] SEQ ID NO: 10764 represents the cDNA sequence for clone AI733966.

[10804] SEQ ID NO: 10765 represents the cDNA sequence for clone AI733976.

[10805] SEQ ID NO: 10766 represents the cDNA sequence for clone AI733977.

[10806] SEQ ID NO: 10767 represents the cDNA sequence for clone AI733979.

[10807] SEQ ID NO: 10768 represents the cDNA sequence for clone AI733980.

[10808] SEQ ID NO: 10769 represents the cDNA sequence for clone AI733981.

[10809] SEQ ID NO: 10770 represents the cDNA sequence for clone AI733983.

[10810] SEQ ID NO: 10771 represents the cDNA sequence for clone AI733984.

[10811] SEQ ID NO: 10772 represents the cDNA sequence for clone AI733986.

[10812] SEQ ID NO: 10773 represents the cDNA sequence for clone AI733988.

[10813] SEQ ID NO: 10774 represents the cDNA sequence for clone AI733989.

[10814] SEQ ID NO: 10775 represents the cDNA sequence for clone AI733990.

[10815] SEQ ID NO: 10776 represents the cDNA sequence for clone AI733991.

[10816] SEQ ID NO: 10777 represents the cDNA sequence for clone AI733992.

[10817] SEQ ID NO: 10778 represents the cDNA sequence for clone AI733994.

[10818] SEQ ID NO: 10779 represents the cDNA sequence for clone AI733995.

[10819] SEQ ID NO: 10780 represents the cDNA sequence for clone AI733997.

[10820] SEQ ID NO: 10781 represents the cDNA sequence for clone AI733998.

[10821] SEQ ID NO: 10782 represents the cDNA sequence for clone AI734001.

[10822] SEQ ID NO: 10783 represents the cDNA sequence for clone AI734002.

[10823] SEQ ID NO: 10784 represents the cDNA sequence for clone AI734003.

[10824] SEQ ID NO: 10785 represents the cDNA sequence for clone AI734018.

[10825] SEQ ID NO: 10786 represents the cDNA sequence for clone AI734020.

[10826] SEQ ID NO: 10787 represents the cDNA sequence for clone AI734021.

[10827] SEQ ID NO: 10788 represents the cDNA sequence for clone AI734022.

[10828] SEQ ID NO: 10789 represents the cDNA sequence for clone AI734023.

[10829] SEQ ID NO: 10790 represents the cDNA sequence for clone AI734025.

[10830] SEQ ID NO: 10791 represents the cDNA sequence for clone AI734026.

[10831] SEQ ID NO: 10792 represents the cDNA sequence for clone AI734027.

[10832] SEQ ID NO: 10793 represents the cDNA sequence for clone AI734028.

[10833] SEQ ID NO: 10794 represents the cDNA sequence for clone AI734030.

[10834] SEQ ID NO: 10795 represents the cDNA sequence for clone AI734031.

[10835] SEQ ID NO: 10796 represents the cDNA sequence for clone AI734032.

[10836] SEQ ID NO: 10797 represents the cDNA sequence for clone AI734033.

[10837] SEQ ID NO: 10798 represents the cDNA sequence for clone AI734034.

[10838] SEQ ID NO: 10799 represents the cDNA sequence for clone AI734037.

[10839] SEQ ID NO: 10800 represents the cDNA sequence for clone AI734038.

[10840] SEQ ID NO: 10801 represents the cDNA sequence for clone AI734039.

[10841] SEQ ID NO: 10802 represents the cDNA sequence for clone AI734040.

[10842] SEQ ID NO: 10803 represents the cDNA sequence for clone AI734041.

[10843] SEQ ID NO: 10804 represents the cDNA sequence for clone AI734042.

[10844] SEQ ID NO: 10805 represents the cDNA sequence for clone AI734043.

[10845] SEQ ID NO: 10806 represents the cDNA sequence for clone AI734045.

[10846] SEQ ID NO: 10807 represents the cDNA sequence for clone AI734046.

[10847] SEQ ID NO: 10808 represents the cDNA sequence for clone AI734047.

[10848] SEQ ID NO: 10809 represents the cDNA sequence for clone AI734048.

[10849] SEQ ID NO: 10810 represents the cDNA sequence for clone AI734099.

[10850] SEQ ID NO: 10811 represents the cDNA sequence for clone AI734100.

[10851] SEQ ID NO: 10812 represents the cDNA sequence for clone AI734101.

[10852] SEQ ID NO: 10813 represents the cDNA sequence for clone AI734102.

[10853] SEQ ID NO: 10814 represents the cDNA sequence for clone AI734103.

[10854] SEQ ID NO: 10815 represents the cDNA sequence for clone AI734104.

[10855] SEQ ID NO: 10816 represents the cDNA sequence for clone AI734109.

[10856] SEQ ID NO: 10817 represents the cDNA sequence for clone AI734123.

[10857] SEQ ID NO: 10818 represents the cDNA sequence for clone AI734124.

[10858] SEQ ID NO: 10819 represents the cDNA sequence for clone AI734125.

[10859] SEQ ID NO: 10820 represents the cDNA sequence for clone AI734126.

[10860] SEQ ID NO: 10821 represents the cDNA sequence for clone AI734127.

[10861] SEQ ID NO: 10822 represents the cDNA sequence for clone AI734128.

[10862] SEQ ID NO: 10823 represents the cDNA sequence for clone AI734129.

[10863] SEQ ID NO: 10824 represents the cDNA sequence for clone AI734130.

[10864] SEQ ID NO: 10825 represents the cDNA sequence for clone AI734131.

[10865] SEQ ID NO: 10826 represents the cDNA sequence for clone AI734132.

[10866] SEQ ID NO: 10827 represents the cDNA sequence for clone AI734133.

[10867] SEQ ID NO: 10828 represents the cDNA sequence for clone AI734134.

[10868] SEQ ID NO: 10829 represents the cDNA sequence for clone AI734136.

[10869] SEQ ID NO: 10830 represents the cDNA sequence for clone AI734139.

[10870] SEQ ID NO: 10831 represents the cDNA sequence for clone AI734142.

[10871] SEQ ID NO: 10832 represents the cDNA sequence for clone AI734157.

[10872] SEQ ID NO: 10833 represents the cDNA sequence for clone AI734161.

[10873] SEQ ID NO: 10834 represents the cDNA sequence for clone AI734162.

[10874] SEQ ID NO: 10835 represents the cDNA sequence for clone AI734164.

[10875] SEQ ID NO: 10836 represents the cDNA sequence for clone AI734166.

[10876] SEQ ID NO: 10837 represents the cDNA sequence for clone AI734167.

[10877] SEQ ID NO: 10838 represents the cDNA sequence for clone AI734168.

[10878] SEQ ID NO: 10839 represents the cDNA sequence for clone AI734169.

[10879] SEQ ID NO: 10840 represents the cDNA sequence for clone AI734191.

[10880] SEQ ID NO: 10841 represents the cDNA sequence for clone AI734192.

[10881] SEQ ID NO: 10842 represents the cDNA sequence for clone AI734195.

[10882] SEQ ID NO: 10843 represents the cDNA sequence for clone AI734196.

[10883] SEQ ID NO: 10844 represents the cDNA sequence for clone AI734198.

[10884] SEQ ID NO: 10845 represents the cDNA sequence for clone AI734199.

[10885] SEQ ID NO: 10846 represents the cDNA sequence for clone AI734200.

[10886] SEQ ID NO: 10847 represents the cDNA sequence for clone AI734202.

[10887] SEQ ID NO: 10848 represents the cDNA sequence for clone AI734203.

[10888] SEQ ID NO: 10849 represents the cDNA sequence for clone AI734204.

[10889] SEQ ID NO: 10850 represents the cDNA sequence for clone AI734205.

[10890] SEQ ID NO: 10851 represents the cDNA sequence for clone AI738829.

[10891] SEQ ID NO: 10852 represents the cDNA sequence for clone AI738831.

[10892] SEQ ID NO: 10853 represents the cDNA sequence for clone AI738834.

[10893] SEQ ID NO: 10854 represents the cDNA sequence for clone AI738835.

[10894] SEQ ID NO: 10855 represents the cDNA sequence for clone AI738836.

[10895] SEQ ID NO: 10856 represents the cDNA sequence for clone AI738841.

[10896] SEQ ID NO: 10857 represents the cDNA sequence for clone AI738843.

[10897] SEQ ID NO: 10858 represents the cDNA sequence for clone AI738851.

[10898] SEQ ID NO: 10859 represents the cDNA sequence for clone AI738866.

[10899] SEQ ID NO: 10860 represents the cDNA sequence for clone AI738868.

[10900] SEQ ID NO: 10861 represents the cDNA sequence for clone AI738871.

[10901] SEQ ID NO: 10862 represents the cDNA sequence for clone AI738877.

[10902] SEQ ID NO: 10863 represents an extended sequence for clone O1028C.

[10903] SEQ ID NO: 10864 represents the full length DNA sequence of clone O1029C.

[10904] SEQ ID NO: 10865 represents the cDNA sequence for clone O1003C-R.

[10905] SEQ ID NO: 10866 represents an extended sequence for clone O1030C-R.

[10906] SEQ ID NO: 10867 represents an additional extended sequence for clone O1030C-R.

[10907] SEQ ID NO: 10868 represents an extended sequence for clone O1030C.

[10908] SEQ ID NO: 10869 represents an additional extended sequence for clone O1030C.

[10909] SEQ ID NO: 10870 represents the full length DNA sequence for clone O1031C.

[10910] SEQ ID NO: 10871 represents an extended sequence for clone O1031C.

[10911] SEQ ID NO: 10872 represents the full length DNA sequence for clone O1032C.

[10912] SEQ ID NO: 10873 represents an extended sequence for clone O1032C.

[10913] SEQ ID NO: 10874 represents the full length DNA sequence of clone O1033C.

[10914] SEQ ID NO: 10875 represents an extended sequence for clone O1033C.

[10915] SEQ ID NO: 10876 represents the full length DNA sequence for clone O1034C.

[10916] SEQ ID NO: 10877 represents the DNA sequence of the 5′ end of clone O1034C.

[10917] SEQ ID NO: 10878 represents the DNA sequence of the 3′ end of the clone O1034C.

[10918] SEQ ID NO: 10879 represents an extended sequence for clone O1035C.

[10919] SEQ ID NO: 10880 represents the DNA sequence from clone O1036C.

[10920] SEQ ID NO: 10881 represents an extended sequence for clone O1036C.

[10921] SEQ ID NO: 10882 represents an additional extended sequence for clone O1036C.

[10922] SEQ ID NO: 10883 represents an additional extended sequence for clone O1036C.

[10923] SEQ ID NO: 10884 represents an additional extended sequence for clone O1036C.

[10924] SEQ ID NO: 10885 represents an extended sequence for clone O1062C.

[10925] SEQ ID NO: 10886 represents the DNA sequence of clone O1063C isolated from Ovary Chip.

[10926] SEQ ID NO: 10887 represents the DNA sequence of clone O1064C isolated from Ovary Chip.

[10927] SEQ ID NO: 10888 represents the DNA sequence of clone O1065C isolated from Ovary Chip.

[10928] SEQ ID NO: 10889 represents the DNA sequence of clone O1066C isolated from Ovary Chip.

[10929] SEQ ID NO: 10890 represents the DNA sequence of clone O1067C isolated from Ovary Chip.

[10930] SEQ ID NO: 10891 represents an extended sequence for clone O1067C.

[10931] SEQ ID NO: 10892 represents the DNA sequence of clone O1068C isolated from Ovary Chip.

[10932] SEQ ID NO: 10893 represents an extended sequence for clone O1068C.

[10933] SEQ ID NO: 10894 represents the DNA sequence for clone O1069C.

[10934] SEQ ID NO: 10895 represents the DNA sequence for clone O1070C.

[10935] SEQ ID NO: 10896 represents the DNA sequence for clone O1071C.

[10936] SEQ ID NO: 10897 represents an extended sequence for clone O1071C.

[10937] SEQ ID NO: 10898 represents the DNA sequence for clone O1072C.

[10938] SEQ ID NO: 10899 represents an extended sequence for clone.

[10939] SEQ ID NO: 10900 represents the DNA sequence for clone O1073C.

[10940] SEQ ID NO: 10901 represents an extended sequence for the clone O1073C.

[10941] SEQ ID NO: 10902 represents the DNA sequence for clone O1074C.

[10942] SEQ ID NO: 10903 represents an extended sequence for clone O1074C.

[10943] SEQ ID NO: 10904 represents the DNA sequence for clone O1075C.

[10944] SEQ ID NO: 10905 represents an extended sequence for clone O1075 C.

[10945] SEQ ID NO: 10906 represents the DNA sequence for clone O1076C.

[10946] SEQ ID NO: 10907 represents an extended sequence for clone O1076C.

[10947] SEQ ID NO: 10908 represents the DNA sequence for clone O1077C.

[10948] SEQ ID NO: 10909 represents the DNA sequence for clone O1078C.

[10949] SEQ ID NO: 10910 represents an extended sequence for clone O1078C.

[10950] SEQ ID NO: 10911 represents the DNA sequence for clone O1079C.

[10951] SEQ ID NO: 10912 represents an extended sequence for clone O1079C.

### DETAILED DESCRIPTION OF THE INVENTION

[10952] The present invention is directed generally to compositions and their use in the therapy and diagnosis of cancer, particularly ovarian cancer. As described further below, illustrative compositions of the present invention include, but are not restricted to, polypeptides, particularly immunogenic polypeptides, polynucleotides encoding such polypeptides, antibodies and other binding agents, antigen presenting cells (APCs) and immune system cells (e.g., T cells).

[10953] The practice of the present invention will employ, unless indicated specifically to the contrary, conventional methods of virology, immunology, microbiology, molecular biology and recombinant DNA techniques within the skill of the art, many of which are described below for the purpose of illustration. Such techniques are explained fully in the literature. See, e.g., Sambrook, et al. Molecular Cloning: A Laboratory Manual (2nd Edition, 1989); Maniatis et al. Molecular Cloning: A Laboratory Manual (1982); DNA Cloning: A Practical Approach, vol. I & II (D. Glover, ed.); Oligonucleotide Synthesis (N. Gait, ed., 1984); Nucleic Acid Hybridization (B. Hames & S. Higgins, eds., 1985); Transcription and Translation (B. Hames & S. Higgins, eds., 1984); Animal Cell Culture (R. Freshney, ed., 1986); Perbal, A Practical Guide to Molecular Cloning (1984).

[10954] All publications, patents and patent applications cited herein, whether supra or infra, are hereby incorporated by reference in their entirety.

[10955] As used in this specification and the appended claims, the singular forms “a,” “an” and “the” include plural references unless the content clearly dictates otherwise.

[10956] Polypeptide Compositions

[10957] As used herein, the term “polypeptide” “is used in its conventional meaning, i.e., as a sequence of amino acids. The polypeptides are not limited to a specific length of the product; thus, peptides, oligopeptides, and proteins are included within the definition of polypeptide, and such terms may be used interchangeably herein unless specifically indicated otherwise. This term also does not refer to or exclude post-expression modifications of the polypeptide, for example, glycosylations, acetylations, phosphorylations and the like, as well as other modifications known in the art, both naturally occurring and non-naturally occurring. A polypeptide may be an entire protein, or a subsequence thereof. Particular polypeptides of interest in the context of this invention are amino acid subsequences comprising epitopes, i.e., antigenic determinants substantially responsible for the immunogenic properties of a polypeptide and being capable of evoking an immune response.

[10958] Particularly illustrative polypeptides of the present invention comprise those encoded by a polynucleotide sequence set forth in any one of SEQ ID NO: 1-10,912, or a sequence that hybridizes under moderately stringent conditions, or, alternatively, under highly stringent conditions, to a polynucleotide sequence set forth in any one of SEQ ID NO: 1-10,912.

[10959] The polypeptides of the present invention are sometimes herein referred to as ovarian tumor proteins or ovarian tumor polypeptides, as an indication that their identification has been based at least in part upon their increased levels of expression in ovarian tumor samples. Thus, an “ovarian tumor polypeptide” or “ovarian tumor protein,” refers generally to a polypeptide sequence of the present invention, or a polynucleotide sequence encoding such a polypeptide, that is expressed in a substantial proportion of ovarian tumor samples, for example preferably greater than about 20%, more preferably greater than about 30%, and most preferably greater than about 50% or more of ovarian tumor samples tested, at a level that is at least two fold, and preferably at least five fold, greater than the level of expression in normal tissues, as determined using a representative assay provided herein. An ovarian tumor polypeptide sequence of the invention, based upon its increased level of expression in tumor cells, has particular utility both as a diagnostic marker as well as a therapeutic target, as further described below.

[10960] In certain preferred embodiments, the polypeptides of the invention are immunogenic, i.e., they react detectably within an immunoassay (such as an ELISA or T-cell stimulation assay) with antisera and/or T-cells from a patient with ovarian cancer. Screening for immunogenic activity can be performed using techniques well known to the skilled artisan. For example, such screens can be performed using methods such as those described in Harlow and Lane, Antibodies: A Laboratory Manual, Cold Spring Harbor Laboratory, 1988. In one illustrative example, a polypeptide may be immobilized on a solid support and contacted with patient sera to allow binding of antibodies within the sera to the immobilized polypeptide. Unbound sera may then be removed and bound antibodies detected using, for example, ¹²⁵I-labeled Protein A.

[10961] As would be recognized by the skilled artisan, immunogenic portions of the polypeptides disclosed herein are also encompassed by the present invention. An “immunogenic portion,” as used herein, is a fragment of an immunogenic polypeptide of the invention that itself is immunologically reactive (i.e., specifically binds) with the B-cells and/or T-cell surface antigen receptors that recognize the polypeptide. Immunogenic portions may generally be identified using well known techniques, such as those summarized in Paul, Fundamental Immunology, 3rd ed., 243-247 (Raven Press, 1993) and references cited therein. Such techniques include screening polypeptides for the ability to react with antigen-specific antibodies, antisera and/or T-cell lines or clones. As used herein, antisera and antibodies are “antigen-specific” if they specifically bind to an antigen (i.e., they react with the protein in an ELISA or other immunoassay, and do not react detectably with unrelated proteins). Such antisera and antibodies may be prepared as described herein, and using well-known techniques.

[10962] In one preferred embodiment, an immunogenic portion of a polypeptide of the present invention is a portion that reacts with antisera and/or T-cells at a level that is not substantially less than the reactivity of the full-length polypeptide (e.g., in an ELISA and/or T-cell reactivity assay). Preferably, the level of immunogenic activity of the immunogenic portion is at least about 50%, preferably at least about 70% and most preferably greater than about 90% of the immunogenicity for the full-length polypeptide. In some instances, preferred immunogenic portions will be identified that have a level of immunogenic activity greater than that of the corresponding full-length polypeptide, e.g., having greater than about 100% or 150% or more immunogenic activity.

[10963] In certain other embodiments, illustrative immunogenic portions may include peptides in which an N-terminal leader sequence and/or transmembrane domain have been deleted. Other illustrative immunogenic portions will contain a small N- and/or C-terminal deletion (e.g., 1-30 amino acids, preferably 5-15 amino acids), relative to the mature protein.

[10964] In another embodiment, a polypeptide composition of the invention may also comprise one or more polypeptides that are immunologically reactive with T cells and/or antibodies generated against a polypeptide of the invention, particularly a polypeptide having an amino acid sequence disclosed herein, or to an immunogenic fragment or variant thereof.

[10965] In another embodiment of the invention, polypeptides are provided that comprise one or more polypeptides that are capable of eliciting T cells and/or antibodies that are immunologically reactive with one or more polypeptides described herein, or one or more polypeptides encoded by contiguous nucleic acid sequences contained in the polynucleotide sequences disclosed herein, or immunogenic fragments or variants thereof, or to one or more nucleic acid sequences which hybridize to one or more of these sequences under conditions of moderate to high stringency.

[10966] The present invention, in another aspect, provides polypeptide fragments comprising at least about 5, 10, 15, 20, 25, 50, or 100 contiguous amino acids, or more, including all intermediate lengths, of a polypeptide compositions set forth herein, such as those encoded by a polynucleotide sequence set forth in a sequence of

[10967] SEQ ID NO: 1-10,912.

[10968] In another aspect, the present invention provides variants of the polypeptide compositions described herein. Polypeptide variants generally encompassed by the present invention will typically exhibit at least about 70%, 75%, 80%, 85%, 90%, 91%, 92%, 93%, 94%, 95%, 96%, 97%, 98%, or 99% or more identity (determined as described below), along its length, to a polypeptide sequences set forth herein.

[10969] In one preferred embodiment, the polypeptide fragments and variants provided by the present invention are immunologically reactive with an antibody and/or T-cell that reacts with a full-length polypeptide specifically set forth herein.

[10970] In another preferred embodiment, the polypeptide fragments and variants provided by the present invention exhibit a level of immunogenic activity of at least about 50%, preferably at least about 70%, and most preferably at least about 90% or more of that exhibited by a full-length polypeptide sequence specifically set forth herein.

[10971] A polypeptide “variant,” as the term is used herein, is a polypeptide that typically differs from a polypeptide specifically disclosed herein in one or more substitutions, deletions, additions and/or insertions. Such variants may be naturally occurring or may be synthetically generated, for example, by modifying one or more of the above polypeptide sequences of the invention and evaluating their immunogenic activity as described herein and/or using any of a number of techniques well known in the art.

[10972] For example, certain illustrative variants of the polypeptides of the invention include those in which one or more portions, such as an N-terminal leader sequence or transmembrane domain, have been removed. Other illustrative variants include variants in which a small portion (e.g., 1-30 amino acids, preferably 5-15 amino acids) has been removed from the N- and/or C-terminal of the mature protein.

[10973] In many instances, a variant will contain conservative substitutions. A “conservative substitution” is one in which an amino acid is substituted for another amino acid that has similar properties, such that one skilled in the art of peptide chemistry would expect the secondary structure and hydropathic nature of the polypeptide to be substantially unchanged. As described above, modifications may be made in the structure of the polynucleotides and polypeptides of the present invention and still obtain a functional molecule that encodes a variant or derivative polypeptide with desirable characteristics, e.g., with immunogenic characteristics. When it is desired to alter the amino acid sequence of a polypeptide to create an equivalent, or even an improved, immunogenic variant or portion of a polypeptide of the invention, one skilled in the art will typically change one or more of the codons of the encoding DNA sequence according to Table 1.

[10974] For example, certain amino acids may be substituted for other amino acids in a protein structure without appreciable loss of interactive binding capacity with structures such as, for example, antigen-binding regions of antibodies or binding sites on substrate molecules. Since it is the interactive capacity and nature of a protein that defines that protein's biological functional activity, certain amino acid sequence substitutions can be made in a protein sequence, and, of course, its underlying DNA coding sequence, and nevertheless obtain a protein with like properties. It is thus contemplated that various changes may be made in the peptide sequences of the disclosed compositions, or corresponding DNA sequences which encode said peptides without appreciable loss of their biological utility or activity.

TABLE 1

| Amino Acids | | | Codons | | | | | |
|---|---|---|---|---|---|---|---|---|
| Alanine | Ala | A | GCA | GCC | GCG | GGU | | |
| Cysteine | Cys | C | UGC | UGU | | | | |
| Aspartic acid | Asp | D | GAC | GAU | | | | |
| Glutamic acid | Glu | E | GAA | GAG | | | | |
| Phenylalanine | Phe | F | UUC | UUU | | | | |
| Glycine | Gly | G | GGA | GGC | GGG | GGU | | |
| Histidine | His | H | CAC | CAU | | | | |
| Isoleucine | Ile | I | AUA | AUC | AUU | | | |
| Lysine | Lys | K | AAA | AAG | | | | |
| Leucine | Leu | L | UUA | UUG | CUA | CUC | CUG | CUU |
| Methionine | Met | M | AUG | | | | | |
| Asparagine | Asn | N | AAC | AAU | | | | |
| Proline | Pro | P | CCA | CCC | CCG | CCU | | |
| Glutamine | Gln | Q | CAA | CAG | | | | |
| Arginine | Arg | R | AGA | AGG | CGA | CGC | CGG | CGU |
| Serine | Ser | S | AGC | AGU | UCA | UCC | UCG | UCU |
| Threonine | Thr | T | ACA | ACC | ACG | ACU | | |
| Valine | Val | V | GUA | GUC | GUG | GUU | | |
| Tryptophan | Trp | W | UGG | | | | | |
| Tyrosine | Tyr | Y | UAC | UAU | | | | |

[10975] In making such changes, the hydropathic index of amino acids may be considered. The importance of the hydropathic amino acid index in conferring interactive biologic function on a protein is generally understood in the art (Kyte and Doolittle, 1982, incorporated herein by reference). It is accepted that the relative hydropathic character of the amino acid contributes to the secondary structure of the resultant protein, which in turn defines the interaction of the protein with other molecules, for example, enzymes, substrates, receptors, DNA, antibodies, antigens, and the like. Each amino acid has been assigned a hydropathic index on the basis of its hydrophobicity and charge characteristics (Kyte and Doolittle, 1982). These values are: isoleucine (+4.5); valine (+4.2); leucine (+3.8); phenylalanine (+2.8); cysteine/cystine (+2.5); methionine (+1.9); alanine (+1.8); glycine (−0.4); threonine (−0.7); serine (−0.8); tryptophan (−0.9); tyrosine (−1.3); proline (−1.6); histidine (−3.2); glutamate (−3.5); glutamine (−3.5); aspartate (−3.5); asparagine (−3.5); lysine (−3.9); and arginine (−4.5).

[10976] It is known in the art that certain amino acids may be substituted by other amino acids having a similar hydropathic index or score and still result in a protein with similar biological activity, i.e. still obtain a biological functionally equivalent protein. In making such changes, the substitution of amino acids whose hydropathic indices are within ±2 is preferred, those within ±1 are particularly preferred, and those within ±0.5 are even more particularly preferred. It is also understood in the art that the substitution of like amino acids can be made effectively on the basis of hydrophilicity. U.S. Pat. No. 4,554,101 (specifically incorporated herein by reference in its entirety), states that the greatest local average hydrophilicity of a protein, as governed by the hydrophilicity of its adjacent amino acids, correlates with a biological property of the protein.

[10977] As detailed in U.S. Pat. No. 4,554,101, the following hydrophilicity values have been assigned to amino acid residues: arginine (+3.0); lysine (+3.0); aspartate (+3.0±1); glutamate (+3.0±1); serine (+0.3); asparagine (+0.2); glutamine (+0.2); glycine (0); threonine (−0.4); proline (−0.5±1); alanine (−0.5); histidine (−0.5); cysteine (−1.0); methionine (−1.3); valine (−1.5); leucine (−1.8); isoleucine (−1.8); tyrosine (−2.3); phenylalanine (−2.5); tryptophan (−3.4). It is understood that an amino acid can be substituted for another having a similar hydrophilicity value and still obtain a biologically equivalent, and in particular, an immunologically equivalent protein. In such changes, the substitution of amino acids whose hydrophilicity values are within ±2 is preferred, those within ±1 are particularly preferred, and those within ±0.5 are even more particularly preferred.

[10978] As outlined above, amino acid substitutions are generally therefore based on the relative similarity of the amino acid side-chain substituents, for example, their hydrophobicity, hydrophilicity, charge, size, and the like. Exemplary substitutions that take various of the foregoing characteristics into consideration are well known to those of skill in the art and include: arginine and lysine; glutamate and aspartate; serine and threonine; glutamine and asparagine; and valine, leucine and isoleucine.

[10979] In addition, any polynucleotide may be further modified to increase stability in vivo. Possible modifications include, but are not limited to, the addition of flanking sequences at the 5′ and/or 3′ ends; the use of phosphorothioate or 2′ O-methyl rather than phosphodiesterase linkages in the backbone; and/or the inclusion of nontraditional bases such as inosine, queosine and wybutosine, as well as acetyl-methyl-, thio- and other modified forms of adenine, cytidine, guanine, thymine and uridine.

[10980] Amino acid substitutions may further be made on the basis of similarity in polarity, charge, solubility, hydrophobicity, hydrophilicity and/or the amphipathic nature of the residues. For example, negatively charged amino acids include aspartic acid and glutamic acid; positively charged amino acids include lysine and arginine; and amino acids with uncharged polar head groups having similar hydrophilicity values include leucine, isoleucine and valine; glycine and alanine; asparagine and glutamine; and serine, threonine, phenylalanine and tyrosine. Other groups of amino acids that may represent conservative changes include: (1) ala, pro, gly, glu, asp, gln, asn, ser, thr; (2) cys, ser, tyr, thr; (3) val, ile, leu, met, ala, phe; (4) lys, arg, his; and (5) phe, tyr, trp, his. A variant may also, or alternatively, contain nonconservative changes. In a preferred embodiment, variant polypeptides differ from a native sequence by substitution, deletion or addition of five amino acids or fewer. Variants may also (or alternatively) be modified by, for example, the deletion or addition of amino acids that have minimal influence on the immunogenicity, secondary structure and hydropathic nature of the polypeptide.

[10981] As noted above, polypeptides may comprise a signal (or leader) sequence at the N-terminal end of the protein, which co-translationally or post-translationally directs transfer of the protein. The polypeptide may also be conjugated to a linker or other sequence for ease of synthesis, purification or identification of the polypeptide (e.g., poly-His), or to enhance binding of the polypeptide to a solid support. For example, a polypeptide may be conjugated to an immunoglobulin Fc region.

[10982] When comparing polypeptide sequences, two sequences are said to be “identical” if the sequence of amino acids in the two sequences is the same when aligned for maximum correspondence, as described below. Comparisons between two sequences are typically performed by comparing the sequences over a comparison window to identify and compare local regions of sequence similarity. A “comparison window” as used herein, refers to a segment of at least about 20 contiguous positions, usually 30 to about 75, 40 to about 50, in which a sequence may be compared to a reference sequence of the same number of contiguous positions after the two sequences are optimally aligned.

[10983] Optimal alignment of sequences for comparison may be conducted using the Megalign program in the Lasergene suite of bioinformatics software (DNASTAR, Inc., Madison, Wis.), using default parameters. This program embodies several alignment schemes described in the following references: Dayhoff, M. O. (1978) A model of evolutionary change in proteins—Matrices for detecting distant relationships. In Dayhoff, M. O. (ed.) Atlas of Protein Sequence and Structure, National Biomedical Research Foundation, Washington D.C. Vol. 5, Suppl. 3, pp. 345-358; Hein J. (1990) Unified Approach to Alignment and Phylogenes pp. 626-645 Methods in Enzymology vol. 183, Academic Press, Inc., San Diego, Calif.; Higgins, D. G. and Sharp, P. M. (1989) CABIOS 5:151-153; Myers, E. W. and Muller W. (1988) CABIOS 4:11-17; Robinson, E. D. (1971) Comb. Theor 11:105; Saitou, N. Nei, M. (1987) Mol. Biol. Evol. 4:406-425; Sneath, P. H. A. and Sokal, R. R. (1973) Numerical Taxonomy—the Principles and Practice of Numerical Taxonomy, Freeman Press, San Francisco, Calif.; Wilbur, W. J. and Lipman, D. J. (1983) Proc. Natl. Acad., Sci. USA 80:726-730.

[10984] Alternatively, optimal alignment of sequences for comparison may be conducted by the local identity algorithm of Smith and Waterman (1981) Add. APL. Math 2:482, by the identity alignment algorithm of Needleman and Wunsch (1970) J. Mol. Biol. 48:443, by the search for similarity methods of Pearson and Lipman (1988) Proc. Natl. Acad. Sci. USA 85: 2444, by computerized implementations of these algorithms (GAP, BESTFIT, BLAST, FASTA, and TFASTA in the Wisconsin Genetics Software Package, Genetics Computer Group (GCG), 575 Science Dr., Madison, Wis.), or by inspection.

[10985] One preferred example of algorithms that are suitable for determining percent sequence identity and sequence similarity are the BLAST and BLAST 2.0 algorithms, which are described in Altschul et al. (1977) Nucl. Acids Res. 25:3389-3402 and Altschul et al. (1990) J. Mol. Biol. 215:403-410, respectively. BLAST and BLAST 2.0 can be used, for example with the parameters described herein, to determine percent sequence identity for the polynucleotides and polypeptides of the invention. Software for performing BLAST analyses is publicly available through the National Center for Biotechnology Information. For amino acid sequences, a scoring matrix can be used to calculate the cumulative score. Extension of the word hits in each direction are halted when: the cumulative alignment score falls off by the quantity X from its maximum achieved value; the cumulative score goes to zero or below, due to the accumulation of one or more negative-scoring residue alignments; or the end of either sequence is reached. The BLAST algorithm parameters W, T and X determine the sensitivity and speed of the alignment.

[10986] In one preferred approach, the “percentage of sequence identity” is determined by comparing two optimally aligned sequences over a window of comparison of at least 20 positions, wherein the portion of the polypeptide sequence in the comparison window may comprise additions or deletions (i.e., gaps) of 20 percent or less, usually 5 to 15 percent, or 10 to 12 percent, as compared to the reference sequences (which does not comprise additions or deletions) for optimal alignment of the two sequences. The percentage is calculated by determining the number of positions at which the identical amino acid residue occurs in both sequences to yield the number of matched positions, dividing the number of matched positions by the total number of positions in the reference sequence (i.e., the window size) and multiplying the results by 100 to yield the percentage of sequence identity.

[10987] Within other illustrative embodiments, a polypeptide may be a xenogeneic polypeptide that comprises an polypeptide having substantial sequence identity, as described above, to the human polypeptide (also termed autologous antigen) which served as a reference polypeptide, but which xenogeneic polypeptide is derived from a different, non-human species. One skilled in the art will recognize that “self” antigens are often poor stimulators of CD8+ and CD4+ T-lymphocyte responses, and therefore efficient immunotherapeutic strategies directed against tumor polypeptides require the development of methods to overcome immune tolerance to particular self tumor polypeptides. For example, humans immunized with prostase protein from a xenogeneic (non human) origin are capable of mounting an immune response against the counterpart human protein, e.g. the human prostase tumor protein present on human tumor cells. Accordingly, the present invention provides methods for purifying the xenogeneic form of the tumor proteins set forth herein, such as those encoded by polynucleotide sequences set forth in

[10988] SEQ ID NO: 1-10,912.

[10989] Therefore, one aspect of the present invention provides xenogeneic variants of the polypeptide compositions described herein. Such xenogeneic variants generally encompassed by the present invention will typically exhibit at least about 70%, 75%, 80%, 85%, 90%, 91%, 92%, 93%, 94%, 95%, 96%, 97%, 98%, or 99% or more identity along their lengths, to a polypeptide sequences set forth herein.

[10990] More particularly, the invention is directed to mouse, rat, monkey, porcine and other non-human polypeptides which can be used as xenogeneic forms of human polypeptides set forth herein, to induce immune responses directed against tumor polypeptides of the invention.

[10991] Within other illustrative embodiments, a polypeptide may be a fusion polypeptide that comprises multiple polypeptides as described herein, or that comprises at least one polypeptide as described herein and an unrelated sequence, such as a known tumor protein. A fusion partner may, for example, assist in providing T helper epitopes (an immunological fusion partner), preferably T helper epitopes recognized by humans, or may assist in expressing the protein (an expression enhancer) at higher yields than the native recombinant protein. Certain preferred fusion partners are both immunological and expression enhancing fusion partners. Other fusion partners may be selected so as to increase the solubility of the polypeptide or to enable the polypeptide to be targeted to desired intracellular compartments. Still further fusion partners include affinity tags, which facilitate purification of the polypeptide.

[10992] Fusion polypeptides may generally be prepared using standard techniques, including chemical conjugation. Preferably, a fusion polypeptide is expressed as a recombinant polypeptide, allowing the production of increased levels, relative to a non-fused polypeptide, in an expression system. Briefly, DNA sequences encoding the polypeptide components may be assembled separately, and ligated into an appropriate expression vector. The 3′ end of the DNA sequence encoding one polypeptide component is ligated, with or without a peptide linker, to the 5′ end of a DNA sequence encoding the second polypeptide component so that the reading frames of the sequences are in phase. This permits translation into a single fusion polypeptide that retains the biological activity of both component polypeptides.

[10993] A peptide linker sequence may be employed to separate the first and second polypeptide components by a distance sufficient to ensure that each polypeptide folds into its secondary and tertiary structures. Such a peptide linker sequence is incorporated into the fusion polypeptide using standard techniques well known in the art. Suitable peptide linker sequences may be chosen based on the following factors: (1) their ability to adopt a flexible extended conformation; (2) their inability to adopt a secondary structure that could interact with functional epitopes on the first and second polypeptides; and (3) the lack of hydrophobic or charged residues that might react with the polypeptide functional epitopes. Preferred peptide linker sequences contain Gly, Asn and Ser residues. Other near neutral amino acids, such as Thr and Ala may also be used in the linker sequence. Amino acid sequences which may be usefully employed as linkers include those disclosed in Maratea et al., Gene 40:39-46, 1985; Murphy et al., Proc. Natl. Acad. Sci. USA 83:8258-8262, 1986; U.S. Pat. Nos. 4,935,233 and 4,751,180. The linker sequence may generally be from 1 to about 50 amino acids in length. Linker sequences are not required when the first and second polypeptides have non-essential N-terminal amino acid regions that can be used to separate the functional domains and prevent steric interference.

[10994] The ligated DNA sequences are operably linked to suitable transcriptional or translational regulatory elements. The regulatory elements responsible for expression of DNA are located only 5′ to the DNA sequence encoding the first polypeptides. Similarly, stop codons required to end translation and transcription termination signals are only present 3′ to the DNA sequence encoding the second polypeptide.

[10995] The fusion polypeptide can comprise a polypeptide as described herein together with an unrelated immunogenic protein, such as an immunogenic protein capable of eliciting a recall response. Examples of such proteins include tetanus, tuberculosis and hepatitis proteins (see, for example, Stoute et al. New Engl. J. Med., 336:86-91, 1997).

[10996] In one preferred embodiment, the immunological fusion partner is derived from a Mycobacterium sp., such as a Mycobacterium tuberculosis-derived Ra12 fragment. Ra12 compositions and methods for their use in enhancing the expression and/or immunogenicity of heterologous polynucleotide/polypeptide sequences is described in U.S. Patent Application No. 60/158,585, the disclosure of which is incorporated herein by reference in its entirety. Briefly, Ra12 refers to a polynucleotide region that is a subsequence of a Mycobacterium tuberculosis MTB32A nucleic acid. MTB32A is a serine protease of 32 KD molecular weight encoded by a gene in virulent and avirulent strains of M. tuberculosis. The nucleotide sequence and amino acid sequence of MTB32A have been described (for example, U.S. Patent Application No. 60/158,585; see also, Skeiky et al., Infection and Immun. (1999) 67:3998-4007, incorporated herein by reference). C-terminal fragments of the MTB32A coding sequence express at high levels and remain as a soluble polypeptides throughout the purification process. Moreover, Ra12 may enhance the immunogenicity of heterologous immunogenic polypeptides with which it is fused. One preferred Ra12 fusion polypeptide comprises a 14 KD C-terminal fragment corresponding to amino acid residues 192 to 323 of MTB32A. Other preferred Ra12 polynucleotides generally comprise at least about 15 consecutive nucleotides, at least about 30 nucleotides, at least about 60 nucleotides, at least about 100 nucleotides, at least about 200 nucleotides, or at least about 300 nucleotides that encode a portion of a Ra12 polypeptide. Ra12 polynucleotides may comprise a native sequence (i.e., an endogenous sequence that encodes a Ra12 polypeptide or a portion thereof) or may comprise a variant of such a sequence. Ra12 polynucleotide variants may contain one or more substitutions, additions, deletions and/or insertions such that the biological activity of the encoded fusion polypeptide is not substantially diminished, relative to a fusion polypeptide comprising a native Ra12 polypeptide. Variants preferably exhibit at least about 70% identity, more preferably at least about 80% identity and most preferably at least about 90% identity to a polynucleotide sequence that encodes a native Ra12 polypeptide or a portion thereof.

[10997] Within other preferred embodiments, an immunological fusion partner is derived from protein D, a surface protein of the gram-negative bacterium Haemophilus influenza B (WO 91/18926). Preferably, a protein D derivative comprises approximately the first third of the protein (e.g., the first N-terminal 100-110 amino acids), and a protein D derivative may be lipidated. Within certain preferred embodiments, the first 109 residues of a Lipoprotein D fusion partner is included on the N-terminus to provide the polypeptide with additional exogenous T-cell epitopes and to increase the expression level in E. coli (thus functioning as an expression enhancer). The lipid tail ensures optimal presentation of the antigen to antigen presenting cells. Other fusion partners include the non-structural protein from influenzae virus, NS1 (hemaglutinin). Typically, the N-terminal 81 amino acids are used, although different fragments that include T-helper epitopes may be used.

[10998] In another embodiment, the immunological fusion partner is the protein known as LYTA, or a portion thereof (preferably a C-terminal portion). LYTA is derived from Streptococcus pneumoniae, which synthesizes an N-acetyl-L-alanine amidase known as amidase LYTA (encoded by the LytA gene; Gene 43:265-292, 1986). LYTA is an autolysin that specifically degrades certain bonds in the peptidoglycan backbone. The C-terminal domain of the LYTA protein is responsible for the affinity to the choline or to some choline analogues such as DEAE. This property has been exploited for the development of E. coli C-LYTA expressing plasmids useful for expression of fusion proteins. Purification of hybrid proteins containing the C-LYTA fragment at the amino terminus has been described (see Biotechnology 10:795-798, 1992). Within a preferred embodiment, a repeat portion of LYTA may be incorporated into a fusion polypeptide. A repeat portion is found in the C-terminal region starting at residue 178. A particularly preferred repeat portion incorporates residues 188-305.

[10999] Yet another illustrative embodiment involves fusion polypeptides, and the polynucleotides encoding them, wherein the fusion partner comprises a targeting signal capable of directing a polypeptide to the endosomal/lysosomal compartment, as described in U.S. Pat. No. 5,633,234. An immunogenic polypeptide of the invention, when fused with this targeting signal, will associate more efficiently with MHC class II molecules and thereby provide enhanced in vivo stimulation of CD4⁺ T-cells specific for the polypeptide.

[11000] Polypeptides of the invention are prepared using any of a variety of well known synthetic and/or recombinant techniques, the latter of which are further described below. Polypeptides, portions and other variants generally less than about 150 amino acids can be generated by synthetic means, using techniques well known to those of ordinary skill in the art. In one illustrative example, such polypeptides are synthesized using any of the commercially available solid-phase techniques, such as the Merrifield solid-phase synthesis method, where amino acids are sequentially added to a growing amino acid chain. See Merrifield, J. Am. Chem. Soc. 85:2149-2146, 1963. Equipment for automated synthesis of polypeptides is commercially available from suppliers such as Perkin Elmer/Applied BioSystems Division (Foster City, Calif.), and may be operated according to the manufacturer's instructions.

[11001] In general, polypeptide compositions (including fusion polypeptides) of the invention are isolated. An “isolated” polypeptide is one that is removed from its original environment. For example, a naturally-occurring protein or polypeptide is isolated if it is separated from some or all of the coexisting materials in the natural system. Preferably, such polypeptides are also purified, e.g., are at least about 90% pure, more preferably at least about 95% pure and most preferably at least about 99% pure.

[11002] Polynucleotide Compositions

[11003] The present invention, in other aspects, provides polynucleotide compositions. The terms “DNA” and “polynucleotide” are used essentially interchangeably herein to refer to a DNA molecule that has been isolated free of total genomic DNA of a particular species. “Isolated,” as used herein, means that a polynucleotide is substantially away from other coding sequences, and that the DNA molecule does not contain large portions of unrelated coding DNA, such as large chromosomal fragments or other functional genes or polypeptide coding regions. Of course, this refers to the DNA molecule as originally isolated, and does not exclude genes or coding regions later added to the segment by the hand of man.

[11004] As will be understood by those skilled in the art, the polynucleotide compositions of this invention can include genomic sequences, extra-genomic and plasmid-encoded sequences and smaller engineered gene segments that express, or may be adapted to express, proteins, polypeptides, peptides and the like. Such segments may be naturally isolated, or modified synthetically by the hand of man.

[11005] As will be also recognized by the skilled artisan, polynucleotides of the invention may be single-stranded (coding or antisense) or double-stranded, and may be DNA (genomic, cDNA or synthetic) or RNA molecules. RNA molecules may include HnRNA molecules, which contain introns and correspond to a DNA molecule in a one-to-one manner, and mRNA molecules, which do not contain introns. Additional coding or non-coding sequences may, but need not, be present within a polynucleotide of the present invention, and a polynucleotide may, but need not, be linked to other molecules and/or support materials.

[11006] Polynucleotides may comprise a native sequence (i.e., an endogenous sequence that encodes a polypeptide/protein of the invention or a portion thereof) or may comprise a sequence that encodes a variant or derivative, preferably and immunogenic variant or derivative, of such a sequence.

[11007] Therefore, according to another aspect of the present invention, polynucleotide compositions are provided that comprise some or all of a polynucleotide sequence set forth in any one of SEQ ID NO: 1-10,912, complements of a polynucleotide sequence set forth in any one of SEQ ID NO: 1-10,912, and degenerate variants of a polynucleotide sequence set forth in any one of SEQ ID NO: 1-10,912. In certain preferred embodiments, the polynucleotide sequences set forth herein encode immunogenic polypeptides, as described above.

[11008] In other related embodiments, the present invention provides polynucleotide variants having substantial identity to the sequences disclosed herein in SEQ ID NO: 1-10,912, for example those comprising at least 70% sequence identity, preferably at least 75%, 80%, 85%, 90%, 95%, 96%, 97%, 98%, or 99% or higher, sequence identity compared to a polynucleotide sequence of this invention using the methods described herein, (e.g., BLAST analysis using standard parameters, as described below). One skilled in this art will recognize that these values can be appropriately adjusted to determine corresponding identity of proteins encoded by two nucleotide sequences by taking into account codon degeneracy, amino acid similarity, reading frame positioning and the like.

[11009] Typically, polynucleotide variants will contain one or more substitutions, additions, deletions and/or insertions, preferably such that the immunogenicity of the polypeptide encoded by the variant polynucleotide is not substantially diminished relative to a polypeptide encoded by a polynucleotide sequence specifically set forth herein). The term “variants” should also be understood to encompass homologous genes of xenogenic origin.

[11010] In additional embodiments, the present invention provides polynucleotide fragments comprising or consisting of various lengths of contiguous stretches of sequence identical to or complementary to one or more of the sequences disclosed herein. For example, polynucleotides are provided by this invention that comprise or consist of at least about 10, 15, 20, 30, 40, 50, 75, 100, 150, 200, 300, 400, 500 or 1000 or more contiguous nucleotides of one or more of the sequences disclosed herein as well as all intermediate lengths there between. It will be readily understood that “intermediate lengths”, in this context, means any length between the quoted values, such as 16, 17, 18, 19, etc.; 21, 22, 23, etc.; 30, 31, 32, etc.; 50, 51, 52, 53, etc.; 100, 101, 102, 103, etc.; 150, 151, 152, 153, etc.; including all integers through 200-500; 500-1,000, and the like. A polynucleotide sequence as described here may be extended at one or both ends by additional nucleotides not found in the native sequence. This additional sequence may consist of 1, 2, 3, 4, 5, 6, 7, 8, 9, 10, 11, 12, 13, 14, 15, 16, 17, 18, 19, or 20 nucleotides at either end of the disclosed sequence or at both ends of the disclosed sequence.

[11011] In another embodiment of the invention, polynucleotide compositions are provided that are capable of hybridizing under moderate to high stringency conditions to a polynucleotide sequence provided herein, or a fragment thereof, or a complementary sequence thereof. Hybridization techniques are well known in the art of molecular biology. For purposes of illustration, suitable moderately stringent conditions for testing the hybridization of a polynucleotide of this invention with other polynucleotides include prewashing in a solution of 5×SSC, 0.5% SDS, 1.0 mM EDTA (pH 8.0); hybridizing at 50° C.-60° C., 5×SSC, overnight; followed by washing twice at 65° C. for 20 minutes with each of 2×, 0.5× and 0.2×SSC containing 0.1% SDS. One skilled in the art will understand that the stringency of hybridization can be readily manipulated, such as by altering the salt content of the hybridization solution and/or the temperature at which the hybridization is performed. For example, in another embodiment, suitable highly stringent hybridization conditions include those described above, with the exception that the temperature of hybridization is increased, e.g., to 60-65° C. or 65-70° C.

[11012] In certain preferred embodiments, the polynucleotides described above, e.g., polynucleotide variants, fragments and hybridizing sequences, encode polypeptides that are immunologically cross-reactive with a polypeptide sequence specifically set forth herein. In other preferred embodiments, such polynucleotides encode polypeptides that have a level of immunogenic activity of at least about 50%, preferably at least about 70%, and more preferably at least about 90% of that for a polypeptide sequence specifically set forth herein.

[11013] The polynucleotides of the present invention, or fragments thereof, regardless of the length of the coding sequence itself, may be combined with other DNA sequences, such as promoters, polyadenylation signals, additional restriction enzyme sites, multiple cloning sites, other coding segments, and the like, such that their overall length may vary considerably. It is therefore contemplated that a nucleic acid fragment of almost any length may be employed, with the total length preferably being limited by the ease of preparation and use in the intended recombinant DNA protocol. For example, illustrative polynucleotide segments with total lengths of about 10,000, about 5000, about 3000, about 2,000, about 1,000, about 500, about 200, about 100, about 50 base pairs in length, and the like, (including all intermediate lengths) are contemplated to be useful in many implementations of this invention.

[11014] When comparing polynucleotide sequences, two sequences are said to be “identical” if the sequence of nucleotides in the two sequences is the same when aligned for maximum correspondence, as described below. Comparisons between two sequences are typically performed by comparing the sequences over a comparison window to identify and compare local regions of sequence similarity. A “comparison window” as used herein, refers to a segment of at least about 20 contiguous positions, usually 30 to about 75, 40 to about 50, in which a sequence may be compared to a reference sequence of the same number of contiguous positions after the two sequences are optimally aligned.

[11015] Optimal alignment of sequences for comparison may be conducted using the Megalign program in the Lasergene suite of bioinformatics software (DNASTAR, Inc., Madison, Wis.), using default parameters. This program embodies several alignment schemes described in the following references: Dayhoff, M. O. (1978) A model of evolutionary change in proteins—Matrices for detecting distant relationships. In Dayhoff, M. O. (ed.) Atlas of Protein Sequence and Structure, National Biomedical Research Foundation, Washington D.C. Vol. 5, Suppl. 3, pp. 345-358; Hein J. (1990) Unified Approach to Alignment and Phylogenes pp. 626-645 Methods in Enzymology vol. 183, Academic Press, Inc., San Diego, Calif.; Higgins, D. G. and Sharp, P. M. (1989) CABIOS 5:151-153; Myers, E. W. and Muller W. (1988) CABIOS 4:11-17; Robinson, E. D. (1971) Comb. Theor 11:105; Santou, N. Nes, M. (1987) Mol. Biol. Evol. 4:406-425; Sneath, P. H. A. and Sokal, R. R. (1973) Numerical Taxonomy—the Principles and Practice of Numerical Taxonomy, Freeman Press, San Francisco, Calif.; Wilbur, W. J. and Lipman, D. J. (1983) Proc. Natl. Acad., Sci. USA 80:726-730.

[11016] Alternatively, optimal alignment of sequences for comparison may be conducted by the local identity algorithm of Smith and Waterman (1981) Add. APL. Math 2:482, by the identity alignment algorithm of Needleman and Wunsch (1970) J. Mol. Biol. 48:443, by the search for similarity methods of Pearson and Lipman (1988)Proc. Natl. Acad. Sci. USA 85: 2444, by computerized implementations of these algorithms (GAP, BESTFIT, BLAST, FASTA, and TFASTA in the Wisconsin Genetics Software Package, Genetics Computer Group (GCG), 575 Science Dr., Madison, Wis.), or by inspection.

[11017] One preferred example of algorithms that are suitable for determining percent sequence identity and sequence similarity are the BLAST and BLAST 2.0 algorithms, which are described in Altschul et al. (1977) Nucl. Acids Res. 25:3389-3402 and Altschul et al. (1990) J. Mol. Biol. 215:403-410, respectively. BLAST and BLAST 2.0 can be used, for example with the parameters described herein, to determine percent sequence identity for the polynucleotides of the invention. Software for performing BLAST analyses is publicly available through the National Center for Biotechnology Information. In one illustrative example, cumulative scores can be calculated using, for nucleotide sequences, the parameters M (reward score for a pair of matching residues; always >0) and N (penalty score for mismatching residues; always <0). Extension of the word hits in each direction are halted when: the cumulative alignment score falls off by the quantity X from its maximum achieved value; the cumulative score goes to zero or below, due to the accumulation of one or more negative-scoring residue alignments; or the end of either sequence is reached. The BLAST algorithm parameters W, T and X determine the sensitivity and speed of the alignment. The BLASTN program (for nucleotide sequences) uses as defaults a wordlength (W) of 11, and expectation (E) of 10, and the BLOSUM62 scoring matrix (see Henikoff and Henikoff (1989) Proc. Natl. Acad. Sci. USA 89:10915) alignments, (B) of 50, expectation (E) of 10, M=5, N=−4 and a comparison of both strands.

[11018] Preferably, the “percentage of sequence identity” is determined by comparing two optimally aligned sequences over a window of comparison of at least 20 positions, wherein the portion of the polynucleotide sequence in the comparison window may comprise additions or deletions (i.e., gaps) of 20 percent or less, usually 5 to 15 percent, or 10 to 12 percent, as compared to the reference sequences (which does not comprise additions or deletions) for optimal alignment of the two sequences. The percentage is calculated by determining the number of positions at which the identical nucleic acid bases occurs in both sequences to yield the number of matched positions, dividing the number of matched positions by the total number of positions in the reference sequence (i.e., the window size) and multiplying the results by 100 to yield the percentage of sequence identity.

[11019] It will be appreciated by those of ordinary skill in the art that, as a result of the degeneracy of the genetic code, there are many nucleotide sequences that encode a polypeptide as described herein. Some of these polynucleotides bear minimal homology to the nucleotide sequence of any native gene. Nonetheless, polynucleotides that vary due to differences in codon usage are specifically contemplated by the present invention. Further, alleles of the genes comprising the polynucleotide sequences provided herein are within the scope of the present invention. Alleles are endogenous genes that are altered as a result of one or more mutations, such as deletions, additions and/or substitutions of nucleotides. The resulting mRNA and protein may, but need not, have an altered structure or function. Alleles may be identified using standard techniques (such as hybridization, amplification and/or database sequence comparison).

[11020] Therefore, in another embodiment of the invention, a mutagenesis approach, such as site-specific mutagenesis, is employed for the preparation of immunogenic variants and/or derivatives of the polypeptides described herein. By this approach, specific modifications in a polypeptide sequence can be made through mutagenesis of the underlying polynucleotides that encode them. These techniques provides a straightforward approach to prepare and test sequence variants, for example, incorporating one or more of the foregoing considerations, by introducing one or more nucleotide sequence changes into the polynucleotide.

[11021] Site-specific mutagenesis allows the production of mutants through the use of specific oligonucleotide sequences which encode the DNA sequence of the desired mutation, as well as a sufficient number of adjacent nucleotides, to provide a primer sequence of sufficient size and sequence complexity to form a stable duplex on both sides of the deletion junction being traversed. Mutations may be employed in a selected polynucleotide sequence to improve, alter, decrease, modify, or otherwise change the properties of the polynucleotide itself, and/or alter the properties, activity, composition, stability, or primary sequence of the encoded polypeptide.

[11022] In certain embodiments of the present invention, the inventors contemplate the mutagenesis of the disclosed polynucleotide sequences to alter one or more properties of the encoded polypeptide, such as the immunogenicity of a polypeptide vaccine. The techniques of site-specific mutagenesis are well-known in the art, and are widely used to create variants of both polypeptides and polynucleotides. For example, site-specific mutagenesis is often used to alter a specific portion of a DNA molecule. In such embodiments, a primer comprising typically about 14 to about 25 nucleotides or so in length is employed, with about 5 to about 10 residues on both sides of the junction of the sequence being altered.

[11023] As will be appreciated by those of skill in the art, site-specific mutagenesis techniques have often employed a phage vector that exists in both a single stranded and double stranded form. Typical vectors useful in site-directed mutagenesis include vectors such as the M13 phage. These phage are readily commercially-available and their use is generally well-known to those skilled in the art. Double-stranded plasmids are also routinely employed in site directed mutagenesis that eliminates the step of transferring the gene of interest from a plasmid to a phage.

[11024] In general, site-directed mutagenesis in accordance herewith is performed by first obtaining a single-stranded vector or melting apart of two strands of a double-stranded vector that includes within its sequence a DNA sequence that encodes the desired peptide. An oligonucleotide primer bearing the desired mutated sequence is prepared, generally synthetically. This primer is then annealed with the single-stranded vector, and subjected to DNA polymerizing enzymes such as E. coli polymerase I Klenow fragment, in order to complete the synthesis of the mutation-bearing strand. Thus, a heteroduplex is formed wherein one strand encodes the original non-mutated sequence and the second strand bears the desired mutation. This heteroduplex vector is then used to transform appropriate cells, such as E. coli cells, and clones are selected which include recombinant vectors bearing the mutated sequence arrangement.

[11025] The preparation of sequence variants of the selected peptide-encoding DNA segments using site-directed mutagenesis provides a means of producing potentially useful species and is not meant to be limiting as there are other ways in which sequence variants of peptides and the DNA sequences encoding them may be obtained. For example, recombinant vectors encoding the desired peptide sequence may be treated with mutagenic agents, such as hydroxylamine, to obtain sequence variants. Specific details regarding these methods and protocols are found in the teachings of Maloy et al., 1994; Segal, 1976; Prokop and Bajpai, 1991; Kuby, 1994; and Maniatis et al., 1982, each incorporated herein by reference, for that purpose.

[11026] As used herein, the term “oligonucleotide directed mutagenesis procedure” refers to template-dependent processes and vector-mediated propagation which result in an increase in the concentration of a specific nucleic acid molecule relative to its initial concentration, or in an increase in the concentration of a detectable signal, such as amplification. As used herein, the term “oligonucleotide directed mutagenesis procedure” is intended to refer to a process that involves the template-dependent extension of a primer molecule. The term template dependent process refers to nucleic acid synthesis of an RNA or a DNA molecule wherein the sequence of the newly synthesized strand of nucleic acid is dictated by the well-known rules of complementary base pairing (see, for example, Watson, 1987). Typically, vector mediated methodologies involve the introduction of the nucleic acid fragment into a DNA or RNA vector, the clonal amplification of the vector, and the recovery of the amplified nucleic acid fragment. Examples of such methodologies are provided by U.S. Pat. No. 4,237,224, specifically incorporated herein by reference in its entirety.

[11027] In another approach for the production of polypeptide variants of the present invention, recursive sequence recombination, as described in U.S. Pat. No. 5,837,458, may be employed. In this approach, iterative cycles of recombination and screening or selection are performed to “evolve” individual polynucleotide variants of the invention having, for example, enhanced immunogenic activity.

[11028] In other embodiments of the present invention, the polynucleotide sequences provided herein can be advantageously used as probes or primers for nucleic acid hybridization. As such, it is contemplated that nucleic acid segments that comprise or consist of a sequence region of at least about a 15 nucleotide long contiguous sequence that has the same sequence as, or is complementary to, a 15 nucleotide long contiguous sequence disclosed herein will find particular utility. Longer contiguous identical or complementary sequences, e.g., those of about 20, 30, 40, 50, 100, 200, 500, 1000 (including all intermediate lengths) and even up to full length sequences will also be of use in certain embodiments.

[11029] The ability of such nucleic acid probes to specifically hybridize to a sequence of interest will enable them to be of use in detecting the presence of complementary sequences in a given sample. However, other uses are also envisioned, such as the use of the sequence information for the preparation of mutant species primers, or primers for use in preparing other genetic constructions.

[11030] Polynucleotide molecules having sequence regions consisting of contiguous nucleotide stretches of 10-14, 15-20, 30, 50, or even of 100-200 nucleotides or so (including intermediate lengths as well), identical or complementary to a polynucleotide sequence disclosed herein, are particularly contemplated as hybridization probes for use in, e.g., Southern and Northern blotting. This would allow a gene product, or fragment thereof, to be analyzed, both in diverse cell types and also in various bacterial cells. The total size of fragment, as well as the size of the complementary stretch(es), will ultimately depend on the intended use or application of the particular nucleic acid segment. Smaller fragments will generally find use in hybridization embodiments, wherein the length of the contiguous complementary region may be varied, such as between about 15 and about 100 nucleotides, but larger contiguous complementarity stretches may be used, according to the length complementary sequences one wishes to detect.

[11031] The use of a hybridization probe of about 15-25 nucleotides in length allows the formation of a duplex molecule that is both stable and selective. Molecules having contiguous complementary sequences over stretches greater than 15 bases in length are generally preferred, though, in order to increase stability and selectivity of the hybrid, and thereby improve the quality and degree of specific hybrid molecules obtained. One will generally prefer to design nucleic acid molecules having gene-complementary stretches of 15 to 25 contiguous nucleotides, or even longer where desired.

[11032] Hybridization probes may be selected from any portion of any of the sequences disclosed herein. All that is required is to review the sequences set forth herein, or to any continuous portion of the sequences, from about 15-25 nucleotides in length up to and including the full length sequence, that one wishes to utilize as a probe or primer. The choice of probe and primer sequences may be governed by various factors. For example, one may wish to employ primers from towards the termini of the total sequence.

[11033] Small polynucleotide segments or fragments may be readily prepared by, for example, directly synthesizing the fragment by chemical means, as is commonly practiced using an automated oligonucleotide synthesizer. Also, fragments may be obtained by application of nucleic acid reproduction technology, such as the PCR™ technology of U.S. Pat. No. 4,683,202 (incorporated herein by reference), by introducing selected sequences into recombinant vectors for recombinant production, and by other recombinant DNA techniques generally known to those of skill in the art of molecular biology.

[11034] The nucleotide sequences of the invention may be used for their ability to selectively form duplex molecules with complementary stretches of the entire gene or gene fragments of interest. Depending on the application envisioned, one will typically desire to employ varying conditions of hybridization to achieve varying degrees of selectivity of probe towards target sequence. For applications requiring high selectivity, one will typically desire to employ relatively stringent conditions to form the hybrids, e.g., one will select relatively low salt and/or high temperature conditions, such as provided by a salt concentration of from about 0.02 M to about 0.15 M salt at temperatures of from about 50° C. to about 70° C. Such selective conditions tolerate little, if any, mismatch between the probe and the template or target strand, and would be particularly suitable for isolating related sequences.

[11035] Of course, for some applications, for example, where one desires to prepare mutants employing a mutant primer strand hybridized to an underlying template, less stringent (reduced stringency) hybridization conditions will typically be needed in order to allow formation of the heteroduplex. In these circumstances, one may desire to employ salt conditions such as those of from about 0.15 M to about 0.9 M salt, at temperatures ranging from about 20° C. to about 55° C. Cross-hybridizing species can thereby be readily identified as positively hybridizing signals with respect to control hybridizations. In any case, it is generally appreciated that conditions can be rendered more stringent by the addition of increasing amounts of formamide, which serves to destabilize the hybrid duplex in the same manner as increased temperature. Thus, hybridization conditions can be readily manipulated, and thus will generally be a method of choice depending on the desired results.

[11036] According to another embodiment of the present invention, polynucleotide compositions comprising antisense oligonucleotides are provided. Antisense oligonucleotides have been demonstrated to be effective and targeted inhibitors of protein synthesis, and, consequently, provide a therapeutic approach by which a disease can be treated by inhibiting the synthesis of proteins that contribute to the disease. The efficacy of antisense oligonucleotides for inhibiting protein synthesis is well established. For example, the synthesis of polygalactauronase and the muscarine type 2 acetylcholine receptor are inhibited by antisense oligonucleotides directed to their respective mRNA sequences (U.S. Pat. Nos. 5,739,119 and 5,759,829). Further, examples of antisense inhibition have been demonstrated with the nuclear protein cyclin, the multiple drug resistance gene (MDG1), ICAM-1, E-selectin, STK-1, striatal GABA_{A} receptor and human EGF (Jaskulski et al., Science. 1988 June 10;240(4858):1544-6; Vasanthakumar and Ahmed, Cancer Commun. 1989;1(4):225-32; Peris et al., Brain Res Mol Brain Res. Jun. 15, 1998;57(2):310-20; U.S. Pat. Nos. 5,801,154; 5,789,573; 5,718,709 and 5,610,288). Antisense constructs have also been described that inhibit and can be used to treat a variety of abnormal cellular proliferations, e.g. cancer (U.S. Pat. Nos. 5,747,470; 5,591,317 and 5,783,683).

[11037] Therefore, in certain embodiments, the present invention provides oligonucleotide sequences that comprise all, or a portion of, any sequence that is capable of specifically binding to polynucleotide sequence described herein, or a complement thereof. In one embodiment, the antisense oligonucleotides comprise DNA or derivatives thereof In another embodiment, the oligonucleotides comprise RNA or derivatives thereof. In a third embodiment, the oligonucleotides are modified DNAs comprising a phosphorothioated modified backbone. In a fourth embodiment, the oligonucleotide sequences comprise peptide nucleic acids or derivatives thereof. In each case, preferred compositions comprise a sequence region that is complementary, and more preferably substantially-complementary, and even more preferably, completely complementary to one or more portions of polynucleotides disclosed herein. Selection of antisense compositions specific for a given gene sequence is based upon analysis of the chosen target sequence and determination of secondary structure, Tₘ, binding energy, and relative stability. Antisense compositions may be selected based upon their relative inability to form dimers, hairpins, or other secondary structures that would reduce or prohibit specific binding to the target mRNA in a host cell. Highly preferred target regions of the mRNA, are those which are at or near the AUG translation initiation codon, and those sequences which are substantially complementary to 5′ regions of the mRNA. These secondary structure analyses and target site selection considerations can be performed, for example, using v.4 of the OLIGO primer analysis software and/or the BLASTN 2.0.5 algorithm software (Altschul et al., Nucleic Acids Res. 1997, 25(17):3389-402).

[11038] The use of an antisense delivery method employing a short peptide vector, termed MPG (27 residues), is also contemplated. The MPG peptide contains a hydrophobic domain derived from the fusion sequence of HIV gp41 and a hydrophilic domain from the nuclear localization sequence of SV40 T-antigen (Morris et al., Nucleic Acids Res. Jul. 15, 1997;25(14):2730-6). It has been demonstrated that several molecules of the MPG peptide coat the antisense oligonucleotides and can be delivered into cultured mammalian cells in less than 1 hour with relatively high efficiency (90%). Further, the interaction with MPG strongly increases both the stability of the oligonucleotide to nuclease and the ability to cross the plasma membrane.

[11039] According to another embodiment of the invention, the polynucleotide compositions described herein are used in the design and preparation of ribozyme molecules for inhibiting expression of the tumor polypeptides and proteins of the present invention in tumor cells. Ribozymes are RNA-protein complexes that cleave nucleic acids in a site-specific fashion. Ribozymes have specific catalytic domains that possess endonuclease activity (Kim and Cech, Proc Natl Acad Sci USA. December 1987;84(24):8788-92; Forster and Symons, Cell. Apr. 24, 1987;49(2):211-20). For example, a large number of ribozymes accelerate phosphoester transfer reactions with a high degree of specificity, often cleaving only one of several phosphoesters in an oligonucleotide substrate (Cech et al., Cell. December 1981;27(3 Pt 2):487-96; Michel and Westhof, J Mol Biol. Dec. 5, 1990;216(3):585-610; Reinhold-Hurek and Shub, Nature. May 14, 1992;357(6374):173-6). This specificity has been attributed to the requirement that the substrate bind via specific base-pairing interactions to the internal guide sequence (“IGS”) of the ribozyme prior to chemical reaction.

[11040] Six basic varieties of naturally-occurring enzymatic RNAs are known presently. Each can catalyze the hydrolysis of RNA phosphodiester bonds in trans (and thus can cleave other RNA molecules) under physiological conditions. In general, enzymatic nucleic acids act by first binding to a target RNA. Such binding occurs through the target binding portion of a enzymatic nucleic acid which is held in close proximity to an enzymatic portion of the molecule that acts to cleave the target RNA. Thus, the enzymatic nucleic acid first recognizes and then binds a target RNA through complementary base-pairing, and once bound to the correct site, acts enzymatically to cut the target RNA. Strategic cleavage of such a target RNA will destroy its ability to direct synthesis of an encoded protein. After an enzymatic nucleic acid has bound and cleaved its RNA target, it is released from that RNA to search for another target and can repeatedly bind and cleave new targets.

[11041] The enzymatic nature of a ribozyme is advantageous over many technologies, such as antisense technology (where a nucleic acid molecule simply binds to a nucleic acid target to block its translation) since the concentration of ribozyme necessary to affect a therapeutic treatment is lower than that of an antisense oligonucleotide. This advantage reflects the ability of the ribozyme to act enzymatically. Thus, a single ribozyme molecule is able to cleave many molecules of target RNA. In addition, the ribozyme is a highly specific inhibitor, with the specificity of inhibition depending not only on the base pairing mechanism of binding to the target RNA, but also on the mechanism of target RNA cleavage. Single mismatches, or base-substitutions, near the site of cleavage can completely eliminate catalytic activity of a ribozyme. Similar mismatches in antisense molecules do not prevent their action (Woolf et al., Proc Natl Acad Sci USA. Aug. 15, 1992;89(16):7305-9). Thus, the specificity of action of a ribozyme is greater than that of an antisense oligonucleotide binding the same RNA site.

[11042] The enzymatic nucleic acid molecule may be formed in a hammerhead, hairpin, a hepatitis δ virus, group I intron or RNaseP RNA (in association with an RNA guide sequence) or Neurospora VS RNA motif. Examples of hammerhead motifs are described by Rossi et al. Nucleic Acids Res. Sep. 11, 1992;20(17):4559-65. Examples of hairpin motifs are described by Hampel et al. (Eur. Pat. Appl. Publ. No. EP 0360257), Hampel and Tritz, Biochemistry Jun. 13, 1989;28(12):4929-33; Hampel et al., Nucleic Acids Res. Jan. 25, 1990;18(2):299-304 and U.S. Pat. No. 5,631,359. An example of the hepatitis δ virus motif is described by Perrotta and Been, Biochemistry. Dec. 1, 1992;31(47):11843-52; an example of the RNaseP motif is described by Guerrier-Takada et al., Cell. Decemeber 1983;35(3 Pt 2):849-57; Neurospora VS RNA ribozyme motif is described by Collins (Saville and Collins, Cell. May 18, 1990;61(4):685-96; Saville and Collins, Proc Natl Acad Sci USA. Oct. 1, 1991;88(19):8826-30; Collins and Olive, Biochemistry. Mar. 23, 1993;32(11):2795-9); and an example of the Group I intron is described in (U.S. Pat. No. 4,987,071). All that is important in an enzymatic nucleic acid molecule of this invention is that it has a specific substrate binding site which is complementary to one or more of the target gene RNA regions, and that it have nucleotide sequences within or surrounding that substrate binding site which impart an RNA cleaving activity to the molecule. Thus the ribozyme constructs need not be limited to specific motifs mentioned herein.

[11043] Ribozymes may be designed as described in Int. Pat. Appl. Publ. No. WO 93/23569 and Int. Pat. Appl. Publ. No. WO 94/02595, each specifically incorporated herein by reference) and synthesized to be tested in vitro and in vivo, as described. Such ribozymes can also be optimized for delivery. While specific examples are provided, those in the art will recognize that equivalent RNA targets in other species can be utilized when necessary.

[11044] Ribozyme activity can be optimized by altering the length of the ribozyme binding arms, or chemically synthesizing ribozymes with modifications that prevent their degradation by serum ribonucleases (see e.g., Int. Pat. Appl. Publ. No. WO 92/07065; Int. Pat. Appl. Publ. No. WO 93/15187; Int. Pat. Appl. Publ. No. WO 91/03162; Eur. Pat. Appl. Publ. No. 92110298.4; U.S. Pat. No. 5,334,711; and Int. Pat. Appl. Publ. No. WO 94/13688, which describe various chemical modifications that can be made to the sugar moieties of enzymatic RNA molecules), modifications which enhance their efficacy in cells, and removal of stem II bases to shorten RNA synthesis times and reduce chemical requirements.

[11045] Sullivan et al. (Int. Pat. Appl. Publ. No. WO 94/02595) describes the general methods for delivery of enzymatic RNA molecules. Ribozymes may be administered to cells by a variety of methods known to those familiar to the art, including, but not restricted to, encapsulation in liposomes, by iontophoresis, or by incorporation into other vehicles, such as hydrogels, cyclodextrins, biodegradable nanocapsules, and bioadhesive microspheres. For some indications, ribozymes may be directly delivered ex vivo to cells or tissues with or without the aforementioned vehicles. Alternatively, the RNA/vehicle combination may be locally delivered by direct inhalation, by direct injection or by use of a catheter, infusion pump or stent. Other routes of delivery include, but are not limited to, intravascular, intramuscular, subcutaneous or joint injection, aerosol inhalation, oral (tablet or pill form), topical, systemic, ocular, intraperitoneal and/or intrathecal delivery. More detailed descriptions of ribozyme delivery and administration are provided in Int. Pat. Appl. Publ. No. WO 94/02595 and Int. Pat. Appl. Publ. No. WO 93/23569, each specifically incorporated herein by reference.

[11046] Another means of accumulating high concentrations of a ribozyme(s) within cells is to incorporate the ribozyme-encoding sequences into a DNA expression vector. Transcription of the ribozyme sequences are driven from a promoter for eukaryotic RNA polymerase I (pol I), RNA polymerase II (pol II), or RNA polymerase III (pol III). Transcripts from pol II or pol III promoters will be expressed at high levels in all cells; the levels of a given pol II promoter in a given cell type will depend on the nature of the gene regulatory sequences (enhancers, silencers, etc.) present nearby. Prokaryotic RNA polymerase promoters may also be used, providing that the prokaryotic RNA polymerase enzyme is expressed in the appropriate cells. Ribozymes expressed from such promoters have been shown to function in mammalian cells. Such transcription units can be incorporated into a variety of vectors for introduction into mammalian cells, including but not restricted to, plasmid DNA vectors, viral DNA vectors (such as adenovirus or adeno-associated vectors), or viral RNA vectors (such as retroviral, semliki forest virus, sindbis virus vectors).

[11047] In another embodiment of the invention, peptide nucleic acids (PNAs) compositions are provided. PNA is a DNA mimic in which the nucleobases are attached to a pseudopeptide backbone (Good and Nielsen, Antisense Nucleic Acid Drug Dev. 1997 7(4) 431-37). PNA is able to be utilized in a number methods that traditionally have used RNA or DNA. Often PNA sequences perform better in techniques than the corresponding RNA or DNA sequences and have utilities that are not inherent to RNA or DNA. A review of PNA including methods of making, characteristics of, and methods of using, is provided by Corey (Trends Biotechnol June 1997;15(6):224-9). As such, in certain embodiments, one may prepare PNA sequences that are complementary to one or more portions of the ACE mRNA sequence, and such PNA compositions may be used to regulate, alter, decrease, or reduce the translation of ACE-specific mRNA, and thereby alter the level of ACE activity in a host cell to which such PNA compositions have been administered.

[11048] PNAs have 2-aminoethyl-glycine linkages replacing the normal phosphodiester backbone of DNA (Nielsen et al., Science Dec. 6, 1991;254(5037):1497-500; Hanvey et al., Science. Nov. 27, 1992;258(5087):1481-5; Hyrup and Nielsen, Bioorg Med Chem. January 1996;4(1):5-23). This chemistry has three important consequences: firstly, in contrast to DNA or phosphorothioate oligonucleotides, PNAs are neutral molecules; secondly, PNAs are achiral, which avoids the need to develop a stereoselective synthesis; and thirdly, PNA synthesis uses standard Boc or Fmoc protocols for solid-phase peptide synthesis, although other methods, including a modified Merrifield method, have been used.

[11049] PNA monomers or ready-made oligomers are commercially available from PerSeptive Biosystems (Framingham, Mass.). PNA syntheses by either Boc or Fmoc protocols are straightforward using manual or automated protocols (Norton et al., Bioorg Med Chem. April 1995;3(4):437-45). The manual protocol lends itself to the production of chemically modified PNAs or the simultaneous synthesis of families of closely related PNAs.

[11050] As with peptide synthesis, the success of a particular PNA synthesis will depend on the properties of the chosen sequence. For example, while in theory PNAs can incorporate any combination of nucleotide bases, the presence of adjacent purines can lead to deletions of one or more residues in the product. In expectation of this difficulty, it is suggested that, in producing PNAs with adjacent purines, one should repeat the coupling of residues likely to be added inefficiently. This should be followed by the purification of PNAs by reverse-phase high-pressure liquid chromatography, providing yields and purity of product similar to those observed during the synthesis of peptides.

[11051] Modifications of PNAs for a given application may be accomplished by coupling amino acids during solid-phase synthesis or by attaching compounds that contain a carboxylic acid group to the exposed N-terminal amine. Alternatively, PNAs can be modified after synthesis by coupling to an introduced lysine or cysteine. The ease with which PNAs can be modified facilitates optimization for better solubility or for specific functional requirements. Once synthesized, the identity of PNAs and their derivatives can be confirmed by mass spectrometry. Several studies have made and utilized modifications of PNAs (for example, Norton et al., Bioorg Med Chem. April 1995;3(4):437-45; Petersen et al., J Pept Sci. May-June 1995;1(3):175-83; Orum et al., Biotechniques. September 1995;19(3):472-80; Footer et al., Biochemistry. Aug. 20, 1996;35(33):10673-9; Griffith et al., Nucleic Acids Res. Aug. 11, 1995;23(15):3003-8; Pardridge et al., Proc Natl Acad Sci USA. June 6, 1995;92(12):5592-6; Boffa et al., Proc Natl Acad Sci USA. Mar. 14, 1995;92(6):1901-5; Gambacorti-Passerini et al., Blood. Aug. 15, 1996;88(4):1411-7; Armitage et al., Proc Natl Acad Sci USA. Nov. 11, 1997;94(23):12320-5; Seeger et al., Biotechniques. September 1997;23(3):512-7). U.S. Pat. No. 5,700,922 discusses PNA-DNA-PNA chimeric molecules and their uses in diagnostics, modulating protein in organisms, and treatment of conditions susceptible to therapeutics.

[11052] Methods of characterizing the antisense binding properties of PNAs are discussed in Rose (Anal Chem. Dec. 15, 1993;65(24):3545-9) and Jensen et al. (Biochemistry. Apr. 22, 1997;36(16):5072-7). Rose uses capillary gel electrophoresis to determine binding of PNAs to their complementary oligonucleotide, measuring the relative binding kinetics and stoichiometry. Similar types of measurements were made by Jensen et al. using BIAcore™ technology.

[11053] Other applications of PNAs that have been described and will be apparent to the skilled artisan include use in DNA strand invasion, antisense inhibition, mutational analysis, enhancers of transcription, nucleic acid purification, isolation of transcriptionally active genes, blocking of transcription factor binding, genome cleavage, biosensors, in situ hybridization, and the like.

[11054] Polynucleotide Identification, Characterization and Expression

[11055] Polynucleotides compositions of the present invention may be identified, prepared and/or manipulated using any of a variety of well established techniques (see generally, Sambrook et al., Molecular Cloning: A Laboratory Manual, Cold Spring Harbor Laboratories, Cold Spring Harbor, N.Y., 1989, and other like references). For example, a polynucleotide may be identified, as described in more detail below, by screening a microarray of cDNAs for tumor-associated expression (i.e., expression that is at least two fold greater in a tumor than in normal tissue, as determined using a representative assay provided herein). Such screens may be performed, for example, using the microarray technology of Affymetrix, Inc. (Santa Clara, Calif.) according to the manufacturer's instructions (and essentially as described by Schena et al., Proc. Natl. Acad. Sci. USA 93:10614-10619, 1996 and Heller et al., Proc. Natl. Acad. Sci. USA 94:2150-2155, 1997). Alternatively, polynucleotides may be amplified from cDNA prepared from cells expressing the proteins described herein, such as tumor cells.

[11056] Many template dependent processes are available to amplify a target sequences of interest present in a sample. One of the best known amplification methods is the polymerase chain reaction (PCR™) which is described in detail in U.S. Pat. Nos. 4,683,195, 4,683,202 and 4,800,159, each of which is incorporated herein by reference in its entirety. Briefly, in PCR™, two primer sequences are prepared which are complementary to regions on opposite complementary strands of the target sequence. An excess of deoxynucleoside triphosphates is added to a reaction mixture along with a DNA polymerase (e.g., Taq polymerase). If the target sequence is present in a sample, the primers will bind to the target and the polymerase will cause the primers to be extended along the target sequence by adding on nucleotides. By raising and lowering the temperature of the reaction mixture, the extended primers will dissociate from the target to form reaction products, excess primers will bind to the target and to the reaction product and the process is repeated. Preferably reverse transcription and PCR™ amplification procedure may be performed in order to quantify the amount of mRNA amplified. Polymerase chain reaction methodologies are well known in the art.

[11057] Any of a number of other template dependent processes, many of which are variations of the PCR™ amplification technique, are readily known and available in the art. Illustratively, some such methods include the ligase chain reaction (referred to as LCR), described, for example, in Eur. Pat. Appl. Publ. No. 320,308 and U.S. Pat. No. 4,883,750; Qbeta Replicase, described in PCT Intl. Pat. Appl. Publ. No. PCT/US87/00880; Strand Displacement Amplification (SDA) and Repair Chain Reaction (RCR). Still other amplification methods are described in Great Britain Pat. Appl. No. 2 202 328, and in PCT Intl. Pat. Appl. Publ. No. PCT/US89/01025. Other nucleic acid amplification procedures include transcription-based amplification systems (TAS) (PCT Intl. Pat. Appl. Publ. No. WO 88/10315), including nucleic acid sequence based amplification (NASBA) and 3SR. Eur. Pat. Appl. Publ. No. 329,822 describes a nucleic acid amplification process involving cyclically synthesizing single-stranded RNA (“ssRNA”), ssDNA, and double-stranded DNA (dsDNA). PCT Intl. Pat. Appl. Publ. No. WO 89/06700 describes a nucleic acid sequence amplification scheme based on the hybridization of a promoter/primer sequence to a target single-stranded DNA (“ssDNA”) followed by transcription of many RNA copies of the sequence. Other amplification methods such as “RACE” (Frohman, 1990), and “one-sided PCR” (Ohara, 1989) are also well-known to those of skill in the art.

[11058] An amplified portion of a polynucleotide of the present invention may be used to isolate a full length gene from a suitable library (e.g., a tumor cDNA library) using well known techniques. Within such techniques, a library (cDNA or genomic) is screened using one or more polynucleotide probes or primers suitable for amplification. Preferably, a library is size-selected to include larger molecules. Random primed libraries may also be preferred for identifying 5′ and upstream regions of genes. Genomic libraries are preferred for obtaining introns and extending 5′ sequences.

[11059] For hybridization techniques, a partial sequence may be labeled (e.g., by nick-translation or end-labeling with ³²P) using well known techniques. A bacterial or bacteriophage library is then generally screened by hybridizing filters containing denatured bacterial colonies (or lawns containing phage plaques) with the labeled probe (see Sambrook et al., Molecular Cloning: A Laboratory Manual, Cold Spring Harbor Laboratories, Cold Spring Harbor, N.Y., 1989). Hybridizing colonies or plaques are selected and expanded, and the DNA is isolated for further analysis. cDNA clones may be analyzed to determine the amount of additional sequence by, for example, PCR using a primer from the partial sequence and a primer from the vector. Restriction maps and partial sequences may be generated to identify one or more overlapping clones. The complete sequence may then be determined using standard techniques, which may involve generating a series of deletion clones. The resulting overlapping sequences can then assembled into a single contiguous sequence. A full length cDNA molecule can be generated by ligating suitable fragments, using well known techniques.

[11060] Alternatively, amplification techniques, such as those described above, can be useful for obtaining a full length coding sequence from a partial cDNA sequence. One such amplification technique is inverse PCR (see Triglia et al., Nucl. Acids Res. 16:8186, 1988), which uses restriction enzymes to generate a fragment in the known region of the gene. The fragment is then circularized by intramolecular ligation and used as a template for PCR with divergent primers derived from the known region. Within an alternative approach, sequences adjacent to a partial sequence may be retrieved by amplification with a primer to a linker sequence and a primer specific to a known region. The amplified sequences are typically subjected to a second round of amplification with the same linker primer and a second primer specific to the known region. A variation on this procedure, which employs two primers that initiate extension in opposite directions from the known sequence, is described in WO 96/38591. Another such technique is known as “rapid amplification of cDNA ends” or RACE. This technique involves the use of an internal primer and an external primer, which hybridizes to a polyA region or vector sequence, to identify sequences that are 5′ and 3′ of a known sequence. Additional techniques include capture PCR (Lagerstrom et al., PCR Methods Applic. 1:111-19, 1991) and walking PCR (Parker et al., Nucl. Acids. Res. 19:3055-60, 1991). Other methods employing amplification may also be employed to obtain a full length cDNA sequence.

[11061] In certain instances, it is possible to obtain a full length cDNA sequence by analysis of sequences provided in an expressed sequence tag (EST) database, such as that available from GenBank. Searches for overlapping ESTs may generally be performed using well known programs (e.g., NCBI BLAST searches), and such ESTs may be used to generate a contiguous full length sequence. Full length DNA sequences may also be obtained by analysis of genomic fragments.

[11062] In other embodiments of the invention, polynucleotide sequences or fragments thereof which encode polypeptides of the invention, or fusion proteins or functional equivalents thereof, may be used in recombinant DNA molecules to direct expression of a polypeptide in appropriate host cells. Due to the inherent degeneracy of the genetic code, other DNA sequences that encode substantially the same or a functionally equivalent amino acid sequence may be produced and these sequences may be used to clone and express a given polypeptide.

[11063] As will be understood by those of skill in the art, it may be advantageous in some instances to produce polypeptide-encoding nucleotide sequences possessing non-naturally occurring codons. For example, codons preferred by a particular prokaryotic or eukaryotic host can be selected to increase the rate of protein expression or to produce a recombinant RNA transcript having desirable properties, such as a half-life which is longer than that of a transcript generated from the naturally occurring sequence.

[11064] Moreover, the polynucleotide sequences of the present invention can be engineered using methods generally known in the art in order to alter polypeptide encoding sequences for a variety of reasons, including but not limited to, alterations which modify the cloning, processing, and/or expression of the gene product. For example, DNA shuffling by random fragmentation and PCR reassembly of gene fragments and synthetic oligonucleotides may be used to engineer the nucleotide sequences. In addition, site-directed mutagenesis may be used to insert new restriction sites, alter glycosylation patterns, change codon preference, produce splice variants, or introduce mutations, and so forth.

[11065] In another embodiment of the invention, natural, modified, or recombinant nucleic acid sequences may be ligated to a heterologous sequence to encode a fusion protein. For example, to screen peptide libraries for inhibitors of polypeptide activity, it may be useful to encode a chimeric protein that can be recognized by a commercially available antibody. A fusion protein may also be engineered to contain a cleavage site located between the polypeptide-encoding sequence and the heterologous protein sequence, so that the polypeptide may be cleaved and purified away from the heterologous moiety.

[11066] Sequences encoding a desired polypeptide may be synthesized, in whole or in part, using chemical methods well known in the art (see Caruthers, M. H. et al. (1980) Nucl. Acids Res. Symp. Ser. 215-223, Horn, T. et al. (1980) Nucl. Acids Res. Symp. Ser. 225-232). Alternatively, the protein itself may be produced using chemical methods to synthesize the amino acid sequence of a polypeptide, or a portion thereof. For example, peptide synthesis can be performed using various solid-phase techniques (Roberge, J. Y. et al. (1995) Science 269:202-204) and automated synthesis may be achieved, for example, using the ABI 431A Peptide Synthesizer (Perkin Elmer, Palo Alto, Calif.).

[11067] A newly synthesized peptide may be substantially purified by preparative high performance liquid chromatography (e.g., Creighton, T. (1983) Proteins, Structures and Molecular Principles, W H Freeman and Co., New York, N.Y.) or other comparable techniques available in the art. The composition of the synthetic peptides may be confirmed by amino acid analysis or sequencing (e.g., the Edman degradation procedure). Additionally, the amino acid sequence of a polypeptide, or any part thereof, may be altered during direct synthesis and/or combined using chemical methods with sequences from other proteins, or any part thereof, to produce a variant polypeptide.

[11068] In order to express a desired polypeptide, the nucleotide sequences encoding the polypeptide, or functional equivalents, may be inserted into appropriate expression vector, i.e., a vector which contains the necessary elements for the transcription and translation of the inserted coding sequence. Methods which are well known to those skilled in the art may be used to construct expression vectors containing sequences encoding a polypeptide of interest and appropriate transcriptional and translational control elements. These methods include in vitro recombinant DNA techniques, synthetic techniques, and in vivo genetic recombination. Such techniques are described, for example, in Sambrook, J. et al. (1989) Molecular Cloning, A Laboratory Manual, Cold Spring Harbor Press, Plainview, N.Y., and Ausubel, F. M. et al. (1989) Current Protocols in Molecular Biology, John Wiley & Sons, New York. N.Y.

[11069] A variety of expression vector/host systems may be utilized to contain and express polynucleotide sequences. These include, but are not limited to, microorganisms such as bacteria transformed with recombinant bacteriophage, plasmid, or cosmid DNA expression vectors; yeast transformed with yeast expression vectors; insect cell systems infected with virus expression vectors (e.g., baculovirus); plant cell systems transformed with virus expression vectors (e.g., cauliflower mosaic virus, CaMV; tobacco mosaic virus, TMV) or with bacterial expression vectors (e.g., Ti or pBR322 plasmids); or animal cell systems.

[11070] The “control elements” or “regulatory sequences” present in an expression vector are those non-translated regions of the vector—enhancers, promoters, 5′ and 3′ untranslated regions—which interact with host cellular proteins to carry out transcription and translation. Such elements may vary in their strength and specificity. Depending on the vector system and host utilized, any number of suitable transcription and translation elements, including constitutive and inducible promoters, may be used. For example, when cloning in bacterial systems, inducible promoters such as the hybrid lacZ promoter of the pBLUESCRIPT phagemid (Stratagene, La Jolla, Calif.) or pSPORT1 plasmid (Gibco BRL, Gaithersburg, Md.) and the like may be used. In mammalian cell systems, promoters from mammalian genes or from mammalian viruses are generally preferred. If it is necessary to generate a cell line that contains multiple copies of the sequence encoding a polypeptide, vectors based on SV40 or EBV may be advantageously used with an appropriate selectable marker.

[11071] In bacterial systems, any of a number of expression vectors may be selected depending upon the use intended for the expressed polypeptide. For example, when large quantities are needed, for example for the induction of antibodies, vectors which direct high level expression of fusion proteins that are readily purified may be used. Such vectors include, but are not limited to, the multifunctional E. coli cloning and expression vectors such as pBLUESCRIPT (Stratagene), in which the sequence encoding the polypeptide of interest may be ligated into the vector in frame with sequences for the amino-terminal Met and the subsequent 7 residues of .beta.-galactosidase so that a hybrid protein is produced; pIN vectors (Van Heeke, G. and S. M. Schuster (1989) J. Biol. Chem. 264:5503-5509); and the like. pGEX Vectors (Promega, Madison, Wis.) may also be used to express foreign polypeptides as fusion proteins with glutathione S-transferase (GST). In general, such fusion proteins are soluble and can easily be purified from lysed cells by adsorption to glutathione-agarose beads followed by elution in the presence of free glutathione. Proteins made in such systems may be designed to include heparin, thrombin, or factor XA protease cleavage sites so that the cloned polypeptide of interest can be released from the GST moiety at will.

[11072] In the yeast, Saccharomyces cerevisiae, a number of vectors containing constitutive or inducible promoters such as alpha factor, alcohol oxidase, and PGH may be used. For reviews, see Ausubel et al. (supra) and Grant et al. (1987) Methods Enzymol. 153:516-544.

[11073] In cases where plant expression vectors are used, the expression of sequences encoding polypeptides may be driven by any of a number of promoters. For example, viral promoters such as the 35S and 19S promoters of CaMV may be used alone or in combination with the omega leader sequence from TMV (Takamatsu, N. (1987) EMBO J. 6:307-311. Alternatively, plant promoters such as the small subunit of RUBISCO or heat shock promoters may be used (Coruzzi, G. et al. (1984) EMBO J. 3:1671-1680; Broglie, R. et al. (1984) Science 224:838-843; and Winter, J. et al. (1991) Results Probl. Cell Differ. 17:85-105). These constructs can be introduced into plant cells by direct DNA transformation or pathogen-mediated transfection. Such techniques are described in a number of generally available reviews (see, for example, Hobbs, S. or Murry, L. E. in McGraw Hill Yearbook of Science and Technology (1992) McGraw Hill, New York, N.Y.; pp. 191-196).

[11074] An insect system may also be used to express a polypeptide of interest. For example, in one such system, Autographa californica nuclear polyhedrosis virus (AcNPV) is used as a vector to express foreign genes in Spodoptera frugiperda cells or in Trichoplusia larvae. The sequences encoding the polypeptide may be cloned into a non-essential region of the virus, such as the polyhedrin gene, and placed under control of the polyhedrin promoter. Successful insertion of the polypeptide-encoding sequence will render the polyhedrin gene inactive and produce recombinant virus lacking coat protein. The recombinant viruses may then be used to infect, for example, S. frugiperda cells or Trichoplusia larvae in which the polypeptide of interest may be expressed (Engelhard, E. K. et al. (1994) Proc. Natl. Acad. Sci. 91 :3224-3227).

[11075] In mammalian host cells, a number of viral-based expression systems are generally available. For example, in cases where an adenovirus is used as an expression vector, sequences encoding a polypeptide of interest may be ligated into an adenovirus transcription/translation complex consisting of the late promoter and tripartite leader sequence. Insertion in a non-essential E1 or E3 region of the viral genome may be used to obtain a viable virus which is capable of expressing the polypeptide in infected host cells (Logan, J. and Shenk, T. (1984) Proc. Natl. Acad. Sci. 81:3655-3659). In addition, transcription enhancers, such as the Rous sarcoma virus (RSV) enhancer, may be used to increase expression in mammalian host cells.

[11076] Specific initiation signals may also be used to achieve more efficient translation of sequences encoding a polypeptide of interest. Such signals include the ATG initiation codon and adjacent sequences. In cases where sequences encoding the polypeptide, its initiation codon, and upstream sequences are inserted into the appropriate expression vector, no additional transcriptional or translational control signals may be needed. However, in cases where only coding sequence, or a portion thereof, is inserted, exogenous translational control signals including the ATG initiation codon should be provided. Furthermore, the initiation codon should be in the correct reading frame to ensure translation of the entire insert. Exogenous translational elements and initiation codons may be of various origins, both natural and synthetic. The efficiency of expression may be enhanced by the inclusion of enhancers which are appropriate for the particular cell system which is used, such as those described in the literature (Scharf, D. et al. (1994) Results Probl. Cell Differ. 20:125-162).

[11077] In addition, a host cell strain may be chosen for its ability to modulate the expression of the inserted sequences or to process the expressed protein in the desired fashion. Such modifications of the polypeptide include, but are not limited to, acetylation, carboxylation. glycosylation, phosphorylation, lipidation, and acylation. Post-translational processing which cleaves a “prepro” form of the protein may also be used to facilitate correct insertion, folding and/or function. Different host cells such as CHO, COS, HeLa, MDCK, HEK293, and W138, which have specific cellular machinery and characteristic mechanisms for such post-translational activities, may be chosen to ensure the correct modification and processing of the foreign protein.

[11078] For long-term, high-yield production of recombinant proteins, stable expression is generally preferred. For example, cell lines which stably express a polynucleotide of interest may be transformed using expression vectors which may contain viral origins of replication and/or endogenous expression elements and a selectable marker gene on the same or on a separate vector. Following the introduction of the vector, cells may be allowed to grow for 1-2 days in an enriched media before they are switched to selective media. The purpose of the selectable marker is to confer resistance to selection, and its presence allows growth and recovery of cells which successfully express the introduced sequences. Resistant clones of stably transformed cells may be proliferated using tissue culture techniques appropriate to the cell type.

[11079] Any number of selection systems may be used to recover transformed cell lines. These include, but are not limited to, the herpes simplex virus thymidine kinase (Wigler, M. et al. (1977) Cell 11:223-32) and adenine phosphoribosyltransferase (Lowy, I. et al. (1990) Cell 22:817-23) genes which can be employed in tk.sup.- or aprt.sup.-cells, respectively. Also, antimetabolite, antibiotic or herbicide resistance can be used as the basis for selection; for example, dhfr which confers resistance to methotrexate (Wigler, M. et al. (1980) Proc. Natl. Acad. Sci. 77:3567-70); npt, which confers resistance to the aminoglycosides, neomycin and G-418 (Colbere-Garapin, F. et al (1981) J. Mol. Biol. 150:1-14); and als or pat, which confer resistance to chlorsulfuron and phosphinotricin acetyltransferase, respectively (Murry, supra). Additional selectable genes have been described, for example, trpB, which allows cells to utilize indole in place of tryptophan, or hisD, which allows cells to utilize histinol in place of histidine (Hartman, S. C. and R. C. Mulligan (1988) Proc. Natl. Acad. Sci. 85:8047-51). The use of visible markers has gained popularity with such markers as anthocyanins, beta-glucuronidase and its substrate GUS, and luciferase and its substrate luciferin, being widely used not only to identify transformants, but also to quantify the amount of transient or stable protein expression attributable to a specific vector system (Rhodes, C. A. et al. (1995) Methods Mol. Biol. 55:121-131).

[11080] Although the presence/absence of marker gene expression suggests that the gene of interest is also present, its presence and expression may need to be confirmed. For example, if the sequence encoding a polypeptide is inserted within a marker gene sequence, recombinant cells containing sequences can be identified by the absence of marker gene function. Alternatively, a marker gene can be placed in tandem with a polypeptide-encoding sequence under the control of a single promoter. Expression of the marker gene in response to induction or selection usually indicates expression of the tandem gene as well.

[11081] Alternatively, host cells that contain and express a desired polynucleotide sequence may be identified by a variety of procedures known to those of skill in the art. These procedures include, but are not limited to, DNA-DNA or DNA-RNA hybridizations and protein bioassay or immunoassay techniques which include, for example, membrane, solution, or chip based technologies for the detection and/or quantification of nucleic acid or protein.

[11082] A variety of protocols for detecting and measuring the expression of polynucleotide-encoded products, using either polyclonal or monoclonal antibodies specific for the product are known in the art. Examples include enzyme-linked immunosorbent assay (ELISA), radioimmunoassay (RIA), and fluorescence activated cell sorting (FACS). A two-site, monoclonal-based immunoassay utilizing monoclonal antibodies reactive to two non-interfering epitopes on a given polypeptide may be preferred for some applications, but a competitive binding assay may also be employed. These and other assays are described, among other places, in Hampton, R. et al. (1990; Serological Methods, a Laboratory Manual, APS Press, St Paul. Minn.) and Maddox, D. E. et al. (1983; J. Exp. Med. 158:1211-1216).

[11083] A wide variety of labels and conjugation techniques are known by those skilled in the art and may be used in various nucleic acid and amino acid assays. Means for producing labeled hybridization or PCR probes for detecting sequences related to polynucleotides include oligolabeling, nick translation, end-labeling or PCR amplification using a labeled nucleotide. Alternatively, the sequences, or any portions thereof may be cloned into a vector for the production of an mRNA probe. Such vectors are known in the art, are commercially available, and may be used to synthesize RNA probes in vitro by addition of an appropriate RNA polymerase such as T7, T3, or SP6 and labeled nucleotides. These procedures may be conducted using a variety of commercially available kits. Suitable reporter molecules or labels, which may be used include radionuclides, enzymes, fluorescent, chemiluminescent, or chromogenic agents as well as substrates, cofactors, inhibitors, magnetic particles, and the like.

[11084] Host cells transformed with a polynucleotide sequence of interest may be cultured under conditions suitable for the expression and recovery of the protein from cell culture. The protein produced by a recombinant cell may be secreted or contained intracellularly depending on the sequence and/or the vector used. As will be understood by those of skill in the art, expression vectors containing polynucleotides of the invention may be designed to contain signal sequences which direct secretion of the encoded polypeptide through a prokaryotic or eukaryotic cell membrane. Other recombinant constructions may be used to join sequences encoding a polypeptide of interest to nucleotide sequence encoding a polypeptide domain which will facilitate purification of soluble proteins. Such purification facilitating domains include, but are not limited to, metal chelating peptides such as histidine-tryptophan modules that allow purification on immobilized metals, protein A domains that allow purification on immobilized immunoglobulin, and the domain utilized in the FLAGS extension/affinity purification system (Immunex Corp., Seattle, Wash.). The inclusion of cleavable linker sequences such as those specific for Factor XA or enterokinase (Invitrogen. San Diego, Calif.) between the purification domain and the encoded polypeptide may be used to facilitate purification. One such expression vector provides for expression of a fusion protein containing a polypeptide of interest and a nucleic acid encoding 6 histidine residues preceding a thioredoxin or an enterokinase cleavage site. The histidine residues facilitate purification on IMIAC (immobilized metal ion affinity chromatography) as described in Porath, J. et al. (1992, Prot. Exp. Purif. 3:263-281) while the enterokinase cleavage site provides a means for purifying the desired polypeptide from the fusion protein. A discussion of vectors which contain fusion proteins is provided in Kroll, D. J. et al. (1993; DNA Cell Biol. 12:441-453).

[11085] In addition to recombinant production methods, polypeptides of the invention, and fragments thereof, may be produced by direct peptide synthesis using solid-phase techniques (Merrifield J. (1963) J. Am. Chem. Soc. 85:2149-2154). Protein synthesis may be performed using manual techniques or by automation. Automated synthesis may be achieved, for example, using Applied Biosystems 431A Peptide Synthesizer (Perkin Elmer). Alternatively, various fragments may be chemically synthesized separately and combined using chemical methods to produce the full length molecule.

[11086] Antibody Compositions, Fragments Thereof and Other Binding Agents

[11087] According to another aspect, the present invention further provides binding agents, such as antibodies and antigen-binding fragments thereof, that exhibit immunological binding to a tumor polypeptide disclosed herein, or to a portion, variant or derivative thereof. An antibody, or antigen-binding fragment thereof, is said to “specifically bind,” “immunogically bind,” and/or is “immunologically reactive” to a polypeptide of the invention if it reacts at a detectable level (within, for example, an ELISA assay) with the polypeptide, and does not react detectably with unrelated polypeptides under similar conditions.

[11088] Immunological binding, as used in this context, generally refers to the non-covalent interactions of the type which occur between an immunoglobulin molecule and an antigen for which the immunoglobulin is specific. The strength, or affinity of immunological binding interactions can be expressed in terms of the dissociation constant (K_{d}) of the interaction, wherein a smaller K_{d} represents a greater affinity. Immunological binding properties of selected polypeptides can be quantified using methods well known in the art. One such method entails measuring the rates of antigen-binding site/antigen complex formation and dissociation, wherein those rates depend on the concentrations of the complex partners, the affinity of the interaction, and on geometric parameters that equally influence the rate in both directions. Thus, both the “on rate constant” (Kₒₙ) and the “off rate constant” (K_{off}) can be determined by calculation of the concentrations and the actual rates of association and dissociation. The ratio of K_{off}/Kₒₙ enables cancellation of all parameters not related to affinity, and is thus equal to the dissociation constant K_{d}. See, generally, Davies et al. (1990) Annual Rev. Biochem. 59:439-473.

[11089] An “antigen-binding site,” or “binding portion” of an antibody refers to the part of the immunoglobulin molecule that participates in antigen binding. The antigen binding site is formed by amino acid residues of the N-terminal variable (“V”) regions of the heavy (“H”) and light (“L”) chains. Three highly divergent stretches within the V regions of the heavy and light chains are referred to as “hypervariable regions” which are interposed between more conserved flanking stretches known as “framework regions,” or “FRs”. Thus the term “FR” refers to amino acid sequences which are naturally found between and adjacent to hypervariable regions in immunoglobulins. In an antibody molecule, the three hypervariable regions of a light chain and the three hypervariable regions of a heavy chain are disposed relative to each other in three dimensional space to form an antigen-binding surface. The antigen-binding surface is complementary to the three-dimensional surface of a bound antigen, and the three hypervariable regions of each of the heavy and light chains are referred to as “complementarity-determining regions,” or “CDRs.”

[11090] Binding agents may be further capable of differentiating between patients with and without a cancer, such as ovarian cancer, using the representative assays provided herein. For example, antibodies or other binding agents that bind to a tumor protein will preferably generate a signal indicating the presence of a cancer in at least about 20% of patients with the disease, more preferably at least about 30% of patients. Alternatively, or in addition, the antibody will generate a negative signal indicating the absence of the disease in at least about 90% of individuals without the cancer. To determine whether a binding agent satisfies this requirement, biological samples (e.g., blood, sera, sputum, urine and/or tumor biopsies) from patients with and without a cancer (as determined using standard clinical tests) may be assayed as described herein for the presence of polypeptides that bind to the binding agent. Preferably, a statistically significant number of samples with and without the disease will be assayed. Each binding agent should satisfy the above criteria; however, those of ordinary skill in the art will recognize that binding agents may be used in combination to improve sensitivity.

[11091] Any agent that satisfies the above requirements may be a binding agent. For example, a binding agent may be a ribosome, with or without a peptide component, an RNA molecule or a polypeptide. In a preferred embodiment, a binding agent is an antibody or an antigen-binding fragment thereof. Antibodies may be prepared by any of a variety of techniques known to those of ordinary skill in the art. See, e.g., Harlow and Lane, Antibodies: A Laboratory Manual, Cold Spring Harbor Laboratory, 1988. In general, antibodies can be produced by cell culture techniques, including the generation of monoclonal antibodies as described herein, or via transfection of antibody genes into suitable bacterial or mammalian cell hosts, in order to allow for the production of recombinant antibodies. In one technique, an immunogen comprising the polypeptide is initially injected into any of a wide variety of mammals (e.g., mice, rats, rabbits, sheep or goats). In this step, the polypeptides of this invention may serve as the immunogen without modification. Alternatively, particularly for relatively short polypeptides, a superior immune response may be elicited if the polypeptide is joined to a carrier protein, such as bovine serum albumin or keyhole limpet hemocyanin. The immunogen is injected into the animal host, preferably according to a predetermined schedule incorporating one or more booster immunizations, and the animals are bled periodically. Polyclonal antibodies specific for the polypeptide may then be purified from such antisera by, for example, affinity chromatography using the polypeptide coupled to a suitable solid support.

[11092] Monoclonal antibodies specific for an antigenic polypeptide of interest may be prepared, for example, using the technique of Kohler and Milstein, Eur. J. Immunol. 6:511-519, 1976, and improvements thereto. Briefly, these methods involve the preparation of immortal cell lines capable of producing antibodies having the desired specificity (i.e., reactivity with the polypeptide of interest). Such cell lines may be produced, for example, from spleen cells obtained from an animal immunized as described above. The spleen cells are then immortalized by, for example, fusion with a myeloma cell fusion partner, preferably one that is syngeneic with the immunized animal. A variety of fusion techniques may be employed. For example, the spleen cells and myeloma cells may be combined with a nonionic detergent for a few minutes and then plated at low density on a selective medium that supports the growth of hybrid cells, but not myeloma cells. A preferred selection technique uses HAT (hypoxanthine, aminopterin, thymidine) selection. After a sufficient time, usually about 1 to 2 weeks, colonies of hybrids are observed. Single colonies are selected and their culture supernatants tested for binding activity against the polypeptide. Hybridomas having high reactivity and specificity are preferred.

[11093] Monoclonal antibodies may be isolated from the supernatants of growing hybridoma colonies. In addition, various techniques may be employed to enhance the yield, such as injection of the hybridoma cell line into the peritoneal cavity of a suitable vertebrate host, such as a mouse. Monoclonal antibodies may then be harvested from the ascites fluid or the blood. Contaminants may be removed from the antibodies by conventional techniques, such as chromatography, gel filtration, precipitation, and extraction. The polypeptides of this invention may be used in the purification process in, for example, an affinity chromatography step.

[11094] A number of therapeutically useful molecules are known in the art which comprise antigen-binding sites that are capable of exhibiting immunological binding properties of an antibody molecule. The proteolytic enzyme papain preferentially cleaves IgG molecules to yield several fragments, two of which (the “F(ab)” fragments) each comprise a covalent heterodimer that includes an intact antigen-binding site. The enzyme pepsin is able to cleave IgG molecules to provide several fragments, including the “F(ab′)₂” fragment which comprises both antigen-binding sites. An “Fv” fragment can be produced by preferential proteolytic cleavage of an IgM, and on rare occasions IgG or IgA immunoglobulin molecule. Fv fragments are, however, more commonly derived using recombinant techniques known in the art. The Fv fragment includes a non-covalent V_{H}::V_{L} heterodimer including an antigen-binding site which retains much of the antigen recognition and binding capabilities of the native antibody molecule. Inbar et al. (1972) Proc. Nat. Acad. Sci. USA 69:2659-2662; Hochman et al. (1976) Biochem 15:2706-2710; and Ehrlich et al. (1980) Biochem 19:4091-4096.

[11095] A single chain Fv (“sFv”) polypeptide is a covalently linked V_{H}::V_{L} heterodimer which is expressed from a gene fusion including V_{H}- and V_{L}-encoding genes linked by a peptide-encoding linker. Huston et al. (1988) Proc. Nat. Acad. Sci. USA 85(16):5879-5883. A number of methods have been described to discern chemical structures for converting the naturally aggregated—but chemically separated—light and heavy polypeptide chains from an antibody V region into an sFv molecule which will fold into a three dimensional structure substantially similar to the structure of an antigen-binding site. See, e.g., U.S. Pat. Nos. 5,091,513 and 5,132,405, to Huston et al.; and U.S. Pat. No. 4,946,778, to Ladner et al.

[11096] Each of the above-described molecules includes a heavy chain and a light chain CDR set, respectively interposed between a heavy chain and a light chain FR set which provide support to the CDRS and define the spatial relationship of the CDRs relative to each other. As used herein, the term “CDR set” refers to the three hypervariable regions of a heavy or light chain V region. Proceeding from the N-terminus of a heavy or light chain, these regions are denoted as “CDR1,” “CDR2,” and “CDR3” respectively. An antigen-binding site, therefore, includes six CDRs, comprising the CDR set from each of a heavy and a light chain V region. A polypeptide comprising a single CDR, (e.g., a CDR1, CDR2 or CDR3) is referred to herein as a “molecular recognition unit.” Crystallographic analysis of a number of antigen-antibody complexes has demonstrated that the amino acid residues of CDRs form extensive contact with bound antigen, wherein the most extensive antigen contact is with the heavy chain CDR3. Thus, the molecular recognition units are primarily responsible for the specificity of an antigen-binding site.

[11097] As used herein, the term “FR set” refers to the four flanking amino acid sequences which frame the CDRs of a CDR set of a heavy or light chain V region. Some FR residues may contact bound antigen; however, FRs are primarily responsible for folding the V region into the antigen-binding site, particularly the FR residues directly adjacent to the CDRS. Within FRs, certain amino residues and certain structural features are very highly conserved. In this regard, all V region sequences contain an internal disulfide loop of around 90 amino acid residues. When the V regions fold into a binding-site, the CDRs are displayed as projecting loop motifs which form an antigen-binding surface. It is generally recognized that there are conserved structural regions of FRs which influence the folded shape of the CDR loops into certain “canonical” structures—regardless of the precise CDR amino acid sequence. Further, certain FR residues are known to participate in non-covalent interdomain contacts which stabilize the interaction of the antibody heavy and light chains.

[11098] A number of “humanized” antibody molecules comprising an antigen-binding site derived from a non-human immunoglobulin have been described, including chimeric antibodies having rodent V regions and their associated CDRs fused to human constant domains (Winter et al. (1991) Nature 349:293-299; Lobuglio et al. (1989) Proc. Nat. Acad. Sci. USA 86:4220-4224; Shaw et al. (1987) J Immunol. 138:4534-4538; and Brown et al. (1987) Cancer Res. 47:3577-3583), rodent CDRs grafted into a human supporting FR prior to fusion with an appropriate human antibody constant domain (Riechmann et al. (1988) Nature 332:323-327; Verhoeyen et al. (1988) Science 239:1534-1536; and Jones et al. (1986) Nature 321:522-525), and rodent CDRs supported by recombinantly veneered rodent FRs (European Patent Publication No. 519,596, published Dec. 23, 1992). These “humanized” molecules are designed to minimize unwanted immunological response toward rodent antihuman antibody molecules which limits the duration and effectiveness of therapeutic applications of those moieties in human recipients.

[11099] As used herein, the terms “veneered FRs” and “recombinantly veneered FRs” refer to the selective replacement of FR residues from, e.g., a rodent heavy or light chain V region, with human FR residues in order to provide a xenogeneic molecule comprising an antigen-binding site which retains substantially all of the native FR polypeptide folding structure. Veneering techniques are based on the understanding that the ligand binding characteristics of an antigen-binding site are determined primarily by the structure and relative disposition of the heavy and light chain CDR sets within the antigen-binding surface. Davies et al. (1990) Ann. Rev. Biochem. 59:439-473. Thus, antigen binding specificity can be preserved in a humanized antibody only wherein the CDR structures, their interaction with each other, and their interaction with the rest of the V region domains are carefully maintained. By using veneering techniques, exterior (e.g., solvent-accessible) FR residues which are readily encountered by the immune system are selectively replaced with human residues to provide a hybrid molecule that comprises either a weakly immunogenic, or substantially non-immunogenic veneered surface.

[11100] The process of veneering makes use of the available sequence data for human antibody variable domains compiled by Kabat et al., in Sequences of Proteins of Immunological Interest, 4th ed., (U.S. Dept. of Health and Human Services, U.S. Government Printing Office, 1987), updates to the Kabat database, and other accessible U.S. and foreign databases (both nucleic acid and protein). Solvent accessibilities of V region amino acids can be deduced from the known three-dimensional structure for human and murine antibody fragments. There are two general steps in veneering a murine antigen-binding site. Initially, the FRs of the variable domains of an antibody molecule of interest are compared with corresponding FR sequences of human variable domains obtained from the above-identified sources. The most homologous human V regions are then compared residue by residue to corresponding murine amino acids. The residues in the murine FR which differ from the human counterpart are replaced by the residues present in the human moiety using recombinant techniques well known in the art. Residue switching is only carried out with moieties which are at least partially exposed (solvent accessible), and care is exercised in the replacement of amino acid residues which may have a significant effect on the tertiary structure of V region domains, such as proline, glycine and charged amino acids.

[11101] In this manner, the resultant “veneered” murine antigen-binding sites are thus designed to retain the murine CDR residues, the residues substantially adjacent to the CDRs, the residues identified as buried or mostly buried (solvent inaccessible), the residues believed to participate in non-covalent (e.g., electrostatic and hydrophobic) contacts between heavy and light chain domains, and the residues from conserved structural regions of the FRs which are believed to influence the “canonical” tertiary structures of the CDR loops. These design criteria are then used to prepare recombinant nucleotide sequences which combine the CDRs of both the heavy and light chain of a murine antigen-binding site into human-appearing FRs that can be used to transfect mammalian cells for the expression of recombinant human antibodies which exhibit the antigen specificity of the murine antibody molecule.

[11102] In another embodiment of the invention, monoclonal antibodies of the present invention may be coupled to one or more therapeutic agents. Suitable agents in this regard include radionuclides, differentiation inducers, drugs, toxins, and derivatives thereof. Preferred radionuclides include ⁹⁰Y, ¹²³I, ¹²⁵I, ¹³¹I, ¹⁸⁶Re, ¹⁸⁸Re, ²¹¹At, and ²¹²Bi. Preferred drugs include methotrexate, and pyrimidine and purine analogs. Preferred differentiation inducers include phorbol esters and butyric acid. Preferred toxins include ricin, abrin, diptheria toxin, cholera toxin, gelonin, Pseudomonas exotoxin, Shigella toxin, and pokeweed antiviral protein.

[11103] A therapeutic agent may be coupled (e.g., covalently bonded) to a suitable monoclonal antibody either directly or indirectly (e.g., via a linker group). A direct reaction between an agent and an antibody is possible when each possesses a substituent capable of reacting with the other. For example, a nucleophilic group, such as an amino or sulfhydryl group, on one may be capable of reacting with a carbonyl-containing group, such as an anhydride or an acid halide, or with an alkyl group containing a good leaving group (e.g., a halide) on the other.

[11104] Alternatively, it may be desirable to couple a therapeutic agent and an antibody via a linker group. A linker group can function as a spacer to distance an antibody from an agent in order to avoid interference with binding capabilities. A linker group can also serve to increase the chemical reactivity of a substituent on an agent or an antibody, and thus increase the coupling efficiency. An increase in chemical reactivity may also facilitate the use of agents, or functional groups on agents, which otherwise would not be possible.

[11105] It will be evident to those skilled in the art that a variety of bifunctional or polyfunctional reagents, both homo- and hetero-functional (such as those described in the catalog of the Pierce Chemical Co., Rockford, Ill.), may be employed as the linker group. Coupling may be effected, for example, through amino groups, carboxyl groups, sulfhydryl groups or oxidized carbohydrate residues. There are numerous references describing such methodology, e.g., U.S. Pat. No. 4,671,958, to Rodwell et al.

[11106] Where a therapeutic agent is more potent when free from the antibody portion of the immunoconjugates of the present invention, it may be desirable to use a linker group which is cleavable during or upon internalization into a cell. A number of different cleavable linker groups have been described. The mechanisms for the intracellular release of an agent from these linker groups include cleavage by reduction of a disulfide bond (e.g., U.S. Pat. No. 4,489,710, to Spitler), by irradiation of a photolabile bond (e.g., U.S. Pat. No. 4,625,014, to Senter et al.), by hydrolysis of derivatized amino acid side chains (e.g., U.S. Pat. No. 4,638,045, to Kohn et al.), by serum complement-mediated hydrolysis (e.g., U.S. Pat. No. 4,671,958, to Rodwell et al.), and acid-catalyzed hydrolysis (e.g., U.S. Pat. No. 4,569,789, to Blattler et al.).

[11107] It may be desirable to couple more than one agent to an antibody. In one embodiment, multiple molecules of an agent are coupled to one antibody molecule. In another embodiment, more than one type of agent may be coupled to one antibody. Regardless of the particular embodiment, immunoconjugates with more than one agent may be prepared in a variety of ways. For example, more than one agent may be coupled directly to an antibody molecule, or linkers that provide multiple sites for attachment can be used. Alternatively, a carrier can be used.

[11108] A carrier may bear the agents in a variety of ways, including covalent bonding either directly or via a linker group. Suitable carriers include proteins such as albumins (e.g., U.S. Pat. No. 4,507,234, to Kato et al.), peptides and polysaccharides such as aminodextran (e.g., U.S. Pat. No. 4,699,784, to Shih et al.). A carrier may also bear an agent by noncovalent bonding or by encapsulation, such as within a liposome vesicle (e.g., U.S. Pat. Nos. 4,429,008 and 4,873,088). Carriers specific for radionuclide agents include radiohalogenated small molecules and chelating compounds. For example, U.S. Pat. No. 4,735,792 discloses representative radiohalogenated small molecules and their synthesis. A radionuclide chelate may be formed from chelating compounds that include those containing nitrogen and sulfur atoms as the donor atoms for binding the metal, or metal oxide, radionuclide. For example, U.S. Pat. No. 4,673,562, to Davison et al. discloses representative chelating compounds and their synthesis.

[11109] T Cell Compositions

[11110] The present invention, in another aspect, provides T cells specific for a tumor polypeptide disclosed herein, or for a variant or derivative thereof. Such cells may generally be prepared in vitro or ex vivo, using standard procedures. For example, T cells may be isolated from bone marrow, peripheral blood, or a fraction of bone marrow or peripheral blood of a patient, using a commercially available cell separation system, such as the Isolex™ System, available from Nexell Therapeutics, Inc. (Irvine, Calif.; see also U.S. Pat. Nos. 5,240,856; 5,215,926; WO 89/06280; WO 91/16116 and WO 92/07243). Alternatively, T cells may be derived from related or unrelated humans, non-human mammals, cell lines or cultures.

[11111] T cells may be stimulated with a polypeptide, polynucleotide encoding a polypeptide and/or an antigen presenting cell (APC) that expresses such a polypeptide. Such stimulation is performed under conditions and for a time sufficient to permit the generation of T cells that are specific for the polypeptide of interest. Preferably, a tumor polypeptide or polynucleotide of the invention is present within a delivery vehicle, such as a microsphere, to facilitate the generation of specific T cells.

[11112] T cells are considered to be specific for a polypeptide of the present invention if the T cells specifically proliferate, secrete cytokines or kill target cells coated with the polypeptide or expressing a gene encoding the polypeptide. T cell specificity may be evaluated using any of a variety of standard techniques. For example, within a chromium release assay or proliferation assay, a stimulation index of more than two fold increase in lysis and/or proliferation, compared to negative controls, indicates T cell specificity. Such assays may be performed, for example, as described in Chen et al., Cancer Res. 54:1065-1070, 1994. Alternatively, detection of the proliferation of T cells may be accomplished by a variety of known techniques. For example, T cell proliferation can be detected by measuring an increased rate of DNA synthesis (e.g., by pulse-labeling cultures of T cells with tritiated thymidine and measuring the amount of tritiated thymidine incorporated into DNA). Contact with a tumor polypeptide (100 ng/ml-100 μg/ml, preferably 200 ng/ml-25 μg/ml) for 3-7 days will typically result in at least a two fold increase in proliferation of the T cells. Contact as described above for 2-3 hours should result in activation of the T cells, as measured using standard cytokine assays in which a two fold increase in the level of cytokine release (e.g., TNF or IFN-γ) is indicative of T cell activation (see Coligan et al., Current Protocols in Immunology, vol. 1, Wiley Interscience (Greene 1998)). T cells that have been activated in response to a tumor polypeptide, polynucleotide or polypeptide-expressing APC may be CD4⁺ and/or CD8⁺. Tumor polypeptide-specific T cells may be expanded using standard techniques. Within preferred embodiments, the T cells are derived from a patient, a related donor or an unrelated donor, and are administered to the patient following stimulation and expansion.

[11113] For therapeutic purposes, CD4⁺ or CD8⁺ T cells that proliferate in response to a tumor polypeptide, polynucleotide or APC can be expanded in number either in vitro or in vivo. Proliferation of such T cells in vitro may be accomplished in a variety of ways. For example, the T cells can be re-exposed to a tumor polypeptide, or a short peptide corresponding to an immunogenic portion of such a polypeptide, with or without the addition of T cell growth factors, such as interleukin-2, and/or stimulator cells that synthesize a tumor polypeptide. Alternatively, one or more T cells that proliferate in the presence of the tumor polypeptide can be expanded in number by cloning. Methods for cloning cells are well known in the art, and include limiting dilution.

[11114] T Cell Receptor Compositions The T cell receptor (TCR) consists of 2 different, highly variable polypeptide chains, termed the T-cell receptor α and β chains, that are linked by a disulfide bond (Janeway, Travers, Walport. Immunobiology. Fourth Ed., 148-159. Elsevier Science Ltd/Garland Publishing. 1999). The α/β heterodimer complexes with the invariant CD3 chains at the cell membrane. This complex recognizes specific antigenic peptides bound to MHC molecules. The enormous diversity of TCR specificities is generated much like immunoglobulin diversity, through somatic gene rearrangement. The β chain genes contain over 50 variable (V), 2 diversity (D), over 10 joining (J) segments, and 2 constant region segments (C). The α chain genes contain over 70 V segments, and over 60 J segments but no D segments, as well as one C segment. During T cell development in the thymus, the D to J gene rearrangement of the β chain occurs, followed by the V gene segment rearrangement to the DJ. This functional VDJ_{β} exon is transcribed and spliced to join to a C_{β}. For the α chain, a V_{α} gene segment rearranges to a J_{α} gene segment to create the functional exon that is then transcribed and spliced to the C_{α}. Diversity is further increased during the recombination process by the random addition of P and N-nucleotides between the V, D, and J segments of the β chain and between the V and J segments in the α chain (Janeway, Travers, Walport. Immunobiology. Fourth Ed., 98 and 150. Elsevier Science Ltd/Garland Publishing. 1999).

[11115] The present invention, in another aspect, provides TCRs specific for a polypeptide disclosed herein, or for a variant or derivative thereof. In accordance with the present invention, polynucleotide and amino acid sequences are provided for the V-J or V-D-J junctional regions or parts thereof for the alpha and beta chains of the T-cell receptor which recognize tumor polypeptides described herein. In general, this aspect of the invention relates to T-cell receptors which recognize or bind tumor polypeptides presented in the context of MHC. In a preferred embodiment the tumor antigens recognized by the T-cell receptors comprise a polypeptide of the present invention. For example, cDNA encoding a TCR specific for a_tumor peptide can be isolated from T cells specific for a tumor polypeptide using standard molecular biological and recombinant DNA techniques.

[11116] This invention further includes the T-cell receptors or analogs thereof having substantially the same function or activity as the T-cell receptors of this invention which recognize or bind tumor polypeptides. Such receptors include, but are not limited to, a fragment of the receptor, or a substitution, addition or deletion mutant of a T-cell receptor provided herein. This invention also encompasses polypeptides or peptides that are substantially homologous to the T-cell receptors provided herein or that retain substantially the same activity. The term “analog” includes any protein or polypeptide having an amino acid residue sequence substantially identical to the T-cell receptors provided herein in which one or more residues, preferably no more than 5 residues, more preferably no more than 25 residues have been conservatively substituted with a functionally similar residue and which displays the functional aspects of the T-cell receptor as described herein.

[11117] The present invention further provides for suitable mammalian host cells, for example, non-specific T cells, that are transfected with a polynucleotide encoding TCRs specific for a polypeptide described herein, thereby rendering the host cell specific for the polypeptide. The α and β chains of the TCR may be contained on separate expression vectors or alternatively, on a single expression vector that also contains an internal ribosome entry site (IRES) for cap-independent translation of the gene downstream of the IRES. Said host cells expressing TCRs specific for the polypeptide may be used, for example, for adoptive immunotherapy of ovarian cancer as discussed further below.

[11118] In further aspects of the present invention, cloned TCRs specific for a polypeptide recited herein may be used in a kit for the diagnosis of ovarian cancer. For example, the nucleic acid sequence or portions thereof, of tumor-specific TCRs can be used as probes or primers for the detection of expression of the rearranged genes encoding the specific TCR in a biological sample. Therefore, the present invention further provides for an assay for detecting messenger RNA or DNA encoding the TCR specific for a polypeptide.

[11119] Pharmaceutical Compositions

[11120] In additional embodiments, the present invention concerns formulation of one or more of the polynucleotide, polypeptide, T-cell, TCR, and/or antibody compositions disclosed herein in pharmaceutically-acceptable carriers for administration to a cell or an animal, either alone, or in combination with one or more other modalities of therapy.

[11121] It will be understood that, if desired, a composition as disclosed herein may be administered in combination with other agents as well, such as, e.g., other proteins or polypeptides or various pharmaceutically-active agents. In fact, there is virtually no limit to other components that may also be included, given that the additional agents do not cause a significant adverse effect upon contact with the target cells or host tissues. The compositions may thus be delivered along with various other agents as required in the particular instance. Such compositions may be purified from host cells or other biological sources, or alternatively may be chemically synthesized as described herein. Likewise, such compositions may further comprise substituted or derivatized RNA or DNA compositions.

[11122] Therefore, in another aspect of the present invention, pharmaceutical compositions are provided comprising one or more of the polynucleotide, polypeptide, antibody, TCR, and/or T-cell compositions described herein in combination with a physiologically acceptable carrier. In certain preferred embodiments, the pharmaceutical compositions of the invention comprise immunogenic polynucleotide and/or polypeptide compositions of the invention for use in prophylactic and theraputic vaccine applications. Vaccine preparation is generally described in, for example, M. F. Powell and M. J. Newman, eds., “Vaccine Design (the subunit and adjuvant approach),” Plenum Press (NY, 1995). Generally, such compositions will comprise one or more polynucleotide and/or polypeptide compositions of the present invention in combination with one or more immunostimulants.

[11123] It will be apparent that any of the pharmaceutical compositions described herein can contain pharmaceutically acceptable salts of the polynucleotides and polypeptides of the invention. Such salts can be prepared, for example, from pharmaceutically acceptable non-toxic bases, including organic bases (e.g., salts of primary, secondary and tertiary amines and basic amino acids) and inorganic bases (e.g., sodium, potassium, lithium, ammonium, calcium and magnesium salts).

[11124] In another embodiment, illustrative immunogenic compositions, e.g., vaccine compositions, of the present invention comprise DNA encoding one or more of the polypeptides as described above, such that the polypeptide is generated in situ. As noted above, the polynucleotide may be administered within any of a variety of delivery systems known to those of ordinary skill in the art. Indeed, numerous gene delivery techniques are well known in the art, such as those described by Rolland, Crit. Rev. Therap. Drug Carrier Systems 15:143-198, 1998, and references cited therein. Appropriate polynucleotide expression systems will, of course, contain the necessary regulatory DNA regulatory sequences for expression in a patient (such as a suitable promoter and terminating signal). Alternatively, bacterial delivery systems may involve the administration of a bacterium (such as Bacillus-Calmette-Guerrin) that expresses an immunogenic portion of the polypeptide on its cell surface or secretes such an epitope.

[11125] Therefore, in certain embodiments, polynucleotides encoding immunogenic polypeptides described herein are introduced into suitable mammalian host cells for expression using any of a number of known viral-based systems. In one illustrative embodiment, retroviruses provide a convenient and effective platform for gene delivery systems. A selected nucleotide sequence encoding a polypeptide of the present invention can be inserted into a vector and packaged in retroviral particles using techniques known in the art. The recombinant virus can then be isolated and delivered to a subject. A number of illustrative retroviral systems have been described (e.g., U.S. Pat. No. 5,219,740; Miller and Rosman (1989) BioTechniques 7:980-990; Miller, A. D. (1990) Human Gene Therapy 1:5-14; Scarpa et al. (1991) Virology 180:849-852; Burns et al. (1993) Proc. Natl. Acad. Sci. USA 90:8033-8037; and Boris-Lawrie and Temin (1993) Cur. Opin. Genet. Develop. 3:102-109.

[11126] In addition, a number of illustrative adenovirus-based systems have also been described. Unlike retroviruses which integrate into the host genome, adenoviruses persist extrachromosomally thus minimizing the risks associated with insertional mutagenesis (Haj-Ahmad and Graham (1986) J. Virol. 57:267-274; Bett et al. (1993) J. Virol. 67:5911-5921; Mittereder et al. (1994) Human Gene Therapy 5:717-729; Seth et al. (1994) J. Virol. 68:933-940; Barr et al. (1994) Gene Therapy 1:51-58; Berkner, K. L. (1988) BioTechniques 6:616-629; and Rich et al. (1993) Human Gene Therapy 4:461-476).

[11127] Various adeno-associated virus (AAV) vector systems have also been developed for polynucleotide delivery. AAV vectors can be readily constructed using techniques well known in the art. See, e.g., U.S. Pat. Nos. 5,173,414 and 5,139,941; International Publication Nos. WO 92/01070 and WO 93/03769; Lebkowski et al. (1988) Molec. Cell. Biol. 8:3988-3996; Vincent et al. (1990) Vaccines 90 (Cold Spring Harbor Laboratory Press); Carter, B. J. (1992) Current Opinion in Biotechnology 3:533-539; Muzyczka, N. (1992) Current Topics in Microbiol. and Immunol. 158:97-129; Kotin, R. M. (1994) Human Gene Therapy 5:793-801; Shelling and Smith (1994) Gene Therapy 1:165-169; and Zhou et al. (1994) J. Exp. Med. 179:1867-1875.

[11128] Additional viral vectors useful for delivering the polynucleotides encoding polypeptides of the present invention by gene transfer include those derived from the pox family of viruses, such as vaccinia virus and avian poxvirus. By way of example, vaccinia virus recombinants expressing the novel molecules can be constructed as follows. The DNA encoding a polypeptide is first inserted into an appropriate vector so that it is adjacent to a vaccinia promoter and flanking vaccinia DNA sequences, such as the sequence encoding thymidine kinase (TK). This vector is then used to transfect cells which are simultaneously infected with vaccinia. Homologous recombination serves to insert the vaccinia promoter plus the gene encoding the polypeptide of interest into the viral genome. The resulting TK.sup.(−) recombinant can be selected by culturing the cells in the presence of 5-bromodeoxyuridine and picking viral plaques resistant thereto.

[11129] A vaccinia-based infection/transfection system can be conveniently used to provide for inducible, transient expression or coexpression of one or more polypeptides described herein in host cells of an organism. In this particular system, cells are first infected in vitro with a vaccinia virus recombinant that encodes the bacteriophage T7 RNA polymerase. This polymerase displays exquisite specificity in that it only transcribes templates bearing T7 promoters. Following infection, cells are transfected with the polynucleotide or polynucleotides of interest, driven by a T7 promoter. The polymerase expressed in the cytoplasm from the vaccinia virus recombinant transcribes the transfected DNA into RNA which is then translated into polypeptide by the host translational machinery. The method provides for high level, transient, cytoplasmic production of large quantities of RNA and its translation products. See, e.g., Elroy-Stein and Moss, Proc. Natl. Acad. Sci. USA (1990) 87:6743-6747; Fuerst et al. Proc. Natl. Acad. Sci. USA (1986) 83:8122-8126.

[11130] Alternatively, avipoxviruses, such as the fowlpox and canarypox viruses, can also be used to deliver the coding sequences of interest. Recombinant avipox viruses, expressing immunogens from mammalian pathogens, are known to confer protective immunity when administered to non-avian species. The use of an Avipox vector is particularly desirable in human and other mammalian species since members of the Avipox genus can only productively replicate in susceptible avian species and therefore are not infective in mammalian cells. Methods for producing recombinant Avipoxviruses are known in the art and employ genetic recombination, as described above with respect to the production of vaccinia viruses. See, e.g., WO 91/12882; WO 89/03429; and WO 92/03545.

[11131] Any of a number of alphavirus vectors can also be used for delivery of polynucleotide compositions of the present invention, such as those vectors described in U.S. Pat. Nos. 5,843,723; 6,015,686; 6,008,035 and 6,015,694. Certain vectors based on Venezuelan Equine Encephalitis (VEE) can also be used, illustrative examples of which can be found in U.S. Pat. Nos. 5,505,947 and 5,643,576.

[11132] Moreover, molecular conjugate vectors, such as the adenovirus chimeric vectors described in Michael et al. J. Biol. Chem. (1993) 268:6866-6869 and Wagner et al. Proc. Natl. Acad. Sci. USA (1992) 89:6099-6103, can also be used for gene delivery under the invention.

[11133] Additional illustrative information on these and other known viral-based delivery systems can be found, for example, in Fisher-Hoch et al., Proc. Natl. Acad. Sci. USA 86:317-321, 1989; Flexner et al., Ann. N.Y. Acad. Sci. 569:86-103, 1989; Flexner et al., Vaccine 8:17-21, 1990; U.S. Pat. Nos. 4,603,112, 4,769,330, and 5,017,487; WO 89/01973; U.S. Pat. No. 4,777,127; GB 2,200,651; EP 0,345,242; WO 91/02805; Berkner, Biotechniques 6:616-627, 1988; Rosenfeld et al., Science 252:431-434, 1991; Kolls et al., Proc. Natl. Acad. Sci. USA 91:215-219, 1994; Kass-Eisler et al., Proc. Natl. Acad. Sci. USA 90:11498-11502, 1993; Guzman et al., Circulation 88:2838-2848, 1993; and Guzman et al., Cir. Res. 73:1202-1207, 1993.

[11134] In certain embodiments, a polynucleotide may be integrated into the genome of a target cell. This integration may be in the specific location and orientation via homologous recombination (gene replacement) or it may be integrated in a random, non-specific location (gene augmentation). In yet further embodiments, the polynucleotide may be stably maintained in the cell as a separate, episomal segment of DNA. Such polynucleotide segments or “episomes” encode sequences sufficient to permit maintenance and replication independent of or in synchronization with the host cell cycle. The manner in which the expression construct is delivered to a cell and where in the cell the polynucleotide remains is dependent on the type of expression construct employed.

[11135] In another embodiment of the invention, a polynucleotide is administered/delivered as “naked” DNA, for example as described in Ulmer et al., Science 259:1745-1749, 1993 and reviewed by Cohen, Science 259:1691-1692, 1993. The uptake of naked DNA may be increased by coating the DNA onto biodegradable beads, which are efficiently transported into the cells.

[11136] In still another embodiment, a composition of the present invention can be delivered via a particle bombardment approach, many of which have been described. In one illustrative example, gas-driven particle acceleration can be achieved with devices such as those manufactured by Powderject Pharmaceuticals PLC (Oxford, UK) and Powderject Vaccines Inc. (Madison, Wis.), some examples of which are described in U.S. Pat. Nos. 5,846,796; 6,010,478; 5,865,796; 5,584,807; and EP Patent No. 0500 799. This approach offers a needle-free delivery approach wherein a dry powder formulation of microscopic particles, such as polynucleotide or polypeptide particles, are accelerated to high speed within a helium gas jet generated by a hand held device, propelling the particles into a target tissue of interest.

[11137] In a related embodiment, other devices and methods that may be useful for gas-driven needle-less injection of compositions of the present invention include those provided by Bioject, Inc. (Portland, Oreg.), some examples of which are described in U.S. Pat. Nos. 4,790,824; 5,064,413; 5,312,335; 5,383,851; 5,399,163; 5,520,639 and 5,993,412.

[11138] According to another embodiment, the pharmaceutical compositions described herein will comprise one or more immunostimulants in addition to the immunogenic polynucleotide, polypeptide, antibody, T-cell, TCR, and/or APC compositions of this invention. An immunostimulant refers to essentially any substance that enhances or potentiates an immune response (antibody and/or cell-mediated) to an exogenous antigen. One preferred type of immunostimulant comprises an adjuvant. Many adjuvants contain a substance designed to protect the antigen from rapid catabolism, such as aluminum hydroxide or mineral oil, and a stimulator of immune responses, such as lipid A, Bortadella pertussis or Mycobacterium tuberculosis derived proteins. Certain adjuvants are commercially available as, for example, Freund's Incomplete Adjuvant and Complete Adjuvant (Difco Laboratories, Detroit, Mich.); Merck Adjuvant 65 (Merck and Company, Inc., Rahway, N.J.); AS-2 (SmithKline Beecham, Philadelphia, Pa.); aluminum salts such as aluminum hydroxide gel (alum) or aluminum phosphate; salts of calcium, iron or zinc; an insoluble suspension of acylated tyrosine; acylated sugars; cationically or anionically derivatized polysaccharides; polyphosphazenes; biodegradable microspheres; monophosphoryl lipid A and quil A. Cytokines, such as GM-CSF, interleukin-2, -7, -12, and other like growth factors, may also be used as adjuvants.

[11139] Within certain embodiments of the invention, the adjuvant composition is preferably one that induces an immune response predominantly of the Th1 type. High levels of Th1-type cytokines (e.g., IFN-γ, TNFα, IL-2 and IL-12) tend to favor the induction of cell mediated immune responses to an administered antigen. In contrast, high levels of Th2-type cytokines (e.g., IL-4, IL-5, IL-6 and IL-10) tend to favor the induction of humoral immune responses. Following application of a vaccine as provided herein, a patient will support an immune response that includes Th1- and Th2-type responses. Within a preferred embodiment, in which a response is predominantly Th1-type, the level of Th1-type cytokines will increase to a greater extent than the level of Th2-type cytokines. The levels of these cytokines may be readily assessed using standard assays. For a review of the families of cytokines, see Mosmann and Coffman, Ann. Rev. Immunol. 7:145-173, 1989.

[11140] Certain preferred adjuvants for eliciting a predominantly Th1-type response include, for example, a combination of monophosphoryl lipid A, preferably 3-de-O-acylated monophosphoryl lipid A, together with an aluminum salt. MPL® adjuvants are available from Corixa Corporation (Seattle, Wash.; see, for example, U.S. Pat. Nos. 4,436,727; 4,877,611; 4,866,034 and 4,912,094). CpG-containing oligonucleotides (in which the CpG dinucleotide is unmethylated) also induce a predominantly Th1 response. Such oligonucleotides are well known and are described, for example, in WO 96/02555, WO 99/33488 and U.S. Pat. Nos. 6,008,200 and 5,856,462. Immunostimulatory DNA sequences are also described, for example, by Sato et al., Science 273:352, 1996. Another preferred adjuvant comprises a saponin, such as Quil A, or derivatives thereof, including QS21 and QS7 (Aquila Biopharmaceuticals Inc., Framingham, Mass.); Escin; Digitonin; or Gypsophila or Chenopodium quinoa l saponins . Other preferred formulations include more than one saponin in the adjuvant combinations of the present invention, for example combinations of at least two of the following group comprising QS21, QS7, Quil A, β-escin, or digitonin.

[11141] Alternatively the saponin formulations may be combined with vaccine vehicles composed of chitosan or other polycationic polymers, polylactide and polylactide-co-glycolide particles, poly-N-acetyl glucosamine-based polymer matrix, particles composed of polysaccharides or chemically modified polysaccharides, liposomes and lipid-based particles, particles composed of glycerol monoesters, etc. The saponins may also be formulated in the presence of cholesterol to form particulate structures such as liposomes or ISCOMs. Furthermore, the saponins may be formulated together with a polyoxyethylene ether or ester, in either a non-particulate solution or suspension, or in a particulate structure such as a paucilamelar liposome or ISCOM. The saponins may also be formulated with excipients such as Carbopol^{R} to increase viscosity, or may be formulated in a dry powder form with a powder excipient such as lactose.

[11142] In one preferred embodiment, the adjuvant system includes the combination of a monophosphoryl lipid A and a saponin derivative, such as the combination of QS21 and 3D-MPL® adjuvant, as described in WO 94/00153, or a less reactogenic composition where the QS21 is quenched with cholesterol, as described in WO 96/33739. Other preferred formulations comprise an oil-in-water emulsion and tocopherol. Another particularly preferred adjuvant formulation employing QS21, 3D-MPL® adjuvant and tocopherol in an oil-in-water emulsion is described in WO 95/17210.

[11143] Another enhanced adjuvant system involves the combination of a CpG-containing oligonucleotide and a saponin derivative particularly the combination of CpG and QS21 is disclosed in WO 00/09159. Preferably the formulation additionally comprises an oil in water emulsion and tocopherol.

[11144] Additional illustrative adjuvants for use in the pharmaceutical compositions of the invention include Montanide ISA 720 (Seppic, France), SAF (Chiron, Calif., United States), ISCOMS (CSL), MF-59 (Chiron), the SBAS series of adjuvants (e.g., SBAS-2 or SBAS-4, available from SmithKline Beecham, Rixensart, Belgium), Detox (Enhanzyn®) (Corixa, Hamilton, Mont.), RC-529 (Corixa, Hamilton, Mont.) and other aminoalkyl glucosaminide 4-phosphates (AGPs), such as those described in pending U.S. patent application Ser. Nos. 08/853,826 and 09/074,720, the disclosures of which are incorporated herein by reference in their entireties, and polyoxyethylene ether adjuvants such as those described in WO 99/52549A1.

[11145] Other preferred adjuvants include adjuvant molecules of the general formula (I)

HO(CH₂CH₂O)ₙ—A—R,

[11146] wherein, n is 1-50, A is a bond or —C(O)—, R is C₁₋₅₀ alkyl or Phenyl C₁₋₅₀ alkyl.

[11147] One embodiment of the present invention consists of a vaccine formulation comprising a polyoxyethylene ether of general formula (I), wherein n is between 1 and 50, preferably 4-24, most preferably 9; the R component is C₁₋₅₀, preferably C₄-C₂₀ alkyl and most preferably C₁₂ alkyl, and A is a bond. The concentration of the polyoxyethylene ethers should be in the range 0.1-20%, preferably from 0.1-10%, and most preferably in the range 0.1-1%. Preferred polyoxyethylene ethers are selected from the following group: polyoxyethylene-9-lauryl ether, polyoxyethylene-9-steoryl ether, polyoxyethylene-8-steoryl ether, polyoxyethylene-4-lauryl ether, polyoxyethylene-35-lauryl ether, and polyoxyethylene-23-lauryl ether. Polyoxyethylene ethers such as polyoxyethylene lauryl ether are described in the Merck index (12ₜₕ edition: entry 7717). These adjuvant molecules are described in WO 99/52549.

[11148] The polyoxyethylene ether according to the general formula (I) above may, if desired, be combined with another adjuvant. For example, a preferred adjuvant combination is preferably with CpG as described in the pending UK patent application GB 9820956.2.

[11149] According to another embodiment of this invention, an immunogenic composition described herein is delivered to a host via antigen presenting cells (APCs), such as dendritic cells, macrophages, B cells, monocytes and other cells that may be engineered to be efficient APCs. Such cells may, but need not, be genetically modified to increase the capacity for presenting the antigen, to improve activation and/or maintenance of the T cell response, to have anti-tumor effects per se and/or to be immunologically compatible with the receiver (i.e., matched HLA haplotype). APCs may generally be isolated from any of a variety of biological fluids and organs, including tumor and peritumoral tissues, and may be autologous, allogeneic, syngeneic or xenogeneic cells.

[11150] Certain preferred embodiments of the present invention use dendritic cells or progenitors thereof as antigen-presenting cells. Dendritic cells are highly potent APCs (Banchereau and Steinman, Nature 392:245-251, 1998) and have been shown to be effective as a physiological adjuvant for eliciting prophylactic or therapeutic antitumor immunity (see Timmerman and Levy, Ann. Rev. Med. 50:507-529, 1999). In general, dendritic cells may be identified based on their typical shape (stellate in situ, with marked cytoplasmic processes (dendrites) visible in vitro), their ability to take up, process and present antigens with high efficiency and their ability to activate naïve T cell responses. Dendritic cells may, of course, be engineered to express specific cell-surface receptors or ligands that are not commonly found on dendritic cells in vivo or ex vivo, and such modified dendritic cells are contemplated by the present invention. As an alternative to dendritic cells, secreted vesicles antigen-loaded dendritic cells (called exosomes) may be used within a vaccine (see Zitvogel et al., Nature Med. 4:594-600, 1998).

[11151] Dendritic cells and progenitors may be obtained from peripheral blood, bone marrow, tumor-infiltrating cells, peritumoral tissues-infiltrating cells, lymph nodes, spleen, skin, umbilical cord blood or any other suitable tissue or fluid. For example, dendritic cells may be differentiated ex vivo by adding a combination of cytokines such as GM-CSF, IL-4, IL-13 and/or TNFα to cultures of monocytes harvested from peripheral blood. Alternatively, CD34 positive cells harvested from peripheral blood, umbilical cord blood or bone marrow may be differentiated into dendritic cells by adding to the culture medium combinations of GM-CSF, IL-3, TNFα, CD40 ligand, LPS, flt3 ligand and/or other compound(s) that induce differentiation, maturation and proliferation of dendritic cells.

[11152] Dendritic cells are conveniently categorized as “immature” and “mature” cells, which allows a simple way to discriminate between two well characterized phenotypes. However, this nomenclature should not be construed to exclude all possible intermediate stages of differentiation. Immature dendritic cells are characterized as APC with a high capacity for antigen uptake and processing, which correlates with the high expression of Fcγ receptor and mannose receptor. The mature phenotype is typically characterized by a lower expression of these markers, but a high expression of cell surface molecules responsible for T cell activation such as class I and class II MHC, adhesion molecules (e.g., CD54 and CD 11) and costimulatory molecules (e.g., CD40, CD80, CD86 and 4-1BB).

[11153] APCs may generally be transfected with a polynucleotide of the invention (or portion or other variant thereof) such that the encoded polypeptide, or an immunogenic portion thereof, is expressed on the cell surface. Such transfection may take place ex vivo, and a pharmaceutical composition comprising such transfected cells may then be used for therapeutic purposes, as described herein. Alternatively, a gene delivery vehicle that targets a dendritic or other antigen presenting cell may be administered to a patient, resulting in transfection that occurs in vivo. In vivo and ex vivo transfection of dendritic cells, for example, may generally be performed using any methods known in the art, such as those described in WO 97/24447, or the gene gun approach described by Mahvi et al., Immunology and cell Biology 75:456-460, 1997. Antigen loading of dendritic cells may be achieved by incubating dendritic cells or progenitor cells with the tumor polypeptide, DNA (naked or within a plasmid vector) or RNA; or with antigen-expressing recombinant bacterium or viruses (e.g., vaccinia, fowlpox, adenovirus or lentivirus vectors). Prior to loading, the polypeptide may be covalently conjugated to an immunological partner that provides T cell help (e.g., a carrier molecule). Alternatively, a dendritic cell may be pulsed with a non-conjugated immunological partner, separately or in the presence of the polypeptide.

[11154] While any suitable carrier known to those of ordinary skill in the art may be employed in the pharmaceutical compositions of this invention, the type of carrier will typically vary depending on the mode of administration. Compositions of the present invention may be formulated for any appropriate manner of administration, including for example, topical, oral, nasal, mucosal, intravenous, intracranial, intraperitoneal, subcutaneous and intramuscular administration.

[11155] Carriers for use within such pharmaceutical compositions are biocompatible, and may also be biodegradable. In certain embodiments, the formulation preferably provides a relatively constant level of active component release. In other embodiments, however, a more rapid rate of release immediately upon administration may be desired. The formulation of such compositions is well within the level of ordinary skill in the art using known techniques. Illustrative carriers useful in this regard include microparticles of poly(lactide-co-glycolide), polyacrylate, latex, starch, cellulose, dextran and the like. Other illustrative delayed-release carriers include supramolecular biovectors, which comprise a non-liquid hydrophilic core (e.g., a cross-linked polysaccharide or oligosaccharide) and, optionally, an external layer comprising an amphiphilic compound, such as a phospholipid (see e.g., U.S. Pat. No. 5,151,254 and PCT applications WO 94/20078, WO/94/23701 and WO 96/06638). The amount of active compound contained within a sustained release formulation depends upon the site of implantation, the rate and expected duration of release and the nature of the condition to be treated or prevented.

[11156] In another illustrative embodiment, biodegradable microspheres (e.g., polylactate polyglycolate) are employed as carriers for the compositions of this invention. Suitable biodegradable microspheres are disclosed, for example, in U.S. Pat. Nos. 4,897,268; 5,075,109; 5,928,647; 5,811,128; 5,820,883; 5,853,763; 5,814,344, 5,407,609 and 5,942,252. Modified hepatitis B core protein carrier systems. such as described in WO/99 40934, and references cited therein, will also be useful for many applications. Another illustrative carrier/delivery system employs a carrier comprising particulate-protein complexes, such as those described in U.S. Pat. No. 5,928,647, which are capable of inducing a class I-restricted cytotoxic T lymphocyte responses in a host.

[11157] In another illustrative embodiment, calcium phosphate core particles are employed as carriers, vaccine adjuvants, or as controlled release matrices for the compositions of this invention. Exemplary calcium phosphate particles are disclosed, for example, in published patent application No. WO/0046147.

[11158] The pharmaceutical compositions of the invention will often further comprise one or more buffers (e.g., neutral buffered saline or phosphate buffered saline), carbohydrates (e.g., glucose, mannose, sucrose or dextrans), mannitol, proteins, polypeptides or amino acids such as glycine, antioxidants, bacteriostats, chelating agents such as EDTA or glutathione, adjuvants (e.g., aluminum hydroxide), solutes that render the formulation isotonic, hypotonic or weakly hypertonic with the blood of a recipient, suspending agents, thickening agents and/or preservatives. Alternatively, compositions of the present invention may be formulated as a lyophilizate.

[11159] The pharmaceutical compositions described herein may be presented in unit-dose or multi-dose containers, such as sealed ampoules or vials. Such containers are typically sealed in such a way to preserve the sterility and stability of the formulation until use. In general, formulations may be stored as suspensions, solutions or emulsions in oily or aqueous vehicles. Alternatively, a pharmaceutical composition may be stored in a freeze-dried condition requiring only the addition of a sterile liquid carrier immediately prior to use.

[11160] The development of suitable dosing and treatment regimens for using the particular compositions described herein in a variety of treatment regimens, including e.g., oral, parenteral, intravenous, intranasal, and intramuscular administration and formulation, is well known in the art, some of which are briefly discussed below for general purposes of illustration.

[11161] In certain applications, the pharmaceutical compositions disclosed herein may be delivered via oral administration to an animal. As such, these compositions may be formulated with an inert diluent or with an assimilable edible carrier, or they may be enclosed in hard- or soft-shell gelatin capsule, or they may be compressed into tablets, or they may be incorporated directly with the food of the diet.

[11162] The active compounds may even be incorporated with excipients and used in the form of ingestible tablets, buccal tables, troches, capsules, elixirs, suspensions, syrups, wafers, and the like (see, for example, Mathiowitz et al., Nature Mar. 27, 1997;386(6623):410-4; Hwang et al., Crit Rev Ther Drug Carrier Syst 1998;15(3):243-84; U.S. Pat. Nos. 5,641,515; 5,580,579 and 5,792,451). Tablets, troches, pills, capsules and the like may also contain any of a variety of additional components, for example, a binder, such as gum tragacanth, acacia, cornstarch, or gelatin; excipients, such as dicalcium phosphate; a disintegrating agent, such as corn starch, potato starch, alginic acid and the like; a lubricant, such as magnesium stearate; and a sweetening agent, such as sucrose, lactose or saccharin may be added or a flavoring agent, such as peppermint, oil of wintergreen, or cherry flavoring. When the dosage unit form is a capsule, it may contain, in addition to materials of the above type, a liquid carrier. Various other materials may be present as coatings or to otherwise modify the physical form of the dosage unit. For instance, tablets, pills, or capsules may be coated with shellac, sugar, or both. Of course, any material used in preparing any dosage unit form should be pharmaceutically pure and substantially non-toxic in the amounts employed. In addition, the active compounds may be incorporated into sustained-release preparation and formulations.

[11163] Typically, these formulations will contain at least about 0.1% of the active compound or more, although the percentage of the active ingredient(s) may, of course, be varied and may conveniently be between about 1 or 2% and about 60% or 70% or more of the weight or volume of the total formulation. Naturally, the amount of active compound(s) in each therapeutically useful composition may be prepared is such a way that a suitable dosage will be obtained in any given unit dose of the compound. Factors such as solubility, bioavailability, biological half-life, route of administration, product shelf life, as well as other pharmacological considerations will be contemplated by one skilled in the art of preparing such pharmaceutical formulations, and as such, a variety of dosages and treatment regimens may be desirable.

[11164] For oral administration the compositions of the present invention may alternatively be incorporated with one or more excipients in the form of a mouthwash, dentifrice, buccal tablet, oral spray, or sublingual orally-administered formulation. Alternatively, the active ingredient may be incorporated into an oral solution such as one containing sodium borate, glycerin and potassium bicarbonate, or dispersed in a dentifrice, or added in a therapeutically-effective amount to a composition that may include water, binders, abrasives, flavoring agents, foaming agents, and humectants. Alternatively the compositions may be fashioned into a tablet or solution form that may be placed under the tongue or otherwise dissolved in the mouth.

[11165] In certain circumstances it will be desirable to deliver the pharmaceutical compositions disclosed herein parenterally, intravenously, intramuscularly, or even intraperitoneally. Such approaches are well known to the skilled artisan, some of which are further described, for example, in U.S. Pat. Nos. 5,543,158; 5,641,515 and 5,399,363. In certain embodiments, solutions of the active compounds as free base or pharmacologically acceptable salts may be prepared in water suitably mixed with a surfactant, such as hydroxypropylcellulose. Dispersions may also be prepared in glycerol, liquid polyethylene glycols, and mixtures thereof and in oils. Under ordinary conditions of storage and use, these preparations generally will contain a preservative to prevent the growth of microorganisms.

[11166] Illustrative pharmaceutical forms suitable for injectable use include sterile aqueous solutions or dispersions and sterile powders for the extemporaneous preparation of sterile injectable solutions or dispersions (for example, see U.S. Pat. No. 5,466,468). In all cases the form must be sterile and must be fluid to the extent that easy syringability exists. It must be stable under the conditions of manufacture and storage and must be preserved against the contaminating action of microorganisms, such as bacteria and fungi. The carrier can be a solvent or dispersion medium containing, for example, water, ethanol, polyol (e.g, glycerol, propylene glycol, and liquid polyethylene glycol, and the like), suitable mixtures thereof, and/or vegetable oils. Proper fluidity may be maintained, for example, by the use of a coating, such as lecithin, by the maintenance of the required particle size in the case of dispersion and/or by the use of surfactants. The prevention of the action of microorganisms can be facilitated by various antibacterial and antifungal agents, for example, parabens, chlorobutanol, phenol, sorbic acid, thimerosal, and the like. In many cases, it will be preferable to include isotonic agents, for example, sugars or sodium chloride. Prolonged absorption of the injectable compositions can be brought about by the use in the compositions of agents delaying absorption, for example, aluminum monostearate and gelatin.

[11167] In one embodiment, for parenteral administration in an aqueous solution, the solution should be suitably buffered if necessary and the liquid diluent first rendered isotonic with sufficient saline or glucose. These particular aqueous solutions are especially suitable for intravenous, intramuscular, subcutaneous and intraperitoneal administration. In this connection, a sterile aqueous medium that can be employed will be known to those of skill in the art in light of the present disclosure. For example, one dosage may be dissolved in 1 ml of isotonic NaCl solution and either added to 1000 ml of hypodermoclysis fluid or injected at the proposed site of infusion, (see for example, “Remington's Pharmaceutical Sciences” 15th Edition, pages 1035-1038 and 1570-1580). Some variation in dosage will necessarily occur depending on the condition of the subject being treated. Moreover, for human administration, preparations will of course preferably meet sterility, pyrogenicity, and the general safety and purity standards as required by FDA Office of Biologics standards.

[11168] In another embodiment of the invention, the compositions disclosed herein may be formulated in a neutral or salt form. Illustrative pharmaceutically-acceptable salts include the acid addition salts (formed with the free amino groups of the protein) and which are formed with inorganic acids such as, for example, hydrochloric or phosphoric acids, or such organic acids as acetic, oxalic, tartaric, mandelic, and the like. Salts formed with the free carboxyl groups can also be derived from inorganic bases such as, for example, sodium, potassium, ammonium, calcium, or ferric hydroxides, and such organic bases as isopropylamine, trimethylamine, histidine, procaine and the like. Upon formulation, solutions will be administered in a manner compatible with the dosage formulation and in such amount as is therapeutically effective.

[11169] The carriers can further comprise any and all solvents, dispersion media, vehicles, coatings, diluents, antibacterial and antifungal agents, isotonic and absorption delaying agents, buffers, carrier solutions, suspensions, colloids, and the like. The use of such media and agents for pharmaceutical active substances is well known in the art. Except insofar as any conventional media or agent is incompatible with the active ingredient, its use in the therapeutic compositions is contemplated. Supplementary active ingredients can also be incorporated into the compositions. The phrase “pharmaceutically-acceptable” refers to molecular entities and compositions that do not produce an allergic or similar untoward reaction when administered to a human.

[11170] In certain embodiments, the pharmaceutical compositions may be delivered by intranasal sprays, inhalation, and/or other aerosol delivery vehicles. Methods for delivering genes, nucleic acids, and peptide compositions directly to the lungs via nasal aerosol sprays has been described, e.g., in U.S. Pat. Nos. 5,756,353 and 5,804,212. Likewise, the delivery of drugs using intranasal microparticle resins (Takenaga et al., J Controlled Release Mar. 2, 1998;52(1-2):81-7) and lysophosphatidyl-glycerol compounds (U.S. Pat. No. 5,725,871) are also well-known in the pharmaceutical arts. Likewise, illustrative transmucosal drug delivery in the form of a polytetrafluoroetheylene support matrix is described in U.S. Pat. No. 5,780,045.

[11171] In certain embodiments, liposomes, nanocapsules, microparticles, lipid particles, vesicles, and the like, are used for the introduction of the compositions of the present invention into suitable host cells/organisms. In particular, the compositions of the present invention may be formulated for delivery either encapsulated in a lipid particle, a liposome, a vesicle, a nanosphere, or a nanoparticle or the like. Alternatively, compositions of the present invention can be bound, either covalently or non-covalently, to the surface of such carrier vehicles.

[11172] The formation and use of liposome and liposome-like preparations as potential drug carriers is generally known to those of skill in the art (see for example, Lasic, Trends Biotechnol July 1998;16(7):307-21; Takakura, Nippon Rinsho 1998 March;56(3):691-5; Chandran et al., Indian J Exp Biol. August 1997;35(8):801-9; Margalit, Crit Rev Ther Drug Carrier Syst. 1995;12(2-3):233-61; U.S. Pat. Nos. 5,567,434; 5,552,157; 5,565,213; 5,738,868 and 5,795,587, each specifically incorporated herein by reference in its entirety).

[11173] Liposomes have been used successfully with a number of cell types that are normally difficult to transfect by other procedures, including T cell suspensions, primary hepatocyte cultures and PC 12 cells (Renneisen et al., J Biol Chem. Sep. 25, 1990;265(27):16337-42; Muller et al., DNA Cell Biol. April 1990;9(3):221-9). In addition, liposomes are free of the DNA length constraints that are typical of viral-based delivery systems. Liposomes have been used effectively to introduce genes, various drugs, radiotherapeutic agents, enzymes, viruses, transcription factors, allosteric effectors and the like, into a variety of cultured cell lines and animals. Furthermore, he use of liposomes does not appear to be associated with autoimmune responses or unacceptable toxicity after systemic delivery.

[11174] In certain embodiments, liposomes are formed from phospholipids that are dispersed in an aqueous medium and spontaneously form multilamellar concentric bilayer vesicles (also termed multilamellar vesicles (MLVs).

[11175] Alternatively, in other embodiments, the invention provides for pharmaceutically-acceptable nanocapsule formulations of the compositions of the present invention. Nanocapsules can generally entrap compounds in a stable and reproducible way (see, for example, Quintanar-Guerrero et al., Drug Dev Ind Pharm. December 1998;24(12):1113-28). To avoid side effects due to intracellular polymeric overloading, such ultrafine particles (sized around 0.1 μm) may be designed using polymers able to be degraded in vivo. Such particles can be made as described, for example, by Couvreur et al., Crit Rev Ther Drug Carrier Syst. 1988;5(1):1-20; zur Muhlen et al., Eur J Pharm Biopharm. March 1998;45(2):149-55; Zambaux et al. J Controlled Release. Jan. 2, 1998;50(1-3):31-40; and U.S. Pat. No. 5,145,684.

[11176] Cancer Therapeutic Methods

[11177] Immunologic approaches to cancer therapy are based on the recognition that cancer cells can often evade the body's defenses against aberrant or foreign cells and molecules, and that these defenses might be therapeutically stimulated to regain the lost ground, e.g. pgs. 623-648 in Klein, Immunology (Wiley-Interscience, New York, 1982). Numerous recent observations that various immune effectors can directly or indirectly inhibit growth of tumors has led to renewed interest in this approach to cancer therapy, e.g. Jager, et al., Oncology 2001;60(1):1-7; Renner, et al., Ann Hematol December 2000;79(12):651-9.

[11178] Four-basic cell types whose function has been associated with antitumor cell immunity and the elimination of tumor cells from the body are: i) B-lymphocytes which secrete immunoglobulins into the blood plasma for identifying and labeling the nonself invader cells; ii) monocytes which secrete the complement proteins that are responsible for lysing and processing the immunoglobulin-coated target invader cells; iii) natural killer lymphocytes having two mechanisms for the destruction of tumor cells, antibody-dependent cellular cytotoxicity and natural killing; and iv) T-lymphocytes possessing antigen-specific receptors and having the capacity to recognize a tumor cell carrying complementary marker molecules (Schreiber, H., 1989, in Fundamental Immunology (ed). W. E. Paul, pp. 923-955).

[11179] Cancer immunotherapy generally focuses on inducing humoral immune responses, cellular immune responses, or both. Moreover, it is well established that induction of CD4⁺ T helper cells is necessary in order to secondarily induce either antibodies or cytotoxic CD8⁺ T cells. Polypeptide antigens that are selective or ideally specific for cancer cells, particularly ovarian cancer cells, offer a powerful approach for inducing immune responses against ovarian cancer, and are an important aspect of the present invention.

[11180] Therefore, in further aspects of the present invention, the pharmaceutical compositions described herein may be used to stimulate an immune response against cancer, particularly for the immunotherapy of ovarian cancer. Within such methods, the pharmaceutical compositions described herein are administered to a patient, typically a warm-blooded animal, preferably a human. A patient may or may not be afflicted with cancer. Pharmaceutical compositions and vaccines may be administered either prior to or following surgical removal of primary tumors and/or treatment such as administration of radiotherapy or conventional chemotherapeutic drugs. As discussed above, administration of the pharmaceutical compositions may be by any suitable method, including administration by intravenous, intraperitoneal, intramuscular, subcutaneous, intranasal, intradermal, anal, vaginal, topical and oral routes.

[11181] Within certain embodiments, immunotherapy may be active immunotherapy, in which treatment relies on the in vivo stimulation of the endogenous host immune system to react against tumors with the administration of immune response-modifying agents (such as polypeptides and polynucleotides as provided herein).

[11182] Within other embodiments, immunotherapy may be passive immunotherapy, in which treatment involves the delivery of agents with established tumor-immune reactivity (such as effector cells or antibodies) that can directly or indirectly mediate antitumor effects and does not necessarily depend on an intact host immune system. Examples of effector cells include T cells as discussed above, T lymphocytes (such as CD8⁺ cytotoxic T lymphocytes and CD4⁺ T-helper tumor-infiltrating lymphocytes), killer cells (such as Natural Killer cells and lymphokine-activated killer cells), B cells and antigen-presenting cells (such as dendritic cells and macrophages) expressing a polypeptide provided herein. T cell receptors and antibody receptors specific for the polypeptides recited herein may be cloned, expressed and transferred into other vectors or effector cells for adoptive immunotherapy. The polypeptides provided herein may also be used to generate antibodies or anti-idiotypic antibodies (as described above and in U.S. Pat. No. 4,918,164) for passive immunotherapy.

[11183] Monoclonal antibodies may be labeled with any of a variety of labels for desired selective usages in detection, diagnostic assays or therapeutic applications (as described in U.S. Pat. Nos. 6,090,365; 6,015,542; 5,843,398; 5,595,721; and 4,708,930, hereby incorporated by reference in their entirety as if each was incorporated individually). In each case, the binding of the labelled monoclonal antibody to the determinant site of the antigen will signal detection or delivery of a particular therapeutic agent to the antigenic determinant on the non-normal cell. A further object of this invention is to provide the specific monoclonal antibody suitably labelled for achieving such desired selective usages thereof.

[11184] Effector cells may generally be obtained in sufficient quantities for adoptive immunotherapy by growth in vitro, as described herein. Culture conditions for expanding single antigen-specific effector cells to several billion in number with retention of antigen recognition in vivo are well known in the art. Such in vitro culture conditions typically use intermittent stimulation with antigen, often in the presence of cytokines (such as IL-2) and non-dividing feeder cells. As noted above, immunoreactive polypeptides as provided herein may be used to rapidly expand antigen-specific T cell cultures in order to generate a sufficient number of cells for immunotherapy. In particular, antigen-presenting cells, such as dendritic, macrophage, monocyte, fibroblast and/or B cells, may be pulsed with immunoreactive polypeptides or transfected with one or more polynucleotides using standard techniques well known in the art. For example, antigen-presenting cells can be transfected with a polynucleotide having a promoter appropriate for increasing expression in a recombinant virus or other expression system. Cultured effector cells for use in therapy must be able to grow and distribute widely, and to survive long term in vivo. Studies have shown that cultured effector cells can be induced to grow in vivo and to survive long term in substantial numbers by repeated stimulation with antigen supplemented with IL-2 (see, for example, Cheever et al., Immunological Reviews 157:177, 1997).

[11185] Alternatively, a vector expressing a polypeptide recited herein may be introduced into antigen presenting cells taken from a patient and clonally propagated ex vivo for transplant back into the same patient. Transfected cells may be reintroduced into the patient using any means known in the art, preferably in sterile form by intravenous, intracavitary, intraperitoneal or intratumor administration.

[11186] Routes and frequency of administration of the therapeutic compositions described herein, as well as dosage, will vary from individual to individual, and may be readily established using standard techniques. In general, the pharmaceutical compositions and vaccines may be administered by injection (e.g., intracutaneous, intramuscular, intravenous or subcutaneous), intranasally (e.g., by aspiration) or orally. Preferably, between 1 and 10 doses may be administered over a 52 week period. Preferably, 6 doses are administered, at intervals of 1 month, and booster vaccinations may be given periodically thereafter. Alternate protocols may be appropriate for individual patients. A suitable dose is an amount of a compound that, when administered as described above, is capable of promoting an anti-tumor immune response, and is at least 10-50% above the basal (i.e., untreated) level. Such response can be monitored by measuring the anti-tumor antibodies in a patient or by vaccine-dependent generation of cytolytic effector cells capable of killing the patient's tumor cells in vitro. Such vaccines should also be capable of causing an immune response that leads to an improved clinical outcome (e.g., more frequent remissions, complete or partial or longer disease-free survival) in vaccinated patients as compared to non-vaccinated patients. In general, for pharmaceutical compositions and vaccines comprising one or more polypeptides, the amount of each polypeptide present in a dose ranges from about 25 μg to 5 mg per kg of host. Suitable dose sizes will vary with the size of the patient, but will typically range from about 0.1 mL to about 5 mL.

[11187] In general, an appropriate dosage and treatment regimen provides the active compound(s) in an amount sufficient to provide therapeutic and/or prophylactic benefit. Such a response can be monitored by establishing an improved clinical outcome (e.g., more frequent remissions, complete or partial, or longer disease-free survival) in treated patients as compared to non-treated patients. Increases in preexisting immune responses to a tumor protein generally correlate with an improved clinical outcome. Such immune responses may generally be evaluated using standard proliferation, cytotoxicity or cytokine assays, which may be performed using samples obtained from a patient before and after treatment.

[11188] Cancer Detection and Diagnostic Compositions, Methods and Kits

[11189] In general, a cancer may be detected in a patient based on the presence of one or more ovarian tumor proteins and/or polynucleotides encoding such proteins in a biological sample (for example, blood, sera, sputum urine and/or tumor biopsies) obtained from the patient. In other words, such proteins may be used as markers to indicate the presence or absence of a cancer such as ovarian cancer. In addition, such proteins may be useful for the detection of other cancers. The binding agents provided herein generally permit detection of the level of antigen that binds to the agent in the biological sample.

[11190] Polynucleotide primers and probes may be used to detect the level of mRNA encoding a tumor protein, which is also indicative of the presence or absence of a cancer. In general, a tumor sequence should be present at a level that is at least two-fold, preferably three-fold, and more preferably five-fold or higher in tumor tissue than in normal tissue of the same type from which the tumor arose. Expression levels of a particular tumor sequence in tissue types different from that in which the tumor arose are irrelevant in certain diagnostic embodiments since the presence of tumor cells can be confirmed by observation of predetermined differential expression levels, e.g., 2-fold, 5-fold, etc, in tumor tissue to expression levels in normal tissue of the same type.

[11191] Other differential expression patterns can be utilized advantageously for diagnostic purposes. For example, in one aspect of the invention, overexpression of a tumor sequence in tumor tissue and normal tissue of the same type, but not in other normal tissue types, e.g. PBMCs, can be exploited diagnostically. In this case, the presence of metastatic tumor cells, for example in a sample taken from the circulation or some other tissue site different from that in which the tumor arose, can be identified and/or confirmed by detecting expression of the tumor sequence in the sample, for example using RT-PCR analysis. In many instances, it will be desired to enrich for tumor cells in the sample of interest, e.g., PBMCs, using cell capture or other like techniques.

[11192] There are a variety of assay formats known to those of ordinary skill in the art for using a binding agent to detect polypeptide markers in a sample. See, e.g., Harlow and Lane, Antibodies: A Laboratory Manual, Cold Spring Harbor Laboratory, 1988. In general, the presence or absence of a cancer in a patient may be determined by (a) contacting a biological sample obtained from a patient with a binding agent; (b) detecting in the sample a level of polypeptide that binds to the binding agent; and (c) comparing the level of polypeptide with a predetermined cut-off value.

[11193] In a preferred embodiment, the assay involves the use of binding agent immobilized on a solid support to bind to and remove the polypeptide from the remainder of the sample. The bound polypeptide may then be detected using a detection reagent that contains a reporter group and specifically binds to the binding agent/polypeptide complex. Such detection reagents may comprise, for example, a binding agent that specifically binds to the polypeptide or an antibody or other agent that specifically binds to the binding agent, such as an anti-immunoglobulin, protein G, protein A or a lectin. Alternatively, a competitive assay may be utilized, in which a polypeptide is labeled with a reporter group and allowed to bind to the immobilized binding agent after incubation of the binding agent with the sample. The extent to which components of the sample inhibit the binding of the labeled polypeptide to the binding agent is indicative of the reactivity of the sample with the immobilized binding agent. Suitable polypeptides for use within such assays include full length ovarian tumor proteins and polypeptide portions thereof to which the binding agent binds, as described above.

[11194] The solid support may be any material known to those of ordinary skill in the art to which the tumor protein may be attached. For example, the solid support may be a test well in a microtiter plate or a nitrocellulose or other suitable membrane. Alternatively, the support may be a bead or disc, such as glass, fiberglass, latex or a plastic material such as polystyrene or polyvinylchloride. The support may also be a magnetic particle or a fiber optic sensor, such as those disclosed, for example, in U.S. Pat. No. 5,359,681. The binding agent may be immobilized on the solid support using a variety of techniques known to those of skill in the art, which are amply described in the patent and scientific literature. In the context of the present invention, the term “immobilization” refers to both noncovalent association, such as adsorption, and covalent attachment (which may be a direct linkage between the agent and functional groups on the support or may be a linkage by way of a cross-linking agent). Immobilization by adsorption to a well in a microtiter plate or to a membrane is preferred. In such cases, adsorption may be achieved by contacting the binding agent, in a suitable buffer, with the solid support for a suitable amount of time. The contact time varies with temperature, but is typically between about 1 hour and about 1 day. In general, contacting a well of a plastic microtiter plate (such as polystyrene or polyvinylchloride) with an amount of binding agent ranging from about 10 ng to about 10 μg, and preferably about 100 ng to about 1 μg, is sufficient to immobilize an adequate amount of binding agent.

[11195] Covalent attachment of binding agent to a solid support may generally be achieved by first reacting the support with a bifunctional reagent that will react with both the support and a functional group, such as a hydroxyl or amino group, on the binding agent. For example, the binding agent may be covalently attached to supports having an appropriate polymer coating using benzoquinone or by condensation of an aldehyde group on the support with an amine and an active hydrogen on the binding partner (see, e.g., Pierce Immunotechnology Catalog and Handbook, 1991, at A12-A13).

[11196] In certain embodiments, the assay is a two-antibody sandwich assay. This assay may be performed by first contacting an antibody that has been immobilized on a solid support, commonly the well of a microtiter plate, with the sample, such that polypeptides within the sample are allowed to bind to the immobilized antibody. Unbound sample is then removed from the immobilized polypeptide-antibody complexes and a detection reagent (preferably a second antibody capable of binding to a different site on the polypeptide) containing a reporter group is added. The amount of detection reagent that remains bound to the solid support is then determined using a method appropriate for the specific reporter group.

[11197] More specifically, once the antibody is immobilized on the support as described above, the remaining protein binding sites on the support are typically blocked. Any suitable blocking agent known to those of ordinary skill in the art, such as bovine serum albumin or Tween 20™ (Sigma Chemical Co., St. Louis, Mo.). The immobilized antibody is then incubated with the sample, and polypeptide is allowed to bind to the antibody. The sample may be diluted with a suitable diluent, such as phosphate-buffered saline (PBS) prior to incubation. In general, an appropriate contact time (i.e., incubation time) is a period of time that is sufficient to detect the presence of polypeptide within a sample obtained from an individual with ovarian least about 95% of that achieved at equilibrium between bound and unbound polypeptide. Those of ordinary skill in the art will recognize that the time necessary to achieve equilibrium may be readily determined by assaying the level of binding that occurs over a period of time. At room temperature, an incubation time of about 30 minutes is generally sufficient.

[11198] Unbound sample may then be removed by washing the solid support with an appropriate buffer, such as PBS containing 0.1% Tween 20™. The second antibody, which contains a reporter group, may then be added to the solid support. Preferred reporter groups include those groups recited above.

[11199] The detection reagent is then incubated with the immobilized antibody-polypeptide complex for an amount of time sufficient to detect the bound polypeptide. An appropriate amount of time may generally be determined by assaying the level of binding that occurs over a period of time. Unbound detection reagent is then removed and bound detection reagent is detected using the reporter group. The method employed for detecting the reporter group depends upon the nature of the reporter group. For radioactive groups, scintillation counting or autoradiographic methods are generally appropriate. Spectroscopic methods may be used to detect dyes, luminescent groups and fluorescent groups. Biotin may be detected using avidin, coupled to a different reporter group (commonly a radioactive or fluorescent group or an enzyme). Enzyme reporter groups may generally be detected by the addition of substrate (generally for a specific period of time), followed by spectroscopic or other analysis of the reaction products.

[11200] To determine the presence or absence of a cancer, such as ovarian cancer, the signal detected from the reporter group that remains bound to the solid support is generally compared to a signal that corresponds to a predetermined cut-off value. In one preferred embodiment, the cut-off value for the detection of a cancer is the average mean signal obtained when the immobilized antibody is incubated with samples from patients without the cancer. In general, a sample generating a signal that is three standard deviations above the predetermined cut-off value is considered positive for the cancer. In an alternate preferred embodiment, the cut-off value is determined using a Receiver Operator Curve, according to the method of Sackett et al., Clinical Epidemiology: A Basic Science for Clinical Medicine, Little Brown and Co., 1985, p. 106-7. Briefly, in this embodiment, the cut-off value may be determined from a plot of pairs of true positive rates (i.e., sensitivity) and false positive rates (100% -specificity) that correspond to each possible cut-off value for the diagnostic test result. The cut-off value on the plot that is the closest to the upper left-hand corner (i.e., the value that encloses the largest area) is the most accurate cut-off value, and a sample generating a signal that is higher than the cut-off value determined by this method may be considered positive. Alternatively, the cut-off value may be shifted to the left along the plot, to minimize the false positive rate, or to the right, to minimize the false negative rate. In general, a sample generating a signal that is higher than the cut-off value determined by this method is considered positive for a cancer.

[11201] In a related embodiment, the assay is performed in a flow-through or strip test format, wherein the binding agent is immobilized on a membrane, such as nitrocellulose. In the flow-through test, polypeptides within the sample bind to the immobilized binding agent as the sample passes through the membrane. A second, labeled binding agent then binds to the binding agent-polypeptide complex as a solution containing the second binding agent flows through the membrane. The detection of bound second binding agent may then be performed as described above. In the strip test format, one end of the membrane to which binding agent is bound is immersed in a solution containing the sample. The sample migrates along the membrane through a region containing second binding agent and to the area of immobilized binding agent. Concentration of second binding agent at the area of immobilized antibody indicates the presence of a cancer. Typically, the concentration of second binding agent at that site generates a pattern, such as a line, that can be read visually. The absence of such a pattern indicates a negative result. In general, the amount of binding agent immobilized on the membrane is selected to generate a visually discernible pattern when the biological sample contains a level of polypeptide that would be sufficient to generate a positive signal in the two-antibody sandwich assay, in the format discussed above. Preferred binding agents for use in such assays are antibodies and antigen-binding fragments thereof. Preferably, the amount of antibody immobilized on the membrane ranges from about 25 ng to about 1 μg, and more preferably from about 50 ng to about 500 ng. Such tests can typically be performed with a very small amount of biological sample.

[11202] Of course, numerous other assay protocols exist that are suitable for use with the tumor proteins or binding agents of the present invention. The above descriptions are intended to be exemplary only. For example, it will be apparent to those of ordinary skill in the art that the above protocols may be readily modified to use tumor polypeptides to detect antibodies that bind to such polypeptides in a biological sample. The detection of such tumor protein specific antibodies may correlate with the presence of a cancer.

[11203] A cancer may also, or alternatively, be detected based on the presence of T cells that specifically react with a tumor protein in a biological sample. Within certain methods, a biological sample comprising CD4⁺ and/or CD8⁺ T cells isolated from a patient is incubated with a tumor polypeptide, a polynucleotide encoding such a polypeptide and/or an APC that expresses at least an immunogenic portion of such a polypeptide, and the presence or absence of specific activation of the T cells is detected. Suitable biological samples include, but are not limited to, isolated T cells. For example, T cells may be isolated from a patient by routine techniques (such as by Ficoll/Hypaque density gradient centrifugation of peripheral blood lymphocytes). T cells may be incubated in vitro for 2-9 days (typically 4 days) at 37° C. with polypeptide (e.g., 5-25 μg/ml). It may be desirable to incubate another aliquot of a T cell sample in the absence of tumor polypeptide to serve as a control. For CD4⁺T cells, activation is preferably detected by evaluating proliferation of the T cells. For CD8⁺T cells, activation is preferably detected by evaluating cytolytic activity. A level of proliferation that is at least two fold greater and/or a level of cytolytic activity that is at least 20% greater than in disease-free patients indicates the presence of a cancer in the patient.

[11204] As noted above, a cancer may also, or alternatively, be detected based on the level of mRNA encoding a tumor protein in a biological sample. For example, at least two oligonucleotide primers may be employed in a polymerase chain reaction (PCR) based assay to amplify a portion of a tumor cDNA derived from a biological sample, wherein at least one of the oligonucleotide primers is specific for (i.e., hybridizes to) a polynucleotide encoding the tumor protein. The amplified cDNA is then separated and detected using techniques well known in the art, such as gel electrophoresis.

[11205] Similarly, oligonucleotide probes that specifically hybridize to a polynucleotide encoding a tumor protein may be used in a hybridization assay to detect the presence of polynucleotide encoding the tumor protein in a biological sample.

[11206] To permit hybridization under assay conditions, oligonucleotide primers and probes should comprise an oligonucleotide sequence that has at least about 60%, preferably at least about 75% and more preferably at least about 90%, identity to a portion of a polynucleotide encoding a tumor protein of the invention that is at least 10 nucleotides, and preferably at least 20 nucleotides, in length. Preferably, oligonucleotide primers and/or probes hybridize to a polynucleotide encoding a polypeptide described herein under moderately stringent conditions, as defined above. Oligonucleotide primers and/or probes which may be usefully employed in the diagnostic methods described herein preferably are at least 10-40 nucleotides in length. In a preferred embodiment, the oligonucleotide primers comprise at least 10 contiguous nucleotides, more preferably at least 15 contiguous nucleotides, of a DNA molecule having a sequence as disclosed herein. Techniques for both PCR based assays and hybridization assays are well known in the art (see, for example, Mullis et al., Cold Spring Harbor Symp. Quant. Biol., 51:263, 1987; Erlich ed., PCR Technology, Stockton Press, NY, 1989).

[11207] One preferred assay employs RT-PCR, in which PCR is applied in conjunction with reverse transcription. Typically, RNA is extracted from a biological sample, such as biopsy tissue, and is reverse transcribed to produce cDNA molecules. PCR amplification using at least one specific primer generates a cDNA molecule, which may be separated and visualized using, for example, gel electrophoresis. Amplification may be performed on biological samples taken from a test patient and from an individual who is not afflicted with a cancer. The amplification reaction may be performed on several dilutions of cDNA spanning two orders of magnitude. A two-fold or greater increase in expression in several dilutions of the test patient sample as compared to the same dilutions of the non-cancerous sample is typically considered positive.

[11208] In another aspect of the present invention, cell capture technologies may be used in conjunction, with, for example, real-time PCR to provide a more sensitive tool for detection of metastatic cells expressing ovarian tumor antigens. Detection of ovarian cancer cells in biological samples, e.g., bone marrow samples, peripheral blood, and small needle aspiration samples is desirable for diagnosis and prognosis in ovarian cancer patients.

[11209] Immunomagnetic beads coated with specific monoclonal antibodies to surface cell markers, or tetrameric antibody complexes, may be used to first enrich or positively select cancer cells in a sample. Various commercially available kits may be used, including Dynabeads® Epithelial Enrich (Dynal Biotech, Oslo, Norway), StemSep™ (StemCell Technologies, Inc., Vancouver, BC), and RosetteSep (StemCell Technologies). A skilled artisan will recognize that other methodologies and kits may also be used to enrich or positively select desired cell populations. Dynabeads® Epithelial Enrich contains magnetic beads coated with mAbs specific for two glycoprotein membrane antigens expressed on normal and neoplastic epithelial tissues. The coated beads may be added to a sample and the sample then applied to a magnet, thereby capturing the cells bound to the beads. The unwanted cells are washed away and the magnetically isolated cells eluted from the beads and used in further analyses.

[11210] RosetteSep can be used to enrich cells directly from a blood sample and consists of a cocktail of tetrameric antibodies that targets a variety of unwanted cells and crosslinks them to glycophorin A on red blood cells (RBC) present in the sample, forming rosettes. When centrifuged over Ficoll, targeted cells pellet along with the free RBC. The combination of antibodies in the depletion cocktail determines which cells will be removed and consequently which cells will be recovered. Antibodies that are available include, but are not limited to: CD2, CD3, CD4, CD5, CD8, CD10, CD11b, CD14, CD15, CD16, CD19, CD20, CD24, CD25, CD29, CD33, CD34, CD36, CD38, CD41, CD45, CD45RA, CD45RO, CD56, CD66B, CD66e, HLA-DR, IgE, and TCRαβ.

[11211] Additionally, it is contemplated in the present invention that mAbs specific for ovarian tumor antigens can be generated and used in a similar manner. For example, mAbs that bind to tumor-specific cell surface antigens may be conjugated to magnetic beads, or formulated in a tetrameric antibody complex, and used to enrich or positively select metastatic ovarian tumor cells from a sample. Once a sample is enriched or positively selected, cells may be lysed and RNA isolated. RNA may then be subjected to RT-PCR analysis using ovarian tumor-specific primers in a real-time PCR assay as described herein. One skilled in the art will recognize that enriched or selected populations of cells may be analyzed by other methods (e.g. in situ hybridization or flow cytometry).

[11212] In another embodiment, the compositions described herein may be used as markers for the progression of cancer. In this embodiment, assays as described above for the diagnosis of a cancer may be performed over time, and the change in the level of reactive polypeptide(s) or polynucleotide(s) evaluated. For example, the assays may be performed every 24-72 hours for a period of 6 months to 1 year, and thereafter performed as needed. In general, a cancer is progressing in those patients in whom the level of polypeptide or polynucleotide detected increases over time. In contrast, the cancer is not progressing when the level of reactive polypeptide or polynucleotide either remains constant or decreases with time.

[11213] Certain in vivo diagnostic assays may be performed directly on a tumor. One such assay involves contacting tumor cells with a binding agent. The bound binding agent may then be detected directly or indirectly via a reporter group. Such binding agents may also be used in histological applications. Alternatively, polynucleotide probes may be used within such applications.

[11214] As noted above, to improve sensitivity, multiple tumor protein markers may be assayed within a given sample. It will be apparent that binding agents specific for different proteins provided herein may be combined within a single assay. Further, multiple primers or probes may be used concurrently. The selection of tumor protein markers may be based on routine experiments to determine combinations that results in optimal sensitivity. In addition, or alternatively, assays for tumor proteins provided herein may be combined with assays for other known tumor antigens.

[11215] The present invention further provides kits for use within any of the above diagnostic methods. Such kits typically comprise two or more components necessary for performing a diagnostic assay. Components may be compounds, reagents, containers and/or equipment. For example, one container within a kit may contain a monoclonal antibody or fragment thereof that specifically binds to a tumor protein. Such antibodies or fragments may be provided attached to a support material, as described above. One or more additional containers may enclose elements, such as reagents or buffers, to be used in the assay. Such kits may also, or alternatively, contain a detection reagent as described above that contains a reporter group suitable for direct or indirect detection of antibody binding.

[11216] Alternatively, a kit may be designed to detect the level of mRNA encoding a tumor protein in a biological sample. Such kits generally comprise at least one oligonucleotide probe or primer, as described above, that hybridizes to a polynucleotide encoding a tumor protein. Such an oligonucleotide may be used, for example, within a PCR or hybridization assay. Additional components that may be present within such kits include a second oligonucleotide and/or a diagnostic reagent or container to facilitate the detection of a polynucleotide encoding a tumor protein.

[11217] The following Examples are offered by way of illustration and not by way of limitation.

### EXAMPLES

### Example 1

### Identification of Ovarian Tumor Protein cDNAS

[11218] This Example illustrates the identification of cDNA molecules encoding ovarian tumor proteins.

[11219] Ovarian-specific genes were identified by electronic subtraction. The method used was similar to that described by Vasmatizis et al., Proc. Natl. Acad. Sci. USA 95:300-304, 1998, but there were several key differences. The sequences of EST clones (1,453,679) were downloaded from the GenBank public human EST database. Human cDNA libraries were downloaded to create a database of these cDNA libraries and the EST sequences derived from them. The cDNA libraries were grouped into three groups: Plus, Minus and Other/Neutral. The Plus group included 26 libraries constructed from ovary normal and tumor tissues (and therefore including those containing ovary-specific ESTs); the Minus group consisted of 184 libraries derived from all adult normal tissues except for breast, uterus and male-specific tissues, such as prostate; the Other/Neutral group contained libraries from tissues where expression is considered irrelevant (e.g., fetal tissue, tumors, cell lines other than ovary cell lines, non-relevant tissues. A total of 43,581 ESTs were derived from the 26 available ovary libraries (this subset represents 3% of the total 1,453,679 ESTs in the database). These ESTs were preprocessed to remove common sequence repeats and cloning adapters, resulting in a final Plus group of 39,019 (a decrease of 10%).

[11220] Each Plus group (ovary) EST sequence was used as a query “seed” sequence in a BLASTN (version 2.0.9; May 7, 1999) search against the total human EST database. Standard measures of similarity are insufficient in this sort of analysis, as EST relationships often include short stretches and poor sequence data. Criteria employed in this study required a matching segment to be at least 75 nucleotides in length, and the density of exact matches within this segment to be at least 80%. This was considered conservative criteria designed to avoid short spurious matches while allowing for polymorphisms and errors in sequencing. Each BLAST search generated a cluster of related sequences based on direct overlap with the query “seed” sequence. A second level of clustering was performed to merge closely related clusters and to eliminate redundancy resulting from the fact that similar clusters are generated if the clusters contain more than one seed (i.e., sequences from the Plus EST group). The resulting “super clusters” were discarded if they grew in size to 200 or more ESTs, since these probably represented repetitive elements that were not removed by the initial preprocessing of the seeds, or highly expressed genes such as those for ribosomal proteins. Superclusters were merged if they shared at least one third of their sequences.

[11221] The BLAST searches gave rise to a total of 38,979 clusters. In the first super clustering stage, 10,307 clusters grew beyond the limit of 200 clones. Following this step and the elimination of duplicates, there were 15,758 super clusters remaining. This number was reduced to 15,244 after adjacent clusters were merged. Resulting super clusters were analyzed to determine the tissue source of each EST clone contained within it and this expression profile was used to classify the superclusters into four groups: Type 1—this supercluster contains EST clones found in the Plus group only, with no expression in the Minus or Other/Neutral group libraries; Type 2—EST clones in the supercluster are found in the Plus and Other/Neutral group libraries, with no expression in the Minus group; Type 3—super cluster EST clones found in all groups, but the number of ESTs in the Plus group is higher than in either of the Minus or Other/Neutral groups; Type 4—super cluster EST clones found in all groups, but the number in the Plus group is higher than in the Minus group with expression in the Other/Neutral group non relevant. Sequences derived from the Plus library group that were placed in Types 1, 2 and 3 superclusters are provided herein as SEQ ID NO:1-10,862. The electronic subtraction procedures identified these sequences as having significant differential expression in ovary tissue.

[11222] Sequences which showed good electronic subtraction profiles are described in more detail in Table 2.

TABLE 2
Electronic Subtraction Analysis

| Clone ID | | | | | | |
|---|---|---|---|---|---|---|
| IMAGE # | Accession # | SuperClstr | Plus | Minus | Neutral | EST/GenBank Annotation |
| 595243 | AA164216/ | AA164216 | 1 | 0 | 8 | Novel |
| | AA164215 | | | | | |
| 594484 | AA180009/ | AA164850 | 2 | 0 | 27 | Reverse transcriptase/human |
| | AA164745 | | | | | endogenous retrovirus |
| 843028 | AA488541/ | AI567987 | 15 | 0 | 22 | Megakaryocyte potentiating |
| | AA488406 | | | | | factor; mesothelin or CAK1 |
| 76058 | T59567/ | T59567 | 1 | 0 | 12 | ALEX3, armadillo repeat |
| | T59521 | | | | | containing protein |
| 544863 | AA075131/ | AA075131 | 1 | 0 | 0 | Cathepsin L, cysteine protease |
| | AA075149 | | | | | (major excreted protein, MEP) |
| 741139 | AA402754/ | AA402207 | 1 | 0 | 3 | Developmental protein eyes |
| | AA402207 | | | | | absent (Eab1) |
| 545242 | AA076182/ | AA180012 | 4 | 0 | 16 | STAT1, signal transducer/ |
| | AA076085 | | | | | activator of transcription 1 |
| 75673 | T58484 | T58484 | 1 | 0 | 0 | Genomic clone, chromosome 21 |
| 811600 | AA458533/ | AA454609 | 1 | 0 | 13 | Forkhead transcription factor |
| | AA454609 | | | | | HFH-4 |
| 739457 | AA477250/ | AA402253 | 2 | 0 | 3 | Novel |
| | AA477249 | | | | | |
| 77262 | T50256/ | T50256 | 1 | 0 | 0 | Vector, bacteriophage lambda |
| | T50206 | | | | | lacZ |
| 77257 | T50212 | T50212 | 1 | 0 | 0 | Aspartate aminotransferase; |
| | | | | | | genomic E. coli clones U/K |
| | | | | | | protein |
| 74768 | T47079 | T47079 | 1 | 0 | 0 | Genomic clone, chromosome |
| | | | | | | 13q12.11-12.3 |
| 593444 | AI733904/ | AA160258 | 1 | 0 | 0 | Novel |
| | AI732611/ | | | | | |
| | AA160259/ | | | | | |
| | AA160258 | | | | | |
| 811063 | AI734202/ | AA485451 | 1 | 0 | 1 | DNA-binding protein A |
| | AI732823/ | | | | | (HUMBPA) |
| | AA485619/ | | | | | |
| | AA485451 | | | | | |
| 593218 | AI733902/ | AA159743 | 1 | 0 | 1 | Novel |
| | AI732609/ | | | | | |
| | AA159613/ | | | | | |
| | AA159743 | | | | | |
| 595232 | AI732624/ | AA173518 | 1 | 0 | 0 | Genomic clone, chromosome |
| | AA173518 | | | | | 12p11-37.2-54.4 |
| 75759 | T58522 | T58522 | 2 | 0 | 16 | cDNA clone FLJ10748, weakly |
| | | | | | | similar to ringcanal protein |
| 714232 | AA293601 | AA293601 | 1 | 0 | 2 | Novel |
| 809858 | AA464305/ | AI567829 | 2 | 0 | 17 | COP9 complex subunit 7a |
| | AA455119 | | | | | |
| 489076 | AA057195/ | AA423796 | 1 | 0 | 5 | Elastin microfibril interfase |
| | AA057129 | | | | | located protein (EMI); |
| | | | | | | ketohexokinase |
| 771328 | AA476222/ | AA476222 | 2 | 0 | 6 | MG81 |
| | AA476223 | | | | | |
| 755093 | AI821682/ | AA482508 | 1 | 0 | 0 | Neuronal apoptosis inhibitory |
| | AI820932/ | | | | | protein; basic transn factor 2 p44 |
| | AA482660/ | | | | | |
| | AA482508 | | | | | |
| 771053 | AA430718/ | AA430718 | 1 | 0 | 2 | Zinc Finger Protein 26; contains |
| | AA427528 | | | | | element THR, repetitive element |
| 77250 | T50141 | T50141 | 7 | 2 | 1 | Excisionase (xis) and integrase |
| | | | | | | (int) bacteriophage genes |
| 810109 | AA465048/ | AA292245 | 2 | 0 | 9 | cDNA clone DKFZp434K022 |
| | AA464979 | | | | | |
| 136984 | AF074992/ | AA401975 | 3 | 0 | 2 | cDNA YH90A09 |
| | R35849 | | | | | |
| 809776 | AA454784/ | AA454732 | 3 | 0 | 19 | IL-16, lymphocyte |
| | AA454732 | | | | | chemoattractant factor |
| 593439 | AA165668/ | AA165632 | 3 | 2 | 31 | GAG polyprotein/endogenous |
| | AA165632 | | | | | retrovirus sequences |
| 76081 | T59590 | T59590 | 1 | 0 | 0 | Novel |
| 724886 | AA404613/ | AA464208 | 5 | 0 | 6 | contains PTR7 repetitive |
| | AA291468 | | | | | element; T cell receptor gamma |
| | | | | | | V1? |
| 724962 | AA404631/ | AA402723 | 15 | 0 | 38 | Pregnancy-Associated |
| | AA291495 | | | | | endometrial alpha2 globulin; = |
| | | | | | | HPP14 |
| 283151 | N45230 | AA284811 | 2 | 0 | 6 | Genomic clones, alpha albumin |
| | | | | | | and MER27 repetitive element |
| 595363 | AA164920/ | AA402031 | 3 | 1 | 30 | Interferon-gamma induced small |
| | AA164919 | | | | | cytokine subfamily B #10 |
| 544548 | AA075105/ | AI567987 | 15 | 0 | 22 | Megakaryocyte potentiating |
| | AA074952 | | | | | factor; mesothelin or CAK1 |
| 595220 | AA164851/ | AA164850 | 2 | 0 | 27 | Genomic clones |
| | AA164850 | | | | | |
| 545443 | AA079191/ | AA167449 | 5 | 1 | 55 | Genomic clone containing X |
| | AA079190 | | | | | (inactive)-specific transcript |
| | | | | | | (XIST) |
| 545185 | AA076101 | AA076101 | 1 | 0 | 0 | Acidic ribosomal phosphoprotein |
| | | | | | | P0 |
| 714080 | AA284545/ | AA284815 | 1 | 0 | 0 | Megakaryocyte potentiating |
| | AA284815 | | | | | factor; mesothelin or CAK1 |
| 595449 | AA173739/ | AA173383 | 5 | 0 | 33 | Neurotensin receptor; C protein- |
| | AA173383 | | | | | coupled receptor (GPR39) |
| | AA176693/ | AA173996 | 2 | 1 | 3 | Pak1, p21-activated serine/ |
| | AA173996 | | | | | threonine-protein kinase (JNK |
| | | | | | | path) |
| | AI821564/ | AA284658 | 1 | 0 | 1 | Novel |
| | AA284659/ | | | | | |
| | AA284658 | | | | | |
| | AA075034/ | AA169452 | 2 | 1 | 27 | C. elegans homolog, CGI-19 |
| | AA075033 | | | | | |
| | AA394090/ | AA293773 | 1 | 0 | 6 | cDNA clone 23870 |
| | AA293773 | | | | | |
| | T57605 | T57605 | 1 | 0 | 0 | Novel |
| | AA456327/ | AA480796 | 2 | 1 | 18 | Genomic clone, chromosome 22 |
| | AA454681 | | | | | |
| | AA164782/ | AA164644 | 3 | 0 | 15 | Novel |
| | AA164781 | | | | | |
| | AA166898/ | AA166756 | 1 | 0 | 0 | Mixed genomic clones, contains |
| | AA166756 | | | | | Alu repetitive element |
| | AA075203/ | AA075202 | 1 | 0 | 1 | E. coli genomic DNA; ycbS, a |
| | AA075202 | | | | | putative outer membrane protein |
| | AA405395/ | AA402723 | 15 | 0 | 38 | Pregnancy-Associated |
| | AA402883 | | | | | endometrial alpha2 globulin; = |
| | | | | | | HPP14 |
| | AA172236/ | AA172056 | 1 | 0 | 4 | Genomic clone, chromosome 22 |
| | AA172056 | | | | | (cat eye syndrome region) |
| | T57611/ | T57557 | 1 | 0 | 0 | Novel |
| | T57557 | | | | | |
| | AA419214/ | AA173383 | 5 | 0 | 33 | Neurotensin receptor; G protein |
| | AA419229 | | | | | coupled receptor (GPR39) |
| | AA171974/ | AA171755 | 1 | 0 | 3 | Genomic clone, chromosome 14 |
| | AA171755 | | | | | |
| | AA076270/ | AA076269 | 1 | 0 | 0 | Novel |
| | AA076269 | | | | | |
| | AA464689 | AA464689 | 1 | 0 | 9 | Novel |
| | AA456446/ | AA477508 | 3 | 0 | 38 | Myo-inositol 1-phosphate |
| | AA454554 | | | | | synthase |
| | T60090 | T60090 | 1 | 0 | 0 | Genomic clone, chromosome 1 |
| | AA075211/ | AA074946 | 2 | 0 | 0 | Nucleoside diphosphate kinase |
| | AA075126 | | | | | (DR-nm23); Ndk3-like |
| | AA076228/ | AA076228 | 1 | 0 | 3 | C. elegans homolog, CGI-62 |
| | AA076227 | | | | | |
| | AA075310 | AA075310 | 1 | 0 | 9 | Sperm membrane protein; |
| | | | | | | nucleoporin; Ran-binding protein |
| | | | | | | 2 |
| | T58551/ | T58501 | 1 | 0 | 36 | Genomic clone, chromosome |
| | T58501 | | | | | 22q13.31-13.33 |
| | T59551 | T59551 | 1 | 0 | 0 | Reverse transcriptase-like protein |
| | | | | | | -rat |
| | AA464691 | AA405746 | 2 | 0 | 25 | Genomic clone, chromosome |
| | | | | | | Xp22 |
| | T52869/ | T52868 | 1 | 0 | 0 | Contains repetitive DNA |
| | T52868 | | | | | |
| | AF147380/ | T59850 | 2 | 0 | 0 | cDNA clone YB67A06, contains |
| | T59906/ | | | | | CER/MER22 repetitive element |
| | T59850 | | | | | |
| 2216507 | AI653489 | AI653489 | 1 | 0 | 1 | gDNA 12p13.3 PAC RPCI5- |
| | | | | | | 940J5 |
| 2292394 | AI648506 | AI648506 | 2 | 0 | 54 | PTK7 protein tyrosine kinase 7 |
| | | | | | | (PTK7), mRNA |
| 2216151 | AI654462 | AI654452 | 2 | 0 | 3 | |
| 981215 | AA526423 | AA526423 | 1 | 0 | 1 | |
| 1373880 | AA828788 | AA828788 | 1 | 0 | 0 | gDNA chromosome 5 clone |
| | | | | | | CTD-2318A17 |
| 1373112 | AA837621 | AA837621 | 1 | 0 | 4 | |
| 2002493 | AI224233 | AI223766 | 10 | 0 | 37 | |
| 1373281 | AA827974 | AA526119 | 2 | 0 | 0 | gDNA clone 1018D12 20q11.1- |
| | | | | | | 11.22 |
| 2216154 | AI654454 | AI567994 | 2 | 0 | 8 | VSGP/F-spondin, complete cds |
| 755378 | AA410595 | AA410247 | 3 | 0 | 1 | Inhibitor of DNA binding 4, |
| | | | | | | dom/neg HLH protein (ID4), |
| 769666 | AA428329 | AA291377 | 2 | 0 | 2 | gDNA RP11-343B21 from 2 |
| 2216636 | AI653555 | AI653555 | 1 | 0 | 1 | gDNA RP5-1185I7 from |
| | | | | | | 7q11.23-q21 |
| 1455124 | AA909822 | AA909822 | 1 | 0 | 19 | mRNA for GARS-AIRS-GART |
| 1374123 | AA828611 | AA828611 | 1 | 0 | 0 | |
| 770437 | AA427513 | AA427513 | 2 | 0 | 4 | gDNA chromosome 8 clone |
| | | | | | | RP11-4K16 |
| 739389 | AA476860 | AA856964 | 3 | 1 | 26 | TLS-associated Ser-Arg protein 1 |
| | | | | | | (TASR1), mRNA |
| 1985442 | AI254625 | AI254625 | 1 | 0 | 4 | |
| 981039 | AA526017 | AA526017 | 1 | 0 | 40 | Smad1 mRNA |
| 755111 | AA411372 | AA411372 | 1 | 0 | 15 | mRNA for KIAA0326 gene |
| 1965439 | AI356599 | AA862214 | 2 | 0 | 28 | cDNA FLJ10943 fis, clone |
| | | | | | | OVARC1001360 |
| 755436 | AA419044 | AA292435 | 3 | 0 | 23 | cDNA FLJ10023 fis, clone |
| | | | | | | HEMBA1000608 |
| 742144 | AA405975 | AA405727 | 2 | 0 | 0 | |
| 1373104 | AA837606 | AA828060 | 3 | 0 | 0 | gDNA clone B331M8 map 4q25 |
| 1373878 | AA828778 | AA828778 | 1 | 0 | 0 | CREB binding protein |
| | | | | | | (Rubinstein-Taybi |
| | | | | | | syndrome)(CREBBP |
| 1454766 | AA908470 | AA908470 | 1 | 0 | 10 | gDNA clone RP11-83M17 from |
| | | | | | | 7q31 |
| 1373719 | AA828882 | AA828882 | 2 | 0 | 0 | |
| 1374009 | AA828703 | AA828138 | 2 | 0 | 4 | hepatocellular carcinoma antigen |
| | | | | | | 519 (HCA519) |
| 1373380 | AA828138 | AA828138 | 2 | 0 | 4 | hepatocellular carcinoma antigen |
| | | | | | | 519 (HCA519) |
| 1373381 | AA828148 | AA828038 | 2 | 0 | 0 | gDNA clone RP3-525L6 on |
| | | | | | | 6p22.3- |
| 1964546 | AI284862 | AI284862 | 1 | 0 | 1 | gDNA clone RP11-215O15 on |
| | | | | | | chromosome 9 |
| 1192366 | AA650614 | AA650614 | 2 | 0 | 0 | |
| 2260607 | AI590617 | AI590617 | 1 | 0 | 5 | Staufen (Drosophila, RNA- |
| | | | | | | binding protein) (STAU) |
| 1154834 | AA642166 | AA642166 | 1 | 0 | 0 | |
| 981113 | AA526205 | AA526205 | 1 | 0 | 0 | |
| 2292558 | AI648453 | AI648453 | 1 | 0 | 0 | |
| 981376 | AA525937 | AA525937 | 1 | 0 | 0 | |
| 1374125 | AA828612 | AA828612 | 1 | 0 | 0 | |
| 1374171 | AA828647 | AA828647 | 1 | 0 | 0 | eIF3 p40 subunit gene, exon 7 |
| 1965552 | AI364864 | AI364864 | 1 | 0 | 8 | gDNA clone RP5-850O15 on |
| | | | | | | 1p32.3-34.2 |
| 981310 | AA525800 | AA525800 | 1 | 0 | 0 | |
| 1373500 | AA847986 | AA829098 | 2 | 0 | 0 | |
| 1373375 | AA828135 | AA828135 | 2 | 1 | 10 | zinc finger protein (ZFD25) |
| | | | | | | mRNA |
| 1190617 | AA650078 | AA650078 | 1 | 0 | 0 | |
| 2292555 | AI648459 | AI648459 | 1 | 0 | 9 | mitosin mRNA |
| 755357 | AA410276 | AA293518 | 2 | 0 | 4 | mRNA for KIAA1335 protein |
| 1373287 | AA827977 | AA827977 | 1 | 0 | 4 | |
| 1192390 | AA650618 | AA650614 | 2 | 0 | 0 | |
| 2260515 | AI590596 | AI590596 | 3 | 0 | 4 | gDNA chromosome 5 clone |
| | | | | | | CTD-2019M3 |
| 981372 | AA525935 | AA525935 | 2 | 1 | 3 | peroxisomal 70 kD memb |
| | | | | | | protein mRNA |
| 980932 | AA525774 | AA525774 | 1 | 0 | 0 | gDNA clone B271E1 on 4q25 |
| 1374020 | AA828698 | AA828797 | 5 | 0 | 6 | gDNA chromosome 20 clones 97 |
| | | | | | | and 127 |
| 1373311 | AA828039 | AA828039 | 1 | 0 | 3 | gDNA chromosome 21 segment |
| | | | | | | HS21C010 |
| 1047907 | AA773935 | AA362728 | 2 | 0 | 11 | cDNA: FLJ21661 fis, clone |
| | | | | | | COL08837 |
| 1154937 | AA627343 | AA627343 | 1 | 0 | 0 | |
| 1373504 | AA847988 | AA847988 | 1 | 0 | 3 | gDNA 12 BAC RP11-588G21 |
| 1963836 | AI280530 | AI280530 | 1 | 0 | 0 | |
| 981337 | AA525918 | AA525918 | 1 | 0 | 0 | gDNA chromosome 21 segment |
| | | | | | | HS21C046 |
| 1373879 | AA828787 | AA828787 | 2 | 0 | 1 | |
| 980966 | AA525874 | AA525874 | 1 | 0 | 0 | gDNA BAC clone CTB-95A14 |
| | | | | | | from 7p15-p21 |
| 2292391 | AI648510 | AI648510 | 1 | 0 | 0 | SYBL1 gene, exons 6-8 |
| 2292584 | AI648468 | AI648468 | 1 | 0 | 6 | mRNA for KIAA1442 protein, |
| | | | | | | partial cds |
| 981068 | AA526095 | AA525221 | 2 | 0 | 0 | |
| 1373285 | AA827976 | AA827976 | 2 | 0 | 2 | |
| 1373419 | AA826312 | AA826312 | 1 | 0 | 0 | |
| 1374172 | AA828640 | AA828640 | 2 | 0 | 0 | |
| 1373400 | AA826292 | AA826292 | 1 | 0 | 0 | AMP-activated protein kinase |
| | | | | | | (hAMPK) |
| 1373695 | AA828597 | AA828597 | 1 | 0 | 1 | gDNA BAC 55C20 on |
| | | | | | | chromosome 6. |
| 1373807 | AA828690 | AA828690 | 1 | 0 | 0 | |
| 1373415 | AA826310 | AA826310 | 1 | 0 | 0 | |
| 981359 | AA525929 | AA525929 | 2 | 0 | 13 | gDNA, chromosome 21q, section |
| | | | | | | 89/105 |
| 1373309 | AA828038 | AA828038 | 2 | 0 | 0 | gDNA clone RP3-525L6 on |
| | | | | | | 6p22.3- |
| 2260575 | AI591141 | AI591141 | 1 | 0 | 3 | protein Tyr phosphatase, receptor |
| | | | | | | type, M (PTPRM) |
| 755715 | AA496499 | AA496499 | 2 | 0 | 2 | platelet derived growth factor C |
| | | | | | | (PDGFC) |
| 809959 | AA454835 | AA430746 | 3 | 0 | 29 | EWS protein/E1A enhancer |
| | | | | | | binding protein |
| 1373509 | AA848000 | AA829138 | 3 | 0 | 0 | |
| 1374033 | AA829114 | AA828882 | 2 | 0 | 0 | |
| 1373080 | AA837588 | AA837588 | 1 | 0 | 4 | gDNA 3 BAC RP11-91B3 |
| 1373691 | AA828596 | AA828596 | 1 | 0 | 15 | gDNA clone 747H23 on 6q13-15 |
| 1964868 | AI355523 | AI355523 | 1 | 0 | 3 | gDNA BAC clone GS1-67A24 |
| | | | | | | from 7q21.q21.2 |
| 1190662 | AA650084 | AA650084 | 1 | 0 | 9 | phospholipase C-beta-3 (PLCB3) |
| | | | | | | gene |
| 1154908 | AA627330 | AA627330 | 1 | 0 | 0 | |
| 1985131 | AI242020 | AI242020 | 1 | 0 | 3 | Ca2+-activated potassium |
| | | | | | | channel SK3 |
| 1985090 | AI241990 | AI241990 | 7 | 0 | 1 | |
| 1985420 | AI254602 | AI252922 | 4 | 0 | 1 | |
| 1985633 | AI254657 | AI254657 | 1 | 0 | 0 | gDNA clone RP3-421H16 on |
| | | | | | | Xp11.3-21. |
| 1985494 | AI254938 | AI254938 | 2 | 0 | 1 | gDNA chromosome 14 BAC R- |
| | | | | | | 131H24 |
| 1985584 | AI251343 | AI254785 | 2 | 0 | 1 | gDNA GS1-304P7 on 1q25.1- |
| | | | | | | 31.1 |
| 1985071 | AI241981 | AI241981 | 1 | 0 | 0 | mRNA KIAA0741 gene product |
| | | | | | | (IF2) |
| 1985548 | AI251317 | AA425733 | 4 | 0 | 25 | gDNA on 7q22 |
| 1985096 | AI241992 | AI241992 | 1 | 0 | 0 | gDNA clone RP13-206I21 on |
| | | | | | | Xp11.3-21.1 |
| 1985539 | AI251255 | AI251255 | 1 | 0 | 0 | |
| 1985503 | AI254963 | AI254963 | 1 | 0 | 0 | |
| 1985111 | AI242006 | AI242006 | 2 | 0 | 2 | CLNS1A gene, intron 1 |
| 1985085 | AI241987 | AI241987 | 1 | 0 | 0 | mRNAKIAA0741 gene product |
| | | | | | | (IF2) |
| 810330 | AA464144 | AA428222 | 2 | 0 | 3 | cytochrome B561, HCYTO |
| | | | | | | B561 |
| 980920 | AA525758 | AA525758 | 1 | 0 | 0 | cDNA FLJ10145 fis, clone |
| | | | | | | HEMBA1003322 |
| 1985162 | AI254100 | AI254100 | 2 | 0 | 4 | Lens epithelium-derived growth |
| | | | | | | factor |
| 930200 | AA502530 | AA502530 | 1 | 0 | 0 | |
| 1985535 | AI251253 | AI251253 | 1 | 0 | 2 | cDNA DKFZp586B0319 |
| 1985593 | AI251369 | AI251369 | 1 | 0 | 0 | |
| 2003171 | AI250559 | AI250559 | 1 | 0 | 6 | NY-REN-41 antigen mRNA |
| 810462 | AA457130 | AA457130 | 3 | 0 | 0 | gDNA 8q21.3:RICK gene |
| 1985079 | AI241985 | AI241985 | 1 | 0 | 0 | mRNA KIAA0741 gene product |
| | | | | | | (IF2) |
| 769684 | AA428757 | AA425850 | 4 | 1 | 17 | |
| 1985127 | AI242019 | AI144024 | 7 | 0 | 3 | |
| 1985630 | AI254644 | AI254644 | 1 | 0 | 0 | gDNA, chromosome 21q, section |
| | | | | | | 69/105 |
| 1985576 | AI251339 | AI251339 | 1 | 0 | 1 | |
| 1985558 | AI251322 | AI251322 | 1 | 0 | 0 | AF-4 gene, exons 2 to 7 and Alu |
| | | | | | | repeats |
| 1984612 | AI255127 | AI254106 | 2 | 0 | 2 | |
| 1373305 | AA828036 | AA828036 | 1 | 0 | 0 | |
| 2002838 | AI224248 | AI054405 | 4 | 0 | 14 | |
| 1984571 | AI251722 | AI251722 | 1 | 0 | 0 | |
| 1985520 | AI251235 | AI251235 | 2 | 0 | 3 | GAC-1 (GAC-1) mRNA |
| 1985272 | AI254763 | AI254763 | 1 | 0 | 0 | |
| 2002656 | AI223675 | AI252423 | 4 | 2 | 32 | gDNA chromosome X region |
| 1985594 | AI251359 | AI054387 | 8 | 0 | 4 | |
| 1985474 | AI254929 | AI254929 | 1 | 0 | 0 | mRNA KIAA0741 gene product |
| | | | | | | (IF2) |
| 2119169 | AI401777 | AA363377 | 1 | 0 | 1 | |
| 755480A | A410639 | AA410639 | 1 | 0 | 2 | |
| 1985049 | AI251638 | AI251638 | 1 | 0 | 0 | |
| 2006525 | AI265778 | AI265778 | 1 | 0 | 35 | cDNA FLJ11653 fis, clone |
| | | | | | | HEMBA1004538 |
| 1984955 | AI252857 | AI252857 | 1 | 0 | 0 | mRNA KIAA0741 gene product |
| | | | | | | (IF2) |
| 810467 | AA457141 | AA457141 | 1 | 0 | 0 | |
| 993046 | AA570694 | AA363055 | 1 | 0 | 4 | hypothetical protein FLJ10099 |
| | | | | | | (FLJ10099) |
| 810530 | AA464548 | AA464548 | 3 | 2 | 25 | Claudin 7 (CLDN7) |
| 1985621 | AI254651 | AI254651 | 1 | 0 | 0 | |
| 2002637 | AI223666 | AI223666 | 1 | 0 | 2 | |
| 755865 | AA496479 | AA496479 | 1 | 0 | 4 | gDNA chromosome 21, NF1- |
| | | | | | | related locus |
| 1985448 | AI254906 | AI254906 | 1 | 0 | 0 | |
| 2292434 | AI648563 | AI648563 | 2 | 0 | 0 | gDNA 12p12-21.3-21.8 |
| 810498 | AA457154 | AA457154 | 1 | 0 | 3 | gDNA clone RP11-379I13 on |
| | | | | | | chromosome 10 |
| 2003068 | AI223766 | AI223766 | 10 | 0 | 37 | |
| 2006294 | AI279388 | AI279388 | 1 | 0 | 8 | Integin, alpha 9 (ITGA9), mRNA |
| 1985556 | AI251321 | AI251321 | 1 | 0 | 1 | |
| 1985494 | AI254938 | AI254938 | 2 | 0 | 1 | gDNA chromosome 14 clone |
| | | | | | | BAC R-131H24 |
| 1985040 | AI251623 | AI254571 | 3 | 0 | 1 | |
| 1984903 | AI254586 | AI053894 | 50 | 5 | 68 | |
| 2292460 | AI648530 | AI648530 | 1 | 0 | 1 | Wilms tumor associated protein |
| | | | | | | (WIT-1) |
| 1984941 | AI252841 | AI252841 | 2 | 1 | 3 | gDNA chromosome 14 clone |
| | | | | | | BAC R-804L24 |
| 770747 | AA454520 | AA454520 | 1 | 0 | 0 | |
| 1985061 | AI251642 | AI251642 | 1 | 0 | 0 | |
| 2260925 | AI591032 | AI591032 | 1 | 0 | 4 | |
| 2006359 | AI264852 | AI264852 | 1 | 0 | 33 | |
| 2292490 | AI648545 | AI648545 | 1 | 0 | 13 | |
| 770522 | AA456762 | AA456762 | 1 | 0 | 16 | |
| 2292472 | AI648533 | AI648533 | 1 | 0 | 0 | |
| 2002584 | AI223506 | AI223506 | 1 | 0 | 0 | |
| 2006508 | AI265914 | AI265914 | 1 | 0 | 4 | |
| 2002702 | AI223706 | AI223706 | 1 | 0 | 0 | |
| 2002948 | AI223609 | AI053964 | 5 | 0 | 13 | |
| 2002540 | AI223470 | AI223470 | 1 | 0 | 0 | |
| 2260893 | AI591004 | AI591004 | 1 | 0 | 2 | |
| 2003136 | AI250523 | AI250523 | 1 | 0 | 0 | |
| 2260680 | AI590757 | AI590757 | 1 | 0 | 1 | |
| 2219675 | AI738841 | AI738841 | 1 | 0 | 0 | |
| 2006285 | AI279392 | AI279392 | 1 | 0 | 70 | |
| 1984994 | AI252969 | AI252969 | 1 | 0 | 3 | |
| 2260809 | AI608710 | AI608710 | 1 | 0 | 0 | |
| 2260492 | AI590577 | AI590577 | 1 | 0 | 1 | |
| 1964644 | AI287912 | AI287912 | 1 | 0 | 0 | |
| 770961 | AA428171 | AA428171 | 1 | 0 | 1 | |
| 810067 | AA455305 | AA165584 | 8 | 7 | 55 | |
| 2107496 | AI380369 | AA362711 | 1 | 0 | 2 | |
| 2292567 | AI648462 | AI648462 | 1 | 0 | 1 | |
| 2260591 | AI590610 | AI590610 | 1 | 0 | 0 | |
| 2261022 | AI591055 | AI591055 | 1 | 0 | 2 | |
| 2292702 | AI612846 | AA167381 | 2 | 0 | 21 | |
| 2002858 | AI224270 | AA166620 | 3 | 0 | 17 | |
| 2006307 | AI279408 | AI279408 | 1 | 0 | 8 | |
| 1984931 | AI252836 | AI252836 | 1 | 0 | 35 | |
| 2260917 | AI591022 | AI591022 | 1 | 0 | 0 | |
| 770927 | AA433865 | AA433865 | 1 | 0 | 8 | |
| 2006292 | AI279387 | AI279387 | 1 | 0 | 2 | |
| 2261010 | AI609587 | AI609587 | 2 | 0 | 14 | |
| 741039 | AA402296 | AA402296 | 1 | 0 | 0 | |
| 2006364 | AI264845 | AI264845 | 1 | 0 | 14 | |
| 1985021 | AI251613 | AI251613 | 1 | 0 | 0 | |
| 1374360 | AA828959 | AA829097 | 3 | 0 | 1 | |
| 1985005 | AI252985 | AI252985 | 1 | 0 | 1 | |
| 2258189 | AI623135 | AF136413 | 1 | 0 | 1 | |
| 2006320 | AI279404 | AI279404 | 1 | 0 | 6 | |
| 770715 | AA454497 | AA454497 | 1 | 0 | 9 | |
| 2261186 | AI609337 | AI609337 | 1 | 0 | 16 | |
| 2216400 | AI654744 | AI654744 | 1 | 0 | 16 | |
| 2006496 | AI265908 | AI265908 | 1 | 0 | 0 | |
| 2292705 | AI612857 | AI612857 | 1 | 0 | 0 | |
| 1964750 | AI283331 | AI283331 | 1 | 0 | 0 | |
| 2260699 | AI590770 | AI590770 | 1 | 0 | 9 | |
| 1984950 | AI252845 | AI254780 | 5 | 0 | 2 | |
| 770978 | AA428247 | AA428247 | 2 | 1 | 12 | |
| 770998 | AA428253 | AA430746 | 3 | 0 | 29 | |
| 2292390 | AI648504 | AI648504 | 1 | 0 | 1 | |
| 1985408 | AI254597 | AI254597 | 1 | 0 | 0 | |
| 2251282 | AI658484 | AA363270 | 1 | 0 | 1 | |
| 1373633 | AA837669 | AA837669 | 1 | 0 | 0 | |
| 2122708 | AI521444 | AI521444 | 1 | 0 | 33 | |
| 753401 | AA406401 | T29223 | 1 | 0 | 13 | |
| 2216215 | AI654529 | AI654529 | 1 | 0 | 0 | |
| 810889 | AA459288 | AA454869 | 5 | 3 | 76 | |
| 811573 | AA458520 | AA458520 | 1 | 0 | 1 | |
| 2216412 | AI654749 | AA464522 | 3 | 0 | 12 | |
| 754929 | AA422036 | AA422036 | 2 | 0 | 0 | |
| 981382 | AA525940 | AA525940 | 1 | 0 | 0 | |
| 1965573 | AI364874 | AI364874 | 1 | 0 | 11 | |
| 981208 | AA526408 | AA526408 | 1 | 0 | 0 | |
| 757030 | AA429021 | AA402679 | 24 | 12 | 79 | |
| 742056 | AA405746 | AA405746 | 2 | 0 | 25 | |
| 1861875 | AI053808 | AI053808 | 1 | 0 | 17 | |
| 1373857 | AA828779 | AA482061 | 2 | 0 | 0 | |
| 1373888 | AA828792 | AA828792 | 1 | 0 | 0 | |
| 810216 | AA463996 | AA402679 | 24 | 12 | 79 | |
| 1374124 | AA828604 | AA828604 | 1 | 0 | 0 | |
| 981025 | AA526011 | AA526011 | 1 | 0 | 0 | |
| 1212476 | AA643476 | AA643450 | 4 | 0 | 8 | |
| 800175 | AA581095 | AA581095 | 1 | 0 | 0 | |
| 741705 | AA402081 | AA402081 | 1 | 0 | 0 | |
| 740320 | AA477801 | AA482651 | 2 | 0 | 6 | |
| 756537 | AA436442 | AA292747 | 2 | 0 | 2 | |
| 897358 | AA496757 | AA363048 | 1 | 0 | 11 | |
| 1965502 | AI364842 | AI364842 | 1 | 0 | 0 | |
| 755590 | AA419204 | AA419204 | 1 | 0 | 0 | |
| 1964045 | AI280624 | AI280624 | 1 | 0 | 0 | |
| 1965524 | AI364851 | AI364851 | 1 | 0 | 0 | |
| 740416 | AA477828 | AA422036 | 2 | 0 | 0 | |
| 770267 | AA434256 | AA434256 | 1 | 0 | 0 | |
| 811005 | AA485364 | AA292026 | 2 | 0 | 20 | |
| 741183 | AA402548 | AA402548 | 1 | 0 | 4 | |
| 727859 | AA393566 | AA362742 | 1 | 0 | 34 | |

### Example 2

### Analysis of cDNA Expression Using Microarray Analysis and Real Time PCR

[11223] The electronic subtraction performed in Example 1 identified 10,862 sequences. Of the original sequences, 1688 were excluded from continued analysis due to duplication of the sequences. The remaining 9174 sequences were evaluated for their expression profiles in a variety of tumor and normal tissue types using microarray analysis.

[11224] Using this approach, the cDNA sequences were PCR amplified using vector specific primers. The resulting PCR products were then arrayed randomly onto one of two chips. Ovary Chip #3 contained 2784 EST clones and Ovary Chip #4 contained 4882 clones.

[11225] Their mRNA profiles in tumor and normal tissues were then examined using microarray technology essentially as described (Shena M. et al., 1995 Science 270:467-470). The probes were selected from two groups, one of which is fluorescently labeled with Cy3 (Group I, typically tumor tissues, see Table I) and the other with Cy5 (Group II, typically normal tissue [N], see Table 3). The Chips were then hybridized with probe pairs (one from Group I and one from Group II) and the fluorescent intensities measured. The mean fluorescent intensity of probes from Group I was then compared to the mean fluorescence of probes from Group II. A ratio was then determined using computational analysis. This ratio determines the relevance of a particular sequence to different tissues, both normal and tumor. In addition to this ratio, sequences were also classified based on the level of background present in Group II. If the mean fluorescent signal was <0.1, this identified sequences with low background, between 0.1-0.2 identified sequences with some background, and <0.2 identified sequences with potentially high background.

[11226] Ovary Chip #3 was probed with 35 different probe pairs (see Table 3, Groups I and II for details). Two different types of analysis were then performed:

[11227] 1. The mean fluorescent intensity of ovary tumor tissue compared to the mean fluorescent intensity of normal tissue (minus ovary). Sequences were selected using this analysis if the ratio was greater than three and the background <0.2.

[11228] 2. The mean fluorescent intensity of ovary tumor and ovary normal tissue compared to the mean fluorescent intensity of essential normal tissue (minus ovary). Sequences were selected using this analysis if the ratio was greater than 2.5 and the background <0.2.

TABLE 3
Probes Used to Analyze Ovary Chip #3

| Cy3 Probe | | Cy5 Probe | |
|---|---|---|---|
| Ovary Tumor (IIIC) | 261A | SPACT37 | Adrenal Gland (essential) |
| Ovary Tumor (IIIC) | 264A | 396A | Skin N (essential) |
| Ovary Tumor (IIIC) | 265A | SPACT56 | Thymus N (essential) |
| Ovary Tumor (IIIC) | 288A | 600C | Bronchus N (essential) |
| Papillary Serous Cystic Neo. | 854A | 785B | Bronchus N (essential) |
| (IA) | | | |
| Papillary Serous (IA) | 855A | 407B | Bone N |
| Papillary Serous (IA) | 856A | 484A | Peritoneum Epithelial N |
| | | | (essential) |
| Papillary Serous Adeno (IA) | 603A | SPACT52 | Pituitary Gland N (essential) |
| Papillary Serous (IB) | 857A | SPACT40 | Skeletal muscle N (essential) |
| Papillary Serous Adeno (IB) | 385A | SPACT55 | Stomach (essential) |
| Papillary Serous Neo (IC) | 492A | SPACT54 | Spleen N (essential) |
| Papillary Serous (IIA) | 858A | 862A | Pancreas N (essential) |
| Papillary Serous (IIB) | 859A | S27 | Ovary N |
| Serous Borderline Tumor | 605A | SPACT45 | Spinal cord N (essential) |
| (IIIC) | | | |
| Papillary Serous Carcinoma | 495A | SPAAm1 | Heart N |
| (III) | | | |
| Mucinous Cystadeno (IB) | 381C | S7 | Ovary N |
| Mucinous Adeno (IIIC) | 382A | 5449A | Ovary N |
| Mets Mucinous Adeno (IIIC) | 428B | SPACT53 | Small intestine N (essential) |
| Endometrioid Adeno. (IA) | 491A | 502B | Esophagus N (essential) |
| Endometrioid Adeno. (II) | 335A | 199A | Colon N (essential) |
| Endometrioid Adeno. (II-III) | 494A | SPACT46 | Thyroid gland N (essential) |
| Cystic Endometrioid. (IIIC) | 860A | 783A | PBMC (resting) (essential) |
| Clear cell adeno. (I) | 604A | 415A | Aorta N (essential) |
| Clear cell (IA) | 607A | 776A | Trachea N (essential) |
| Granulosa Cell Tumor (IA) | S25 | CT25 | Trachea N (essential) |
| Granulosa Cell Tumor (IA) | S22 | PAN2000 | Pancreas N (pool) (essential) |
| Germ Cell Tumor | 386A | S92 | Breast (HMEC) N (essential) |
| Papillary Serous Adeno. (IIIB) | 602A | 328B/C | Bladder N (essential) |
| Papillary Serous Adeno. (IIIC) | S23 | SPACT49 | Bone marrow N (essential) |
| Papillary Serous Cystadeno. | 606A | SPAAm2 | Lung N (essential) |
| (IIIB) | | | |
| Mets Papillary Adeno. (IIIA) | 383A | 302B | Kidney N (essential) |
| Mets Papillary Serous. (IIIB) | 384A | S44/782A | PBMC (activated) (essential) |
| Mets. Pap. Serous Cystadeno | 426A | 603A | Ovary tumor (Cy3 match) |
| (IIIC) | | | |
| Mets Pap. Adeno (IIIC) | 429A | 270B | Liver N (essential) |
| Ovary Tumor | 427A | SPACT50 | Brain N (essential) |

[11229] Microarray analysis of clones that showed significant expression levels in tumor samples when compared to normals is presented in Table 4.

TABLE 4
Microarray Analysis From Ovary Chip #3

| | | | | | |
|---|---|---|---|---|---|
| Clone ID | | | Mean | Mean | Candidate |
| IMAGE # | Accession # | Ratio | Signal 1 | Signal 2 | Name |

Threshold >3.0; Mean signal 2 <0.1; Ranked by Mean signal 1.

| | | | | | |
|---|---|---|---|---|---|
| 595243 | AA164216/AA164215 | 6.67 | 0.632 | 0.095 | O1028C |
| 594484 | AA180009/AA164745 | 5.6 | 0.432 | 0.077 | O1029C |
| 843028 | AA488541/AA488406 | 3.85 | 0.368 | 0.096 | O1030C-R |
| 76058 | T59567/T59521 | 3.07 | 0.278 | 0.09 | O1031C |
| 544863 | AA075131/AA075149 | 3.24 | 0.248 | 0.077 | |
| 741139 | AA402754/AA402207 | 3.3 | 0.225 | 0.068 | |
| 545242 | AA076182/AA076085 | 3.23 | 0.225 | 0.07 | |
| 75673 | T58484 | 3.18 | 0.189 | 0.059 | |
| 811600 | AA458533/AA454609 | 3.95 | 0.183 | 0.046 | O1032C |
| 739457 | AA477250/AA477249 | 3.26 | 0.183 | 0.056 | |
| 77262 | T50256/T50206 | 3.12 | 0.175 | 0.056 | |
| 77257 | T50212 | 3.06 | 0.172 | 0.056 | |
| 74768 | T47079 | 3.02 | 0.17 | 0.056 | |
| 593444 | AI733904/AI732611/AA160259/ | 4.96 | 0.164 | 0.033 | |
| | AA160258 | | | | |
| 811063 | AI734202/AI732823/AA485619/ | 3.03 | 0.164 | 0.054 | |
| | AA485451 | | | | |
| 593218 | AI733902/AI732609/AA159613/ | 3.01 | 0.149 | 0.05 | |
| | AA159743 | | | | |
| 595232 | AI732624/AA173518 | 4.19 | 0.144 | 0.034 | |
| 75759 | T58522 | 3.68 | 0.142 | 0.038 | |
| 714232 | AA293601 | 3.03 | 0.134 | 0.044 | |
| 809858 | AA464305/AA455119 | 3.56 | 0.129 | 0.036 | |
| 489076 | AA057195/AA057129 | 3.2 | 0.129 | 0.04 | |
| 771328 | AA476222/AA476223 | 3.23 | 0.111 | 0.034 | |
| 755093 | AI821682/AI820932/AA482660/ | 5.95 | 0.094 | 0.016 | |
| | AA482508 | | | | |
| 771053 | AA430718/AA427528 | 3.37 | 0.086 | 0.025 | |
| 77250 | T50141 | 3.22 | 0.082 | 0.025 | |
| 810109 | AA465048/AA464979 | 4.65 | 0.078 | 0.017 | |
| 136984 | AF074992/R35849 | 4.31 | 0.068 | 0.016 | |
| 809776 | AA454784/AA454732 | 6.89 | 0.028 | 0.004 | |

Threshold >3.0; Signal 2 <0.2; Ranked by mean Signal 1.

| | | | | | |
|---|---|---|---|---|---|
| 593439 | AA165668/AA165632 | 9.75 | 1.149 | 0.118 | O1033C |
| 76081 | T59590 | 3.86 | 0.708 | 0.183 | |
| 724886 | AA404613/AA291468 | 3.04 | 0.532 | 0.175 | |
| 724962 | AA404631/AA291495 | 3.36 | 0.438 | 0.13 | HPP14 |
| 283151 | N45230 | 3.2 | 0.379 | 0.119 | |
| 595363 | AA164920/AA164919 | 3.04 | 0.31 | 0.102 | |

Threshold >3.0; Mean Signal 2 >0.2; Ranked by Mean Signal 1.

| | | | | | |
|---|---|---|---|---|---|
| 544548 | AA075105/AA074952 | 4.23 | 1.768 | 0.418 | |
| 595220 | AA164851/AA164850 | 3.31 | 1.598 | 0.482 | |
| 545443 | AA079191/AA079190 | 3.29 | 1.241 | 0.377 | |
| 545185 | AA076101 | 3.04 | 1.152 | 0.379 | |
| 714080 | AA284545/AA284815 | 5.09 | 1.05 | 0.206 | |
| 595449 | AA173739/AA173383 | 4.95 | 0.999 | 0.202 | O1034C |

Threshold >2.5; Mean Signal 2 <0.1; Ranked by Mean Signal 1.

| | | | | |
|---|---|---|---|---|
| AA176693/AA173996 | 15.64 | 1.43 | 0.091 | |
| AI821564/AA284659/ | 4.71 | 0.323 | 0.069 | |
| AA284658 | | | | |
| AA075034/AA075033 | 3.01 | 0.291 | 0.097 | O1035C |
| AA394090/AA293773 | 3.04 | 0.275 | 0.091 | O1036C |
| T57605 | 2.92 | 0.19 | 0.065 | |
| AA456327/AA454681 | 3.19 | 0.188 | 0.059 | |
| AA164782/AA164781 | 2.85 | 0.138 | 0.049 | |
| AA166898/AA166756 | 2.73 | 0.129 | 0.047 | |
| AA075203/AA075202 | 3.35 | 0.128 | 0.038 | |
| AA405395/AA402883 | 3.07 | 0.126 | 0.041 | |
| AA172236/AA172056 | 3.17 | 0.124 | 0.039 | |
| T57611/T57557 | 2.62 | 0.118 | 0.045 | |
| AA419214/AA419229 | 2.68 | 0.112 | 0.042 | |
| AA171974/AA171755 | 2.89 | 0.109 | 0.038 | |
| AA076270/AA076269 | 5.32 | 0.087 | 0.016 | |
| AA464689 | 2.61 | 0.074 | 0.028 | |
| AA456446/AA454554 | 2.57 | 0.065 | 0.025 | |
| T60090 | 3.66 | 0.045 | 0.012 | |
| AA075211/AA075126 | 3.91 | 0.036 | 0.009 | |

Threshold >2.5; Mean Signal 2 >2.0; Ranked by Mean Signal 1.

| | | | |
|---|---|---|---|
| AA076228/AA076227 | 5.02 | 0.812 | 0.162 |
| AA075310 | 4.98 | 0.582 | 0.117 |
| T58551/T58501 | 3.15 | 0.528 | 0.167 |
| T59551 | 3.13 | 0.431 | 0.138 |
| AA464691 | 2.62 | 0.382 | 0.146 |
| T52869/T52868 | 3.16 | 0.37 | 0.117 |
| AF147380/T59906/T59850 | 2.55 | 0.335 | 0.131 |

Threshold >2.5; Mean Signal 2 <0.1; Ranked by Mean Signal 1.

| | | | | |
|---|---|---|---|---|
| | AA172293/AA171844 | 2.82 | 0.257 | 0.091 |
| | AA446928/AA443351 | 2.55 | 0.164 | 0.064 |
| | AA164691 | 3.09 | 0.107 | 0.035 |
| | AA160156/AA160155 | 2.68 | 0.088 | 0.033 |
| | AI732624/AA173518/AA173428 | 3.08 | 0.086 | 0.028 |
| 595232 | AI732624/AA173518 | 4.19 | 0.144 | 0.034 |
| | AA411128/AA292424 | 2.74 | 0.078 | 0.028 |
| | AI734109/AI732705/AA428413/ | 2.55 | 0.072 | 0.028 |
| | AA427400 | | | |

[11230] Of those sequences presented in Table 4, several were selected for Real Time PCR analysis of an extensive panel of normal and tumor tissues. Real Time PCR (see Gibson et al., Genome Research 6:995-1001, 1996; Heid et al., Genome Research 6:986-994, 1996) is a technique that evaluates the level of PCR product accumulation during amplification. This technique permits quantitative evaluation of mRNA levels in multiple samples. Briefly, this was done by extracting mRNA from tumor and normal tissue and preparing cDNA using standard techniques. Real Time PCR was then performed using a Perkin-Elmer/Applied Biosystems (Foster City, Calif.) 7700 Prism instrument. Matching primers and fluorescent probes were then designed for each of the 6 sequences and optimal concentrations for amplification and detection determined. The cDNA content was standardized using PCR specific for β-Actin. The amount of specific RNA was then determined by either comparing the number of copies present per 1000 picograms of β-Actin or by setting a baseline using the sample, which showed the lowest level of the gene of interest.

[11231] Table 5 contains the Real Time PCR results for 6 samples selected from Chip #3.

TABLE 5
Real Time PCR Expression
Profiles of Sequences Identified on Ovary Chip #3

| | | SEQ ID | Ovary Tumor Tissue and | |
|---|---|---|---|---|
| Clone ID | Image # | NO | tumor associated tissue | Normal Tissue |
| 1029C | 94484 | 1928; | HOE in 11/23; OE in 3/23; E | OE in 1/3 Ovary |
| | | 10,864 | 3/23; E in 2/2 SCID grown | |
| | | | tumors; E in 1/1 tumor cell lines | |
| 1030C | 843028 | 10,196; | HOE in 5/20; OE in 5/20; E in | E in ovary |
| | | 10,868; | 9/20 | |
| | | 10,870 | | |
| 1032C | 811600 | 5085; | HOE in 1/22; OE in 1/22; E in | OE in Bronchia |
| | | 10,872; | 14/22. | |
| | | 10,873 | | |
| 1033C | 593439 | 10,874; | HOE in 4/21; OE in 4/21; E | No expression |
| | | 10,875 | 10/21 | detected |
| 1034C | 595449 | 2409; | HOE in 4/22; OE in 7/22; E in | E in brain, brain |
| | | 10,876 | 7/22; OE in 1/2 SCID grown | pool, pancreas, |
| | | | tumors. | |
| O1036C | 726384 | 3228; | HOE in 1/13; OE in 4/13; E in | E in PBMC |
| | | 3239; | 8/13; E in 2/2 SCID derived | (activated), Skeletal |
| | | 10,880; | tissue. | muscle, spleen, bone |
| | | 10,881; | | marrrow, bronchia, |
| | | 10,882; | | brain |
| | | 10883; | | |
| | | 10,884 | | |

HOE = highly over expressed; OE = over expressed; E = expressed.

[11232] Ovary Chip #4 contained 4882 clones from the electronic subtraction process described in Example 1. This Chip was probed with 35 different probe paris (see Table 6, Groups I and II for details). Two different types of analysis were then performed:

[11233] 1. The mean fluorescent intensity of ovary tumor tissue compared to the mean fluorescent intensity of normal tissue (minus ovary). Sequences were selected using this analysis if the ratio was greater than three and the background <0.2.

[11234] 2. The mean fluorescent intensity of ovary tumor and ovary normal tissue compared to the mean fluorescent intensity of essential normal tissue (minus ovary). Sequences were selected using this analysis if the ratio was greater than 2.5 and the background <0.2.

TABLE 6
Probes Used to Analyze Ovary Chip #4

| Group I: Cy3 Probe | | Group II: Cy5 Probe | |
|---|---|---|---|
| Ovary Tumor (IIIC) | 201 | SPACT84 | Adrenal Gland N |
| Ovary Tumor (IIIC) | 264A | SK2000 | Skin Pool N |
| Ovary Tumor (IIIC) | 263A | SPACT70 | Thymus N |
| Ovary Tumor (IIIC) | 288A | 785A/D | Bronchus N |
| Papillary Serous adeno. (IA) | 1068A | 784B | Bronchus N |
| Serous Cystadenoma (IB) | 1084A | 741A/B | Bone N |
| Papillary Serous (IA) | 856A | BP2000 | Breast Pool N |
| Papillary Serous Adeno. (IA) | 603A | SPACT67 | Pituitary Gland N |
| Papillary Serous Cystadeno. | 857A | SPACT75 | Skeletal |
| (IB) | | | Muscle N |
| Papillary Serous Adeno. (IB) | 385A | SPACT66 | Stomach N |
| Papillary Serous Neo. (IC) | 492A | SPACT69 | Spleen N |
| Papillary Serous Cystadeno. | 858A | 862A | Pancreas N |
| IIA | | | |
| Mucious Carcinoma (IIA) | 1130A | S27 | Ovary N |
| Mets. Papillary Serous (III) | 495A | SPACT73 | Heart N |
| Mets. Pap. Serous Cystadeno. | 606A | S52/ | Lung N |
| (IIIB) | | SPACT78 | |
| Papillary Serous Adeno. (IIIB) | 602A | 328B/C | Bladder N |
| Serous Borderline Tumor | 605A | SPACT59 | Spinal Cord N |
| (IIIC) | | | |
| Papillary Serous Adeno. (IIIC) | S23 | SPACT49 | Bone Marrow N |
| Mets. Papillary Adeno. (IIIA) | 383A | KP2000 | Kidney Pool N |
| Mets. Adenocarcinoma (IIIC) | 1069A | 1155A | PBMC (activated) |
| Mets. Papillary Adeno. (IIIC) | 1070A | 1070A | Ovary Tumor |
| | | | Cy3 match |
| Mets. Papillary Adeno. (III) | 429A | SPACT81 | Liver N |
| Mets. Pap. Serous Adeno. | 427A | SPACT85 | Brain N |
| (IIIC) | | | |
| Mucinous Cystadeno. (IB) | 381C | S7 | Ovary N |
| Mets. Endometrial Adeno. | 1127A | S449A | Ovary N |
| (III) | | | |
| Mets. Mucinous Adeno. (IIIC) | 428B | SPACT86 | Small Intestine N |
| Endometrioid Carcinoma (IA) | 1071A | 502B | Esophagus N |
| Endometrioid Adeno. (IA) | 1081A | 1004A | Colon N |
| Mets. Adeno. (II-III) | 494A | 886A | Thyroid Gland N |
| Cystic Edometrioid Adeno. | 860A | 783A/ | PBMC Pool |
| (IIIC) | | 888A | (resting) |
| Clear Cell Adeno. (IA) | 604A | 415C | Aorta N |
| Clear Cell/Endometrioid (IA) | 607A | CT25 | Trachea Pool N |
| Granulosa Cell Tumor (IA) | S25 | 772B | Trachea N |
| Granulosa Cell Tumor (IA) | 1082A | SPACT58 | Pancreas Pool N |
| Ovary Germ-Cell Tumor (I) | 386A | S12 | Mammary |
| | | | Epithelial N |

[11235] Microarray analysis of clones that showed significant expression levels in tumor samples when compared to normals is presented in Table 7.

TABLE 7
Microarray Analysis From Ovary Chip #4

| | | | | | |
|---|---|---|---|---|---|
| Clone ID | | | Mean | Mean | Candidate |
| IMAGE # | Accession # | Ratio | Signal 1 | Signal 2 | Name |

Threshold >2.0; Mean Signal 2 <0.1; Mean Signal 1 >0.2.

| | | | | | |
|---|---|---|---|---|---|
| | | 6.67 | 0.358 | 0.054 | O1033C |
| | | 4.82 | 0.247 | 0.051 | O1029C |
| | | 4.59 | 0.22 | 0.048 | O1034C |
| | | 3.32 | 0.209 | 0.063 | Phospholipase a2 |
| 2216507 | AI653489 | 3.26 | 0.254 | 0.078 | |
| 2292394 | AI648506 | 2.94 | 0.235 | 0.08 | |
| 2216151 | AI654462 | 2.64 | 0.202 | 0.076 | |
| 981215 | AA526423 | 2.56 | 0.227 | 0.089 | |
| 1373880 | AA828788 | 2.16 | 0.201 | 0.093 | |
| 1373112 | AA837621 | 2.1 | 0.201 | 0.096 | |

Threshold >2.0; Mean Signal 2 <0.1; Mean Signal 1 = 0.1-0.2.

| | | | | | |
|---|---|---|---|---|---|
| 2002493 | AI224233 | 15.14 | 0.102 | 0.007 | |
| 1373281 | AA827974 | 4.19 | 0.102 | 0.024 | |
| 2216154 | AI654454 | 3.52 | 0.195 | 0.055 | |
| 755378 | AA410595 | 3.15 | 0.107 | 0.034 | |
| 769666 | AA428329 | 2.97 | 0.112 | 0.038 | |
| 2216636 | AI653555 | 2.92 | 0.123 | 0.042 | |
| 1455124 | AA909822 | 2.89 | 0.183 | 0.063 | |
| 1374123 | AA828611 | 2.86 | 0.176 | 0.061 | |
| 770437 | AA427513 | 2.79 | 0.154 | 0.055 | |
| 739389 | AA476860 | 2.78 | 0.153 | 0.055 | |
| 1985442 | AI254625 | 2.72 | 0.111 | 0.041 | |
| 981039 | AA526017 | 2.67 | 0.139 | 0.052 | |
| 755111 | AA411372 | 2.66 | 0.11 | 0.042 | |
| 1965439 | AI356599 | 2.65 | 0.136 | 0.051 | |
| 755436 | AA419044 | 2.63 | 0.138 | 0.053 | |
| 742144 | AA405975 | 2.58 | 0.104 | 0.04 | |
| 1373104 | AA837606 | 2.56 | 0.172 | 0.067 | |
| 1373878 | AA828778 | 2.55 | 0.156 | 0.061 | |
| 1454766 | AA908470 | 2.55 | 0.152 | 0.06 | |
| 1373719 | AA828882 | 2.41 | 0.163 | 0.068 | |
| 1374009 | AA828703 | 2.36 | 0.184 | 0.078 | |
| 1373380 | AA828138 | 2.34 | 0.17 | 0.073 | |
| 1373381 | AA828148 | 2.32 | 0.161 | 0.07 | |
| 1964546 | AI284862 | 2.29 | 0.1 | 0.044 | |
| 1192366 | AA650614 | 2.27 | 0.157 | 0.069 | |
| 2260607 | AI590617 | 2.25 | 0.102 | 0.045 | |
| 1154834 | AA642166 | 2.25 | 0.155 | 0.069 | |
| 981113 | AA526205 | 2.23 | 0.111 | 0.05 | |
| 2292558 | AI648453 | 2.22 | 0.1 | 0.045 | |
| 981376 | AA525937 | 2.21 | 0.138 | 0.063 | |
| 1374125 | AA828612 | 2.21 | 0.159 | 0.072 | |
| 1374171 | AA828647 | 2.21 | 0.183 | 0.082 | |
| 1965552 | AI364864 | 2.21 | 0.142 | 0.064 | |
| 981310 | AA525800 | 2.2 | 0.109 | 0.05 | |
| 1373500 | AA847986 | 2.18 | 0.181 | 0.083 | |
| 1373375 | AA828135 | 2.17 | 0.173 | 0.08 | |
| 1190617 | AA650078 | 2.17 | 0.155 | 0.071 | |
| 2292555 | AI648459 | 2.16 | 0.12 | 0.056 | |
| 755357 | AA410276 | 2.15 | 0.153 | 0.071 | |
| 1373287 | AA827977 | 2.15 | 0.166 | 0.077 | |
| 1192390 | AA650618 | 2.14 | 0.182 | 0.085 | |
| 2260515 | AI590596 | 2.13 | 0.18 | 0.085 | |
| 981372 | AA525935 | 2.12 | 0.189 | 0.089 | |
| 980932 | AA525774 | 2.11 | 0.199 | 0.094 | |
| 1374020 | AA828698 | 2.11 | 0.178 | 0.085 | |
| 1373311 | AA828039 | 2.09 | 0.157 | 0.075 | |
| 1047907 | AA773935 | 2.09 | 0.158 | 0.076 | |
| 1154937 | AA627343 | 2.09 | 0.197 | 0.094 | |
| 1373504 | AA847988 | 2.08 | 0.19 | 0.091 | |
| 1963836 | AI280530 | 2.08 | 0.187 | 0.09 | |
| 981337 | AA525918 | 2.08 | 0.193 | 0.093 | |
| 1373879 | AA828787 | 2.08 | 0.182 | 0.088 | |
| 980966 | AA525874 | 2.07 | 0.199 | 0.096 | |
| 2292391 | AI648510 | 2.07 | 0.115 | 0.056 | |
| 2292584 | AI648468 | 2.06 | 0.104 | 0.051 | |
| 981068 | AA526095 | 2.06 | 0.176 | 0.086 | |
| 1373285 | AA827976 | 2.06 | 0.165 | 0.08 | |
| 1373419 | AA826312 | 2.06 | 0.153 | 0.074 | |
| 1374172 | AA828640 | 2.06 | 0.161 | 0.078 | |
| 1373400 | AA826292 | 2.04 | 0.162 | 0.079 | |
| OVM-84 | | 2.04 | 0.166 | 0.081 | OVM-84 |
| 1373695 | AA828597 | 2.03 | 0.15 | 0.074 | |
| 1373807 | AA828690 | 2.03 | 0.118 | 0.058 | |
| 1373415 | AA826310 | 2.03 | 0.146 | 0.072 | |
| 981359 | AA525929 | 2.03 | 0.172 | 0.084 | |
| 1373309 | AA828038 | 2.03 | 0.16 | 0.079 | |
| 2260575 | AI591141 | 2.02 | 0.107 | 0.053 | |
| 755715 | AA496499 | 2.02 | 0.165 | 0.082 | |
| 809959 | AA454835 | 2.02 | 0.152 | 0.075 | |
| 1373509 | AA848000 | 2.01 | 0.193 | 0.096 | |
| 1374033 | AA829114 | 2.01 | 0.172 | 0.086 | |
| 1373080 | AA837588 | 2.01 | 0.187 | 0.093 | |
| 1373691 | AA828596 | 2.01 | 0.193 | 0.096 | |
| 1964868 | AI355523 | 2.01 | 0.109 | 0.054 | |
| 1190662 | AA650084 | 2.01 | 0.179 | 0.089 | |
| 1154908 | AA627330 | 2 | 0.178 | 0.089 | |

Threshold >2.0; Mean Signal 2 <0.1; Mean Signal 1 <0.1.

| | | | | | |
|---|---|---|---|---|---|
| 1985131 | AI242020 | 9.05 | 0.028 | 0.003 | |
| 1985090 | AI241990 | 8.43 | 0.024 | 0.003 | |
| 1985420 | AI254602 | 7.47 | 0.029 | 0.004 | |
| 1985633 | AI254657 | 7.34 | 0.029 | 0.004 | |
| 1985494 | AI254938 | 6.94 | 0.065 | 0.009 | |
| 1985584 | AI251343 | 6.81 | 0.056 | 0.008 | |
| 1985071 | AI241981 | 6.49 | 0.026 | 0.004 | |
| 1985548 | AI251317 | 6.36 | 0.03 | 0.005 | |
| 1985096 | AI241992 | 6.04 | 0.027 | 0.005 | |
| 1985539 | AI251255 | 5.86 | 0.053 | 0.009 | |
| 1985503 | AI254963 | 5.69 | 0.075 | 0.013 | |
| 1985111 | AI242006 | 5.65 | 0.022 | 0.004 | |
| 1985085 | AI241987 | 5.65 | 0.023 | 0.004 | |
| 810330 | AA464144 | 5.52 | 0.018 | 0.003 | |
| 980920 | AA525758 | 5.34 | 0.067 | 0.012 | |
| 1985162 | AI254100 | 5.2 | 0.028 | 0.005 | |
| 930200 | AA502530 | 5.17 | 0.035 | 0.007 | |
| 1985535 | AI251253 | 5.09 | 0.044 | 0.009 | |
| 1985593 | AI251369 | 5.07 | 0.06 | 0.012 | |
| 2003171 | AI250559 | 4.92 | 0.026 | 0.005 | |
| 810462 | AA457130 | 4.84 | 0.025 | 0.005 | |
| 1985079 | AI241985 | 4.54 | 0.038 | 0.008 | |
| 769684 | AA428757 | 4.42 | 0.019 | 0.004 | |
| 1985127 | AI242019 | 4.42 | 0.031 | 0.007 | |
| 1985630 | AI254644 | 4.41 | 0.059 | 0.013 | |
| 1985576 | AI251339 | 4.37 | 0.042 | 0.01 | |
| 1985558 | AI251322 | 4.36 | 0.074 | 0.017 | |
| 1984612 | AI255127 | 4.35 | 0.04 | 0.009 | |
| 1373305 | AA828036 | 4.32 | 0.08 | 0.018 | |
| 2002838 | AI224248 | 4.06 | 0.015 | 0.004 | |
| 1984571 | AI251722 | 3.92 | 0.028 | 0.007 | |
| 1985520 | AI251235 | 3.78 | 0.045 | 0.012 | |
| 1985272 | AI254763 | 3.75 | 0.038 | 0.01 | |
| 2002656 | AI223675 | 3.62 | 0.022 | 0.006 | |
| 1985594 | AI251359 | 3.6 | 0.039 | 0.011 | |
| 1985474 | AI254929 | 3.47 | 0.053 | 0.015 | |
| 2119169 | AI401777 | 3.11 | 0.07 | 0.023 | |
| 755480 | AA410639 | 3.02 | 0.048 | 0.016 | |
| 1985049 | AI251638 | 2.96 | 0.047 | 0.016 | |
| 2006525 | AI265778 | 2.91 | 0.056 | 0.019 | |
| 1984955 | AI252857 | 2.87 | 0.049 | 0.017 | |
| 810467 | AA457141 | 2.83 | 0.071 | 0.025 | |
| 993046 | AA570694 | 2.83 | 0.091 | 0.032 | |
| 810530 | AA464548 | 2.77 | 0.018 | 0.007 | |
| 1985621 | AI254651 | 2.73 | 0.037 | 0.014 | |
| 2002637 | AI223666 | 2.71 | 0.027 | 0.01 | |
| 755865 | AA496479 | 2.67 | 0.073 | 0.027 | |
| 1985448 | AI254906 | 2.63 | 0.015 | 0.006 | |
| 2292434 | AI648563 | 2.63 | 0.067 | 0.026 | |
| 810498 | AA457154 | 2.6 | 0.022 | 0.009 | |
| 2003068 | AI223766 | 2.56 | 0.041 | 0.016 | |
| 2006294 | AI279388 | 2.54 | 0.055 | 0.022 | |
| 1985556 | AI251321 | 2.53 | 0.053 | 0.021 | |
| 1985494 | AI254938 | 2.53 | 0.058 | 0.023 | |
| 1985040 | AI251623 | 2.52 | 0.026 | 0.01 | |
| 1984903 | AI254586 | 2.5 | 0.02 | 0.008 | |
| 2292460 | AI648530 | 2.5 | 0.07 | 0.028 | |
| 1984941 | AI252841 | 2.5 | 0.034 | 0.014 | |
| 770747 | AA454520 | 2.48 | 0.045 | 0.018 | |
| 1985061 | AI251642 | 2.48 | 0.023 | 0.009 | |
| 2260925 | AI591032 | 2.48 | 0.085 | 0.034 | |
| 2006359 | AI264852 | 2.47 | 0.059 | 0.024 | |
| 2292490 | AI648545 | 2.43 | 0.082 | 0.034 | |
| 770522 | AA456762 | 2.42 | 0.052 | 0.022 | |
| 2292472 | AI648533 | 2.4 | 0.074 | 0.031 | |
| | | 2.35 | 0.092 | 0.039 | O1031C |
| 2002584 | AI223506 | 2.34 | 0.024 | 0.01 | |
| 2006508 | AI265914 | 2.34 | 0.038 | 0.016 | |
| 2002702 | AI223706 | 2.34 | 0.041 | 0.018 | |
| 2002948 | AI223609 | 2.31 | 0.028 | 0.012 | |
| 2002540 | AI223470 | 2.31 | 0.027 | 0.012 | |
| 2260893 | AI591004 | 2.3 | 0.082 | 0.036 | |
| 2003136 | AI250523 | 2.27 | 0.023 | 0.01 | |
| 2260680 | AI590757 | 2.26 | 0.056 | 0.025 | |
| 2219675 | AI738841 | 2.23 | 0.067 | 0.03 | |
| 2006285 | AI279392 | 2.22 | 0.033 | 0.015 | |
| 1984994 | AI252969 | 2.18 | 0.041 | 0.019 | |
| 2260809 | AI608710 | 2.17 | 0.056 | 0.026 | |
| 2260492 | AI590577 | 2.15 | 0.081 | 0.038 | |
| 1964644 | AI287912 | 2.14 | 0.098 | 0.046 | |
| 770961 | AA428171 | 2.13 | 0.032 | 0.015 | |
| 810067 | AA455305 | 2.12 | 0.099 | 0.047 | |
| 2107496 | AI380369 | 2.12 | 0.06 | 0.028 | |
| 2292567 | AI648462 | 2.12 | 0.085 | 0.04 | |
| 2260591 | AI590610 | 2.11 | 0.088 | 0.042 | |
| 2261022 | AI591055 | 2.11 | 0.077 | 0.036 | |
| 2292702 | AI612846 | 2.11 | 0.088 | 0.042 | |
| 2002858 | AI224270 | 2.09 | 0.04 | 0.019 | |
| 2006307 | AI279408 | 2.08 | 0.058 | 0.028 | |
| 1984931 | AI252836 | 2.08 | 0.035 | 0.017 | |
| 2260917 | AI591022 | 2.08 | 0.083 | 0.04 | |
| 770927 | AA433865 | 2.07 | 0.024 | 0.011 | |
| 2006292 | AI279387 | 2.07 | 0.036 | 0.017 | |
| 2261010 | AI609587 | 2.07 | 0.084 | 0.041 | |
| 741039 | AA402296 | 2.06 | 0.088 | 0.043 | |
| 2006364 | AI264845 | 2.06 | 0.013 | 0.006 | |
| 1985021 | AI251613 | 2.04 | 0.024 | 0.012 | |
| 1374360 | AA828959 | 2.04 | 0.034 | 0.017 | |
| 1985005 | AI252985 | 2.04 | 0.046 | 0.022 | |
| 2258189 | AI623135 | 2.03 | 0.097 | 0.047 | |
| 2006320 | AI279404 | 2.03 | 0.017 | 0.008 | |
| 770715 | AA454497 | 2.02 | 0.028 | 0.014 | |
| 2261186 | AI609337 | 2.02 | 0.064 | 0.032 | |
| 2216400 | AI654744 | 2.02 | 0.09 | 0.045 | |
| 2006496 | AI265908 | 2.02 | 0.049 | 0.024 | |
| 2292705 | AI612857 | 2.02 | 0.089 | 0.044 | |
| 1964750 | AI283331 | 2.01 | 0.091 | 0.045 | |
| 2260699 | AI590770 | 2.01 | 0.062 | 0.031 | |
| 1984950 | AI252845 | 2.01 | 0.045 | 0.023 | |
| 770978 | AA428247 | 2 | 0.096 | 0.048 | |
| 770998 | AA428253 | 2 | 0.097 | 0.048 | |
| 2292390 | AI648504 | 2 | 0.083 | 0.041 | |
| 1985408 | AI254597 | 2 | 0.045 | 0.022 | |
| 2251282 | AI658484 | 2 | 0.099 | 0.049 | |

Threshold >2.0; Mean Signal 2 = 0.1-0.2; Ranked by Ratio

| | | | | | |
|---|---|---|---|---|---|
| 1373633 | AA837669 | 4.24 | 0.496 | 0.117 | |
| 2122708 | AI521444 | 2.96 | 0.397 | 0.134 | |
| 753401 | AA406401 | 2.36 | 0.266 | 0.113 | |
| 2216215 | AI654529 | 2.35 | 0.336 | 0.143 | |
| 810889 | AA459288 | 2.25 | 0.316 | 0.14 | |
| 811573 | AA458520 | 2.19 | 0.224 | 0.102 | |
| 2216412 | AI654749 | 2.19 | 0.343 | 0.157 | |
| 754929 | AA422036 | 2.18 | 0.38 | 0.174 | |
| 981382 | AA525940 | 2.16 | 0.225 | 0.104 | |
| 1965573 | AI364874 | 2.1 | 0.305 | 0.146 | |
| 981208 | AA526408 | 2.09 | 0.322 | 0.154 | |
| 757030 | AA429021 | 2.08 | 0.344 | 0.165 | |
| 742056 | AA405746 | 2.07 | 0.314 | 0.152 | |
| 1861875 | AI053808 | 2.07 | 0.254 | 0.122 | |
| 1373857 | AA828779 | 2.05 | 0.257 | 0.125 | |
| 1373888 | AA828792 | 2.04 | 0.223 | 0.109 | |
| 810216 | AA463996 | 2.02 | 0.377 | 0.186 | |
| 1374124 | AA828604 | 2.02 | 0.204 | 0.101 | |
| 981025 | AA526011 | 2.01 | 0.349 | 0.173 | |
| 1212476 | AA643476 | 2 | 0.217 | 0.109 | |
| OVM-28 | | 2.63 | 0.313 | 0.119 | OVM-28 |

Threshold >2.0; Mean Signal 2 >0.2; Ranked by ratio.

| | | | | | |
|---|---|---|---|---|---|
| 800175 | AA581095 | 2.93 | 1.213 | 0.414 | |
| 741705 | AA402081 | 2.8 | 3.921 | 1.4 | |
| 740320 | AA477801 | 2.56 | 2.479 | 0.97 | |
| 756537 | AA436442 | 2.42 | 2.437 | 1.007 | |
| 897358 | AA496757 | 2.32 | 1.246 | 0.537 | |
| 1965502 | AI364842 | 2.26 | 0.662 | 0.293 | |
| 755590 | AA419204 | 2.25 | 1.832 | 0.813 | |
| 1964045 | AI280624 | 2.22 | 0.618 | 0.279 | |
| 1965524 | AI364851 | 2.2 | 1.354 | 0.615 | |
| 740416 | AA477828 | 2.11 | 0.477 | 0.226 | |
| 770267 | AA434256 | 2.04 | 0.48 | 0.236 | |
| 811005 | AA485364 | 2.04 | 0.539 | 0.264 | |
| 741183 | AA402548 | 2.03 | 2.903 | 1.431 | |
| 727859 | AA393566 | 2.02 | 0.51 | 0.252 | |
| OVM-61 | | 2.44 | 0.818 | 0.335 | OVM-61 |

[11236] Of those sequences presented in Table 7, several that demonstrated good profiles were selected for Real Time PCR analysis and their expression in a selection of normal and tumor tissues. Table 8 describes the expression two of these clones.

TABLE 8
Real Time PCR Expression Profiles
of Sequences Identified on Ovary Chip #4

| | | | Ovary Tumor | |
|---|---|---|---|---|
| | | SEQ ID | Tissue and | |
| Clone ID | Image # | NO | tumor associated tissue | Normal Tissue |
| 1069C | 1374123 | 7388; | OE in 6/13 | OE in skeletal |
| | | 10,894 | | muscle and |
| | | | | brain |
| O1070C | 1985442 | 9581; | OE in 7/13; E in 4/13 | E in colon, |
| | | 10,895 | | brain and |
| | | | | cerebellum |

OE = over expressed; E = expressed

[11237] All clones subjected to Real Time PCR, in addition to several other clones identified using microarray, were re-sequenced and the sequences were searched against Genbank to identify extended and/or full length sequences. These sequences are disclosed in SEQ ID NO:10,863-10,912.

### Example 3

### Peptide Priming of T-Helper Lines

[11238] Generation of CD4⁺ T helper lines and identification of peptide epitopes derived from tumor-specific antigens that are capable of being recognized by CD4⁺ T cells in the context of HLA class II molecules, is carried out as follows:

[11239] Fifteen-mer peptides overlapping by 10 amino acids, derived from a tumor-specific antigen, are generated using standard procedures. Dendritic cells (DC) are derived from PBMC of a normal donor using GM-CSF and IL-4 by standard protocols. CD4⁺ T cells are generated from the same donor as the DC using MACS beads (Miltenyi Biotec, Auburn, Calif.) and negative selection. DC are pulsed overnight with pools of the 15-mer peptides, with each peptide at a final concentration of 0.25 μg/ml. Pulsed DC are washed and plated at 1×10⁴ cells/well of 96-well V-bottom plates and purified CD4⁺ T cells are added at 1×10⁵/well. Cultures are supplemented with 60 ng/ml IL-6 and 10 ng/ml IL-12 and incubated at 37° C. Cultures are restimulated as above on a weekly basis using DC generated and pulsed as above as antigen presenting cells, supplemented with 5 ng/ml IL-7 and 10 U/ml IL-2. Following 4 in vitro stimulation cycles, resulting CD4⁺ T cell lines (each line corresponding to one well) are tested for specific proliferation and cytokine production in response to the stimulating pools of peptide with an irrelevant pool of peptides used as a control.

### Example 4

### Generation of Tumor-Specific CTL Lines Using in Vitro Whole-Gene Priming

[11240] Using in vitro whole-gene priming with tumor antigen-vaccinia infected DC (see, for example, Yee et al, The Journal of Immunology, 157(9):4079-86, 1996), human CTL lines are derived that specifically recognize autologous fibroblasts transduced with a specific tumor antigen, as determined by interferon-γ ELISPOT analysis. Specifically, dendritic cells (DC) are differentiated from monocyte cultures derived from PBMC of normal human donors by growing for five days in RPMI medium containing 10% human serum, 50 ng/ml human GM-CSF and 30 ng/ml human IL-4. Following culture, DC are infected overnight with tumor antigen-recombinant vaccinia virus at a multiplicity of infection (M.O.I) of five, and matured overnight by the addition of 3 μg/ml CD40 ligand. Virus is then inactivated by UV irradiation. CD8+ T cells are isolated using a magnetic bead system, and priming cultures are initiated using standard culture techniques. Cultures are restimulated every 7-10 days using autologous primary fibroblasts retrovirally transduced with previously identified tumor antigens. Following four stimulation cycles, CD8+ T cell lines are identified that specifically produce interferon-γ when stimulated with tumor antigen-transduced autologous fibroblasts. Using a panel of HLA-mismatched B-LCL lines transduced with a vector expressing a tumor antigen, and measuring interferon-γ production by the CTL lines in an ELISPOT assay, the HLA restriction of the CTL lines is determined.

### Example 5

### Generation and Characterization of Anti-Tumor Antigen Monoclonal Antibodies

[11241] Mouse monoclonal antibodies are raised against E. coli derived tumor antigen proteins as follows: Mice are immunized with Complete Freund's Adjuvant (CFA) containing 50 μg recombinant tumor protein, followed by a subsequent intraperitoneal boost with Incomplete Freund's Adjuvant (IFA) containing 10 μg recombinant protein. Three days prior to removal of the spleens, the mice are immunized intravenously with approximately 50 μg of soluble recombinant protein. The spleen of a mouse with a positive titer to the tumor antigen is removed, and a single-cell suspension made and used for fusion to SP2/O myeloma cells to generate B cell hybridomas. The supernatants from the hybrid clones are tested by ELISA for specificity to recombinant tumor protein, and epitope mapped using peptides that spanned the entire tumor protein sequence. The mAbs are also tested by flow cytometry for their ability to detect tumor protein on the surface of cells stably transfected with the cDNA encoding the tumor protein.

### Example 6

### Synthesis of Polypeptides

[11242] Polypeptides are synthesized on a Perkin Elmer/Applied Biosystems Division 430A peptide synthesizer using FMOC chemistry with HPTU (O-Benzotriazole-N,N,N′, N′-tetramethyluronium hexafluorophosphate) activation. A Gly-Cys-Gly sequence is attached to the amino terminus of the peptide to provide a method of conjugation, binding to an immobilized surface, or labeling of the peptide. Cleavage of the peptides from the solid support is carried out using the following cleavage mixture: trifluoroacetic acid:ethanedithiol:thioanisole:water:phenol (40:1:2:2:3). After cleaving for 2 hours, the peptides are precipitated in cold methyl-t-butyl-ether. The peptide pellets are then dissolved in water containing 0.1% trifluoroacetic acid (TFA) and lyophilized prior to purification by C18 reverse phase HPLC. A gradient of 0%-60% acetonitrile (containing 0.1% TFA) in water (containing 0.1% TFA) is used to elute the peptides. Following lyophilization of the pure fractions, the peptides are characterized using electrospray or other types of mass spectrometry and by amino acid analysis.

[11243] From the foregoing it will be appreciated that, although specific embodiments of the invention have been described herein for purposes of illustration, various modifications may be made without deviating from the spirit and scope of the invention. Accordingly, the invention is not limited except as by the appended claims.

The application's sequence listing, which the Patent Office published only in electronic form, follows.

SEQUENCE LISTING (10912 sequences)

SEQ ID NO: 1 - DNA, 524 bp, Homo sapien
  misc_feature (1)...(524): n = A,T,C or G
ggcacgagtggacattgaccccttcgagatggccgcatacctgaaagatggttaccgaatagcccagccaatcaactgtcctgatgaattatttgctgtgatggcctgttgctgggccttagatccagaggagaggcccaagtttcagcagctggtacagtgcctaacagagtttcatgcagccctgggggcctacgtctgantcctctccaatcccacaccatcaggaagaaggtgcctgtcggggctcacttgaagcctgtcagggatgctttgtatctaacacaacgccaacagaagcacatttgtnttccagaacaccgtgccttaggaaatgctttaggaatctgaactttttaaggacagacttaataatgtgggcatatttttctaggttntcaanttttattagggttggactgaaaggggttttttgtaaatttttttgggccaaatttttttnaaaacatacttactttggactagggggntacatttttaccaaaattaataaaccagttttt

SEQ ID NO: 2 - DNA, 203 bp, Homo sapien
  misc_feature (1)...(203): n = A,T,C or G
ggcacgagcacccctatagctgcttaaatactttccaaatccagntgcactcctagccagggaaggtgaagggatgcacagaggtgggggaggggtactgtgcagggtactcagcatccctgaccaccaggtgccaatgatcagcggncgtggtntngggcacacaggaggcaccttggataagctggagtctattcctggga

SEQ ID NO: 3 - DNA, 328 bp, Homo sapien
  misc_feature (1)...(328): n = A,T,C or G
ggcacgaggaaaagccatggccgacaaggtcctganggagaagagaaagctgtttatccattccatgggtgaaggtacaataaatggcttactggatgatttattacagacaagggtgctgaaccaggaagagatggagaaagtaaaacgtgaaaatgctacagttatggataagacccgagctttgattgactccgttattccgaaagnggcacaggcatgccaaatttgcatcacatacatttgtgaagaagacagttacctggcagagacgctgggactcttcagcaggtnccgataccntgggaattagctttagttcacaagg

SEQ ID NO: 4 - DNA, 191 bp, Homo sapien
ggcacgagaaggaaaacagtgttttagatgagagatcattaatgcatttttccctcatcaagcatatatctgcttttttttattttgcaattctctgtattctatgtctttaaaaatttgatcttgacatttaatgtcacaaagttttgtttttttaaaaagtggatttaaacttaagatccgacattttt

SEQ ID NO: 5 - DNA, 322 bp, Homo sapien
  misc_feature (1)...(322): n = A,T,C or G
ggcacgagcccatgggcttntcctcagcattctgcactgagctactcgcttgatccaaatgcctccggcccacagttccaccaggcagcgggagaggacctgctggccccaccgcacgacaccagcacggttctcacggaggtcatggagcagattcacagcacgtttccatcttgctgcccaaatgttcccagcaggccacaggcaatgtgaagtattcatccggccaaccaatgtttcctgacgtacagtgttgcccttttcagcaaatgccaattccaagttccattaaatcagaagctccatggctccttggcccacg

SEQ ID NO: 6 - DNA, 252 bp, Homo sapien
  misc_feature (1)...(252): n = A,T,C or G
cacaaaaatgggatccaaactggaagacatcctgatggacgacaccctttctcccgtcggtgtcactgatccactcctttcctcagtgtcccccggagcttccaaaacaagcagccggaggagcagtatgagcatggaagaganggagcacacttgttagcgaatcctccctgcactgcattcgcacaaactgcttcctttcttgattcgtaagttattaaanntacggntcaagaaaggaagnaatttttt

SEQ ID NO: 7 - DNA, 284 bp, Homo sapien
ttggaattagttttctgtttaaggctttaatggtactgatttctgaaacgataagtaaaagacaaaatattttgtggtgggagcagtaagttaaaccatgatatgcttcaacacgcttttgttacattgcatttgcttttattaaaatacaaaattaaacaaacaaaaaaactcatggagcgattttattatcttgggggatgagaccatgagattggaaaatgtacattacttctagttttagactttagtttgttttttttttttttcactaaaatcttaaa

SEQ ID NO: 8 - DNA, 434 bp, Homo sapien
  misc_feature (1)...(434): n = A,T,C or G
ggcacgagcacagcagttactaccacagagccttctgggaggggccgttgtgttgaaggaggctcctgcctgagggacagcatcaggcagtgggctctgtagagtgagaaccaggtggaggccttctgtgcccagctcagagttctgcaccacgccaggactgcccaggccaagggctactgacgcaagttccactcattccactctgtgggngggcgccttgggcctctcctggaagggctcttcgagaaggaattggagttacgtacaagtgacctaaatgggaagcttttctagatgagattggattaaattccatgtnatttctctttccctttaatccaggttggggactcgtttctttctggtggtttcaaagcttgcccagatgttgcaatgattttnatgnttctgtagagaagtattttttcttt

SEQ ID NO: 9 - DNA, 248 bp, Homo sapien
ggcacgagtttacaacttacattaggggtttgggggaatgctaattatatattgagaatatacattagaactcttcaaaatgggctcttctaatgaggtcactactgaacaaaattgttccctcttctgttaaatagaataggtttaaatgactagtcaaatgaattattttcttcttgttaaataaattaaatcttactttcttttaatgaccaaccttaggtaaaacaaaaatattgtaatcctag

SEQ ID NO: 10 - DNA, 185 bp, Homo sapien
  misc_feature (1)...(185): n = A,T,C or G
ggcacgagtgtgaatcaaccctaggaggaaaaacctactaccaaaccagaagagcaggcctaagagtactttgagcttctagaagaagtaagcgggaaaggaagagaaagagtagaaagttggtgcatcttctcctccccaagagcctnagtataagaagttggaattttaagggtgggggagct

SEQ ID NO: 11 - DNA, 378 bp, Homo sapien
  misc_feature (1)...(378): n = A,T,C or G
ggcacgagctagtctccagtttttttttttttttttttgttgttgttaaaaagggcctactacattggcgctattcttaggacttctgcaacttttaaagtcttacttgtctttcttgttgcttttgtattaggagtnccccgtgtgggtctagaactcccctttggtaatgcttctttgttttttaatggcccttctgttctcaggatggagagaacacagaagctactatccatgtcaggatttattctatttatatcttattacaataaaattagtggcactttattcataaatattcatgagcctgttaaattgttaagtngttcttcctgtagctggaatcaacaagttattttcaactcaattttatgactt

SEQ ID NO: 12 - DNA, 286 bp, Homo sapien
ggcacgagaagaaattgaaatagtcttagccaagccaccagacaagaaaaggaaagagcgccaagctgctagacaggcctccagaagcactgcgtatgaagattattactaccaccctcctcctcgcatgccacctccaattagaggtcggggtcgtggtggggggagaggtggatatggctaccctccagattactacggctatgaagattactatgatgattactatggttatgaattatcacgactatcgtggaggctatgaagatccctactacggctatga

SEQ ID NO: 13 - DNA, 189 bp, Homo sapien
  misc_feature (1)...(189): n = A,T,C or G
ggcacgagccaagtacttcagatcaatggtgaaaactgtgcagnatggagctctgataaagcgcacaaggtgctcaaacaggcttttggagagaagnttaccatgaccattcgtgacaggccctttgaacggacgattaccatgcataaggatagcactggncatgttggttttatcttttaaaaatgg

SEQ ID NO: 14 - DNA, 249 bp, Homo sapien
  misc_feature (1)...(249): n = A,T,C or G
cacatttgatctgtaaacttttttatttaaaaaaaaatccactgtcattagcaacatgtgctgacattagtttttctttagtgaaataagagtgcaggccttaaattgtctctgtctaaaacatgtagaaatgcagatgtaaacacaaagtctntgccctcctcccctgactttggcagttcatcaatgncatgatctcaaccagaaaagcacggnggggggaaaggccaacattttgatacctaacag

SEQ ID NO: 15 - DNA, 293 bp, Homo sapien
gtttttagactccaaggagtggaaattatgtggaagaagcaaacctgatacaatttgcccaaggtaaacagtttgaaaagacaaatgggcctgccaaactgtacagtttcttccccaagagctgttaggtatcaaaatgttgtcctttcccccctccgtgcttttctggttgagatcatgtcattgatgaactgccaaagtcaggggaggagggcagagactttgtgtttacatctgcatttctacatgttttagacagagacaatttaaggcctgcactcttatttcactaa

SEQ ID NO: 16 - DNA, 308 bp, Homo sapien
catgttgatattttgcttggttttattttactgattttaaaaggtatatagaaaaatgtaggcctttaaaaagaaacagcatgtagttttttattttaatatgttccatagagtggataggcagacaggtactattgtaatgtattctgtatttaataatttaatatactctagaaagtagacctcatgcattcttttagcatgattttcttttaaactgcttttcattttaagggcacccgtggcggaagctgggttttgcaaggactgtgtaagctgtatgcggtctagctgtatgcgttctgtag

SEQ ID NO: 17 - DNA, 291 bp, Homo sapien
aagaacagtttgtactcctttgttctaaagggtacctatagtttatgggaattggggaacttagtagaaaaatcaccaacgctctcatgtttctcataaaaaatgctcagctttatttggaaactttggccattgttttctttttcttctttcttcttctccttcctcttttgagttaaaaaggccacagtctgacctacttatatgtgtgatgaaatgtgcagactctgccaaggctatttattctaatgatttatctactcaagataaaaagaaataaagtgaagacaa

SEQ ID NO: 18 - DNA, 288 bp, Homo sapien
ctgtctctaatccttaggagttgttttaaaagacataatcactttgaacttccatgaaacctgtcttccaccacaacaaccctgggagagaaaaacatgctaaaggaggtatcttggcttaataattccttatagccaatatcaacagtggcaatcagcacacagaggaaaggacccaaatcactatgtagcttaaagatttctgttaatttgaaagaacaaaaacaagacagaacttctggtactctaatcaggatgattcctaacaagtcagtcatttgtgaactt

SEQ ID NO: 19 - DNA, 300 bp, Homo sapien
tgaagcagcaacttcgaaaggcgatgttggaaaaagacggataatttgcctagtgggattgggcctggtggtcttcttcttcagttttctactttcaatatttcgttccaagtaccacggctatccttatagctttttaattaaatgaagccaagtgggatttgcataaagtgaatgtttaccatgaagataaactgttcctgactttatactattttgaattcattcatttcattgtgatcagctagcttattcttgtgtactttttttaaactgtgggttttcctagtaaatttaatt

SEQ ID NO: 20 - DNA, 250 bp, Homo sapien
ctgactccaacacaaactcaaatgccttcaagggcctagaatgggagaagtgcctgcagtaaccgggtcaggacaagactaccctaaagcattcaattctaatttaaaatacagcaacaggctgggcacagcggctcacgcctgtaatcccagcactttgggatgccaaggtgggcggatcacctgaggtcaggagttcgagaccagcctggccaacatggcaaaactttgtctctaaaaaaaaaaaaaa

SEQ ID NO: 21 - DNA, 294 bp, Homo sapien
cttgtaggttttgtgcatatatccttcagggtaagtgcattagcccgaagttcctctgaaatacttcttaatggggtttttatttgaacttgggtgacaattaaagggtctcactgttgaaccgtccaacagtgaatagagtatcttcagtctcagggtgatcacagcttcttccttgaaaactccctgtctcatttcagtctgggctcttaactttgcccttagccactggtaaatgtatgggcactttagatgatcagaccccagtgtttgcttggtgtttgacctctgtcc

SEQ ID NO: 22 - DNA, 288 bp, Homo sapien
aaatttgatgagtcacaccttggagttggttaagatgaacacacattttgaattttattaatcaagccgcaatattcttctgttcaaaatagcatcttgtagttatcaaaatgtatgaattttctttatatagttcctacagaatatttgtgatgaagctgctgatgaatacaaatatgatatgatattgatgatgtattgatggcagtgctgcttttcatctttgctgcccatgagcaattgaaatgtagttgtgtgtgctcttttggagaacgatttctaatcagc

SEQ ID NO: 23 - DNA, 293 bp, Homo sapien
gaacataaatataggttggagaatttacagagattcttcagagactggagagagatatctaaatcgccttcctatacctggctctcaagctaactattgcccctagacatctggaggctttgcactgactgtgacgtcaggccaccatccctgcaactggttagtcaatgtgtctcttcctcacacactgaccatgtgctcatgagagcaggggctgtatctgcctgtttcattcatacttctggcaacatgcttggtatatttgcacttataaatgtttgctgaatacataa

SEQ ID NO: 24 - DNA, 285 bp, Homo sapien
aaacctcttcagagtactgatgaccataaagataattatagtgcagatctctccatctagatgaggctccatacctaaaagaacagaagatggctgcaaaatatctggggaggggaaaaaaaaaaaaaacagagaaagcccgaaaagtaaaatgaacccattgtatgagtgcttgacaccaaatcactgtcatttactaagtaatgaataaaatacatacacacacataaaaatatatgcaccaaggaattgctaggtccaacacaagtaaatctctgtaaattt

SEQ ID NO: 25 - DNA, 301 bp, Homo sapien
  misc_feature (1)...(301): n = A,T,C or G
gggggcaacccacaccgtccctttgccacctctctggtcgtccattcccgcctcttgctggagatttagagtccgggaatagggaggcaggagcgcacccgcctggggaaagggctctggggactccgagggcgggggaaggactggggctgagaccactcctccccctgccccgttgccttccttggcgtttgaccctcctttcctttcagatagggtcctgganggtctggcaaagtgcagcgctaatgtggagagatgacggccaggccttctccgcaggcccctcttcctcctcctg

SEQ ID NO: 26 - DNA, 140 bp, Homo sapien
gacggacgccttagcactcccctatcacgcctctgccttcgcgctcagtgattggcgtctcctcaaggagccatgatttctttgtccattttttaaatgtgctgaggccctttaggagaaaaaccacgcagccaaatgag

SEQ ID NO: 27 - DNA, 207 bp, Homo sapien
aaaatatcaatacaaatggaagtgaaaacaacatatcaaaacttatgaaatataggaaaagcagttctaagaggggtgtttatagcaataaatgcctacattaagaaagaagaaagatctcaaacaacctaaccttacacctcaaggaactagtaaaagaagaagaaactaatcctgaagtcagcagaaggaagaaaatataaagat

SEQ ID NO: 28 - DNA, 293 bp, Homo sapien
actttaaacaggtgaattgtttaaatctcagctgtttgggggaaagaaaaaaacaggttgggcttgataacctaaaatcctggacctgaataaaatataaatataagtcaggctggaaaactggacagcagggaaatcagagttgtaatcaattcctcatgtattccctcaggtcaccggaactgtcctcctcttctcaaaatagttggggagcaaggaatcatggatgtccttccacaattaatgactgaagactgtgcttgggaaatgtgtccatgaactccctgctctga

SEQ ID NO: 29 - DNA, 273 bp, Homo sapien
aactattaacccagctgcactattgtgagagcacaggcattccactggtggtcattattggtgagcaagaactgaaagaaggggtcatcaagatccgttcagtggccagcagagaggaggtggccattaaacgggaaaattttgtggctgaaattcagaagcgactgtctgagtcttgatccttgcctgattcccatctgctgctctttgtagaaaaggtttcctctagaactgaattcctctgggaattgagtgatgggacttcacaacaac

SEQ ID NO: 30 - DNA, 182 bp, Homo sapien
gggcaacagagtgaggccctgactcaaaataaataaatagcttagttcagcattccctaaacaggagacacatcaatcctttaagatggtttgtgtctccctgctaaaaaaaaaaaaaaaaagtggtaggaaaaagtagatcagacactccctataagtgttcagtctcttaattattaaca

SEQ ID NO: 31 - DNA, 269 bp, Homo sapien
  misc_feature (1)...(269): n = A,T,C or G
cnatcccagctctatgacgctttttgctcattcctttttttgtcttacaaggaaaatcaggtactcacacttcgccaagcattggccgttgttgtctcagggcttctcaaggccatgccaccagtgaatttgcccattccctatggtcttttacagggcattaaagccaatgtcctaagaaagtacccacaagtcaacaaattcagtcatacatcctgtctgtccttaatcaataccctttgaaattcaatcccgggagttctcttctg

SEQ ID NO: 32 - DNA, 294 bp, Homo sapien
aaagtattgaaaggcagagtaagaataaagcgggaaaagtggatttggtgacataaaaattgtctcaagtgaaacttaatgacactcaaaaaataggctttctatcaccattctgggccccgaaattctcatcaaatgtaatatccacctggatgcatcaaagatcattgacttctcagtccaaatgtctcttttccaccacttcaggcatccctcttaggcttgtcagcccagtggctgttaaatcactccctaaaatctcgaatttcatagtatttgagaaccatatttcaa

SEQ ID NO: 33 - DNA, 240 bp, Homo sapien
tctgagccgtcgcgaaaacgtggtggatagtacgtcggacacccactgtaacgctctcccgtcatcgcatggcgtgacgtgccacctcttcattccagatattcagtcccttcttccattgcggaccggtttcatcccctttccaggcttgctcgtaaggcgcaaaacgcccgccacgcgccaacatataacctacccgcagccgttcatcagctttcagcaccgtgtctagcgccggtt

SEQ ID NO: 34 - DNA, 281 bp, Homo sapien
aattaaataatgtcattgccttctagaaattaatcatcaaagatagtaatcatgtggagagaaataataagatacatatttagcaaatgcagaacaataaattagtaaatcatttacattatttgtttaaaagagatgaaggaagagtcctagaaattgctgattgtggagaatcattcccttctctcaattacaatagttaaatgcctcacacaataaatattcttgaataatttatctgccctcagtttattgtaatcttttcctcctctggactagaa

SEQ ID NO: 35 - DNA, 293 bp, Homo sapien
  misc_feature (1)...(293): n = A,T,C or G
agagattaaagagctgaggtggtgagtggttgtgatgtaaatgccatcattttctcaatactggtggccagcgttagagggaaagaggctgaaggctngaccttgctgatgtccagccttctctgtcatggctctgctggtctgtgtcctccaccctgtggccacaccccaccttttcaagagcccttctttgaaagtcaggagacctaaggttgaggactggtcctacctttgtctttgaatagtttttagcctgaagcgtcttatcccctggtgggtgcttggatatttgt

SEQ ID NO: 36 - DNA, 271 bp, Homo sapien
agagattaaagagctgaggtggtgagtggttgtgatgtaaatgccatcattttctcaatactggtggccagcgttagagggaaagaggctgaaggctgagccttgctgatgtccagccttctctgtcatggctctgctggtctgtgtcctccaccctgtggccacaccccaccttttcaagagcccttctttgaaagtcaggagacctaaggttgaggactggtcctacctttgtctttgaatagtttttagcctgaagcgtcttatcccc

SEQ ID NO: 37 - DNA, 268 bp, Homo sapien
cacctagcctcaagtttctcctttgtaaagggactttggaattaactagaaaaactggggtagggtgcaatctgacttgtacccatatcaaaagtcaactttctgcatggtcaagtatcagataaatttaagccctctaggctttttttataatagtaaataatttttaaaaatagatgtttttgtaaaagacagactgtgaggaggaggtaagaattaaaatgaaaggctggacgcagtggctcacgcctgtaatcccagcattttg

SEQ ID NO: 38 - DNA, 233 bp, Homo sapien
tcgcgatagctctcaaaaaaaaggaactcatttggtatagttgcactctcactgccttctaaagctttaaccccccaaaatggatgcatatgggagttttgtcatttgcaggcagagaggaagcatttctgtttctttaaatcatatcaagttgactcaaaccatagattcatgcatttattcattcactcagtcagccaaccagcatttattgagtgcctactatgtaccag

SEQ ID NO: 39 - DNA, 232 bp, Homo sapien
aataatatacataaaaatcatggtaaatgcatcggaggaaaagaacagggtactataaatacaatgatattagatctgttaagagataataaggagacaacagtaagggagaagaattacaggcaacatgtgtaaagtccttgaagcaagtaataacttatcgtgtttaaagaatcgaaaaaaggctatgtaactggaatggagtaagcaaggggacagtgatgttatacaa

SEQ ID NO: 40 - DNA, 274 bp, Homo sapien
agacaagccccatctctacaaaaaaaaaaaaaaacccaaaattccccgagtgtcatggcacttacctatagtcccagctactgggagggatgaggtgggaggatcgcttgagcctgggagtttgaggctacaatgagccatgataggaccactgaactccatcctgagtgacacagcaaggtcctgtttctaaagaaaaaaaggacattggaatcaggatcccctccatcctaaggtacctacaaggcatctctctctgcaaacaagtaaacat

SEQ ID NO: 41 - DNA, 300 bp, Homo sapien
tgaaagcctgtgatggtatcaatgattgtggagaccaaagtgatgaactgtgttgtaaagcatgccaaggcaaaggcttccattgcaaatcgggtgtttgcattccaagccagtatcaatgcaatggtgaggtggactgcattacaggggaagatgaagttggctgtgcaggctttgcatctgtggctcaagaagagacagaaattttgactgctgacatggatgcagacagaagacggataaaatcattattacctaaactatcttgtggagttaaaaacagaatgcacattcgaagga

SEQ ID NO: 42 - DNA, 249 bp, Homo sapien
agataacccttggagatgtgactacaacattcactacctctactactggttaaagcaccactacaatgtccattttaatggcctggaatgcaaaacgcctgaagaatacaaaggatggtctgtgggaaaatatattagaagttactatgaagaatgccccaaagacaagttaccagcatatcctgagtcatttgaccaagacacagaagatgatgaatgggaaaaaaaacatagagatcacaccgcaaa

SEQ ID NO: 43 - DNA, 286 bp, Homo sapien
ctagtcagtgtcatgaatataaacccttacttgtaagtttgctatagactagttgtacaacactagaatgaaattatgtaatacttttaagaattgtagtgattgcagggttgtgttaaggtaacattttatgcatgtgtcagtgacagaaaggatcagggtataaaacttagcactaaatagcatgctccttaggaagttttaaggtaagcagtaggaatattcatgtaattctgatgagtttatgtaagttaaggaaaatgcaatgccagtttgttgactttaa

SEQ ID NO: 44 - DNA, 295 bp, Homo sapien
ttggagcttcctagaaattgttcatattccacatagtacagccataattttcactcactgaaaatgctggtaacaacctttgtcagcaagaggaggaaatagatttgatctatttattctctaaaattgtactacctgaaaagaatttctgagatacttagtattcctcatagacattctagtagttttgttaatatatgaatcacagggaaataatatgccatttctgggtagttctgaatttatataagttaacagtgagtaaaaaagatcaaagaattaattgtgacccttt

SEQ ID NO: 45 - DNA, 296 bp, Homo sapien
aaactgccatccaggaagtgagcaggggtgacagagtgcccatgacactgggactctaccgaagcccccagctcagccagaatgcccgtccacatgagcctgagcagaaggacacacttctctgagcctccatttcctcacgggcaataattctcgcctctaagggctatgtgagcaagaaatggggttgcacgggcaaaacacctcccacgggcttgcccaagtgttgcataggacacacttgcactaagagatagagtatgggacatagttctaccaaaaaagtgtttgttgtt

SEQ ID NO: 46 - DNA, 297 bp, Homo sapien
gtcatgaatatgttttaaatgtacgttatttaaaaatttggacaattttaacacctttatcataatgtgtaatgtttttgcatttcctcaaacacattttgctaattgctgctttagagacatcttaagaaacatgacttcaaagtagcgtgctgagttctatactacaaaattacatcttttggatcttcaaaagcacattgacttttacttaaacagtaatttgtctcaatttatttctgtaaataaattggagagttggaataattttgggtggacacattaccctaattattg

SEQ ID NO: 47 - DNA, 219 bp, Homo sapien
gtcctcacgtgtataatgaggaaacaatacctgctttgtaaggatgatgcaaagactcgatgaggtaatgcttcacaagcactgagtggtataaagtttcatactggtataaagtcagggctcaatatgtttattgtcattattttatttgttcccactctcccatctctccaaggaaaacctaacccatgtcattggtcagacctgagttcaaatcct

SEQ ID NO: 48 - DNA, 292 bp, Homo sapien
  misc_feature (1)...(292): n = A,T,C or G
agctcactcgtatgtcctgcactggtacatgcatctgtaatacagtttctacgtctatttaaggctaggagcganatgtgccccattgtcagttggtccacgtttctccccggctcctctgggctaaggcagtgtggcccgaggcttaaaaagttactcggtactgtttttaagaacacttttatagagttagtggaaggcaagttaagagccaatcactgatccccaagtgtttcttgagcatctggtctggggggaccactttgatcggacccacccttggaaagctcag

SEQ ID NO: 49 - DNA, 294 bp, Homo sapien
gagtgtggaggactttgttcctgacgaccgtctggaccgcagcttcctggaagacacaacccccgccaggacgttgaagaaggttggggccaaggctgcccagcaggacaagtgacagtggatggggaggccctggggcggcaacccagatgggttgcaggatttccagggacgatgttggaccttcgaagacccagccactgtggtgagtcccacctcttgtctgcaggccgcacgtcccccagttcaaagacaatcacttactttcagagtcgagtgatggaagccagttag

SEQ ID NO: 50 - DNA, 298 bp, Homo sapien
tttcaccatttaccaaaccttgctgaagtttatcctttagtagtttttttgagaagggattggctaacattcttctgaattctcacctgtttaaaatgtttggctattggctgcatgtggtggcttatagctgtagtcccagcactttggaggccaaggcagaaagattgcttgaggctaggagtgcaagactagcctgggcaacatagcaagactttgtgcatactaactggtggtggtggtggtgcatatttgcagtctcagctacttgggaggctgaggcaggaggttcgcttga

SEQ ID NO: 51 - DNA, 250 bp, Homo sapien
aagaaaacaaaaatattaaaatgagaagtacttctggaatagtggagtatgaaactctgaaattcttgtttccatgaaataaaaaaatccagaaaattatcaaaatcaactttttcagaactctgaaaattaaacaaaatctagcaacaatctgaacagcatttattcaagaaaaatggctgacttttagtaaaaataacaaacactgttatattttaactttccctatttccatccctctttccccaag

SEQ ID NO: 52 - DNA, 285 bp, Homo sapien
ttttgtgaagttttgctgcaaaggggaacatagaaaaggtgcaggtcctggtataggaaatagggtcgagtaatttctttgtattgaagatgagagaaatagctgcatgttatgtgacgatgagaagagtccagtagaaaggaaaatattgctgatgttgcagagaggataggctggctggagtgacaccctggagcagtaagagatgatgggatccagcagtccagtgcaggattctttgggtggacctagcagttgttcatccacagtcacatggaggcaata

SEQ ID NO: 53 - DNA, 297 bp, Homo sapien
tacaagaaaatcccgatggcactggcagatatctcttagatgacagcaaaagcacaatttatatttaaatctttgatccacttcgatttaacttttgtatacagtgtgaggcatatattgagtttatttttttaaatatagttatctggttattctagcaccatttgttaaaaacgctagcctttttccacagcactgcctttgtaactttgtcaaaaatcagttgtctaaatacatgtggatctaattttggactcactattcttgtctgttgatctatatgcctatctttatgcc

SEQ ID NO: 54 - DNA, 272 bp, Homo sapien
aattccctattttacttgtacgtgtgtgtgtatttacttctatacaatttatcatgttaggcttgtgcgtctataaccacagtcaagatgcagaacaattccattgccacaaggttcctttgtgttgcccttttaaaaatcacatcccttccttcctcaccctcctcccacgtgcccatccgtcttcatggccttcactaatctgttttccatgtctacattttggcttttcaaaaatgttctatacatggaatcatgctgttgaaggacat

SEQ ID NO: 55 - DNA, 291 bp, Homo sapien
gatttttttttttttttgcttaagactgctttgtctattcaggcttttttggttccacatgatttttggaatatctttttctagttctgtgaaaaatgacattggtaacttgattggaaaaacatttaatctgtagattgctctgggcaatatgaccattttaacaatattgattctttcaatccacgagcatgaaatgtgtttctatttgtttgggtttaacaaagaaaagcctgaccaggaacagtggtttgcacctgtagtccctactactctggaggctgaagtgga

SEQ ID NO: 56 - DNA, 294 bp, Homo sapien
ccaaatatcagccactgccagtagaagaagctcagctctgtgaagaggtggcaaatagtggtgctttctattaacacctttgttataaaaagcaacaaaggggggaaatggaacaggaattaaaagaaattaaagaatgcataagcaaaaactcaattgtatgtagggaaacccaattcctcctgaggaagagaaagaggtggagtcctttaaaaattcactgcctgtttttccgtctgtagctagtgagccttatctctccctttcccaggcattgtgaagaccctgtttctc

SEQ ID NO: 57 - DNA, 290 bp, Homo sapien
tccattcacgtccattccattctattccatttcattcaactccattccattccattcctctttggttattccattccattccactcgggttgtttccattccattccattccattttattccattccattccattacattacattctataccattccactcgggttgatcccataccattctattccattctattccattaaattccataccattccattccacttgggtagattccattccattccattccactccggtagattccattccattccattcaattccttt

SEQ ID NO: 58 - DNA, 284 bp, Homo sapien
cctgtaatccctgctagtcaggaggcggaggcaggagaattgcttgaacctgggaagcggaggttgcagtgagccgagatggcgccactgtactccacggtggtgtcagagcgatactacatctcaaaaaaaaaaaaaaaaaaattagctgggtttggtggcacacacctgtaataccaggtactcgggaggcccaggcaggatgatcacttgatcccgggaggggttggttttccgtgaaccaagattgtactactgcactccagcctgggggaacaggggca

SEQ ID NO: 59 - DNA, 294 bp, Homo sapien
aaagcctcatgtggtttgcattggacagataggctccagaataataatactgataataatggaagtgctgtttcaatcatgtattatgtattagatcattcagtctttgcaaggactctatgtgatgagtgttattattattcccattttatagacaaggaaattgagagcaacgggagattaaaaatcgcctgaggttatacaggtggtatatggagcagtgagtcaggccagcatccaagtccatgtgtttaaccagtacactgggtacaaagaagggaggaggagacaagc

SEQ ID NO: 60 - DNA, 294 bp, Homo sapien
  misc_feature (1)...(294): n = A,T,C or G
tcaaccccacnagatgtctcttactgcccacttggcgccttgtgattaagcaactagatttggagccagtcaggcttttgtttagacattttaactttttcttgctttccttgcaaactcctcagccttcagactggttggaaagtaaatgtacaatcttacataaattttcaggtaatagcatttcagctttttccccaagattttttgcttgggaggagacagattagactggattcggagtcttgattttgcaaaggtaacaaaagacatgttttttntttaggattttca

SEQ ID NO: 61 - DNA, 299 bp, Homo sapien
ttttgtttaaggccaactttttggctgagacaaaggtgggcctttaatataataaagtaagcccctcccactcacgcaaaagaaaagctgcgtttaaggatttaaactggcattttagagctcggagttcacatgggccacataagcgaattcccttccggagcgcacagaggtgacgtgtatgaattacgcttatggacgtattagtttctaatgaaagatatgcaggtaccactcaagggccttctaatattaaccttccctgcccggcagaaagcccagtacaaggtgaggaaatc

SEQ ID NO: 62 - DNA, 287 bp, Homo sapien
  misc_feature (1)...(287): n = A,T,C or G
tgtagtcccagctactcaggaggctgaggcaggagaatcacttgaacccgggaggtggaggttgcagtgagccaagatcgtgccattgcactccagcctngggtgacagagcaagactctgtctcaaaaaaaaaaaaaaaaagatttttctttaatagcaaaccagctcttgtttcctgggagccaatatttatgtgcttggatagcaaaggttttaaagtctttacttcattagattcagttgcccaagattatggagtcacatatatacttctgttttgattata

SEQ ID NO: 63 - DNA, 325 bp, Homo sapien
ttaaccgagagagacaatacagaaaaggttccagctattcaagtccttctcctcactctcataaaaagaaatatcactgttctctaagtttgtccaaaaatttactggtggaaacctgaattaactgtatttttttcctttaattttccacaccatttttcctgagcagagataatatgaaagcttacctttcaatgccaaaggacattttcttttctttctatgctacagagcaagcatctcctactgtgaacagcagttgggaattgtgtgtctgaaagttggataagaagtgtcataggataaaaaaaaaaaaaaaaaaaaa

SEQ ID NO: 64 - DNA, 289 bp, Homo sapien
  misc_feature (1)...(289): n = A,T,C or G
tttaagggtatatagttatatatatgagatacaactgtaaagaaaagcaagtgttttgctgtccccagaaccagaataatgatttcctctgtggagaagtacagcaatgtgattggggagtggcacctggtcnttctgggatgctggcaatgttctatttcttgtcttgggtggtgattgcatggatgttcacttttaaaatactctttatacatatatattttatatattcttgttcatatataacctttataataaagagaaaaaaatggcaaaaaaaaaaaaaaaa

SEQ ID NO: 65 - DNA, 93 bp, Homo sapien
cccatttctgagcctcttcaaaaggccacctgttactggtcgatttaagtcaacctttaccgctgattcgtggaacagatactctcttccatc

SEQ ID NO: 66 - DNA, 300 bp, Homo sapien
  misc_feature (1)...(300): n = A,T,C or G
aaaaaatactcgngtggaaaaggagaaaagactaatacaattcaaacactagccaagagaggcctgacttgggaaataacgcaaacaagaaataatgtggtgccctggaagaaatgctatcagtaagttacaagtcagcattgaggaagccccgaatgagactgtggaagacattctagagaagacgatctgaactaggtctagcatcagcttcccagcttttgaatctcactaggcaagggggacagagctccctgttgtggtttataacaactgtgataacagacacccagactcccc

SEQ ID NO: 67 - DNA, 294 bp, Homo sapien
  misc_feature (1)...(294): n = A,T,C or G
cgctntnngcgaccagcttgcccaataaagtttaggggacagtggctttatgttttcaccatctgacaaatacctacacaatgacaagcaaaacctttgccaggcagtatcttctgaaagagattcctgcagttatccaaggaaatagccacttaggtcaatggacgtttgcagagtggaagatagtcttcaaagagcaaacccttacagaaaagcaatagtgcctgccccaaatgtatgtttattgtcaaaaacctcaatccctctttttagaaaaattggatagggaaaaat

SEQ ID NO: 68 - DNA, 94 bp, Homo sapien
cccatttctgatcctcttcaaaaggccacctgttactggtcgatttaagtcaacctttaccgctgattcgtggaacagatactctcttccatcc

SEQ ID NO: 69 - DNA, 297 bp, Homo sapien
cctcaagcatttatccttcaagttacaaataatccattttcattatttatttaaaaatatatgattaacttattagtgactaggatcaccctgttgtgctatcaaatagtaggtcttattcattctttctattatcttgtacccattaaccatccccaccttcccctcagccccctctacccatcccagtctctgggaaccatccttctactctctatgtccatgagtttaactgatttgatttttacatcccacaaataagtgagaacatgtgatgtttgtctttctgtgcctggc

SEQ ID NO: 70 - DNA, 292 bp, Homo sapien
gagacaccaccagcaaattgcaaattccaatggcagctagatttttcacccgatctatgcaatcaaggtaaagcttttagaagttgattctgtctagagtgactcattagacatgatcgtgaatgctcttgcaaattcagtttaaaagttcagcacgaaggcaaaattgtttgtttttgcagtgatgatagacacagaaattctgtggtaaaagcaatgttctcattaaagtcagacaccaaatggggtagagacgagcttgtggtgacgctcacagaattcataactgcgg

SEQ ID NO: 71 - DNA, 241 bp, Homo sapien
cagtacacatggataatcagtatttgactgtaatagtatagtagttaaatacagcacttaaaaataccacagacacagttaaagcaaaaggaaacaataaaaggaatgtctgcatgctattttaatctcacattctttatctgtcttaaagtggaaatccatttgcctataaatacctgtaaacgactttaaaaaataaatgattattgctttgtgacaattgacagaatatgtctgatgt

SEQ ID NO: 72 - DNA, 415 bp, Homo sapien
  misc_feature (1)...(415): n = A,T,C or G
tcgtccagccgtcgtgaattagtgaatcagggagctgctgtgtgatcccctcctccaggctttcttggagtttgtctctgccacttcctcaagccctttaaaaaggctcctgtgctttagagagttaggatgttaatgaccgttcttttttcttgtactttattaagtactagtcttactagactagtgcttaagtggcagtgtctgccttntgccttctcccatctctttatgctcctttcttccaacttctcacgtttctgtttctcgctcggccaggtgtccagcatcccatgctgacttgcggttggccaatcccctcctcgtagatttcctccacattttcctcttcctccttttcctgtgggaagttctttttctgggctgtgggctgggtcttacgtagttcggtggg

SEQ ID NO: 73 - DNA, 282 bp, Homo sapien
ttaccccatctccaccctctcccctgttcctctgtctggctccctccagggcaaggaaaacctagggtccttggtcttgggggtggggggaccttttccagcatattcccctgggcctttagttaacatccgagtgacgaagccgggttccccagtacagtgtcttttgggtgcggtcattgtgaggaaggggatgagtgagtgtgggtgtggctggaggaggagctagatgccggtggacagtgggcaggttgatttggggaggagaggatcagcagcagc

SEQ ID NO: 74 - DNA, 297 bp, Homo sapien
agtaaatgcccgaaatgattaatagtataaaacccaagtagactatgtttttccacctgataacttggaatactactaagtgactaacaggctggtgcatacactagacgaagggaggattcatgctctgggcgggatggagctgaatggcataggatttcatcaaagactactaagtgactaacaggcaggtagtataaactgtggatgcactagacaagaaagtattcaggctctggggagaatggggctgaatggcataggatttcatcacactacccagaacaccttttttta

SEQ ID NO: 75 - DNA, 255 bp, Homo sapien
caaaaaggaaaaagaaagacaggaaattgagaaagaacggagagaaagagagagggagcgtgaaagggaacgagaaaggcgagaacgggaacgagaaagggaaagagaacgtgaacgagaaaaggagaaagaacgggagcgggaacgagaacgggatagggaccgtgaccggacaaaagagagagaccgagatcgggatcgagagagagatcgtgaccgggatagagaaaggagctcagatcgtaataaggatcg

SEQ ID NO: 76 - DNA, 304 bp, Homo sapien
  misc_feature (1)...(304): n = A,T,C or G
tcgtccaganagaagggcttaaagcactggggcaaaggggtngngggaaggcctaagaaagtttacaaagcaatctgtcagagaagggatgaaaagggacccccgctgggctgaggggctcaagccttcagctcaccttaggcccagttagaaacctgcaattacttcagctagtcagaaaggctcccctcctccttgctccaaggagcgtggttattaacctctgacccagaagtttccctgagcgtgaagcctcaacttgctggggttttggcaaccccaagtacctatgctctacttaggc

SEQ ID NO: 77 - DNA, 287 bp, Homo sapien
atcagggaatttacaagctttttcattttagccttgtttggttgggctcaggcattatctctaaaatgagattctaaggtatgcctatcaagttaattgctgtagtgcactaaaatggcaatactgtgtttctgcaatgggactatgaatttgttttaactttccaaattatttataatactgcaatgtactatataataatgctgtatggtatattacataatgattaaaaacacaggattctaccgaggacaagagaagttggttaaaatcaaagccagtaagtg

SEQ ID NO: 78 - DNA, 270 bp, Homo sapien
  misc_feature (1)...(270): n = A,T,C or G
agaagcaaaattaggacttaataacattttctgaaaactacaacatttgtatattagaacctatgaacaaaatatgcattgggttttatttgggattccaagataattttagtcataaagtttaggaacagattattccattgctttactatttctctgagcatttaaaaaatgttatctcgttaaacctttataacaacctagtgaaataaggcagcaaagtcctcactttgttngagaagacattgagcctaagagaagcaagttgtc

SEQ ID NO: 79 - DNA, 253 bp, Homo sapien
tagcagaaaaaagatgggggaaggatgacagaatttaaaactacagctgctttgttttccagttaaaaatagttctgagttaaaaacgtaaggatgtcccatcacatgtggacaatttatataaaatatagcatactaatacaaataatcatgtcttatgaaaaagtttatagttctagattgttctggtttagcttgaaattgagattcttactgttgcaacataaaaggaagctttgtgaaggaaatttga

SEQ ID NO: 80 - DNA, 209 bp, Homo sapien
cacactgcagcctgggtgacagagcgagatcctatctaaaaaaaaaaaaaaaaaaaaaaaaaaagcccaacacttttttatctggggaatatttaacatacacaaaaccagagagaatacatatttcaaagtatcactttgtatatgataaatatatatggttttggccaggtgtggtggctcatgtctgtaatcccagcactttggga

SEQ ID NO: 81 - DNA, 285 bp, Homo sapien
ggggtttcacgtgttagccaggatgtctcaatttctaacctcgtgatcccctgccttggctcccaaagtgctggaaagaaagatgtttttatatgttccctagcattttttttgagatggagttttgctcttgttgcccaggctggagtgcaatgctgtgatctcagctcaccacaacctccacctcctgggttcaagcgattctcctgcctcagtctcccaggtagctggagttacaggcatgcgacaccacgcccagctaattttgtatttttagtagagacg

SEQ ID NO: 82 - DNA, 225 bp, Homo sapien
ttgatcgccggagggcgctgtacctgcgcgccacgtacgtgaaacaccggtgtttgaacgcgaactgcaacaaaaccgtcagcggatgctggacaacacgcctgctacaccagataaccgcagctatctgcaacgcactaaagccttctggatcatgctgggcctgcgtattggcgagaacggcccatcctatctgtgccagggctttatcgtgggttacgttgc

SEQ ID NO: 83 - DNA, 270 bp, Homo sapien
tgcgcccagccaaagttttaaatgatatttcagcactttgggtggccgagacggcagatcacaaggttaggagatcaagaccatcctggctaacacagtgaaaccctgtctctactaaaaaaaaaaaaaaaattcaaaaaattagctgggcgtggtggtgggcacctgtagtcccagctacttgggaggctgaggcaggagaatggcgtgaacccaggaggcagagtttgcagtgagccgagatcgtgccactgcactccagcctgggcg

SEQ ID NO: 84 - DNA, 249 bp, Homo sapien
acagcttttatttttatttttttttaaattttctctggaatagtcttcattttgtcataatattccaacactgaaggttaggagaggggagattaagaaaggaacagagccaaaggtaattaaacattctattaatatttaaaatgttgcaatcacaagcatctgactgttagtagtcctgttatcacattcatatcccataggctcaattctactgtcaatgtgctgatatcacgctcatgaagctgc

SEQ ID NO: 85 - DNA, 281 bp, Homo sapien
  misc_feature (1)...(281): n = A,T,C or G
ctcgtgannanatctttccatcttgttgcattatctagaaaagaatatagcatatagctatagatataggcttttccttgaaagcttgaaaaaaattcgccagtaaaataatctagcttaaagtgataaactaacaaacaaatataacaacaactgaaaaggcactctaaattgtggctggcttccctttctgtctgctattgtatgaagaatactgatgtttacctgtatttgctttgctgtactaaaatgtaatgaaaaataaaagattaataaatgaa

SEQ ID NO: 86 - DNA, 277 bp, Homo sapien
tcagatttgtcttcactttatttctttttatcttgagtagataaatcattagaataaatagccttggaagagtctgcacatttcatcacacatataagtaggtcagactgtggcctttttaactcaaaagaggaaggagaagaagaaagaagaaaaagaaaacaatggccaaagtttccaaataaagctgagcattttttatgagaaacatgagagcgttggtgatttttctactaagttccccaattcccataaactataggtaccctttagaaca

SEQ ID NO: 87 - DNA, 363 bp, Homo sapien
  misc_feature (1)...(363): n = A,T,C or G
ggaccacatggtggcaagttgattacatcagacactttgcaccccagggtaggcagcaattcatctttactgagatgaatatttatttatgtacttacgtttgcctttcctgcccgcagtgccttgganaacagcatcatccaaagacatattatccaatttcttgttggaatatccctccataatctcaccttacaccaaggtacttgttttatggtggaggagatattaaaatgaacatttaggaagagatccagtagtcctaatggatttgcagcatctgaagctgctcagcactatatacctagattctggcaactctgtgattcagttctcactctcctgaatcataagctagtgctc

SEQ ID NO: 88 - DNA, 303 bp, Homo sapien
  misc_feature (1)...(303): n = A,T,C or G
ccactaagttcacaaatgactgacttgttaggaatcatcctgattagagtaccagaagttctgtcttgtttttgttctttcaaattaacagaaatctttaagctacatagngatttgggtcctttcctctgtgtgctgattgccactgttganattggctataaggaattattaagccaagataccncctttagcatgtttttctctcccagggttgttgtggtggaagacaggtttcatggaagttcaaagtgattatgtcttttaaaacaactcctaaggattagagacagactcgtgccg

SEQ ID NO: 89 - DNA, 331 bp, Homo sapien
tcaatcctgtggcacacactgaatataacaggcttgaaaaacactttgatatttcctttgtagattactaaatgctaccattgatttctgtaaattaaatttactaggaaaacccacagtttaaaaaaagtacacaagaataagctagctgatcacaatgaaatgaatgaattcaaaatagtataaagtcaggaacagtttatcttcatggtaaacattcactttatgcaaatcccacttggcttcatttaattaaaaagctataaggatagccgtggtacttggaacgaaatattgaaagtagaaaactgaagaagaagaccaccaggcc

SEQ ID NO: 90 - DNA, 367 bp, Homo sapien
ccgctgcgctcgggcgatgtcctgaacagctgctatgacagagcataaagtaggggagagagggcacagcaggagaaggctgttctggggctagtgagtgggagacgggacaaacagctagatagcaacgtgatggcttcaccatggggtgaagcgtgggggagagtatcaattacctagattttaaaaagagagcccttgaacacctctgtcactggtcacttttaccaaagccttctaacttaacggaaggagatgctgcactttaaaggaaaatcacagctgcggaagacagtcttgcaaagccagtttttgtggcttagtattttggggtagcttgtttcatggggtcagattattttctaat

SEQ ID NO: 91 - DNA, 352 bp, Homo sapien
gttagattaagagtgctgattggtgtataacaatcccttagctagacataaagattctccaagtccccccagattaactagaatacagagtgccgattggtgtatttacaatcccttagctagacagaaagattctccaagtctccaccagatcagctagacacagagtgctgattggtgcatttacaaaacttgagctagatacagagtgccgattggtgtattcacaatcccttagctagacataaagattttccaagtccctaatagactcagcagcccagctggcttcacctagtggatctcgcactggggccgttggtgggagctaccctgcccaatcccatgccgt

SEQ ID NO: 92 - DNA, 343 bp, Homo sapien
tgtaaagacaagttcatgctatgttgcccaggctggtctagaaactccttgactcaagcaatcctcccgccttggactcccaaagtggtaggattacaggcataagctaccatgcccagccaagtatctgtattttgaggtcatggttttctatatagctgtgcatgaacccatgtatgaagtagttaatttatgtattcagcaaacatttataagtgcaaatataccaagcatgttgccagaagtatgattgaaacaggcagttacagcccctgctctcatgagcacatggtcagtgtttgaggaagagacacattgactaaccagttgcagggatggtggc

SEQ ID NO: 93 - DNA, 352 bp, Homo sapien
gagaaaaacaaggtgacatcacatggcagggcagaactgggacaacacacccagagccttctgcctctaatagtcctcaatgattgatcctgcaactctactgtactactgcatgtataaagtcatgggagacaagagccctcttttcattccttccctctctagtaaatttacagaagaagaacatccaaaaaacaacaccctgtcattattagattgtatagtgtgctacttgctaaaagtcaaatttacagagatttacttgtgttggacctagcaattccttggtgcatatatttttatgtgtgtgtatgtattttattcattacttagtaaatgacagtgatttggt

SEQ ID NO: 94 - DNA, 367 bp, Homo sapien
actggacatggtggaaactgaagagaaggcttaggactgagccctgtgctcagcaattaacaggcaggaggaggaagaggggcctcggagaaggctggccgtcatctctccacataggcgctcactttgccagaccctccaggaccctatctgaaaggaaaggagggtcaaacgccaaggaaggcaacggggcagggggaggagtggtctcagccccagtccttcccccgccctcggagtccccagagccctttcccaggcgggtgcgctcctgcctccctattcccggactctaaatctccagcaagaggcgggaatggacgaccagagaggtggcaaagggacggtgtgggtttgcccccctcgt

SEQ ID NO: 95 - DNA, 324 bp, Homo sapien
ctggagggccaaagaacaataacatctgcttattatgagagtgttttgagaaagttagccgaagctttagcagaaaaatgctcaggaaaagttcaccagggaagccttcttcaccacacaatgtttctgctcatttctctcatcaaataagagtagttttgcaaaagttttgttgagaaatcattaggcattccaccttaaaatcctgatttgtttccatcagacgtctttttgtttcctaacaaatatttttattccctgaaagtaagaaaatatttttatttcctatttagaaagtctttttatttcctaaaaatctgtaag

SEQ ID NO: 96 - DNA, 359 bp, Homo sapien
agatctgttatgctaaggatacaacctgatgtagaaaaccttgaaatctgaaacacgaaatgggaacacctgggaaggaagcccttgaaaagcctggctttacagactcacctgaaccatttgtgcctgaagatgttacccaactctttcaaatagtactttccctatttgcttccccactacaggaatgcactacagagccctctgtctccttaaggcaacaggaattgccctcaagagctgctgctgcttcatcccccataagtcaggccaataactagggttacatttcagtgcacgtaggctgggggatatgctaggcctggataaggtatgaaaataggattacaaccccaaag

SEQ ID NO: 97 - DNA, 359 bp, Homo sapien
gtttcctttgcctgcaacaggctgctgagcgttttacgtgtactgaatacggcagccggtgtggtgtcaatgctgagaccattgctgcacttgccaaagagttcacgtcttaccagctgcaagcgtcggtgattgctcacggtggcatgatgagcggtaacggtttctataacagttgggctgtgatgatgctcaatgcgctgatcggtaacctgaacctgaagggcggcgtctcggtaggcggcggtaagttcaaggagtttgccgatgggccgcgttataacttgaaaacctgcccaggcatggtgaaacctaaagggctgtgtattgtcgcgcacaaacaaggcgtatgaacaatc

SEQ ID NO: 98 - DNA, 365 bp, Homo sapien
  misc_feature (1)...(365): n = A,T,C or G
tcctgtctcagcctcctgagtaagctgggattacaggaccgtgccaccatgcccagctaatttttgtagttttagtagagatggggttttaccatgttgtccaggctngtctcgaatgtctgacctcaagtgatccacccactcgggcctcccaaagtacttggattacaaggtgtgaccacagcgcctgggccagagaagtttcgataaggagataaaatgtggcatttccgaaagttgaggcccataccaagtgttctctttgtggatacctcttataatttacactctttgttttaggcatattcacataggcctatacatatatcttcctgtgacctgtactgttattggacctgtacagc

SEQ ID NO: 99 - DNA, 196 bp, Homo sapien
ttgaacatgttaaattttattaaaaatatttaacatcgtacaaatattccaatacagttatggtacatgaacactgtaccaaaagcatgatttttattaaactgatgattaaatggaaaaggtcttgcaaatgtccctattttggtatttcttatgttactatatccatatcagcaatttatgtttgcaggagcct

SEQ ID NO: 100 - DNA, 336 bp, Homo sapien
ctggctgaggatctcaaagacattccaccacatttgaatcttaggctggaggacattttcgtattcttcagtcaggaatagcacacttcctttcatgaatagcagcttttagggattatatcatgaggtacaaataaagaggccctcacctggtaaataatccatcatgtatgcattgtgtacagaacacaatgactcttgacctcagcctggcttcctgtgtagaagagtatggtagaacctgagcagagagagggacggagagaaagaaccccagctcagatcatacgcatgattcagactgcaaagcggaactgcttcatgggcatgtggcat

SEQ ID NO: 101 - DNA, 291 bp, Homo sapien
gtttctgagtggccactacatgttatagaaaccatcatcttgtcacacagcacagtctatgaataaaaggctgagttatcactaagcaggagaaaaagcattaaaaagtgtcccattaaaagggacttttaatcaacctaataaactctaattctgctgactttttaaagatctaaggtcattttaatacatgctgaaaagggtcacaattaattctttgatcttttttactcactgttaacttatataatttcagaactacccagaaatggcatattatttccctgtgat

SEQ ID NO: 102 - DNA, 337 bp, Homo sapien
  misc_feature (1)...(337): n = A,T,C or G
tttttgagtactgtcttgctgtgtcgccaggctggagtgcaagggcatgatctcagctcaccgcaaactccacctcctgggcaagcaattctcctgtctcagcctcctgagtagctgggattacaggcacccaccaccacacccagctaactcttgtatcttcagtagagacagggcttcaccgtgttggccaggctagtcttaaactcctaacttcaagtgatccacactgggattataggcgtcnagtcgcacgaccacccagcaccctcgttttataattaatatttataatgccatcattattatcttcaaataaaacaaaactcaaaaataa

SEQ ID NO: 103 - DNA, 256 bp, Homo sapien
ctgggaggtggaggttgcagtgagctgagatggcgccactgcactccagcctgggcgacagagcgagagtccatctcaaaacaacaacaacaacaacaacaaaagatttagcaaaaacaaaaacaagaagatctgggaagcatagtggctcacgcctataatgtcagcattttgagaggctgaggggggcagatcacttaagcccaggagttcaagaccagcctatcagcctggggaatatggcggaactccatct

SEQ ID NO: 104 - DNA, 326 bp, Homo sapien
  misc_feature (1)...(326): n = A,T,C or G
aatgaagagtttataaaacaaaatntctgtggggaattgcaataattagggtaatgtgtcacccaaaattattccaactctccaatttatttacagaaataaattgagacaaattactgtttaagtaaaagtcaatgtgcttttgaagatccaaaagatgtaattttgtagtatagaactcagcacgctactttgaagtcatgtttcttaagatgtctctaaagcagcaattagcaaaatgtgtttgaggaaatgcaaaaacattacacattatgataaaggtgttaaaattgtccaaatttttaaattacgtacatttaaaacat

SEQ ID NO: 105 - DNA, 340 bp, Homo sapien
tctcactctgtcgcccatgctggggtgcagtggcgtgatctcggctcactgcaagctccacctcctgggttcatgccattctcctgcctcagccttccaagtagccgggactacaggcgcccgccaccacgccaggctaattttttgtatttttagtagagacggggtttcaccgtgttagccaggatggtgttggtctcctgacctcgtgatccgcccacctcggcctcccaaaatgctgggattacaggcgtgacgactgcgtccagcctttcattttaattcttacctcctcctcacagtctgtcttttacaaaaacatctatttttaaaaattatt

SEQ ID NO: 106 - DNA, 262 bp, Homo sapien
taactcaagaaagggcttttattgtttttaactcacttcctgggaagttaatttttaaaacactcttatagagtttgctcatcgcttgtgctacattcaaaaacaacgatgccaaccaaaaccctcagtgacagggtgagcatcccacctgggcctacccctgagctttccaagggtgggtccgatcaaagtggtccccccagaccagatgctcaagaaacacttggggatcagtgattggctcttaacttgccttccatta

SEQ ID NO: 107 - DNA, 288 bp, Homo sapien
  misc_feature (1)...(288): n = A,T,C or G
tcctgggctcaagcgatcctcctgcctcagcctcccaagtagctgagactgcaaatatgcaccaccaccaccaccnagttagtatgcacaaatgtcttgctatgttgcccaggctagtcttgcactcctagcctcaagcaatctttctgccttgcgctccaaagtgctgggactacaggcataagccaccacatgcagccaatagccaaacattttaaacaggtgagaattcagatgaatgttagccaatcccttctcaaaaaacctactaaaggataaacttcagca

SEQ ID NO: 108 - DNA, 355 bp, Homo sapien
aaagatggactatattatatctgtaacctaactgaagtggtcaggtacagaataagacactgatgcaagaagcagagaggtaaaatcaggatcaaagacctgagtagaccacagagatggatttaatacacaaattgatgtgtgagtccttagataaaagtagggacagttcatttgttaaaataaaatgtacggtagaatacgaagttacaaatcacgttgcctttccctcaacaaatacatacatacactaacttaactggctttccaccacgcatgatttaatgccaaaattgttacaatggtccagtagatcctttacatcccgggcagtgcatacgttctctgacttgta

SEQ ID NO: 109 - DNA, 365 bp, Homo sapien
tcctgacctcatgatcctcccacctcggcctcccaaagtgttgggattacaggcgtgcgcccgtgcccggcctggaattttttcagattttttttttcatcttttgagatggtcatgtggttttggtttcttattcttttaatatggtgtatgacattgattgaattttagatattaaataagccttgcactcttgggaaatattcctgttggtcataatatatgctttttatatactgctggattctatttcctattattttcttgaggaatttgcatttatatttattagggatattggtcagtagtttttacttcttgaattgtctctgtctggttttggtatcagagtagtactggcctca

SEQ ID NO: 110 - DNA, 333 bp, Homo sapien
tgagatggagtctcctccgtcgcccaagctggagtgcagtggtacactcttggctcactgcaaccttcgcctcccaggttctagagattctcctgccttagcctcccaagtagctgggactacaggcacgcgccaccatgcccggctaagttttatatttttagtagagacggggtttcaccatgtgggccaggctggtctcaaactcctgacctcaggtgatctgcccgcctcagcctcccaaagtgctgggattacaggcgtgacgaccgtgcctgggccgtttccttctcttttgatcattttccctcacgtgtttctgaaggccttccc

SEQ ID NO: 111 - DNA, 359 bp, Homo sapien
ggaaagctcgttcaggggtgaattatggtgctgttggatgtgagctgaatgtggatgaatcaacagtggctactataggccaggcacggtgactcacgcctataatcccagcactttgggaggccgaggtgggtggatcacctgaggtcaggagtttgagaccagcctgaccaacatggtgaaaccccatctctactaataatacaaaacttagctgggcatggtggtgcacgcctgtaatcccagctactcaggaggctgaggtaggagaatcgcttgtacctgggaggtggaggctgcagtgagctaagatcatgccatcgcactcaaaaaaaaaaaaaagaaaatagctattacat

SEQ ID NO: 112 - DNA, 340 bp, Homo sapien
tagaacggggttcacgtggtagcaggatgtctcgttctctgatcttgtgatctcccgcctcggctcccaaagtgctgggattacaggcgtacgatcgcgcccggccgacattttttttataaatacagtttaaagcattttaagaagagaaaaaagtgtcttcgacattcaaatggaaaaaaaaatggtaaaaatcccggctctgagttctcattattcaagttaattaatagtttatatggaaagaagtgaatcattttctcatttcatatgtgcactattggtttgcatttattcagaagctttgtaaatatccaaaagctatggttctctggcaaga

SEQ ID NO: 113 - DNA, 321 bp, Homo sapien
ctgaggtgtctgagtgttaaactttcttttttacaattttttttagtaagaccacacagggtcttccctgttactcaggctgtagtgcagtgttgtgatcatagctcactgcagccttaaacttctgggatcaagtgatccttccacttcagcctccagagtagttgggactacaggtgcacaccactgttcctggtcaggcttttctttgttaaacccaaacaaatagaaacacatttcatgctcgtggattgaaagaatcaatattgttaaaatggtcatattgcccagagcaatctacagattaattgtttttccaat

SEQ ID NO: 114 - DNA, 353 bp, Homo sapien
aaagatgggctatattatatctgtaaagtactgaagtggtcaggtacagaataagacactgatgcaagaagcagagaggtaaaatcaggatcaaagccctgagtagaccacagagatggatttaatacacaaattgatgtgtgagtccttagataaaagtagggacagttcatttgttaaaataaaatgtacggtagaatacgaagttacaaatcacgttgcctttccctcaacaaatacatacatacactaacttaactggctttccaccacgcatgatttaatgccaaaattgttacaatggtccgtaagatcctttacatcccaggcagtgcctacgttctctgacttgt

SEQ ID NO: 115 - DNA, 304 bp, Homo sapien
taccttagaaataatctgtaatgtatatatccagccaggaccagaatagaaagagcttctaaatgaaaaatcttccagattccaagattaccggtgttaggtagatagcacagataaggcaaagccaaagcctctctctttttcttttgagtcggagtcttgcactttcaccggggcttgagggcaatggtgcaatctcggcgcactgcaaccttctctcaggtttaagtgattctcctgcctcctgagttgctgggattacatgtgcccgtcaccacacccggctaatttttgtatttagaga

SEQ ID NO: 116 - DNA, 343 bp, Homo sapien
ttgaacatgttaaattttattaaaaatatttaacatcgtacaaatattccaatacagttatggtacatgaacactgtaccaaaagcatgatttttattaaactgatgattaaatggaaaaggtcttgcaaatgtccctattttggtatttcttatgttactatatccatatcagcaatttatgtttgcaggagccttcagtccaattatagaaatagtcttagaacatagtacctaacattataatgggattcactaagtacaagtctacctacattatcgatgaggctagagaagtcccttttgcccaaccctcatatgtgagaagtcaagaaaagcaatgt

SEQ ID NO: 117 - DNA, 345 bp, Homo sapien
tttttaaaagaaatgggatctggctaattaagctttaaaattttaagacttctcatttttagagcttaataaggagcaaggggatttagagaccacatggtctgatcccaactgtttcttgattcacagaccaggttcaggagtggcgtgttcttgtgtttgtgaagctggttaggggcagagcagggacgggagtcacagggcctctttcttttctcttttttgttttgagagggagtgttgctctgtcacccaggctggagtgcagtggcacaatcatagctcactgcagccttgaacgcctaggctcaaatgattctcccacctcagcctcccaagtagctg

SEQ ID NO: 118 - DNA, 341 bp, Homo sapien
ttttttgagtactgtcttgctgtgtcgccaggctggagtgcaggagcatgatctcagctcaccgcaaactccacctcctgggcaagcaattctcctgtctcagcctcctgagtagctgggattacaggcacccaccaccacacccagctaactcttgtatcttcagtagagacagggcttcaccgtgttggccaggctagtcttaaactcctaacttcaagtgatccacactgggattataggcgtcagtcgcacgcccacccagcaccctcgttttataattaatatttataatgccatcattattatcttcaaataaaacaaaactcaaaaataatata

SEQ ID NO: 119 - DNA, 327 bp, Homo sapien
  misc_feature (1)...(327): n = A,T,C or G
cctgggaggaagaggttgcagtgaacgaggntggcgccactgcactccagcctgggcgacagagcgagagtccatctcaaaacaacaacaacaacaacaacaaaagatttagcaaaaacaaaaacaagaagatctgggaagcatagtggctcacgcctataatgtcagcattttgagaggctaaggggggcagatcacttaagcccaggagttcaagaccagcctatcagcctggggaatatggcggaactccatctctacaaaaaaaaaaaaaaaatacaaaaatttaccaggcgtggtgatttgtagctgtagttccagctactc

SEQ ID NO: 120 - DNA, 335 bp, Homo sapien
aaaagaagagtttataaaacaaaattcatgtggggaattgcaataattagggtaatgtgtccacccaaaattattccaactctccaatttatttacagaaataaattgagacaaattactgtttaagtaaaagtcaatgtgcttttgaagatccaaaagatgtaattttgtagtatagaactcagcacgctactttgaagtcatgtttcttaagatgtctctaaagcagcaattagcaaaatgtgtttgaggaaatgcaaaaacattacacattatgataaaggtgttaaaattgtccaaatttttaaataacgtacatttaaaacatattcatg

SEQ ID NO: 121 - DNA, 344 bp, Homo sapien
tctcactctgtcgcccatgctggggtgcagtggcgtgatctcggctcactgcaagctccacctcctgggttcatgccattctcctgcctcagccttccaagtagccgggactacaggcgcccgcacccacgccaggctaattttttgtatttttagtagagacggggtttcaccgtgttagccaggatggtgttggtctcctgacctcgtgatccgcccacctcggcctcccaaaatgctgggattacaggcgtgacgactgcgtccagcctttcattttaattcttacctcctcctcacagtctgtcttttacaaaaacatctatttttaaaaattatttact

SEQ ID NO: 122 - DNA, 345 bp, Homo sapien
taactcaagaaagggcttttattgtttttaactcacttcctgggaagttaatttttaaaacactcttatagagtttgctcatcgcttgtgctacattcaaaaacaacgatgccaaccaaaaccctcagtgacagggtgagcatcccacctgggcctacccctgagctttccaagggtgggtccgatcaaagtggtccccccagaccagatgctcaagaaacacttggggatcagtgattggctcttaacttgccttccactaactctataaaagtgttcttaaaaacagtaccgagtaactttttaagcctcgggccacactgccttagcccagaggagccgggg

SEQ ID NO: 123 - DNA, 322 bp, Homo sapien
ggctgacaagattttactaggtatggctgagatgctaacaaatgtaactttacagtagtaatgtatgcatatcatagagtgctctacttgaagatgactctgtatcttcccttagaaccttaggaaggagcgctacatttgatctttctacactctgcagctgtgggacctataacatgttttgctgccattcattcatagtatgcaagatgagttttatatagtacctaggaaagtgcctggtacatagtaggcactcaataaatgctggttggctgactgattgaatgaataaatgcatgaatctatggtttgagtcaac

SEQ ID NO: 124 - DNA, 354 bp, Homo sapien
aaagatgggctatattatatctgtaacctaactgaagtggtcaggtacagaataagacactgatgcaagaagcagagaggtaaaatcaggatcaaagccctgagtagaccacagagatggatttaatacacaaattgatgtgtgagtccttagataaaagtagggacagttcatttgttaaaataaaatgtacggtagaatacgaagttacaaatcacgttgcctttccctcaacaaatacatacatacactaacttaactggctttccaccacgcatgatttaatgccaaaattgttacaatggtccgtaagatcctttacatcccgggcagtgcatacgttctctgacttgt

SEQ ID NO: 125 - DNA, 353 bp, Homo sapien
tgacctatgatcctcccctcaagctccaaagtgttgggatacaggcgtgcagccgtgcccggcctggaattttttcagattttttttttcatcttttgagatggtcatgtggttttggtttcttattcttttaatatggtgtatgacattgattgaattttagatattaaataagccttgcactcttgggaaatattcctgttggtcataatatatgctttttatatactgctggattctatttcctattattttcttgaggaatttgcatttatatttattagggatattggtcagtagtttttacttcttgaattgtctctgtctggttttggtatcagagtagtactggc

SEQ ID NO: 126 - DNA, 319 bp, Homo sapien
tgagatggagtgatcctcgtcgcccaagctggagtgcagtggtgcagtcttggctcactgcaaccttcgcctcccaggttctagagattctcctgccttagcctcccaagtagctgggactacaggcacgcgccaccatgcccggctaagttttatatttttagtagagacggggtttcaccatgtgggccaggctggtctcaaactcctgacctcaggtgatctgcccgcctcagcctcccaaagtgctgggattacaggcgtgacgaccgtgcctggccgtttccttctcttttgatcattttccctcacgtgtttc

SEQ ID NO: 127 - DNA, 335 bp, Homo sapien
taattaaaaggagaaatagttataatacaatgtgtttaaaattatgattcacactctagaaaccaatttggcagtttctttcaagattaagcatgcaaataccatacaacccagtaatgacactcaggtatttgtcccagagaaaggaaaacatagatttttacataaaaacctgtacacaaagctttattcataatagccagaactggaaacaacccagatgtccttcaacagcatgattccatgtatagaacatttttgaaaagccaaaatgtagacatggaaaacagattagtgaaggccatgaagacggatgggcacgtgggaggagggtg

SEQ ID NO: 128 - DNA, 357 bp, Homo sapien
aaagatgggctatattatatctgtaacctaactgaagtggtcaggtacagaataagacactgatgcaagaagcagagaggtaaaatcaggatcaaagccctgagtagaccacagagatggatttaatacacaaattgatgtgtgagtccttagataaaagtagggacagttcatttgttaaaataaaatgtacggtagaatacgaagttacaaatcacgttgcctttccctcaacaaatacatacatacactaacttaactggctttccaccacgcatgatttaatgccaaaattgttacaatggtccgtaagatcctttacatcccgggcagtgctacgtttctctgacttgtata

SEQ ID NO: 129 - DNA, 347 bp, Homo sapien
tttttggagtagaggaggatgtatttattatttaggtgcaccacccagtcagattaacatccaaaggactgagccctgaacaaagagtcaggttaccttttaagcatttcatggggtgagaggggagatctgtgcagggggaagcttactacagaagtgagaaacaaagacagttattcagttgagacatgtattacatcatttcttacttttcaaggaaaaacatgttttacaacttgagtttatctgtctagtgaccatgcagctgcacagctgggagaaacaggtgtcttcacaatgcctggggaaaggtgagagataaggcttcactagcatacagtacggaa

SEQ ID NO: 130 - DNA, 266 bp, Homo sapien
tggaatggaatggaatggaatggaatggaatggaatggaacagaatcgaatacaatggaatcaactggaatagaatggaatggaatggaatggaaagcaatggaatggaatcaatccgggtggaatagaatggaatggaatggagtggaatggaatggaatggagtggaatggaatggaatggagtggaatgaaatggaacggaacggaatggaatggaatggaatgggaatcaacccgaatggaatgtaacggaatggaatagaa

SEQ ID NO: 131 - DNA, 309 bp, Homo sapien
ctaacatgatagaatgttttgatgaaaaacaggacccagtagaattaagcaaagaagaaaaatgtactgaaatttttacaaatcagtattaaaatattttggtagtttgtttcaatacttaatctttaaatctttctaattgtgtttatcaacacagatcagatttatcacagatctttattttttccattatattagatttggcttctgttgaataaaataaacttatgatgaaaagtcttataaaaaaacatgtcttttgttacctttgcaaaatcaagactccgaatccagtctaatctgtctcct

SEQ ID NO: 132 - DNA, 243 bp, Homo sapien
tttttttttttaacaactcatcttttatttcagactcagaaaattcagtccaggtctctgaataggtgttcaatagaaaacacacactcacacactctctctatatagatgttcaatagaaaacacacacactctctctataggtgttcaatagaaaacacacacacacactctacaggtgttcaatagaaaaaacacacacacacactcacactctctcttcctctttcccgcaacgtgctg

SEQ ID NO: 133 - DNA, 361 bp, Homo sapien
gagcgcgcaggaggcttctgctgagcagagggccggccgcgcgtcgttgcgctgggaaggttgaggattgggtcctttctggtctggtgacgttcccgggcatccgtggcctcggcatggagagaaaccaaccagctttgctgtctggcttgcggttccgctcctctgtaaggggggcgagattgcccgttctcctcgaagaatgccgttacttgaggcccaagtacggtgcgggtgcttgggtagggtgtttctctgcttcggaaaccaagccctcttggtttgagagggcagtgagccccttcggatttcctcaccttgtactgggctttctgccgggcagggaaggttaatattagaa

SEQ ID NO: 134 - DNA, 121 bp, Homo sapien
agcagagatcctcttttcccaggaatagccagtagtcaatgttggctactcaacctcacctctgggtcaaacgattctctgcctcacttcctgagtagctgggattacagcacatgccacc

SEQ ID NO: 135 - DNA, 288 bp, Homo sapien
  misc_feature (1)...(288): n = A,T,C or G
ttttattctatgacacttcttattcaactttcagatcacacnaatccaactgctgttcacagtaggagatgcgttctctgtagcataganaganaagaaaatgtcctttagcattgaaaggtaagctttcatattatctctgctcaggaaaaatggtgtgganaattaaaggaaaaaaatacagttaattcaggtttccaccagtaaatttttggacaaacttagagaacagtgatatttctttttatgagagtgaggagaaggacttgaatagctggaaccttttct

SEQ ID NO: 136 - DNA, 255 bp, Homo sapien
ttgccatttttttctctttattataaaggttatatatgaacaagaatatataaaatatatatgtataaagagtattttaaaagtgaacatccatgcaatcaccacccaagacaagaaatagaacattgccagcatcccagaagcaccaggtgccactccccaatcacattgctgtacttctccacagaggaaatcattattctggttctggggacagcaaaacacttgcttttctttacagttgtatctcatata

SEQ ID NO: 137 - DNA, 363 bp, Homo sapien
  misc_feature (1)...(363): n = A,T,C or G
agaacagaagagaagagagaagaaagaataagaagtagtgttcctgagcatctaaaactcgtacaagtttaggctactagtcctagaagtccaaagcactgaccttctaacacagcagagatcattattacaccctacaaagagaagacatttctttatggcaccacagattagcacttaattccttccatacagaatgcaagtgccctcagtgacaacagtatttggattgcaggggagtctgggtgtctgttatcacagttgttataaaccacaacagggagctctgtcccccttgcctagtgagattcaaaagctggggaagctgatgcttagacctangttcagtttcgtctttctcta

SEQ ID NO: 138 - DNA, 96 bp, Homo sapien
aatgcaggatattccacctccggttaaggatggaagagagtatctgtcccacgaatcagcggtaaaggttgacttaaatcgaccagtaacaggtgg

SEQ ID NO: 139 - DNA, 346 bp, Homo sapien
taacaaaccactggcaaaatttagagaacctgttgccaaagacacgcatgagcatggcaggtctcctgggcttgtccttgaagcagcgttctggaggcttctgtgcttgggaggcgagaggcccgcaaggtgggagtctctgtgccagagcacttctgtgaaggtgacaccgcatggtctcagatgcattgccgtgcagctcctgtgactgggcacaccggaagacagtggcaaaggtgaataaccacagcctctgctttgccacctggtcacagccgcagttatgaattctgtgagcgtcaccacaagctcgtctctaccccatttgggtgtctgacttttaatg

SEQ ID NO: 140 - DNA, 276 bp, Homo sapien
atactggctaacccaaagcctctctaatgcttttagaagcttgactctcttcaaagtcctctgtctagatgtactccatttatttgcccttccagatctccccctctagtctattccatcctcctctgttcccaggaggctgacctccagaactgcatcaaggagctcccttgctctctgtcttcaagttacttgggccactggagaatcccagcaggagacagatagggggagcagaaaaacgttggggttatgaatgcccctcactgcctctta

SEQ ID NO: 141 - DNA, 317 bp, Homo sapien
ttgctcatcagttatcgttagtgtccgtgtattttacgtgtggcccaagacagttcttcttgttccagtgtggcccagggaagccaaaagattggacactcctggaggtgcagcacagtatctaacactacctcaatactttttccaccgaactacgtaagaccagccacagcccagaaaaagaacttcccacaggaaaaggaggaagaggaaaatttggaggaaatctacgaggaggggattggccaaccgcaagtcagcatgggatgctggacacctggccgagcgagaaacagaaacgtgagaatttggaagat

SEQ ID NO: 142 - DNA, 313 bp, Homo sapien
  misc_feature (1)...(313): n = A,T,C or G
gggggatcagaganggagctcatatgttgccaggctggttgcgactcctgggctcaagtgacctgccaccttggcatctcaaaatgcggggattacacatgtgtaatatttttattggcactattttccacatattctggaaattttatttggatttcttttttttttttttttgacagagtcttgctgtgtcacctaggctggagtgcagtggtgcaatctcagctcactgcaacctccaccttctgggttcaaggatttctcctgcctcagcctcctaagtagctgggtttacaggcatgcgccaccaggg

SEQ ID NO: 143 - DNA, 325 bp, Homo sapien
tttccatgaggaataaatttgtgtttatataaaacctgcagatgaatattttttttaacagcatgattcacaaatgccaaaaacaatgcaaatgcccttcaacacatgaatggattaacagaccgtgatacatgatataatggaataatacttagcaataaaaaaaggtgttctgggtagtgtgatgaaatcctatgccattcagccccattttccccagagcctgaatactttcttgtctagtgcatccacagtttatactacctgcctgttagtcacttagtagtctttgatgaaatcctatgccattcagctccatcccgcc

SEQ ID NO: 144 - DNA, 357 bp, Homo sapien
ccaggagtttaagaccagcctgggtaaagaggcgaaacctcatctctactaaaaatgcaaatattatccaggctgtgtggtgcacactacagtcccagctactcaggtgggaggttcacttgaaccagtgagacagaggttgcagtaagctgagattgtgtcactgcactccagtctgggtaacagagccagacgctgcctcaaaataaataaataaataaatacataaataaaatactaatgaccaagaaataaatacgaaaatatttaatatttcatacaaaaatatattcaatctcacaagtaatcaaaacatgccaattaagacaccagcaagatatctgtgaggctagtgga

SEQ ID NO: 145 - DNA, 326 bp, Homo sapien
ggttatagggccagtttcattattgtctgtgttaaatgccgccccaggagaatgtgcgttccgcagtttgagaagcttgaagttaagatgctggccttggagtcggatcgttctgtccagttctgattctgcccacttactggctttgattttaaccaacttctcttgtcctcggtagaatcctgtgtttttaatcattatgtaatataccatacagcattattatatagtacattgcagtattataaataatttggaaagttaaaacaaattcatagtcccattgcagaaacacagtattgccattttagtgcactacagcaatt

SEQ ID NO: 146 - DNA, 353 bp, Homo sapien
ttcacagagccaagccttgtccatgacgcatcactaatcatgtgtaaaagtagggctttgtgcttgcttcggcggcacatatcctaaaattggaacaatacggggaaagttagcatggcttctgcataaggaggcagcacagatctttgaagcattccatattttgtgcagtcactggaaggtcatttgactatttgctgactagctctgaggaaatagtgtgaatcaaagcaaaatgggtgccacccaaatattgaaattgtgatttgtgctgcaaaaatagtcatgtaagatggtctgtgagatgacttagacctgaataacatgttcggtggcaaaatatattgttaggt

SEQ ID NO: 147 - DNA, 352 bp, Homo sapien
tcaggagttcaaggcagcagtgagctatgactgtgccactgaaaccaacctgggtgacagggtgagactctgtctctaaataaacaagcaagctactacttagatcagccagtttaagactaactaggttggttggtaacataaaaatgatttcttaatagaatatccagtgacccgagcaacttgcataactcctaccagtgaaactaacctttaaaaaatgttctcagtacatgaaatgtattcataagatacttctaaaaataactccccactgtaattccctccttatgcatctgggcagagatgtcatatttccttcacaaagctttcttttatgttgcaacagtaa

SEQ ID NO: 148 - DNA, 205 bp, Homo sapien
atccacccgctcagcctcccaaagaactgggattacagacatgagccaccacacctggctaaaactatatatatttatcatatacaaagtgatactttgaaatatgtattctctctggttttgtgtatgttaaatattctccagataaaaaagtgttgggctttttttttttttttttttttttttttagaaaggatctcgctct

SEQ ID NO: 149 - DNA, 361 bp, Homo sapien
  misc_feature (1)...(361): n = A,T,C or G
tgccggtcgtcgcccgatcacctaacaacagtacgcgtccgtgggctgaatcctcgcgttgcagcgcccgtgccagtgtgganaaaaaggggttggaaatgtcaggcactactaaaccgtaagtcagggtattacctgaggccagtgcgcgggcaatgtcgttcggccggtaacccgtttgttcgatcgcggccagtacccgcaaacgggtggcttctgccagggccgcgggctnttgttaatcacataactgacgaccgcgaccgaggtgcccgctacgcgagcgtcggcgcgggtgaatacgccggggggattgattatccaagttgggttcctgtacgccctgattacgccgcgtcct

SEQ ID NO: 150 - DNA, 281 bp, Homo sapien
agagggcaaaacgataacaactgcaaagcgtgtgcaatgatctacactttgttatccaaaataatagtcaatacctaacacaggaattttctaatttgttctgtaattttcttataaactaaaaataagacctaaaggcttgactggactcaaattaaatatttttggcaagaatagtctaactaggtggtgttgtataccttattttgtaccataataagaagcatataatgcctggaaacattatcatcagtaatactaagatttattactcagcaaat

SEQ ID NO: 151 - DNA, 196 bp, Homo sapien
attatgtcattctctaagaatggagatgattgattattctattctttgaccaactaaaaccatgacaagctctgtcatatatgtgcccttataatctcaggcctaatgaaaagtgtaattaatccaagagggaattttcacaagtgactgtctcaagattgatttagaaaactgttaagaagttcgtatgtgtgta

SEQ ID NO: 152 - DNA, 274 bp, Homo sapien
ttagcattacatttcatttattaatcttttatttttcattacattttagtacagcaaagcaaatacaggtaaacatcagtattcttcatacaatagcagacagaaagggaagccagccacaatttagagtgccttttcagttgttgttatatttgtttgttagtttatcactttaagctagattattttactggcgaatttttttcaagctttcaaggaaaagcctatatctatagctatatgctatattcttttctagataatgcaacaagat

SEQ ID NO: 153 - DNA, 442 bp, Homo sapien
  misc_feature (1)...(442): n = A,T,C or G
gagacgganttcacttttgttgccaggctggagtgcaatggtgcaatttcggctcactgcaacctccgcctcccaggttcaagcaattctcctgcctcagcctcctgagtagctaggattacagtcatgcaccaccacgcccagctaattttgtatttttagtagagatggggtttctccatgttggtcaggctggtcttggacttctgacttcaggtgatccgcccacctcggcctccaaaagtgctgggattacaggcctgagccaccacaccctgccccttcacagctttttaaattgaactattcaatcattcattcatttcacaaatgttgaggcacctattatgggcttnggaaccctaagggctaaattgttacaatgtttgggggtaaaacnaagggntctttttnaacccttngaaggtttataggtctaggt

SEQ ID NO: 154 - DNA, 365 bp, Homo sapien
  misc_feature (1)...(365): n = A,T,C or G
gcacaaaggagaacacatagtaggcatatgatacatatatgcagagtagaataaataaagcccgctcaatttcaacataggatttgtgccatgctgcataatttaacatggcagtagtatttcattccacaaatattttggagcatagactctgcgtgaggtgtgataccagggttggagctccagcaatgaaacaaagcagacaaggtctctgacttcatagggcttgtcagcaattaataccctagagaaggggataagtaagctatgggcatgcagggcaccattttaggcacaacgtcttgtttttgtaccctctccatggaacttaggaatggggtttttnccattgtttaaatggcctg

SEQ ID NO: 155 - DNA, 434 bp, Homo sapien
  misc_feature (1)...(434): n = A,T,C or G
atataaatattcctgaggagctactcaagtggtgataaggaatgccaatttaattagcgttgctgcttgtggcaggnatatccagaagtgtgcttcanagcacagagccctgtgactttgcttttatctcctggagagcttgaagttcttcctgctcccattggccaaaaagtttctcatcctccctgtactttcctccctgggaagtcatcaccatgatagcacacacatgaaggccagtctttgtgaccgtggtgaagaaaacaactctcccctgatggtaactgacaagggtgcaatctgtccagggcaggtggttatagggaagtaaaatagagtctagtttggttcccagtgacttcagatccccaaggcgtnggaggacttcttgtccagccttcacggagttcaggtctgttttttacccaacttga

SEQ ID NO: 156 - DNA, 214 bp, Homo sapien
  misc_feature (1)...(214): n = A,T,C or G
agantcccaggnnntncccncctcnangnggcngtctnnctnnaanaaggnccannanaccnccanangaagacaccccngggaaaccnncctggcgggatggaagcagattatncngccaccattccaggncttnnngtngcacganaaancagggnctnatcaccnnacagtngtnnagcctncccccnaggtccanngcanttgtcccagc

SEQ ID NO: 157 - DNA, 357 bp, Homo sapien
ttaacatctatgctgcatcttccctcactctcttcaactccagtaaccttctcgtctatagcggcctccacccatgaccatggaaaggagcttcccagaccctggaccagctccatgactgaaatcctagctcccaggcttcaactctctgacctataaccttagcccctctcaacttttcttccttactccaatttcctctgttatttcatcttcagaggcaagatcctattattctttttaaaatatatatttttttttattgagatgggcatcttgccatggtttacctacggctagtcttcaaacccctggggcttcaagcaaatcctggcttgcctctttctcccaaagtgt

SEQ ID NO: 158 - DNA, 355 bp, Homo sapien
  misc_feature (1)...(355): n = A,T,C or G
ccagcctggccaagatggtgaaacacggtctctactaaaagttaaaactacaaaaattagccaggcatggtggtgggcacctgtaatcccagctatttgggagggtgaggcaggagaatcacttgaacccgggaggtggaggttgcagtaagccgagatcataccactgcactccagcctgggtgacagagcaagactctgtctcaagaaataaaataatttaaaataaangaggtaagcatgctngctcacacacgtaataccacactttnggagaaagaggcagcaggattgctttgagcccagggggttttgagactagcgtaggtaacatngccaagntgcattcttcaat

SEQ ID NO: 159 - DNA, 244 bp, Homo sapien
  misc_feature (1)...(244): n = A,T,C or G
ttttgtagagacggggtttcaccatgttggctaggctggtctcaaactcctgacctcaggtgatctgcatgccttggcntcccaaagtgctgggattacagggtgagccactgcacctggctctgaaatgtattcttaataccttatttttgtggggaaaagttcctgtggcccacctttatttagttgaattttttttttttttttttttgagacagggtctcactctgtcacccagaccgga

SEQ ID NO: 160 - DNA, 341 bp, Homo sapien
  misc_feature (1)...(341): n = A,T,C or G
ccaggaggtcaaggctgcagtgagttgagatcataccacttgcactccggtctgggtgacagagtgagaccctgtctaaaaaaaaaaaaaaaaaaaattcaactaaataaaggtgggccacaggaacttttccccacaaaaataaggtattaagaatacatttcagagccaggtgcagtggctcaccctgtaatcccagcactttgggaggccaaggcatgcagatcacctnaggtcaggagtttgagaccagcctagccaacatggttanaccccgtctctacanacaaaaaaaanaaaaaaaactcgtgccgatttcctnccagcccggggggtcccct

SEQ ID NO: 161 - DNA, 367 bp, Homo sapien
  misc_feature (1)...(367): n = A,T,C or G
aaaaaattcagagtccagaggcatctagtaaagtggacggggtgtngggaaggccctgcncnaatctgccttctgctcttctcatgcgacatctcaacccagagcaggaggccccagggganaacccagcacctgccacagggaatcagggctgagaaaaggccggcatttcggctttcctgccgaatcatttccagctgccctggtcacctaagtgacaagatgatgcatcaatgtcaataatgctggaagggactatccacagacacggcgatattctccccagggagggcatgaggatggccttcgncagggcagctgggagccacttgaggaatttaaggggccctctttcaggatctctgtn

SEQ ID NO: 162 - DNA, 399 bp, Homo sapien
  misc_feature (1)...(399): n = A,T,C or G
ggttgcagtgagctgagatcgcaccactgcactccagcctgggggacacagcgagactccggctcaaaaaaaaaaaaaaaaatatatatatatatatacacacacacacacacacacataaatacatattcattgggaaggggagacagagatcctgaagagggccccttaattctcagtggctccagctgcctggcgaggcaccctcatgcctcctggggagaatatcgccgtgtctgtggatagtcccttccagcattattgacattgatgcatcatcttgtcacttaggtgaccaggggcagctgggaaatgattcggcagganggccaaattgccggcctttttctcagccctgattccctgtgggcaggtncttgggttttnccccctgggctt

SEQ ID NO: 163 - DNA, 348 bp, Homo sapien
  misc_feature (1)...(348): n = A,T,C or G
aaaaagtaaaacaaaaaacctttaggtaataatgagatctctgaagaaaaatattgtgagggaatngaaaggaagggagttgggtttgggatggcgagtaattgagagttagtatggtcagcaaagttctctgagtaggtatatgaatgatgtgatgtaacacaccacacgcagttctatgcaaagcatttcccagatggagggaatattaaatataaagtctctaaggcagaaaatgcttaggtcttaggaagataaacaagagtccagtgtatggctgggaggaaaaataatttaaggaggggaggagtgtccaaggggagggagntccaggaggacatgggacca

SEQ ID NO: 164 - DNA, 439 bp, Homo sapien
  misc_feature (1)...(439): n = A,T,C or G
tgatcatgttatttttctgaaacctaaaattagttgcaacttcctagagattttcaaggatttctagactctttcttctgacatataatttaaaattttaaagacaaatatggttctatttgttcctactatatttcatcttactgaatttaagctattgcttcaatctacaaaaggaaaattatctaaattcttcaattctcaaagctgaaaaaatgtacaataatataatccaatccccccttttttcagggatagagagaataaggcctgtgtatattaactgagctacttcccaccagtatacagttaggtgggctcccattgaggtttatgctataggggaattttcccattaactccatattggatttggtntattctggtccctttggaggantaggaggancctttcccnatatttttccaatggntaacc

SEQ ID NO: 165 - DNA, 194 bp, Homo sapien
tttttgggggtgaggcctaaaaagcaggggcttcatgcagatgcagcagggacactcccaccaagccatcctgggctttggtcatgggtcccacgccaagcacttggacaagtctgttaggaaagggggtggcacatgctcttccgccatctggaaaaacatggagatccaagggagggcggaaagggtccttg

SEQ ID NO: 166 - DNA, 125 bp, Homo sapien
ccagatggcggaagagcatgtgccaccccctttcctaacagacttgtccaagtgcttggcgtgggacccatgaccaaagcccaggatggcttggtgggagtgtccctgctgcatctgcatgaagc

SEQ ID NO: 167 - DNA, 108 bp, Homo sapien
attcatagtttctcagaaaacatttcctgcatgggagaaaggaaacattgtgggtaggttgcaggaacccataccctgaagcctctctagcttttaaatcacaaataa

SEQ ID NO: 168 - DNA, 370 bp, Homo sapien
  misc_feature (1)...(370): n = A,T,C or G
ttgggattacaggcgtacnccngagcccagcctgtatttttagtagagaccgggtttcaccatcttggccaggttattcttcaactcctgaactcatgatccatccacctcggcctctcaaagtgctgggattacagacgtgagccactgcgcccggcctacaatatctattataatgcacttctctctttttttttttttttttaacactaagaagatatttcaggctgggtgtgggtggctcccatctgtaacatctgcaatcctaggcattttggggaggctgacacttaagcctcgggagttcaaggaccagccngggcaaacatagtgaggaccctctcctctatggaaacaataaaataaaaca

SEQ ID NO: 169 - DNA, 376 bp, Homo sapien
  misc_feature (1)...(376): n = A,T,C or G
gaacaccgagtcacggagatgcaggtacagacaggatctgtcctccacacagatgtgacgttgactggtgccccagctggcaagtgcaaagtggaggagaaagagaaaaaagagaagtcagcccttacactgagccttgaggtggagtggttacacatgggcactggccggtcagattgacactaaccataagaaccaggctgtccgtgcgggcacataccagcccgtgcccgggagcagggagccttggcagttcacattcatttccagttttcttttcttgatttgctcttgttgcatgcgtgtttatttttccccttaccacccccaacacatccttggagtttttaggaggaacnttgttccntagggagat

SEQ ID NO: 170 - DNA, 356 bp, Homo sapien
agataaatgtttaaaatatcatctcctatgacaaggttctctaaaagctcaaggatgtgttgggggtggtaggggaagataacacgcatgcacagagcaatcagaaaagaaaactggaaatgatgtgactgccaaggctccctgctccgggcacgggctggtatgtgcccgcacggacagcctggttcttatggttagtgtcaatctgaccggccagtgcccatgtgtaaccactccacctcaaggctcagtgtaagggctgacttctcttttttctctttctcctcccactttgcacttgccagctgggggcaccagtccaacgtcacatctgtgtgggagggacagatcctgtc

SEQ ID NO: 171 - DNA, 333 bp, Homo sapien
  misc_feature (1)...(333): n = A,T,C or G
gatggagttttgctctgtcccccaggctgaagtgcagtggtgcaatctcagctcacaacaacctctgcctcctgggttcagtgattctcctgcctcagcctcccaagtagctgggattacaggtgcccaccaccatgcctggctaatttttgcatttttagtagagatggggttttgccatgttggccaggctggtcttgaactcctgacctcaggtgatctacccgccttggccttcccaaagtgttgggtttacagggcatgagccaccatgcccggcctgcacagcatntttctttcttgctgtttcctgttttggtttgtttgaacaac

SEQ ID NO: 172 - DNA, 399 bp, Homo sapien
  misc_feature (1)...(399): n = A,T,C or G
ggggttaatgatttgggaataatctgatttacttttgaagatgaaggatcaaaattgacagacccttaaacttaagttttgagctttgacccaattgttgtctctctctggttcccagtgatgacgagaaaggccgacagatgtggagaaaatatctagaacgggaagacagtaggatcgggggtaagcgcatgaaagggaagatgcctgttttcactgttgcctgctcttgcctgagtggagcatgaaaagccctaagaatcactctcccggggaagcctgtttctgcctgggtgttcaacaaagcaaaacaggaacagcaagaaagaagatgctgtgcaggccgggcatgggtggctcatgcctgttaaacccaacactttngggaggccaaggcgg

SEQ ID NO: 173 - DNA, 385 bp, Homo sapien
gaaaaagttcccacgtggtcaactggacaagcagggcaggcaaggcaagccagggctggcaaatcccacccatctgcttcagggagttactgtgagtttagtatgtgtgtgcatttccactaaagaggctgacactaaaggtttgagacacacacatacagaacagtgggaaaacactgattttggagacaggtcaaatgctcaacacccccatttattggctgagaggccttgggagagtttcttaactcctctgagcctgtttcttcttcatgtgaataggagatctagtaatacccaactttgcttaggttaattattgagggtttgaacaaaatgtattacaccttgtcttagctccagagcccagggacacgttaaataa

SEQ ID NO: 174 - DNA, 397 bp, Homo sapien
  misc_feature (1)...(397): n = A,T,C or G
gtatttttnttagagacggagttttaccatgttggtcaggctggtttccaactcccgacctcaagtgatccacccgcctaggcctcctaaagtgctgggattacaggcatgagtcactgtgcccggctgacaagtgtatatttaaaagctcataaataatccaggtgacttgtgctaagtcattaagtgctactgaaactcagaggaaggagagaacactgaggcaataagaggagatttcctggaggtggacagatagaaattccactcattcctcaaagatgagttccctcagtgttttgttcagactcacatgagtattaaactggggttatatgctgctgttacatccacatatgcactgctttatcctcttaacttttattgagtatttacg

SEQ ID NO: 175 - DNA, 214 bp, Homo sapien
cgattaactgccgcagaaactcttccaggtcaccagtgcagtgcttgataacaggagtcttcccaggatggcgaacaacaagaaactggtttccgtcttcacggacttcgttgctttccagtttagcaatacgcttactcccatccgagataacaccttcgtaatactcacgctgctcgttgagttttgattttgctgtttcaagctcaacacg

SEQ ID NO: 176 - DNA, 312 bp, Homo sapien
  misc_feature (1)...(312): n = A,T,C or G
aaaaacacattaccatttacatttacattagcatccaaaaatgtgaaacaggtataaatctaacaaaatatgtaaagatctatatgaggaaaactacaaaatgcaggaaaaatataaaagaagaactaaataaaaggatagatatttcatgttgatgaacaggaacactcaatattgtaaaggtatcagttcttccaaatttgacctacgaagtcagtgctatcccaaacaaaatcccagtaagttattttgtaggggttgacaaactgattctaaagtttacataggagaggcaaaaatcccagantaatc

SEQ ID NO: 177 - DNA, 355 bp, Homo sapien
  misc_feature (1)...(355): n = A,T,C or G
tgtggatattcangttgtcccagcaccatttgttgaaaagactatctttgctgtatcatattatcattgcacctttgtaaaaaatgtctctctatatgtctgtttctgggggctctattctgttctattcatccacttgtgtattctttcacaataccacactgtcttgattcctgtagctncagagtaagtctcaaagtcagacagcggcaggcctctggctnctgttttcctccttcagtattgtattattgattattctggggtttttgcctctctatgtaaactntaggagtcagtntgtcaancccnacaaaataactnactggggggtttgtttgggganagcactgac

SEQ ID NO: 178 - DNA, 283 bp, Homo sapien
  misc_feature (1)...(283): n = A,T,C or G
caggcttggcagttggagtagatgctttaaaaaaaaaaaaaaggaatgatacgctctaccttgcaagtttttcagagagacaggacttgtgtgtgtgaaaagtgcaatagagtttgcaaggcagcatacagtcccattagcatttgtattgcttcatatttctagactaagtgatgttgcagaacaccagtattctgttctatacaatccgttcacatttctaagagcatgagcgtntcatttgtcttttcaattgtttcccactttctctgcatacacaata

SEQ ID NO: 179 - DNA, 270 bp, Homo sapien
ccagcaagtattgtgtatgcagagaaagtgggaaacaattgaaaagacaaatgaacgctcatgctcttagaaatgtgaacggattgtatagaacagaatactggtgttctgcaacatcacttagtctagaaatatgaagcaatacaaatgctaatgggactgtatgctgccttgcaaactctattgcacttttcacacacacaagtcctgtctctctgaaaaacttgcaaggtagagcgtatcattccttttttttttttttaaagcatc

SEQ ID NO: 180 - DNA, 359 bp, Homo sapien
tacctttccccctggtaactagtagaatactgacatatagtgcatatttattaaaataatgaataaaaaatgaattaaagagcagttaaagttcccagatgcttcactgtggacatgctgatgtttcgttatagttcttattctcagggagcattatcctcagcccctgacattcttccactttcaagtttttgagtagtaatttggaagatagatttggggaaagatcctgagatctgtacctacttatccaactatcaactcgacatgaccactttcatgcctaataggtttcgcagttttaatgtcttacctcttcctttctcattcttcacattagtcaatggccgtgctcccac

SEQ ID NO: 181 - DNA, 403 bp, Homo sapien
agagaattctccttgccctctgaacttcaggatgtttttagacattgctctgttctaaagcttaaggatgtgtttttcttcatactctaacgcaaaggataaaaatgtagttatagccaagttacaattagaagcgaccagtagaaattcaaggatgttctcacagccaaattgcttcattttcacttcttgttttctgatgaaaaattatcagtgctcttgggatttatggaagcagtcagcaaaatgtgttataaacaccttcttcaaagacagccccaagagactgcaaaatttctctctctggataatcctctgtatgccagttctggaaccaatcttgggagccactctggacaccaaatggatttcccatcctcccaggaggcccagatgggtgagc

SEQ ID NO: 182 - DNA, 376 bp, Homo sapien
  misc_feature (1)...(376): n = A,T,C or G
aacccaaaaaagaaattaagaagctccctaaagacgcaaagaaatcatctactcctctgtctgaagcaaaaaaaccagctgctttaaaaccaaaagtacccaagaaggaagagtctgtcaagaaagattctgttgctgccggaaagccaaaggagaaggggaaaataaaagtcattaagaaggaaggcaaggcgcnagagntgtcgctgcagctgtcggcactggagccaccacagcagctgtcatggcggcntggnaatagcagccattggccctgccaaaggaactcgaagctgaggaggtcccttatgtcatctcctggaggatcttaaccaaggactttganagagttaaaaggcttgaagaggtcgntgtt

SEQ ID NO: 183 - DNA, 394 bp, Homo sapien
  misc_feature (1)...(394): n = A,T,C or G
ttttttttncggattagctccatctgaggcttgatgtcctttnttacatcgacctcttcagcctttaactcttcaaagtccttggttaganccncaggagatgacataagggacctctcagcttcgagttctttggcagggcaatggctgctattccagctgccgccatgacagctgctgtggtggctccagtgccgacagctgcagcgaccagctctgcggccttgccttccttcttaatgacttttattttccccttctcctttggctttccggcagcaacagaatctttcttgacagactcttccttcttggggtacttttggttttaaagcagctggtttttttgnttcagacagaggagtagatgatttctttgcgtctttaggggagn

SEQ ID NO: 184 - DNA, 409 bp, Homo sapien
  misc_feature (1)...(409): n = A,T,C or G
agacccgctctcgcataccggaagtagaagatgttttntttggggtcctcgtcgtcctcctccatgtcattggccaggtagctgaggacagaaatcaggttggtgctcaggggcacaccaggagaggcctccgctgaggtcagcttcccagagaggaaggtaagggactgtccctagctcaggactggcacccaccctgcagagagccacgccttcctcaggagggctctgctggacagagacctgatcaagggcgtctcccactccttaggatggagacaaaagcccaactggtagccgagagtggtggcttatgcctgggaatcccagcacactgggnaggccaaagcaggaggatcacttgaggccaggagtttgagacgggcctgggcaacatagcaagacccta

SEQ ID NO: 185 - DNA, 177 bp, Homo sapien
  misc_feature (1)...(177): n = A,T,C or G
ccgtctcaaactcctggcctcaagtgatccncctgctttngcctcccagtgtgctgggattccaggcataagcaccactctcggccaccagttgggcttttgtctccatcctaaggagtgggagacgcccntgatcaggnctctgtccagcagagccctcctgaggaaggcntggct

SEQ ID NO: 186 - DNA, 321 bp, Homo sapien
  misc_feature (1)...(321): n = A,T,C or G
atgtcagacgggtaatgtgcctatgtcgtaacaagatttgaaggtggcggccgggcgcggtggctcacgcctgtaatcgcagcactttgggaggccaaggggagttgatccggagtcaagagattgagaccatcctggccaaccaatatggtgaaaccccgtctctactaaaaatacacanattagctgggcgtagtggtgcacacctgtagtcccagctactcaggaggctgagacaggagaattacttgaactcaggaggcggaggttgctgtgagccaagatggttcccactcnattcccagccttggggtnacaatt

SEQ ID NO: 187 - DNA, 446 bp, Homo sapien
  misc_feature (1)...(446): n = A,T,C or G
tccctacacaatcataacatcgcctaaatcattatttcaccagcattttcatgcttgatacctgacataaccggcacttgcccccactaactcactcccaaattcaggaccacaactctcacaaggagaagagtaattccttgaatcatagcccttccaaactcctcctccacaactgccacaggattttagctaaaattccattgtgaccataacacttccctagttcgcaccctccaagaagtttgggcaacttaaaaagtcttctattatttgtgatctttcctctaccattccaaaactgacacttttaaattttatcttataagtctttaattactcaactttttttatgatctagnatctacttgtgggntttgaaggctatcagngtgtaanccgtttttntagggcntcatnaccccggggtaatttgggccgtaggc

SEQ ID NO: 188 - DNA, 303 bp, Homo sapien
  misc_feature (1)...(303): n = A,T,C or G
agacaccatctccaagaagccattccngaccnctggctcatccgcttccatctcccaccctattccacatggatgagttaagtgtccttcctcagggtacatgtgtgttactgtacttaaaatattataccaaattgatgtttatctctccccactaatctataagcnnctaagcatagcatataaaacattcaataaaatgaacaacataaacataaaagactggccacattaattttcattatnaaattcactatattaactgcagacctgtaaaaatccaaggatggttcctggaatatt

SEQ ID NO: 189 - DNA, 173 bp, Homo sapien
ttgcatccaatgttgttttagatattaagtagtataatgtgggattataccacatattgcattactcaaatcttaaggaaaaaaaggttgctatctaaaatgtgaatataagataagtatgtttttcttgggggagaggataaacctgtaaggtcagcattacattgaatcta

SEQ ID NO: 190 - DNA, 191 bp, Homo sapien
  misc_feature (1)...(191): n = A,T,C or G
nccccgtggcgttttgaattnctncccatctgtnggctgagngncctganggttggncngactgccgttgnccattngcttcngcntttcctnagtgtcnggntctncttcnntnttctcctgnncctaggctgngncctcaggnncntnnttgtctctcctttctctctcctcctccngcngcttgangg

SEQ ID NO: 191 - DNA, 547 bp, Homo sapien
  misc_feature (1)...(547): n = A,T,C or G
tggcttactgctgtccttgtgatagtgagttctctcaagatttggttgtttaacaatgtgtgacatcttgcccctcactctctcgcttgctcccacccttgcaatgtaatgttcctgttcccactttgccttctgccatgagtaaagctccttgaggccttcccaggagcctagcagatgccagtgccatgctttctatatagccttcagaaccatgagcaaattaaaccgcttttctttataaattacctagtctcaagtattgctttatagcattgttcttgaagttaggctgcaagaacagcctaacacataaaattggtcgtgagagtggggacattgggtataaagatacctgaaantgtgggaggcaatttgggacttggtaacagaggcttaacaagttcagagggcttcaggaggaaggcagggaaggtgaggggaaagtttnggaaantcttaggggnttggttaggtggtnggtgacccanttcttgatantgttattaancgttgaattccgggttctnaggtctccgntggggat

SEQ ID NO: 192 - DNA, 316 bp, Homo sapien
ttgttggccagcaaggggaaacccatctcttactaaaaatataaaaattagctgggtgtggtggcacacgcctgtagtcccagctactcgggaggctgaggcaggaaaataccttgaacctgaacccaggaggtggaggttgcagatagccgagatgacgccactgcactccagcctggcaacagagcgagactccatctcaaaaaaaaaaaaaaaaaaaaaaattaatgactgccctgctaggtttcagaatagcatgggacctgtagcccctttcttttggtcaatttctccctttcaaaatggggaattttta

SEQ ID NO: 193 - DNA, 159 bp, Homo sapien
  misc_feature (1)...(159): n = A,T,C or G
ttccacaagaaactngnaggcaatttcaaggatgtcaaggananacatntnggggaaaacantnngaatngtccctggttatgcagagcaggtggaaagtaagcacaanacacaacntaaataaaanccatctgatggantnagngtgtaggcatacac

SEQ ID NO: 194 - DNA, 414 bp, Homo sapien
  misc_feature (1)...(414): n = A,T,C or G
tcagacanccctaggaatgagccttcctagcgccgagggacctgctgctgttgttggcctgcacatgcattctatggaatgctttttggccaagcgggggcactgaggactaagctctgatttttttttatctcgcccaaactcctttctaaggagtctggggtgtcatgccctacaaaccataaattctcatcagatggattttatttaacgttgtgtattgtgacttactttccaatctgactctggcataacaagggaaaaattcaaaatgttttaccccaaaatgtatttcctngacataccttgaaattgccctgcaaagtttcttgtggggaaaaatccagagagagagagagagagagagagagagagagagagagagagagagagctcgtgcccgaattcctggca

SEQ ID NO: 195 - DNA, 368 bp, Homo sapien
  misc_feature (1)...(368): n = A,T,C or G
aatcagaagacttgatattgttaagatgtcaattttctcaaactaatctatagattctacagatttgatagatctatagatccaaggctctctcactcaaaatctcagcatgaattttttaaaaaacttcataaactgattctaaaatttatatgcaaaagcaaagaaactaacaattttggaaaaaagancaaacctggaggactcatatttcaagattactattaaccagtaatcaagactgcattgctgggcgaggcgcagtggctaatgcctgtaattccancactttgggaggccgaggcaggtggatcatgtgaggtcgggantttgagnccagcctnggccanctggtgaaccagtctcta

SEQ ID NO: 196 - DNA, 195 bp, Homo sapien
  misc_feature (1)...(195): n = A,T,C or G
ggcgcgatctcagctcaccacaacctccacctcccagattcaagctattcttgtgccttggctcccaaatagctggtattacaggcatgtgcaccacgcctggctaatttttgtattattagtagagacggtttcaccacattggccaggctggtcttganttccccatcacaggngatccacccgccttggcct

SEQ ID NO: 197 - DNA, 261 bp, Homo sapien
  misc_feature (1)...(261): n = A,T,C or G
aaaactcaaaaccaggttgangtatcattgcagacaaaactaccagtagtccatattgtttaatattaagttgaataaaataaattttatttcagtcagagcctaaatcacattttgattgtctgaatttttgatactatttttaaaatcatgctagtggcggctgggcgtgggtggctcacgctggtaaatcccagcattttggggaggccgaagtggggtggaccacgaggtcgggagtncgagaccactttggccaaa

SEQ ID NO: 198 - DNA, 371 bp, Homo sapien
  misc_feature (1)...(371): n = A,T,C or G
gaagcctttgaaacangttcgtcgatgggttcgggaatgcaggatattcccacctccggttaaggatggaagagagtatctgttccacgaatcagcggtaaaggttgacttaaatcgaccagtaacaggtggccttttgaagaggatcagaaatnggaagaaggcgaagtcatgagcgccgggatttaccccctaacctttatataagaaacaatggatattactgcttacagggacccaaggacgggtaaagagtttggattaggcagagacaggcgattcgcaatcactagaagctatacaggccaacatttgattntttttccagggncacanacacaagcntcttgacagngagtttcaacagtgtt

SEQ ID NO: 199 - DNA, 184 bp, Homo sapien
  misc_feature (1)...(184): n = A,T,C or G
cgtagcgatcaagccatgaatgtaacgtaacggaattatcactgttgattctcgctgtcagaggcttgtgtttgtgtcctgaaaataactcaatgttggcctgtatagcttcagtgattgcgattcgcctgtctctgcctaatccaaactctnttacccgtccttgggtccctggtagcaggta

SEQ ID NO: 200 - DNA, 293 bp, Homo sapien
  misc_feature (1)...(293): n = A,T,C or G
atgaggtttgagcaaaancagcactatggtaggagtcaccacaggttgcacaaccctcttttctagagacatttggttttaactgatcttnactgtgaaggncctggttagctggatcacctgaccaggactgccataatgaaggcctgctggtncctggctgtagtcttgaggggcaggagaagggatcnttcccttcnnatcccaaagctttgagttgacagngctttgtgttcgtgtagaatttacagagactaaaanttccccaaaagccctccagagtgtagctggga

SEQ ID NO: 201 - DNA, 396 bp, Homo sapien
  misc_feature (1)...(396): n = A,T,C or G
ttaaaaagttgataagcttatgtcangttcctaaaaattccttggaaattttaccagttcatgaaataaaaaagtctgagaaccagtgatcttttactaattgataagatagatttgcaataaaatatcaagtaattagaatgctcctagaatggtcttgtggttaattagattttcacattgtaggttaactttttggtttcagctgtgctcattcagctcaatttgacatgctgtactgaaagcctcacttatgccagtcatcatactaaatgatgcccatgcgatgatacataatcctgggcttngctctgagagaccaaaccagactagtacaagtgacaggganaagaaaccatttaaggttctgtattccaaagtggataccctnttagc

SEQ ID NO: 202 - DNA, 143 bp, Homo sapien
  misc_feature (1)...(143): n = A,T,C or G
ggagnttnnnggagaacctgagtcancttangaacaccgtggtgnncntagnctggnaggtctttgagagntggatgngnnnttggntnntgtttganttgtgnnggntntncttggngctagagnccactnacgntcnancg

SEQ ID NO: 203 - DNA, 172 bp, Homo sapien
gtgaaatgcgcaaatagcttcttactcgcatctcgtgtcatcctataagctgaagtccatctaaggaagtgagagaagctcacttggataaccctgttttggtatagttgcttttctgattgattttctttttcctcgaacttttaaactgattaaaaaaaatttttttaga

SEQ ID NO: 204 - DNA, 137 bp, Homo sapien
  misc_feature (1)...(137): n = A,T,C or G
taatcangtttaaaagttcgaggaaaaagaaaatcaatcatgaaaagcaactataccaaaacagggttatccaagngagcttctctcacttccttagatggacttcagcttataggatgacacgagatgcgagtaag

SEQ ID NO: 205 - DNA, 330 bp, Homo sapien
  misc_feature (1)...(330): n = A,T,C or G
tgtacaccaaccatccntcccaattctacaatttatatgttactattcttgtttcattctgcctctatccttctatccctncatgttctttttttgatgcatttcaaagttgcccacatcaatccaattccccttaccccaacacttcatcttacactcattaaccagagttctcaaagggtttttaataacatgaaatgcttttttgaaaaaagtaagatgtaaaattaaacatactgcatggccttagccatttcaaaantatatcaaaaaggccagggcacggtggcttatgcttgtaatcccagcacattggttgggccaaggcga

SEQ ID NO: 206 - DNA, 129 bp, Homo sapien
  misc_feature (1)...(129): n = A,T,C or G
agagacagagcccactatgttncccaggctctccaactcctgggcttaagcaatcctttcgccttngccaaccaatgtgctgggattacaagcataagccaccgtgcctggcctttntgatatattntt

SEQ ID NO: 207 - DNA, 288 bp, Homo sapien
  misc_feature (1)...(288): n = A,T,C or G
gcagccccctgacgtatccccgtgacnnctggttttagcggctggcgcagttctggcatcggggcgatgtcgtcccataaccagcgacgatcaacgcactgaaaagcgcgcagttgcaggacacaaaataaacaccaggggagaaagctgctgcctaccccaatgctgccgtaagccatcagtttaacgaaactgaccagcacacccgcgaggaaaatctccgccattncccaggttttgagttgaaaaagcacccgtgccagttagtnttttaaacgggaccggtta

SEQ ID NO: 208 - DNA, 268 bp, Homo sapien
  misc_feature (1)...(268): n = A,T,C or G
ctcgcgggtgtgctggtcagtttcgttaaactgatggcttacggcagcattggggtaggcagcanctttctcccctggtgtttattttgtgtcctgcaactgcgcgcttttcagtgcgttgatcgtcgctggttatgggacgacatcgccccgatgccagaactgcgccaccgctaaaaccaggcgtcacggggatacgtcaggggctgcgttcgtgctcctgttgtacggcaatccttcctgctgatgaacccgtgtgcccgcggtg

SEQ ID NO: 209 - DNA, 326 bp, Homo sapien
  misc_feature (1)...(326): n = A,T,C or G
ctcacactgactgtcctgccgctgcctctctctttaatgagtaagaacctttgtgattacatgggccccacttggataatccagggtaacttccccattttaaattcaactgattagcaatcttaattccatattcaaccataattcctccttgccacgtaaagcaacatatttgggaggttccgggaattagaacatagacgtctctctctgtggggacattattttgcctntcacnagcanggttacatgggctgcctgaattttgggaaggaatcccnttgattcttcaaatnccattcaattttttggtaaaaancagcatt

SEQ ID NO: 210 - DNA, 389 bp, Homo sapien
gcttctaaactcatcacatgtatcctgaaaagatgggaagattatattggaagtgctgtttttacataatatttgattggatttgagaatcagaggatttctttccaagagtcaggcagccatgtaaccttgctgtgataggcaaaataatgtcccacagagagagacgtctatgttctaattcctggaacctccaaatatgttgctttacgtggcaaggaggaattatggttgaatatggaattaagattgctaatcagttgaatttaaaatggggaagttaccctgggattatccaagtggggcccatgtaatcacaaaggttcttactcattaaagagagaggcagcggcaggacagtcagtgtgagaatgataaagcataagaag

SEQ ID NO: 211 - DNA, 301 bp, Homo sapien
  misc_feature (1)...(301): n = A,T,C or G
gtcaatctgctgatctcgtgatccacccgcctcagcctcccaaagtgctgggattacaggcgtgnacccgtgcccagcccatcttaaccatttttaagcatatagttcaatagtgttaaatatattcatcaattgagaccagaaggtcaaggctgcagtgaaccatgattgcgccactgcactccagcctgggcgaccagagtgaaactctgcctccaaaaaaataaataaatatattcacacaattgtgcagaggtagattcttatacctccactgctgccatttgggttgttgtatttt

SEQ ID NO: 212 - DNA, 374 bp, Homo sapien
  misc_feature (1)...(374): n = A,T,C or G
ctaataataaggaaacatcatttgcctttttcactctcattctctcatgagtgtacagtggagttttccagagattcacggtgtgtgatattacaacataccaaatgcagcagttggaggtataagaatctacctctgcacaattgtgtgaatatatttatttatttttttgaggcagagtttcactctgtcgcccaggctggagtgcagtggcgcaatcatggttcactgcagccttgaccttctggtctcaattgatgaatatatttaacactattgaactatatgcttaaaaatggttaagatggggctgggcacggtggctcacgcctgttaatcccagcactttggggaggctgaggcgggtnggatca

SEQ ID NO: 213 - DNA, 311 bp, Homo sapien
  misc_feature (1)...(311): n = A,T,C or G
tgttcgangaggaggtgcgggagacgcggcggcnaccgagcngcgcttgggtggaggtngacagcagccggcagcaggagtacgacttcaagatggcacaggcgctggaggagctgcggacagcancgacgagcaagtncgtctctacaagctggagctggagcagacctaccaggccaagctngacagacccaantnagctctgaccagaacgacaaggcggccagtgcggctcgcgaggactgaaggaggcccgcatgcncctgggagtccctcagctaccagctntccggcctccagaagcaggccag

SEQ ID NO: 214 - DNA, 336 bp, Homo sapien
  misc_feature (1)...(336): n = A,T,C or G
ntatcctccacacttgctataagtaacactccaattccaaaactagacaccattatactttatcataaaaaaaaaacagtgctggttatttgataaaatgtcccacgcactatgtagtgagaaaactaacactggctttttgtggcaaactggatgaatgtgctttaaaagtatcatcctttaaatgaatgcaaactcagggtagtaggaagacaaaaataatgcacaagatgttcnggggaagggtggtttatatgctttgtaaaattcaggacaganttccttcaaanccccaacnttgcccccngattgcaagttcntccctnagggggtntc

SEQ ID NO: 215 - DNA, 402 bp, Homo sapien
  misc_feature (1)...(402): n = A,T,C or G
agtagagcgaggttttccatgttgncaggctgttctcgaactcctgacctcaggtgatcctccacctcagagtccaaagtgttgggattacaggtgtgagcaccgcgcctagtgtatctcgaaaacatagtagagaagnagacacagccacatatatgatgcctttatgtgaaatgttcagacaggcaaatcatagggcagaattagattagtggttccaggaaaggggagtaccactcttgggtatggagtttctttttgggaatgaaaattttctgtagatagtggtggtggtatacatcttgtgaatatacaaaaaactgctgaatatatttactttaaaagggtaaattgtatggtatgtaaattatatctaaaaagagaacaaaattgacacactaa

SEQ ID NO: 216 - DNA, 327 bp, Homo sapien
  misc_feature (1)...(327): n = A,T,C or G
aaacctttgcatttattcatctggactcccccacattgcagatgacgagacgggtacagggaggtccagccactcatttcaacaggtcagccagtagtagcagaggngngatcagaagccagctgtcgggctgaggcaggtgcctttctccacttcaaagcttttcctttgtctggcagggatgatctctctgtgtgcgcaccatggtctcagcctcagtctttccctccccgctgtgtccctcggcctctctgtccaccttcctcagtgtgtctgtctccctctgtgactgtgtgtccgtgtgtctttgcaaggcccggggtgtct

SEQ ID NO: 217 - DNA, 519 bp, Homo sapien
  misc_feature (1)...(519): n = A,T,C or G
cggcatattgttatcttacccataaaaggagtggagctactatccagaagtggctcgggnacctgggcatgggnactggataatcctgtggctatttcatttggggcatcagcaatggatgtggggttaaaaagagcncatagacatgtgtgtgcagcgtgagagtgagacagccagggncttgcaagacacacggacacacagtcacagagggagacagacacactgaggaaggtggacagagaggccgagggcacagcggggagggaagctgaggctgagccatggtccnacacagagagatcatccctgccagacaaaggaaaagctttgaagtngagaaagggcacctgctcanccgacagcctggcttctnatccccgctctnctactacttgcttacctgttgaaatgagttgcttgncctccctgtacccgtctcgtcatctncaatgtgggggagtcagntgattaatncaaaggtttcctcgtgccgattctgcagccnggggttcatta

SEQ ID NO: 218 - DNA, 145 bp, Homo sapien
cctgaacatcttttctaacctcatcactacatgtggcacctcatttgcctagaatctgccagcacactttttttttttttttttttttttgagacagggtctcactctgtgccagggctggagtgcagtgacatgatcttggctc

SEQ ID NO: 219 - DNA, 152 bp, Homo sapien
ctgcttaagggatgttgaggctgcagtgagccaagatcatgtcactgcactccagccctggcacagagtgagaccctgtctcaaaaaaaaaaaaaaaaaaaaaaagtgtgctggcagattctaggcaaatgaggtgccacatgtagtgatga

SEQ ID NO: 220 - DNA, 441 bp, Homo sapien
  misc_feature (1)...(441): n = A,T,C or G
agttccaggccttgcgtgagagcagtggcagcggcgtggaggaagaccatgaatgcgtgtactgttaccgtgtcaaccggcgcctgttcccggtgcctgtggatcccggtaccccctgccgcctgtgcaggacaccgcgagaccagcagggccctgggaccctgggcgcacacgcaccgttcagggtgagcatcccgctgtcgatcctgggagcccccgcaccggtaccacatccaccggcgaaagagctttgacgcctctgacacattggccctgccccggcactgcctgctgggttggggacntttttcttccgaantttgagaaaagttcagccccaggaactgggacnttggcttnttgttttccgttgaggnccagcaaccagaagttttncgggaaccagnagccttttttaaaccggctttaacaattgnagat

SEQ ID NO: 221 - DNA, 319 bp, Homo sapien
  misc_feature (1)...(319): n = A,T,C or G
caganactgagctttatttacaaacttccacagaatccctcaccctccaccccagggcctccctctctggaactcaggcagcagacaagnttgggncacccacctgcccaacctaggacagctgggctgagctgggcggcaggggattcatctcctgggtgcgctgcagaggggagaggctggaggggcgggaatgctgttctccccaggagtcagtcctcagggnttctgcgtgggacgtggggcgaggnactggggcactgaccaggtcggggtcgggggagcatctcattggtgaggcgggtgaaaaggctnctgg

SEQ ID NO: 222 - DNA, 94 bp, Homo sapien
ttttttttatttaacataacatctgcaggtatgttacatggaaattttgtatgatgctgaagtttggggtaaaaattctgtcacctaagctgtg

SEQ ID NO: 223 - DNA, 385 bp, Homo sapien
  misc_feature (1)...(385): n = A,T,C or G
aggtagtccaaattacttgaaacagagtagttttattttccaagtgttaagccatacccacaggaaacaaccagggctattctaccctagcaaagtgccttagctagtcatgcattctgcaacaagtctccatggcaaatttcctaacacacacttctaaacacaaagaactcctccaagtaatanagagggtggtgtgagctcaactaaaaggatattctgctactcctgggatatttttatgagaggatcataaccttattgtcaccttgccatcctaaatgggtgtaaaaattntaaatcctaggaacttctgggagtangcagccaccttaggngtgatcagtgattcccgttgcttcantttcagtgagggatttgtcac

SEQ ID NO: 224 - DNA, 459 bp, Homo sapien
  misc_feature (1)...(459): n = A,T,C or G
tggcacatagttttaagattagcaaggctatttctgtgacttcgtgaagaaagtggtggacctgagtcnttgatcatagctttactatgccactgagtaattgaatggccttggnaaggtcattcacttntttttttttttctcgtgacaatttcctcatctgaaaagtgaagcaactggattcacttgatcacctctaaggctgctgcttacttccagaagttctatgattttatattttttacaccattttaggatggcaaggtgacaataaggttatgatcctctcataaaaatatcccgggagtagcagaatatccttttagttgagctcacaccaccctctttattacttggagggagttctttgtgtttggaagtgtgtgttgggaaatttgccatggagacttgttgcagaatcatgactaggctaagggcactttgctaggggtaggaata

SEQ ID NO: 225 - DNA, 385 bp, Homo sapien
  misc_feature (1)...(385): n = A,T,C or G
cgaggcggcgtacaagcacagcnncatcacggcccactcctgcccccccgtggagcccgccgcagcctaggccccacggacgcggcaggcttctcagtctctgtccgagacagccgggagagcctggggctaaccacgtggggccatgctgagagctgggctttcctctgtgaccatcccggcctgtaacatatctgtaaatagtgagatggacttggggcctctgacgccgcgcactcagccgtgggccnggcgcgggaaggnccgcgaacggaagaagcgggctcgaagaaaataattctctattatttttattaccaagcgcttctttctgactntaaaatatgggaaataaatatttacagaaagtttgtaaaaaaaaaaa

SEQ ID NO: 226 - DNA, 306 bp, Homo sapien
  misc_feature (1)...(306): n = A,T,C or G
agactctcaccatatctcgacaaggcaatatgccggtattgtcaaacgctgggtagctgaaataggcctagatccttctgcatatgggacgcatagcatgnngcaccaaaaccaactctcatctatcgtcggacgaagaattttcgtgccgtccaattgcttttgggacacacgaagcttgagagtacagtccgctatctaggcattgaagtagaagatgcgttnggcttcgcggacaanacagacatcttaacgccaaantagaccggtcgtcgcttagatggccgggcntagccgattttcaga

SEQ ID NO: 227 - DNA, 399 bp, Homo sapien
  misc_feature (1)...(399): n = A,T,C or G
actaccngggcgcatcaaaaacaaaaggatcttaattgtccagacgggacctttactttttttcggcgctggcaantntgcgttgctctccgacgaatggttctccagcacaatttcggccgagattttcgtggcgtttctgttgaagcaagctttaccttcggatgtatagtggcgagttgcgaggggcatatgatgtctgaaatcggctaggcccggccatctaagcgacgaccggtctattttggcgttagatgtctgtttgctccgcgagcgcttaacgcatcttcttacttcaatgcctaggatagcgggactgtactctcaagcttcgtgtgtcccaaaagcaattgggacggcacgaaaattttttcgtccgacgataggangagagttggg

SEQ ID NO: 228 - DNA, 319 bp, Homo sapien
  misc_feature (1)...(319): n = A,T,C or G
tcgtatggtagatgctctgtaagtatttgttgaatgaatgggtttgttggaggtaagatgggtgccagggaaacctagtagaagctttagaagtcatccatgcaagaatagagaaagtctaaactagggttttggtaacagagatggggaggtaattggttgagaaatatttaggaggtagcatcaataggacttggtaattgaaaaaagagggagcatgtgaatgaaagaagaaataaagatgacttctctcttgcacatctaatgattagttggtgctactaagttagatnggagatnccaagtaggaactattgaa

SEQ ID NO: 229 - DNA, 412 bp, Homo sapien
  misc_feature (1)...(412): n = A,T,C or G
cttatgtgtattctttctgagcaattactagctggataccaactcccaatttatgtaagtacagacatctcttccaagctccagacccatatatccatctccatctagatgttccagaagaacctcaaatgtatcatatccataattgatttcattagtttctacttggattctccatctaacttagtagcaccactattcattagatgtgcaagagagaagtcatctttatttcttctttcattcacatgctccctcttttttcaattaccaagtcctattgatgctacctcctaaatatttctcaaccaattacctccccatctctgttaccaaaaccctaggtttaggactttctcttattcttggcagggatggacttcttaaagcttcttactagggnttcccgggg

SEQ ID NO: 230 - DNA, 390 bp, Homo sapien
  misc_feature (1)...(390): n = A,T,C or G
cacctcacaggacctgtatccatctcttctggaggatagcagaggtatggagggagacctggcagggnncttgccccnacgcncntggagactctgttggggatgggggatggaaggtgtatggaagaagagtgagaactagaccacacttgcaccggggttccccacactcagcgcaggctctgttgttctgttaaacttcacttgcaaaacacaaattccaagacaaaaattaaaaatttcaagaggaccaccagagaacatttaaaccccaagtgctggaaacctttgttgagcaaaggtgntgtttttagttacattggttcacacacccttgagccaggtttgntaatggttttttccaagantttcccacaggttgggttnagg

SEQ ID NO: 231 - DNA, 423 bp, Homo sapien
  misc_feature (1)...(423): n = A,T,C or G
gctctgttncccaagctagaatatgatcataactcaccatagcctcaaactcccggcctcaagtaatcctctcacctcagccttccaagtagctgggactacaggtgtgtaccaccacacccagctgattcgtaaaaattttttatagaaatggggtctcactatgttctccagtcttgcctcaaaatcctggcctcaagcaatcctcctgcctcagcctcccaaagtgctgagattacaggcatgagccacctcacccagcctgtgggatagtcttgaacaaccatttagcaagcctgggctcatggggtgtgtgaccagtgtacttaatacagcacctttgctcacaaggtttcagcacttggggtttaatgttctctgggtggtcctcttggaaatttttaatttttgtcttgggaattt

SEQ ID NO: 232 - DNA, 323 bp, Homo sapien
  misc_feature (1)...(323): n = A,T,C or G
ccagggttcacggccacccccactgccgtttcttgcacctgtactgtgagccttcacccactgcaagctctgacagctttggctctcagggctggcagcacctacattctgcagatgaggaagctgaggcttagtgagtaacttgcccagagtcacgaggttaggaagtngggtgtatcaggatgagattcagactctggtcctttttttttttttttttttaaacgagacggattttgctttgtcgcccagcctggagtncagtggcgtgatcctggctcactgcaaccttcaactcccaggttcaagcgattctcttgcct

SEQ ID NO: 233 - DNA, 430 bp, Homo sapien
  misc_feature (1)...(430): n = A,T,C or G
catgccgtnacantgccatcatgggggtagaaggcgccatttgcacagtgattgaaaagtgccttctgccatcaagacagcatccgtgggatattttagcgctgatgggtgcaggaagctatgctaggcacggcacgggttgactgaaaatgggcaccatagattctctgcccatggggggcttgcattcagtttggggaaggaagtgtgctggatgacagggtataagaatcaagcaggctgggcgcggtggctcatgcctgtaatcccagcactttgggaggccgaggtgggtgaattacgaggtcaggagttcgagaccagcctgaccagcatggtgaaacgccgtctctactaaaaatacaaaaattagctgggcgtggtngcacatgcctgttatnccagctantcatgaggctnaggcaagaga

SEQ ID NO: 234 - DNA, 393 bp, Homo sapien
  misc_feature (1)...(393): n = A,T,C or G
gcctgcgcccacgatccagggcactgagatacacttacctccagcctcttgccaaatagtttcacagcagaagggaacttttccttcttgaaccggccccttaaaagtttctagacacctgtgctccaaatgcctgcttgatccttctcaaccggctaaagtcctgcaaggaacacaaaaatgaataagaccgcaggcagctgacatttcaggagagggcagacgctcaaggcccacagtaggagtcaagcaagaggcagaaggtccagtgctnagggcttcaacagccgcatgtcaggggaggacggcggacaagccagtnccatcgcaaagcttgntgtgcctgggtaagcacttgacaaaggagggaggcgaacaacaggttggggcagg

SEQ ID NO: 235 - DNA, 376 bp, Homo sapien
  misc_feature (1)...(376): n = A,T,C or G
cggccagagtcaccagcacctgtgggctgcttcaaagaccccacgtgggaggagaccattttctctcttctggctcttctgagggaggggtgtgtggggcagactgccncntcccactcacagctgttgggctccctctgcccatctctgtgccgcggcctgagcctacagcctgcttcaggggctctcttgtccagggaattgcagtggggccattngagaaagaacagagcgctggccgggccagtggctcacgcctgtaatcccagcacactnggaggccgangcaaggtggatcgtgaagtcaaggagttcgcgatcaacctggccaacatagtnaaaccccgtctctactaaaaatacaaaaatttagctt

SEQ ID NO: 236 - DNA, 385 bp, Homo sapien
  misc_feature (1)...(385): n = A,T,C or G
gccactcccaaaccatgggcaggggcagcagcgtgcacactgagcactctttcgtttttttttttcttttgagacagagtcttgctctattgcccaggttggagtgcagtggcatgatctcagctcaccacaacctccgcctcctgggttcaagtgattctcctgcctcagcttcccaagtaactgggactgcaggcacgcaccactacacccagctaatttttgtatttttagtagagacggggtttcactatgttggccaggctgatcgngaactcctgacctcacgatccacctgcctcggactnccagtgtgctgggattacaggngtgacacttgcgcccggccagcgntctgttctttctccaatggccccactgcaat

SEQ ID NO: 237 - DNA, 383 bp, Homo sapien
  misc_feature (1)...(383): n = A,T,C or G
ngaggaagcagcaaagagtcacgtggatacanaaagggactagtatgggcagagacaacgaatatctctccagaaacatgaggagacagaagacgacatagcagctggatgtgctgactcacacttgtaatcccagtactttggtatgccaaggtgggaggattgcttgagcccaggagttcaaggccagcctggacaacatggcaaaaggtcatttctacaaaaaataaaaaaattagctaggcataatggctcgtggctacagtcacaactacttgggaggctaagacattagaaccacttgaagctggagatggaggttgcagtgagctgagatagtgccgttgccctccagcctgggcttacagagtgagactccgtct

SEQ ID NO: 238 - DNA, 396 bp, Homo sapien
  misc_feature (1)...(396): n = A,T,C or G
gtttgactattggtcaaatggactctaatactcaggtctcctgacccagtttttactgtcatttctattctacacagtatactctgctatatttatttctcttgcctttagcctcacatgacatcagtctcatttttctgtttcaatctgtatccatcttcctcttcctcttcctctcctgcccttctctacacttatttattgacttcttgatccagttatttaacattccataatgagctattgtgtgccaggcatgtgatgggcactgggagatgcaattcatgagacagttaggcttttgcaaagttccctgtcccaggnaagcctncctgaggatgggggcataacagcagctctttccggggggaaagacatacatnaatggacacatct

SEQ ID NO: 239 - DNA, 361 bp, Homo sapien
gaagaagcatggccagaacctgaccatgatacagtcgctggagcagggagattggtggatgcagcagtgatttatgcaggatgggatgaggcctgggaaagcagagtaagggacaagacatgcttttctgtgtgaaggaaagagtaagatgtgtcattagtgtatgtctttcccccaggaaagagctgctgttatgccccatcctcaggcaggcttccctgggacaggaactttgcaaaagcctaactgtctcatgaattgcatctccagtgcccatcacagtgcctggcagacaattagctcattatggaatgttaaataactggatcaagaagtcaattaaataagtgtagagaagggc

SEQ ID NO: 240 - DNA, 393 bp, Homo sapien
taagttggaggtggacactttatctacctgcacaggtggaagatatgtgggtctggaactccggtaaacaaaaagatcctattgggacctctatttggttgactttgtgtcactttttactagggctaattgtctaatgtctctttccactagtgtatgcctccttgagaacatgaacctttaaacaacaacaacaacaataacaacacgaagacaaagtcctgtctgctctcccagggctagagtgcagcgtgcaatcgtgcaatcgcagcctacagtaaggtaggaattcctgggccttcaagctatcctcctgccccaccgtgggcctccttgaaagggcttccgatttacagggaggggagccactgcacccagccaaacctgtttttt

SEQ ID NO: 241 - DNA, 417 bp, Homo sapien
  misc_feature (1)...(417): n = A,T,C or G
anancagancctacactcctgaatgtatttgttcattcactcaacatatttgttgaacccttatcagggccagggactgctctgggcacaggagatacagaataaaagacaggtttggctgggtgcagtggctccctcctgtaatcggagcccttcaggaggccacggtgggcaggaggatagcttgaggccaggaattctaccttactgtaggctgcgattgcacgattgcacgctgcactctagcctgggagagcagacaggactttgtcttcgtgttgttattgttgttgttgttgtttaaaggttcatgttctcaaggaggcatacactagtgggaaagagacattagacaattagccctagtaaaaagtgacacaaagtcaacccaaattagaggtcccaataggatctttt

SEQ ID NO: 242 - DNA, 386 bp, Homo sapien
  misc_feature (1)...(386): n = A,T,C or G
ccgccaccccgtctgggaggtgtacccagcagctcattagagtgggccatgatgacgatggcggttttgtcgagtngaagtgggggaagtgtggggaaaggaaagagaaatcagattgttgttgtgtctgtgtagaaagaagtagacacgggagactccattttgttctgtactaagaaaaattcttctgccttgggaaaaaaaaaaaaaattggaggctgaggaggcagatcacttgaggtcaggagttcaagaccagcctggcccaacatagtgaaaccccgtctctacttaaaaatacaaaaaaaccaaaacaaaaanaaaatttagccagggtgttggtggtgcaggcctgttatccccagctactcgggnggctgagnttt

SEQ ID NO: 243 - DNA, 413 bp, Homo sapien
  misc_feature (1)...(413): n = A,T,C or G
tnnttnntttttttttttttttttttttttttttttttttttttttttttttttttaaacnnagcnncanacctntcccccaggggggaancnagntggncgacccnancnaaccnnaaccccnnccnncggggnnnaaacgacccccccancnnagccccccnagnagcnggganaanaggccnnnaccaccanaccggggaaatttttttttnnttttnttttttgnatttnaagnaganacggggtncnacnangtnggccaggggggnctaaaacccccnacccnaaggnaccccccccccnagcccccaatttnttttttttnccccaaggcagaaggaattttccnnngnacagancaaaanggggncccccgngncaactacttncnananaggcanaacancang

SEQ ID NO: 244 - DNA, 411 bp, Homo sapien
  misc_feature (1)...(411): n = A,T,C or G
gncacccaggctggagtgcagtgacatgatatcaactcactgaaactccccctccgaggtttaagtgattctctggcctcagctcccaagtagctgggactacaggcatgcgcaccatgcccagctaatttttgtatttttgtggagacagggtttcaccatgttagccaggctggtcttgaactcctgacctcaggtgatccacacacctcggcctcccaaagtgctgggattacaggcgtgcactngcacccagccttctcatttctttttaataaatgaacacattgtaaggtcaggtctacccagttattttgagactgaactagggaccacagtatcagccgttgggaatctcagactcacctgggtaggaggggggttggcagaattaggtcatctttcctggga

SEQ ID NO: 245 - DNA, 370 bp, Homo sapien
  misc_feature (1)...(370): n = A,T,C or G
ttcgaactagtaatttgaccaaaattacatgcagggtaagaaaactagttcattatcttagtgaaagaaatagcttctaccaccttcattttacatgtaaaattgtatttgaagaatgcagctgtatatgcctcacctgtaccatttaaataaaactatttaaacattttattacaggttctaaatgagaagaaacttcaagaggttgatagtttatggaaaggaatttganactccagaggaaagcaaacaaaatgtaaggtactcttggaaatccaattaattttaggcagtttaacattttagggggcttgttttatttttttttaaccattttttttcccctggatttnattatnatggtttacat

SEQ ID NO: 246 - DNA, 372 bp, Homo sapien
  misc_feature (1)...(372): n = A,T,C or G
gcccctgccctggcttcacagcttcctaaacgccaccccttcccaagccagtctctgggccaaggccanttcctgcagcccactgggtggcccccaactcagcacctcacttactggcccacctccagccagtctcagtttgcccatctctgaggggatttgtgggtgcatcacagccatcctgtgggctgtttggtaccctgttctccagatgttgggtctgtctcccttcatggcctgaacgggagcaggcttctcatgctctgctcccaaaagatggtggctcggtctagcaagtccaagttgctaaaacattttttaaaaatagaactaaaggctgggcgnagtggctnacgcctgtaaatcccagca

SEQ ID NO: 247 - DNA, 268 bp, Homo sapien
  misc_feature (1)...(268): n = A,T,C or G
tcagagncaagccatatgtcacaatctcatttgcgtgcttggccaaggcaggagagtcaaatcactaaggngctttgaaatgcacacaatcacacctgcaggaaagtccagggattagattagaanttccnaacatgtccaggttctaaaggtatgaangtcaacacctcctntatgttgggtctaagnacatgagtcgcaatcacaatgattgacagantgtgtgcaaaagagccacagtttcttctgcagactgtatcttctnggt

SEQ ID NO: 248 - DNA, 324 bp, Homo sapien
  misc_feature (1)...(324): n = A,T,C or G
ttgcccagcccgacatctttatttaaaagctttttgggccaggcatggtggctcacgcctgtaatcccagcaatttgggaggccgaggcgggcggatcacaaggtcaggagatcaagaccatcctggctaacaaggtgaaaccccctctgtactaaaaatacaaaaaattagccaggcgtggtgctgggcctngttagtcccagctacttgggaggctgaggcaggagaatggcatcaaccagagaggcagagtttgcagttgagcttgagatcgtgccactgcattcccagcctggggccaaggagttnaggattccgttttc

SEQ ID NO: 249 - DNA, 374 bp, Homo sapien
  misc_feature (1)...(374): n = A,T,C or G
tttgagacgtnttnancttcttgcccaggctggagtgcagtggcanantctcagctcactgcaagctctgcctctctggttgatgccattctcctgcctcagcctcccaagtagctgggactacaggtgcccagcacancgcctggctaattttttgtatttttagtacagagggggtttcaccttgttagccaggatggtcttgatctcctgaccttgtgatccgcccgcctcggcctcccaaattgctgggattacaggcgtgacaccnatgcctggcccaaaaagntttaaaataaagatntcgggntgggaatttngtgccgaanttcctgnagcccgggggntccantaagttttagagcggccgccac

SEQ ID NO: 250 - DNA, 332 bp, Homo sapien
  misc_feature (1)...(332): n = A,T,C or G
cagngngagacctggtgttccatgtaagtccctgatgtcttagagagactgtcatgagcacatgctcagacatcttgggcagggcatgttaggcagaggcagagacagatgtaacctaatgaagggtaagcttgagggtacttctcttgcctgacattttccaaagctctgttatcactcctgggggagactgggaggaacccgctgctccagctatgctgcttgtggccttagggagtccctcgtgggcatcctcaggctgtggggtgttatcccgggagagcttgccttgcactaatttcttaatnatattctnagttccccaggggttc

SEQ ID NO: 251 - DNA, 356 bp, Homo sapien
  misc_feature (1)...(356): n = A,T,C or G
caaaaaaaaaaaaaaaaaaaaaaaaaggaaaactttctaaggtttataaggttgaccctggggactagatatattagaagtagtgcaggcagctctccggatacacccacagcctgaggatgccacgagggactcctaggccacagcagcatagctggaagcagcgggttcctcccagtntccccaggagtgataacagagctttggaaaatntcaggcaagagaagtaccctcaagcttacccttcattaggttacatctgtctctgcctctgcctaacatgccctgcccaagatgtctgagcatgtgctnatggacagtctctntaaggacatcaggggactttacatggganc

SEQ ID NO: 252 - DNA, 324 bp, Homo sapien
  misc_feature (1)...(324): n = A,T,C or G
ggagatgagaccctgacccttagagaaatctcccctccaggccttctgggatcggcaccacccctcacaaccccgacacctcctttcccgagacccctcccctcctggatccagaacatgcccctcagaaatcatttcccacaatctccaaaggaaatcaaaccccgctcatctaggagcccctgctctctcctctctcatcccacctccgttgactcccaaaccaccggaccctttgttttttcaggaacttaggacccccttaccctctgggatccccatccccatttttnccccgggcttaagatcccattcttggncttt

SEQ ID NO: 253 - DNA, 356 bp, Homo sapien
  misc_feature (1)...(356): n = A,T,C or G
caggtactgngcnggagagaagggaaggggtctaggataaaagcaagtgtttggaaggaagggtcttagttctcagaggcgaagcaagagtggatcttagccgggggaaaatgggatggggatccagagggtagggggtctagttctgaaaaacaaagggtcggtggtttgggagtcaacggaggtgggatgagagaggagagagcaggggctcctagatgagcggggtttgatttcctttggagattgtgggaaatgatttctgaggggcatgttctggatccagggaggggaggggtctcgggaaaggaggtgtcggggttgtgaggggtngttccgatcccagaaggccttgg

SEQ ID NO: 254 - DNA, 363 bp, Homo sapien
  misc_feature (1)...(363): n = A,T,C or G
attttttagtgcttgccccatcccaccnttggctgttccccagcactaggtcaaagtgccagacattttcacaatataatcaggcaccaggccaccactgtattaataataatctgtataacaaataataataactgcataacaaataatccaaacacttagcagcttacacaacaaacatatcacagtttctgagggtcaagaatctgcaagaaacgtagctaggatggttctggctggagggtctcttcaagttacagtggttgttaggtttaagggctngcattttattctggaggggtccttaggaggaaggcttcacatttttgtgggcttgcttaggaaggggaaagtttccagttt

SEQ ID NO: 255 - DNA, 441 bp, Homo sapien
  misc_feature (1)...(441): n = A,T,C or G
tcctgaccttgggtgatctgcctgcctactnctcccaaaatgctgggattacagatgtgagccactgtgtccagtcagtgaattgtttctaatgaatagaagtgatggaatgtcagcctcaaaattaggttatgaaaagactgtggcttccactttggagactttctctcagagcactcactctgggggaatccgactgccatgccatgtgagctgccctatgaagtggcccatgtggtgaggaactgaactttccttctagcagccacaaatgtgagcttctctaggaccctcagataaatgcagccttaacctacaaccactgtaacttgagagaccctcagccagaaccatctaggctacgtttcttggcagattcttggaccctcaggaaactgtggatatgtttgttgtgtaaggtgctaagtgtttgggattatn

SEQ ID NO: 256 - DNA, 330 bp, Homo sapien
  misc_feature (1)...(330): n = A,T,C or G
aacgaatgtctcttcattgagtcactgcttcagtcacttccctcctaacgtttcaggggatctttccttttcctcccatctctatccttttggttattttccttcttgtttgcatttcctctggagggtagaccaagaaggcaaaggagatgagtccaaaaccattctgttgtttattagtaacccttataagaaaaaaagtattatatgaggaaaggattgaaatatttggtgaaaatcagattttgggagttaatgctgggatttcattttttcattctgtatctccccacttactagttatgggattngggattttggctgttttta

SEQ ID NO: 257 - DNA, 349 bp, Homo sapien
  misc_feature (1)...(349): n = A,T,C or G
caaaagcangttgtctttcaactggaaaggacttttatcagaactgaaaaaaatgctttatcaaggactaactgaaagaatcctttgttaacttgtaatagtcagaatgtaatttcaaggacagctgggaccctatagcaattttacataagataggctgctatttagcctttcaaagactgcttttcatcactggaaaatgagagggttgatgatctccaagacccattccagtcttaaggatgattaagttctggggacccccttgnaaaacttttgggtttggaaaaattccactgggattattcaggctttcatattataaaaactttccccccagccacccttn

SEQ ID NO: 258 - DNA, 402 bp, Homo sapien
  misc_feature (1)...(402): n = A,T,C or G
caattttaaantttttttatctttattctttgttttggtattttaatttttcatctattaataaatttgttttttttgttttttttttttttttctcattctacacctttaatatatcccaaattttaaaataaatgttgacactaattttccnaccncaatgtctagcatgggactatgatattataacactgcaacaaacatgttcagngaatgaaaagctgattggngattccnaatgtcaagcaataaataccnaatgtcataggntgctgaagggtgctgggggaagnttttatatatganggctggataatcccggnggaatttttcaaaccnaaagttttcaaggggggtccccggaaccttaatcatcttaggactgggaatggggactnggga

SEQ ID NO: 259 - DNA, 339 bp, Homo sapien
  misc_feature (1)...(339): n = A,T,C or G
ggggnnttggataaatagaaagtattatggattgtatgcacttctctctctgagcaacaggtacactttttttctctaacattgatctataacacaccagaaccgtgttttaatagctgctgataaatgaacctatttttaagtactctaccaagatgctgtggtaaggttagcatttggtggagagatttacaaggttaagatcatgtgtccatcaaagtgcaatcctatcaatcagaaataaaggtaaaagggccctcaaatgaaatctacggaaaaacataacacaagaagcaggcacttaaatgctatggacgtttctaggaagcaagcatttca

SEQ ID NO: 260 - DNA, 356 bp, Homo sapien
  misc_feature (1)...(356): n = A,T,C or G
tttgaactncctgacctcaaatgatccgcccacttcagcctcccaaaagtgctgggattacaggcgtgatccaccgacccagctaatttttgtatttttagtagagacagggtttcactatgttggccaggctggtttcaaactcctgacatccggtgatctgcccgcctcggcctcccaaagtgctgggatgtcagtgtgcgcccccggcncagccagctgctcttagtttacattccccactacggtgcgttaagagtttccctttttcttccattattccttcggccaggcacttgtttatttttttgttctttcttcactgtgggtttttgatttggcattttctctttatt

SEQ ID NO: 261 - DNA, 206 bp, Homo sapien
  misc_feature (1)...(206): n = A,T,C or G
ttttttttnatttttttttttttttnanggggttttgctctnttncctgggntggtctaggctcaagcagncctgcttccncagcgttctgagnaccngggctnacaggttggagtcaccacacccaaccgaacagacgtttcttnaaagaagacgtacaaatggccaaaaantatgtggaaaaaaatgctcagtatcataataag

SEQ ID NO: 262 - DNA, 357 bp, Homo sapien
  misc_feature (1)...(357): n = A,T,C or G
aaaaataaaaggaaccatggctggagatgatgaaaggttcagcctgatttatgcctaacttaatactaatgttgttttcacagagcccctgagaccttgcccagtgcaagcaaattccaagtagttggctaaaaacttctagagtggcaacaaaaaaaaaaatttttttttttgaggaacctcattctgtcactcaggctagggtgcagttgcnanatctcagctcactgcaacctccccctcccgggtttcaaggcaattctcctggccttcagccttccccaagttaggctggggntttacagggcgcctgccacccacatccgggctaattttttgttattttttagtaggang

SEQ ID NO: 263 - DNA, 381 bp, Homo sapien
  misc_feature (1)...(381): n = A,T,C or G
atgtgacacactaggcctttgatatcagaatactgaagcagagttgctagctccatgaataaacctccaagatgacacacacagcataaaaaaatggtggaattttaaattccttcactgactggggcagaattcatgcgagggactttagatgtttacagaattgtgtaagcaagagactattacactgtaacaggagtatctgttccttagcaccctgcctgaggaaagggtgaagtccaagtgtccacctggggtgttattttcctcctgcttaattaaatatttgtgtttgccggggctngggtgcttgttggcttccacacctgttaattncccaggcacttttnggggagggcagagggccggggccaggatcca

SEQ ID NO: 264 - DNA, 108 bp, Homo sapien
ataaatatatgtaatagaggcagggtctcactatgttgcccaggctggtcttgaactcctgggctccagagatctctcccaccttggtctcccaaagtactaggatga

SEQ ID NO: 265 - DNA, 364 bp, Homo sapien
  misc_feature (1)...(364): n = A,T,C or G
gtatacactgtctccnctaggnggtacccaacatttaaaatactgcagtgtatattatttggataagaagaccaaaagcataatttaaaattgctaggngaaaatgccttagattttcaccatcactacttggagagggggaggaacattgcaacagatgtcagtgctttgcttctcttaggnccagaaccaaacagaaaggggaccaagaagcaagaaaganttgcgctattctnttgaaccnctgagcaggttgcaaatattaagtttttagtgaaccatggaaacctaagttgtttacaaaacaaagtgaagcagtgcaaattaggaactggantctgttttctanggcccaggaacatta

SEQ ID NO: 266 - DNA, 446 bp, Homo sapien
  misc_feature (1)...(446): n = A,T,C or G
gtaacctcctttactccaaagtttgagacctagatatttgattcattttacatccacattataatgtctttccttttccattcctgctgccacaccttacgtttagactttatcttttgcttagattttgttttgacttcctaagcagtctctttaccttcagcctcaagttctgcctacttttctttaggcacagctctacttattcatcacggcaaatatttgtaaactctgaagttgatgttagggaaacgttggaatcctggaaagcccatatcattactccatctggacattaggcaattaggggattattaggggatcatggacttttaataggtactaaaagggggnaaccaaactacaggntctcctaatcgggcaatgctgagggctttttctcaaatattggcttcctaactggtttcacttcctgggggcccctt

SEQ ID NO: 267 - DNA, 322 bp, Homo sapien
  misc_feature (1)...(322): n = A,T,C or G
atgtacttacgtttgcctttcctgcccgcagtgccttggaaacagcatcatccaaagacatattatccaatttcttgttggaatatccctccataatctcaccttacaccaaggtacttgttttatggtggaggagatattaaaatgaacatttaggaagagatccagtagtcctaatggatttgcagcatctgaagctgctcagcacttattatacctaggattctgggcaactctgtgattcagttctcactctcctgagtcataggctagtgctcgctgctgggcaccatatttgaggatgttttctncattcagccgg

SEQ ID NO: 268 - DNA, 355 bp, Homo sapien
  misc_feature (1)...(355): n = A,T,C or G
gcttactggtcattcatacatcttttatgaaatgtctgttcaaatctttttctcagtgtcttatttgggtttttattttcttattactgtaggagttatttatactgaatacaagtcctttgacaaatacatgcattgcagatagtttctcctaatctgtggttcacattttcttttcttttcttcttttgagacaaggccttgctctgttgtccagggctggagtgcagtgggcatgatcacgggctcactgcagcctcggacttcctaggcctctatcaatcctccctcttcagcctcctaggaggctggggactatagggcgattgccacccataccnggggcccaccatta

SEQ ID NO: 269 - DNA, 228 bp, Homo sapien
gcctgcaattgtacttctagggacaattctggtttagcttctacagctccaaagtgttttcggtcctctaccttttgaaaagtatctgcactcacaagaagcgcctgctccagttctcttactctgaactccagtttctctatttcttcattcctttcttgtatatccctttgaagctgctctttagagagcaaaagctcactgcatttgtctgttttttcctcgtgc

SEQ ID NO: 270 - DNA, 517 bp, Homo sapien
  misc_feature (1)...(517): n = A,T,C or G
gcatcgntgtgaagacgacgcgaaattcagcattttcacaagcgttatcttttacaaaaccgatctcactctcctttgatgcgaatncagcgtcagacatcatatgcagatactcacctgcatcctgaacccattgacctccaaccccgtaatagcgatgcgtaatgatgtcgatagttactaacgggtcttgttcgattaactgccgcaggaaactcttccagggtcaccagtgcagtgctttggattaacagggagtctttcccggggatgggcggaaccaacaaggaaactgggtttccgtctttcacgggactttcgtttgctttttcccagttttaggccaattacggctttacttccttgcaggcccgggggggttccncttaggtttcttagggaggcgggccggccaccggggtggggaaggctttccagctttttttgttttcccttttaggttnaggggtttaattttcggaggcttngggggttnaattcatggggtcataggctg

SEQ ID NO: 271 - DNA, 339 bp, Homo sapien
  misc_feature (1)...(339): n = A,T,C or G
gtttttaaagtctcactatgttgcccaggctggtcttgaactcctgggcttgagagatcctcctgcctggtatcagccaatctttctttctttctttcttccttccttccttttttttttttttctgagacaaagtctcactcttgtcacctaggctgcagtgcgatcgcatgatcttggctcactccaacctctacctcccaagttcaagcaattctcccgcctcagcctcccgagtatctgaggaggtacagggcacaggaccaccacacnggggntaaatttttgtatttttaggtacagatggggggttttcaccatggttggggccatgctggg

SEQ ID NO: 272 - DNA, 192 bp, Homo sapien
  misc_feature (1)...(192): n = A,T,C or G
ctacaatagacncaggttttaatattttcatatcataagcagggtttgaaattgatcccttattttacatgaaataaaaacaatttctgttgcggcaggtttgatttcaacacagttgaatctgtaaaaaccaaagctcgtttctgatgcaggacaaatatccacaatatttaaaactgcaagcaccatgcg

SEQ ID NO: 273 - DNA, 270 bp, Homo sapien
  misc_feature (1)...(270): n = A,T,C or G
aagntaccaaaaaaaccttacttncatatcttagtcctcaatggnactgtatgtagtcaatgtacctgattattcaggtctgcaatcccttatctaaaaaccttagggccaaatatatttcaaaattcagactattttggatttcagaaaggtgacatacacacacacacacacacctcacatcctagtgaagtctgnggcaacaccccaaaataagtatgttaatatttctgtggccanaatgtattattctacagttaaagagggggc

SEQ ID NO: 274 - DNA, 314 bp, Homo sapien
  misc_feature (1)...(314): n = A,T,C or G
tcaagtcatctcatgtgattcaaaagctgaggtttatgtttggagggagggggtctaagagagagaacaagtgaggtttgaaacccacctgcataccattctcaaccagctacgttcttccctttacatctatctttcataatgttgaatttaacattatttctatgtccttggtgatctggaaaatcatcttaaatcacagatctggctaggcacggttggctcacacctgttaatcccagcacttgggggaggccaaggtgggttgggattactttnagctccaggngtttcaagaacccagcctgggggga

SEQ ID NO: 275 - DNA, 378 bp, Homo sapien
  misc_feature (1)...(378): n = A,T,C or G
atggtccaagtggtcaaccctagctggcttttgaagagcacaggcagggctcgtactggttagcgggactttcccacagcccagacccagggtgcctgcagaaccccggggttgcagcttggcagccccaagcacgcccttgctggcagcgagcggagaaagggctttgttgttcttgaaactgtcacacttaaaccaagaagcacaacgggccgggagtgggggcagtgttgcacttaattccacacttngggcagcctttcagctttcccacgggtctttggggagattaaaaaacggacacaggaaggaaggagggcagaaacttttccccacagttnagattcnaagcaaggnccgtttgggtttncccttttt

SEQ ID NO: 276 - DNA, 410 bp, Homo sapien
  misc_feature (1)...(410): n = A,T,C or G
tttttatttcttcgagatggggtctcactctgttgcccaggctggagtgcagcggcactatcacggctcactgtagcctggacctccagggcttaagcaatcttctatctcagcctcccaagtagctgggactgcaggcatgcaccaccatggtcagctaatttttgatagagacagggtttccccatgttgcccaggntggtcctgaactcctgggactcaacccatccacccaccttgggccatacttcacttttaatggacatgcttaattaaggggggcagcctntttcagggaataggagagaaaatngggcgggtaactttccgagtntttgccattggcaaggggttaaacttnttcatgggcanttggtanggcgtttntttcctggggtnttggccaatnc

SEQ ID NO: 277 - DNA, 441 bp, Homo sapien
  misc_feature (1)...(441): n = A,T,C or G
gtgcaaagggcaatctcagctcactgcaacctctgcctcccgggttcaagcaattctcctgcctcagcctcccaagtagctgggattacaggcacccaccaccaccctggctaatttttgtacttttagtagagacagagtttcaccatgttggtcaggctggcctcgaccccctgacctcaggtgatctgcccgcctcggcctcccaaagtgctaggattacaggcatgagccatcgtgcccggccttagccactcagttttaaaggacagcccctccccaccccccacacattttttcagtcctcctctctcttttttttaaaatttaaaattaaaatttaaaatttttttatttaatagggatggganttttcaccatgttgggccagggttaggtcctgaagtncttgntttcaagnggttccaccttaccttgggn

SEQ ID NO: 278 - DNA, 437 bp, Homo sapien
  misc_feature (1)...(437): n = A,T,C or G
gattgaatcactccttttagcatacaaaaatgctattataactcccaacttaaaaaataaatttctcttaacctcacacatctcattaactactgtcccctttcttttctttctttctttctttctttttttttagagacagggtcttacctgtcacccaggctggagcgtagtggcgtaaccacagctcactgtagccctgtagccttgaactcctgggctcaagtcatcctccttcatcagcctccaaagtagctgggtattacaggtgcatgctaccatacccggctaatttttaaattttttttgagaggatggggtcttgctacattttccagggctggtcttggaactcccgggctcaagcaatcctcctgtctccccctaaacggataggcagggcgtgncgacctggcacttgggcctgttccattttt

SEQ ID NO: 279 - DNA, 181 bp, Homo sapien
  misc_feature (1)...(181): n = A,T,C or G
ttttttttananacagggtctcactgtgttgcccaggttggagtgcaatggtgtgatctcagctcactgcaacctcctccccctgggcaaaggtgaccctcccacctcagcatcctaaataagtgggatccaaggtgtgcaccaccacacccagctatgtttttatgtagagacagggttt

SEQ ID NO: 280 - DNA, 393 bp, Homo sapien
  misc_feature (1)...(393): n = A,T,C or G
cacttcaggagtggaacgcacgccagcgacgtccaagaagccttgaaacagttcgtcgatgggttcgggaatgcaggatattcccacctccggttaaggatggaagagagtatctgttccacgaatcagcggtaaaggttgacttaaatcgaccagtaacaggtggcctttttgaagaggatccagaaatggggaaggaaggccgaagtcatgagcgccgggattttacccccttaaccttttattattaaggaaacaatgggatatttacttgcttaccaggggaccccaagggacgggttaaagagtttttggatttagggcagcggccgagcggttattcagcttcacttcaaagggcggttatttacggtttnttcccccagattccag

SEQ ID NO: 281 - DNA, 448 bp, Homo sapien
  misc_feature (1)...(448): n = A,T,C or G
gaggaaatgtgcacccattttaatatattctaaagtattgtgctatgtcatagaatctgtggcattcatgttttaggcccagttatatctccatatagagagaggaattttgtgtagttgactggataaaagcttgaacaatggagtgaatatttgatggagagctggtttcggattttgactcttcctctgaatgagcactgtgggcgagtcacttaacctttctcttctttgtgcttgtggacaatggctcaattacatttttttgattctggtaacaagaaaagtaacattcatctctgacttacctaatatctttgcttgtcccnatgcttacacactgtgaggaggaggggcaggaacaccctggggcnaatgcagggaaagcttgggagtgaccacatgggcagccctgtagggatgtccacagtattcttccaccctgcag

SEQ ID NO: 282 - DNA, 395 bp, Homo sapien
  misc_feature (1)...(395): n = A,T,C or G
cattccattccagttccattcgtttccattccattcgagtccactccattccattccattccattcgattccattccattccagtccattccattcaagtccattccactgcattccattccattcgatatcttttgataacaccccattccattctgctccttacaatttaattcaattccagtccatttgattccattccatttgattacattccattcgactccattccattcgactctattccattcgagtccattccattccattccattgcattccgttcgaatcgctattccattccattttgttcataaatctagtagatcacttacttccccctggatggctcagcaacatgtggacaattttntcgtgccggaattcctggcagc

SEQ ID NO: 283 - DNA, 518 bp, Homo sapien
  misc_feature (1)...(518): n = A,T,C or G
cactcataaattacatgagcaaaattaaagcaataaggaggggtctgcctgatgctccacttgaagacatcaccacaaaagaaattgcggcaatgctcaatggatacatagacgagggcaaggcggcgtcacaacgtttaatcagatcaacactgagcgatgcattccgagaggcaatagctgaaggccatataacaacaaaccatgtcgctgccactcgcgcanaanaatcagaggtaaggagatcaagacttacggctgacgaatacctgaaaatttatcaagcagcagaatcatcaccatgttggctcagacttgcaatgggaactggctgttgtttaccggggcaacgagttgggtgatttattgcggaaattgaagtgggtcttgatattcgtaggtgggatatcttttattgttcgaggccaaggcaanaacagggcgttaaaaatttgcccttcccaacaggctttgcctntttgntgctcttcgggattttccattgnaggggnacactt

SEQ ID NO: 284 - DNA, 447 bp, Homo sapien
  misc_feature (1)...(447): n = A,T,C or G
tacctctgtttgaaggccagatgccaaatgccttgaactctataaaccaggtccagcagcttccctaagttctagtgtccctccccagatgataaaagctggcttctctttctgaagagccttgacaagctcttacaagaaatagatgtctgctggtttccttaatacccaaaagctttctccttccttaacccttagaaacctttttttctcttatgatttccaaggtcgaaactctcttgatttactgcttcagaaaaattatcctccttttccttggaattctgggagatataaacactccttccagaagtttccaaagccacttacagtttttcttggacacttcactaaaacttaccagcttgctgtgcctgggtggtcgttaacaacctagggatataggaggcctaggaggnaccttttgggctnaattaggaanccacc

SEQ ID NO: 285 - DNA, 131 bp, Homo sapien
  misc_feature (1)...(131): n = A,T,C or G
ctggcgcagtggctcacgcctgtcatcctagtactttgggagaccaaggtgggagagatctctggagcccaggagttcaagancagcctgggcaacatagtgagaccctgcctctattacatatatttata

SEQ ID NO: 286 - DNA, 242 bp, Homo sapien
  misc_feature (1)...(242): n = A,T,C or G
tcacttgtagttctcagtgaaaattacaagatattggtgaaattaaggatatcattagtatcattggatatgttttctttctttcttcttttttttttttttttgagaaagtcccatgttgtttatttctcagaccttaaagaaatctgagcagtgagtcagtaatgtttccatatgacacaagaggctttacttctgagagagaagagacacttaaaggaaatttctntccaagacctggg

SEQ ID NO: 287 - DNA, 351 bp, Homo sapien
  misc_feature (1)...(351): n = A,T,C or G
agctcctaggtttaattttagaacacagggtccatagtgaggtaggagatagaggaaaataataaaaggggtccatggaagtgaaacagttaggaagcaatatttgagaaaagctcagcatttgctgattagagaactgtagtttgtttcctntttagtactattaaaagtcatgatccttaataatccttaattgctaatgtcagatgggagtaatgatatgggctttcaggattcaacgtttcctaacatcaacttcagagtttaccaaatatttgccgtggatggaataagtaggagctgtgccttcaaggaaaagtagggccggactttnaggctgnaagggtaaag

SEQ ID NO: 288 - DNA, 236 bp, Homo sapien
  misc_feature (1)...(236): n = A,T,C or G
ntgttctaggtgcctgggatacagaagtgaaaataaattcttgccccatagagttaaatctgcaatcttagaatgttatcagatcatgttgtatgttcaaacttaaaatagattgatgggtaaataatttatttccttattagtgaggttgaacatttctccatatgtttgtttagtacatttctaaaataagctttgatagcctctaaaataaagaaaatagggagaccctttct

SEQ ID NO: 289 - DNA, 370 bp, Homo sapien
  misc_feature (1)...(370): n = A,T,C or G
tttttttttttttttaatgttggccaggtatggtggcaatcgcctatagtcccagctacttaggaggctgaagagggaggattgatagaggctaggaagtcgaggctgcagtgagccgtgatcatgccactgcactccagcctggacaacagagcaaggccttgtctcaaaagaagaaaagaaaagaaaatntgaaccacagattaggagaaactatctgcaatgcatgtatttgtcaaaggacttgtattcagtataaataactcctacagtaataagaaaataaaaacccaaattaagacactgaggaaaaagntttgaacagacatttcattaaaaggtgtttggaatgacccgttaggcttncaaa

SEQ ID NO: 290 - DNA, 240 bp, Homo sapien
aaaaaacagacaaatgcagtgagcttttgctctctaaagagcagcttcaaagggatatacaagaaaggaatgaagaaatagagaaactggagttcagagtaagagaactggagcaggcgcttcttgtgagtgcagatacttttcaaaaggtagaggaccgaaaacactttggagctgtagaagctaaaccagaattgtccctagaagtacaattgcaggctgaacgagatgccatagaca

SEQ ID NO: 291 - DNA, 425 bp, Homo sapien
  misc_feature (1)...(425): n = A,T,C or G
cttaatattcattcatttatcagatatttattgagcccctactattttccaggtactaatctaggtactgggaatacagaaacaatgtgaagtccttggcccctatattctactcaattagaaagacaattatgggccaggtgtggtggctcacgcttgtaatcccagcactttgggaggctgagttgggtggattaccctcaggagttcaagaccagcatggccaacatggtgaaaccccatctgtactaaaaatacaaaaattagccaggtntggttgtctgtgcctgtactctcagatactcggggaggctgaggcnggagaatttgctttgaacttngggaggtaggaggttnggagttnagccaaggtccatgcgacttcacttgcagccttagggtnacaaggagtgaggctttntctt

SEQ ID NO: 292 - DNA, 367 bp, Homo sapien
  misc_feature (1)...(367): n = A,T,C or G
tttttctttatnattacttttttttttctgcaggtcagtaaaaggatttaagttgcactgacaaaaataccaaaataaaagtgtatttttaagttcccatttgaaattgctggcgctgctggccggatgcatttttgagtttgtattagttgataaattaacagtaataacaagattgtatgaaccgcatggtgcttgcagttttaaatattgtggatatttgtcctgcatcagaaacgagctttggtttttacagattcaactgtgttgaaatcaaacctgccgcaacagaaattgtttttatttcatgtaaaataagggntccatttccaaaccctgcttatggatatggaaaatntttaaaccc

SEQ ID NO: 293 - DNA, 317 bp, Homo sapien
  misc_feature (1)...(317): n = A,T,C or G
attaacatacataacactaggagatattgggcagaaacttgaggangcaanatatttgangttgaaattatgaaggataaggaccttcattaatttaaaaaattgaaaaaggaaaatctaaatcatttaccttgatattaatcacatctggagacagtgaaccaaaggattaccagcatgagctgtgaagaaatattgcttagcttcanaatcccagccctgcttttcactaagctatgagacctatcaacttaggaattataaatactacctactttcatagggattcttangtaccaaatttaaancaaccaaaa

SEQ ID NO: 294 - DNA, 463 bp, Homo sapien
  misc_feature (1)...(463): n = A,T,C or G
gtctgtggagagagtagaaggcagtcaagtgcttgggatacaccgtctctattctacagtgtaacctgagaaccccaaaatgccctgaggagcccaatcctcccatccctcaaagatggcttcagtattcatgttttatcatattatatattataattttttaattaatagaaaaggaatgttaacacaggtcatctggatccagagctccatgctctaagtttttaaggctatgaattttcctcttaatatagctttgactacatcccttagtttgcagtttgtactactttcatgttaatgattttctaaacattctgtaacttcagctttggactttaattcttggacctaagggttgtttaaaggggattttaaaaatcttcaaatgggttgaagtttgtttagncttatggggtcaggattctctggttgcaggggnattacccccattggcttaggt

SEQ ID NO: 295 - DNA, 458 bp, Homo sapien
  misc_feature (1)...(458): n = A,T,C or G
gngcacgaggagccattctcttttctggaactaggaactcccagcgtagcangatgtaaaaggccacacagctgatgtgaagtccccataacacagagaacaccgttggcctccgagagtggaatctaatcggccttgctgatctcactgtgggaagtttctgcctcttcttctgtgtcgtttttatctcccagacccgtgggagctgaaggctgccgagtgtggattagtgcacactgccccactcccggcccgttgtgcttcttggtttagtgtgacagtttcagaacaacaaagccctttcttccgcttcgcttgccagcaagggcgttgctttnggggcttgccaagttgcaacccggggtttttgcaaggcaacctgggttttggggttttgggaaagtcccgttaaccagtaaggagcccttgcctgttgtttttnaaaagncagttagggt

SEQ ID NO: 296 - DNA, 471 bp, Homo sapien
  misc_feature (1)...(471): n = A,T,C or G
tcgnccngngccntcccaaagtgctgggattacagacgtgagccaccgtgcctggtgaattactaaaattttttagaagttagaccaggcacaatggctctcacctataatcccaacattttgggaggctgaagtgagaggatcgcttaagcccaagaatttgagaccagcctgggcaatgagtgagtccctatctcaaaaaaaaaaaaaaaattaaaaagtcattagccaggcatggtggcacctgcctgttagtcccagctacttgggaggttgatgtgggaggactgcttgatcccgagaggtttgaggctncaattnagctattgattcacaccacttgcatttcccagctttggggttnaggagaggggngatttttgttctcttaaaaattaaattttttaaaaagttttttttnaaaccttgttttttgtgttgttgcttcagccttnttgcccgggggtttag

SEQ ID NO: 297 - DNA, 353 bp, Homo sapien
  misc_feature (1)...(353): n = A,T,C or G
gtggaccgacccccaccgcttacccattgctggacgcctgcngcacccgaccccaccgcttacccattgctggacgcttgccctgttgccatctcctcgctagcgtgaacagtgctgcgtgcagatctctctttcattgattgttttgcgtcttgtacccagaagttgggatttgctgggaccatctcttgnccatttttaaaattggggaaattgacatgatcttgattttaaggntattttnaaaaatcantttggggcntgggggttngggttggcttnacgggtgttaaattcaacaacantttttgggggaaggcccgaggacaagggggggattcaactttnagggg

SEQ ID NO: 298 - DNA, 354 bp, Homo sapien
  misc_feature (1)...(354): n = A,T,C or G
taatatacaagtctcctttgtctcccctccaatgtccccataggcactaccgccccctccacactgaccctgccaaagtcccctctggattcccctccctgccttggggccagggacccccctggngtgctgaataagatgatggggatctttagcatcctaggttctttaggaaaacaaggattcaaacctttttaggagccaactattacgatgttcagagctgggaagggtgnttagcgcctcttggggaggttcacaggctcttttttcaatgtttttgccaagaaggttaggggaccctttttttnccaggaaaanttgcatngggagggccaggagantttaacccca

SEQ ID NO: 299 - DNA, 304 bp, Homo sapien
  misc_feature (1)...(304): n = A,T,C or G
gtgagctcaaaggagaaatcaaaaagtgatgttcagaaaacaaggcaaagaaagtcatccaggaaggagggaatgatctacgggcaaatgctgcagatagatcaagtaaaatgaggactgagaactgaccattttataccacttatggcatagaaggtaaattcttcaacctctctgtttctcagtttcctcacccattaacatgggggaaaaattaacggtacccgcctttagggctttnaagcaagtggantacacgttaaaacantttggaacagttaacttnggccacntaggttagggt

SEQ ID NO: 300 - DNA, 389 bp, Homo sapien
  misc_feature (1)...(389): n = A,T,C or G
caaaactttccttgcttttagagagagaagcctgtatatgttacatgtgtgactttcagtagtttaaagagatgtttcaaaaaattgttgcatgtttttgatgcaatttgggaaattgtttacttcacaatgtagtcattcataaaaaaattcatgaaaatacttgaacatatgtttgagggatttttcttttcctttttaaatttttttattttttctgggggacggagatctgctcttacggcccggggtgggagtgaagtggccgcgaatcttgggcttacttgcaacctncaccccccggggttcaagcgntttctcctgcctangcctcccgggagtaacctgggggtttacagggggccccgccaccacgtncccgggnaatt

SEQ ID NO: 301 - DNA, 192 bp, Homo sapien
  misc_feature (1)...(192): n = A,T,C or G
cagcctggacaacatggtgaaaccntgtctctacataaaaacatagctgggtgtggtggtgcacacttggatcccacttatttaggatgctgaggtgggagggtcacctttgcccagggggaggaggttgcagtgagctgagatcacaccattgcactccaacctggggcaacacagtgagaccctgtctta

SEQ ID NO: 302 - DNA, 333 bp, Homo sapien
  misc_feature (1)...(333): n = A,T,C or G
taaggcttcgatccttcccctttggtngnggctctgggagagacgagacttgaaccccaaatgtgccattgactaggatgaggaaaggattgcactaggttaaaggctgggttcaaattctgattctgccacatcactgctttataaacaggcaagctcctgaccctctgtgactcagtttccttattaaccaaaaacttgcaggtccatcttaggagaatttcccagcctggggnaacatgggttgaaacctgttttcttatttaaaaacaaaggaaaaaaaatttaggccaggtgttggtnttcggcagggcntgttagttccccaggcca

SEQ ID NO: 303 - DNA, 298 bp, Homo sapien
  misc_feature (1)...(298): n = A,T,C or G
ttcattttgtccaaaatagagacgggtataggtgtcccctgcaggtggaagaatactgtggacatcctacagggctgccatgtggtcactccaagntttcctncatttgccagggtgttctgccctctctcacagtgtgtaagcatagggacaagcaaagatattaggtaagtcagagatgaatgttacttttcttgttancagantccaaanaaatgtaattnagccattgtccaccaagcacaaggagggganaggtttaagtgacttcgcccacagtgctcctttcagagggaag

SEQ ID NO: 304 - DNA, 352 bp, Homo sapien
  misc_feature (1)...(352): n = A,T,C or G
aaattgtcacatgttgctgagcatcagggggaagtaagtgatctactagatttatgaacaaaatggaatggaatagcgattcgaacggaatgcaatgggaatggaatggnaatggactcgaatggaatagagtcgaatggaatgggagtcgaatgggaatgtaatcaaatgggaatgggaatcaaatggactgggaatttgaatttaaattgttaagggagcagaatgggattggggtgtttatccaaaagatatccgattgggattgggattgccagttggattggactttgattgggattggaccttgggattgggaattgggatnccgaattgggaattgggaattggg

SEQ ID NO: 305 - DNA, 341 bp, Homo sapien
  misc_feature (1)...(341): n = A,T,C or G
tccccctaggcccgggcagccagcaggtgagattgtgtcacaggggcttgctcacaaccacatcacctcaaggtcaaagcctcatggtctacctaaggccacagcattctgggccaggccatcattcggtttcagatcagggcagatactaggcaagatgaaatgagctaaggcagagttgggaatgaagagccaaggagatggtcttaggaatgatccaagttaaagtgcggatttatggctgttgcggggcccatggagttaaatgtttcatttcaggagttaantgttttgggaaantttttaaaaggcatttttgggcnttgcttattggacatggc

SEQ ID NO: 306 - DNA, 264 bp, Homo sapien
  misc_feature (1)...(264): n = A,T,C or G
ttttgaantaaagnttcactcttgtcgcccaggntggagtacagtggcgcaatctcggctcactgcaacctccgcctcccgagttcaagtgattctcctgcctcagcctcctgagtagctgggattacaggtgcccaccaccgtgcctggctgagtttttnttagcgatgaggttttgccatgttgggcaggctggtctcctgacctcagatgatctgcccgaggtcaggagttcgagaccagcctgggntaacatgctcgtgc

SEQ ID NO: 307 - DNA, 477 bp, Homo sapien
  misc_feature (1)...(477): n = A,T,C or G
cacctntcaggaggngtggagaacggnanaatggtggcagcttgcacagcgtggacactgtgtgaccttgggcaagtcatgaacgctctgggggctcccgattaaggatctccagcactggactcatgatctatacaggattctagcttggggatcctacaattcagggtgagtattctgattcatgaatcttgaaaacagtagcatagaatctaacttccattgccagtgaccaagagatccctcttggactggagagcgtgtgcccatgtgactgtgtaaagacaattattagttttaggaaattcaaattttgcttaatggaaacatcaccatttaaaggccaggcgtnggtggcttcacacctgttaatncccagcncttttgggagggccgaggcngggcagatccaccttnagggtcagggagttttaggagccagcctggggccaaccttggtngaaacctcntctcttc

SEQ ID NO: 308 - DNA, 387 bp, Homo sapien
agaggggcactgctccatactgaaaggtctcaaattgctatatttaagttaccaaaaaaaccttacttccatatcttagtcctcaatggtactgtatgtagtcaatgtacctgattattcaggtctgcaatcccttatctaaaaaccttagggccaaatatatttcaaaattcagaatattttggatttcagaaaggtgacatacacacacacacacacacctcacatcctagtgaagtctgaggcaacaccccaaaataagtatgttaatatttctgtgggcaaaatgtatatttacaggtaaagagggggctggtaaataaaggaccaccaattaccctttacatccacttcaggatccatggttttggcccactatgggggtta

SEQ ID NO: 309 - DNA, 362 bp, Homo sapien
  misc_feature (1)...(362): n = A,T,C or G
aggcagggaaataggtcatgcaaatctatcatgctgtttcctgtgatcagctctggtaaaaaggttaggaaaggagacataacatgaaggctaaaatgcaacttagggattctccatggattccaagtgtctacattctccctgtcatctattagcaaagaaaacccaatgctggttcttttgctgtacaaaataacctaagaggttcagggactttctttagaactgcctcaccaatagaatggggaattgttacttctagaagaatttccattagccctttaaaatccttcaacattcattaaggccaaagagatttcacctaatttagtctgatggggtatgtggancagtctttctag

SEQ ID NO: 310 - DNA, 435 bp, Homo sapien
  misc_feature (1)...(435): n = A,T,C or G
agtgaagcgttntggcactgcaaccaccgcattttcgcgttgactggcaggaatttgccgcattattaagcgagcgcaccagactggtgatcctcaacactccgcataaccccagtgcaactgtctggcagcaggctgatttcgccgctttgtggcaggcgatcgcgngcacgagatttttgtcattagcgatgaagtctacgagcacatcaacttttcacaacagggccatgcagtgtgctggcgcatccgcagctgcgtgaggggcagtggcggtttcttcatttggcaagacctatcatatgaccgnctggaaaagtgggtaattgttntttcngccaggcccaattaagnggccgaaatttcgcaaaggtacaatcaagnaactttganccttttttnggggggaataacccccggcaaantttggcgttt

SEQ ID NO: 311 - DNA, 452 bp, Homo sapien
  misc_feature (1)...(452): n = A,T,C or G
gctcattgcagctgtaaactcctgggctcaaatgatcctcccaactcagcttcccaagtagctgggactatgggtgcacaccactgtgctcggctaatttttaaattttttgtggagacgggtcttgtggtgtcacacaggctatgatgcagccatagctcattgcagcattgaactcctggggctcaagcaatgctcctgcttcagcctcccaaagtgttgggattacaggtgtgagccactgccccttgcctgtttgcttctgttaggaacacttttgcaacaagtcaaaaacattaaacaaaacacaccaattcttaaatgggctttaaagggatagggaaaattattcttcagganaaccaaaaacagaggtcaggggggnaaactttcaggggttnggtttgaatcttgcttcgttggccggaatttcctngcaggcccggggggat

SEQ ID NO: 312 - DNA, 464 bp, Homo sapien
  misc_feature (1)...(464): n = A,T,C or G
aagagatagggtatcactcagtcatgctggctgctgtgatgatagctctctgcagcttcctgcctcagcctccccttcctgagtagctaaatctacaggtacatgccactatgcccagctagcaacttaatttagatcacagaaacacctctacacttttattctaccaatcccccacattttaaaattgtaatgtcacaacttacatcttatactgtgtattctttaacaaattgttgtagctattattattttaatagttttgtatttaacctttatactaaaggatgtacggggatttacctaaccatcacaggtggttaaaggtttctggaatttgactgtggtaattactttggacaggttgaggttttatactttcacaggttttgtggttactaattgggcatatttttctttggggcttggaggggactccctttggggatttncttctaggngga

SEQ ID NO: 313 - DNA, 262 bp, Homo sapien
  misc_feature (1)...(262): n = A,T,C or G
gtgcagtcngntcatggtgcagtcagccttgaccttctggctcaggtggtcctcctgcctcagcctcccaggtagctgcagcctctgtcccttcaggagggatcaggcctccgggaacagtcaccggaggcntcccaggtgatgggggtgacggagtaaaatgctgagggccgggcagngattggagttacaggaagtggttcccctgacagacacgcagaacaccctttacctcggcaaggaaacagggtcccgcccgtga

SEQ ID NO: 314 - DNA, 216 bp, Homo sapien
ccattccattccattccattccatttcgttccattccattctattccgtaccattccattccattccattcctttccattccattccattccactcgtgttgattccattcctttccattccattcggtttgaaagcattccattccattcaattccactccattccattccattccattccattccattccattccattccattggagctcgtgc

SEQ ID NO: 315 - DNA, 504 bp, Homo sapien
  misc_feature (1)...(504): n = A,T,C or G
gtttagtctgcatcagagagaagactaaatccccatcactatcaacactattatatggcattcaagttccttcgcacactggcctcaacttgcacttctagttttatccgtcactgttcatcttcatatacccaacaacatggtaatctcaactacagaaaactcccccaaccaagaattcccaataagcaaagttcaacttatacctatttccaaatacatttttgatagtcaattgggtcattttangantaattaggagaatataggantctcggcaccaggtctnggggcaatatggatggaaaccctggtcttcttacaattanaccaccaaaatttgggcttcggngtgggtgggccncacggcctggttgggtncccggcttacttgggggngggcttnagggtggggnggggntccactttgnggtctngggggnggggtccagggctngccgggggnggcccnccaccncgggccattggcanttccggctgggg

SEQ ID NO: 316 - DNA, 307 bp, Homo sapien
  misc_feature (1)...(307): n = A,T,C or G
agcagcctggccgacatggtgaaaccnnatctctactaaaaatacaaaaattagccgggcctggtggcgtacgctgtaatcccagctacacaggaagctgaggcaggagaatcgcttgaacctggcaggcagaggttgcagtgagccgagatgatgccattgcactccagcctgggtgacagagtgagactctgtctctaaaaaggaacaacaacaaaaaggtattagagaagttgcacggacagctcctggacagttgaggaggtgggagggagaatgggttggaggggcagcatgcgcctcgtgc

SEQ ID NO: 317 - DNA, 445 bp, Homo sapien
  misc_feature (1)...(445): n = A,T,C or G
ggctggagtgcagtggtgtgatctcatcttggctcactgcaacctcccgcctcctgggttcaaacgattctcatttttcagcctcctgagtagctgggattaaaggcgcatcacntacaccggctaatttttgtattttttagtagagacagggtttcgccatgttggccaggctggactcgaactcctgacctcaagtgatccacctgcctcagcctcctaaagcacgggattgcaggtgttgagccaccgcccctgggcattgaagtttgcctctttcttagggtgattttttttcttcattacttaagctgttagggacgtttgcttggggaaggacttttgatattnggacttnattggcctttttcttnccccattttngggaaattccccagctttcacagcgcttccttttcaccattattttnaccccatttngagg

SEQ ID NO: 318 - DNA, 237 bp, Homo sapien
  misc_feature (1)...(237): n = A,T,C or G
gctgtcncaggggtgtgtgggtctaggagcctggctggaggncancgctgggtgggagcttgggacaccgatgggcctgcatctgacctgttgtgctcactgcttaggaccctccaaaggtttacccacctgtcccagctgagaagaggaagcccatccgggtgctgtctctctttgatggaatcgctacaggtgaggggtgcaggcccaagaggtgctggcctcgtgcgaattcct

SEQ ID NO: 319 - DNA, 348 bp, Homo sapien
  misc_feature (1)...(348): n = A,T,C or G
tcaaactgtctaaactattccagctttttaacaggttttaagatctggtagaactaggaaccctctaccacttatcttcattttcaggttgtttttcttggttgttcttgtatgtctatgattccaaatgaactttggtgtcattatgtcatttgtttttaattaaacaaacaacgatacaaccctgctgtttccactgggntgtcatgcaatttagacgaaagctttcctatccaaaaacagaatgattctttcctttacttaaatcttgttctatgtccctcaggaggaattctgcacatacaggtcctacacatttctttatttaattcatatataaatgcttta

SEQ ID NO: 320 - DNA, 294 bp, Homo sapien
  misc_feature (1)...(294): n = A,T,C or G
agacaaggtnttgctctgtcgcccaggctggagtgcagtgcnnnttcatggtgcagtcagccttgaccttctggctcaggtggtcctcctgcctcagcctcccaggtagctgcagctctgtcccttcaggagggatcaggcctccgggaacagtcaccggaggcttcccagggtgatgggggtgacggataaaatgctgagggccgggcagggatggagttacaggaagtggttcccctgacagacacgcagaacacccttttacctcggcaagggaaacagggtcccgcccgt

SEQ ID NO: 321 - DNA, 439 bp, Homo sapien
  misc_feature (1)...(439): n = A,T,C or G
agcagcctggccgacatggtgaaacccatctctactaaaaatacaaaaattagccgggcctggtngcgtacnctggtaatcccagctacacaggaagctgaggcaggagaatcgcttgaacctggcaggcagaggttgcagtgagccgagatgatgccattgcactccagcctgggtgacagagtgagactctgtctctaaaaaggaacaacaacaaaaaggtattagagaagttgcacggacagctcctnggacagttgaggaggttggagggagaattggtttggaggggcagcattcgccttcgtgcccgaatttcttgcagcccgggggatccncttagttcttaggagcggccgccaccgggttggaacttncactttttttttnccttttagttnagggtttattttcgagttttggcttaattcattggtca

SEQ ID NO: 322 - DNA, 367 bp, Homo sapien
  misc_feature (1)...(367): n = A,T,C or G
atgacacttttcttccggaaaaaatccttaggacccagttactctctttcaggattttatatcataatgtgtctgtgagagacagagccagatgttcaggatttcagaccaccatatttgtcctaggaaacctgccagcatttcacattcttgacccttgaattgaatatgaggctctgactatataacagaaaacacccgagttttatgattctgcaagcgtgggtttacactataaatttccaccggtctctgcttgtctcttctaggaatttaggggntattctcaaactctattatacaagcaggtgcccaagtgccttcctnccaaaggtacattnggatactttcttgggggangagangg

SEQ ID NO: 323 - DNA, 527 bp, Homo sapien
  misc_feature (1)...(527): n = A,T,C or G
aatcagggaaggatggaggaactcactactgagcttccatctgtcacaagctcgcaagcacgcttctcccaagaggcgagggacagcagantcatgagtgctgtgaccccagatcaagccaggccgggcagaaagtggggccccatgtcaactacacccccacgtggaagggcctgctggggagattnggggcgagcagagaattgaactttaggcagtgactaagaagctatttccagaaagtaaggcttttctctttcatcctttcgttcacttnacaagttctttcgatattcaaaggatattcgtctttaggatttagggccacccattattttnaatttccctttcaaaggacagcttttaccatcttttcttcatttttttattatttatttgnaaagggaggaggtttgttggattctttgtttnggttttnctggttttncccctttttncacagggttctttcctttagggggaggggagcttggggttttnccaagggcagttttttnaaggcactt

SEQ ID NO: 324 - DNA, 506 bp, Homo sapien
  misc_feature (1)...(506): n = A,T,C or G
tgagacggacnagcntcttgttgcccaggctggagtgcaatggtgtggtctcggctttctgcaacctctgcctcctgggttcaagcgattctcttgcctcagcttcctgagtagctgagattataggagcacaccaccacgcccggctaatttttgtattttttggtagaggtggggtttcgccatgttggccaggctggtctcaaactcctgacctcagatgatctgcccacctcggcctcccaaagtgctgggattacaggtgtgagcagccacgcctagcctattattattttttgagacagggtctttgctctgtcacccaggggtnggagtgcagtggcgcaatcatagttcacagcagcctcaaaactctttgggcttaaaacagtctttcctgttgcaacatcatgctgggggtaaagtttttaatttttgtgtaggagacaggggtttnctatatttnccagggttgatctttnagctcctagtatcatngcaatctt

SEQ ID NO: 325 - DNA, 257 bp, Homo sapien
attgttagccaggctggtctcgaactcctgacctcgggcagatcatctgaggtcaggagaccagcctgcccaacatggcaaaacctcatcgctaacaaaaactcagccaggcacggtggtgggcacctgtaatcccagctactcaggaggctgaggcaggagaatcacttgaactcgggaggcggaggttgcagtgagccgagattgcgccactgtactccagcctgggcgaccaagagtgaaactttcgtctcaaa

SEQ ID NO: 326 - DNA, 122 bp, Homo sapien
  misc_feature (1)...(122): n = A,T,C or G
gtgcctgaggagttaatttcgntcacttcgaacctctctgtttactgataagttccngatcctnctgtcctgaaaataactcaatgttggcctgtntagcttcagtgattgcgattcgcctg

SEQ ID NO: 327 - DNA, 359 bp, Homo sapien
  misc_feature (1)...(359): n = A,T,C or G
agattcaaccaaccctgaagttttccctgactctgtttttgttttctgagatattttcctatcctttaagccatttagaattggtgtgttttgtttatgtttttgacttgttgcaaaagtgttctaacagaagcaaacaggcaaggggcagtggctcacacctgtaatcccaacactttgggaggctgaagcaggagcattgcttgagcccaggagttcaatgctgcaatgagctatggctgcatcatagcctgtgtgacaccacaagacccggtctccacaaaaaatttaaaaattagcccgaggcacagtggtgtgnacccattagttccnggttatttgggnaggctgagttgggg

SEQ ID NO: 328 - DNA, 434 bp, Homo sapien
  misc_feature (1)...(434): n = A,T,C or G
ccaaacaaaaacactgtgcccaacaaaggtgtccttcagaaatgaaggagaaataaagacttttccagacaaataaaagctgagggngtttatcaccaccagacatctcttaggaggaatactnaagggggttcttcaagctcaaaggnnaantatgctaattagtaacacaanacatgtgaaagtattaaactcaacttgtcaaagtaattncaccgtcaanttcagnaaactttnaacactgtgntggttagggtaaatcacgtaccatctttnggtattnnaggtttnantacnaanactatttannattnnttnnttngctaccanccaattttgtttnanggnttacnccggtnttnngntgtnagttgtgnnccttnccntttttnaattgtggggngnttgggtggnnnnnagtgtngaggtattta

SEQ ID NO: 329 - DNA, 192 bp, Homo sapien
  misc_feature (1)...(192): n = A,T,C or G
atccaatggaatggaatggaatggaatggaatngaatagaatagaatagagtggaattgaatggaatggaatgctttcaaaccgaatggaatggaaaggaatggaatcaacacgagtggaatggaatggaatggaaaggaatggaatggaatggaatgggtacggaatagaatggaatggaacgaaatggaa

SEQ ID NO: 330 - DNA, 312 bp, Homo sapien
  misc_feature (1)...(312): n = A,T,C or G
ttccagttacttcttgctgtttttcaggctgtcagcccccttacagtgaaatgcttacaggtagttttgctttattacagttagtgtacaattctcatgcacaagggcactcctccatgccaggctcactatacaaatgttcaatgcctttcagtcagagaggctgactgctgactcctgggtctccctgtggctaaagggtaaagtggatagatacatcttggggtaaactttatttaacttagttggcatgactgatcaggaagtcctcagataccttnacccnccatgnctagggtatttagtgtcatg

SEQ ID NO: 331 - DNA, 337 bp, Homo sapien
  misc_feature (1)...(337): n = A,T,C or G
cgcatcatgccccatccaacccattctccctcccacctcctcaactgtccaggagctgtccgtgcaacttctctaatacctttttgttgttgttcctttttagagacagagtctcactctgtcacccaggctggagtgcaatggcatcatctcggctcactgcaacctctgcctgccaggttcaagcgattctcctgcctcagcttnctgtgtagctgggattacaggcgtacgaacacagggccggctaatttttgtatttttagtagagatggggtttcaccatgtcggccagggtgntcttcgagggggggcccggtaaccaattnggccctat

SEQ ID NO: 332 - DNA, 145 bp, Homo sapien
  misc_feature (1)...(145): n = A,T,C or G
gttntccagagctcagggncaggtaggcaggnncttgggatggctgcagggggagggagncggcagcctgcgaggnctgggnaacctgggctgggcgggggcggggntacggggaccccntggaggatctggagaggtgcagccc

SEQ ID NO: 333 - DNA, 112 bp, Homo sapien
aaaattacctatcaggtactatggtcacagcttaggtgacagaatttttaccccaaacttcagcatcatacaaaatttccatgtaacatacctgcagatgttatgttaaata

SEQ ID NO: 334 - DNA, 350 bp, Homo sapien
  misc_feature (1)...(350): n = A,T,C or G
ttttttttttttttacaaagctttctgtaaatattttattttccatattttagagtcagaaagaagcgcttggtaataaaaataatagagaattattttcttcgagcccnctctggctgcgccggcctccccgcgccgggnccacggtgagtgcgcgcgtcagaggcccaagtccatctcactattacagatatgttacaggccgggatggtcacagaggaaagccagctctcagcatggccccacgtggtgagganccccaggtctaccggctgtctcggacagagctgagaagcctccgcgtcccgtgggggcctaggctgcggcgggtccacggggggcaagantgg

SEQ ID NO: 335 - DNA, 166 bp, Homo sapien
  misc_feature (1)...(166): n = A,T,C or G
ctttcngggcannancttnccccaaggcggccanaacgttgcncagccccccccncttcccctnggcgcggangngcgnccccacccttttcttnaaaaatttgagggcccntttgncccngganaccnnnagnaaccccanggngcgccgtnnnaacggggnaaa

SEQ ID NO: 336 - DNA, 271 bp, Homo sapien
  misc_feature (1)...(271): n = A,T,C or G
nacnnaaaacttttnattgcnctttgggaaagaaacgggaattnattnnccaggnaggangaccccaacaaacttctgcnggaaccagcgnanggcccccccttngcngatnctgtnttgggccccaangnagccngncccgcgnttnttgtcngcgangctnaaaccgggncnacccagnaccanaaagaagnccaggncgaagaaaccaatgntnggggnaaattngaaacccagancgatgtgttccgggggncccaaaaccaaagtt

SEQ ID NO: 337 - DNA, 449 bp, Homo sapien
  misc_feature (1)...(449): n = A,T,C or G
ttttaatacacaaagcaaaaggtaataggctggatgggtgaccaaccttcattcacatacagagcccaagtatagatacagactaattgggaaataagttagagtttgcagggccttaggnctgagagccagaaacactgtccttttggcagccatggaagcgaggatttccttttctggtttcagtgcatgtacgccttcgntggctccatagcctgggngtgcctgcagcacggccactgcctcgtctatcttggcatggagggattctgggagactccagcatgagcaacagctctgagttgtcaatctccagcagcatccccgtgatctttgccagccagctggggtgtggacatcatgggataaggggggtaggagacgctccccaatcatctgctttttgctcatgcagggggcgccgcagccagcatggacgcggtcagggg

SEQ ID NO: 338 - DNA, 360 bp, Homo sapien
  misc_feature (1)...(360): n = A,T,C or G
actgtagggctttcattaacttttgcacccatgaaaatgcctccaccgcctccaggtcaggctccctggaatggggtgtttagtgtcatttccagagacaagctggcagttggctcttgtgtcagagagaagcccacagtcacagtgacaccagcccgcactgtggaagggcttgctatgtgcagtgccctgagccaagtgttccacagacattatctcatttgaaccccatagcagccctgggaaggaggcattgggtgggggaaccaagttgtcctgggggagtcagtgccaagatgttgagccccggacgcggcctcgtcacttcacagccccgtgctnctcagcttcccacccact

SEQ ID NO: 339 - DNA, 293 bp, Homo sapien
  misc_feature (1)...(293): n = A,T,C or G
aacaggggcnacaagcaatagaatctatctggttaaaacatgacagtgatactttttttatttcacagctaagttcacattaaagtaaagaaaacccttctaggcccaaagcgaaggggaaactaaaaaccaattaggcgtgagttaatgctacagctgttcttgggaagggacggtttctaatctcagaaaacaaggggcttcagttttcaaggaccaatcgtgaagagatgggtcctgataactgcaagtatctggggantcccgaaagccaccttacatgaagcaaggtg

SEQ ID NO: 340 - DNA, 472 bp, Homo sapien
  misc_feature (1)...(472): n = A,T,C or G
ttaaccgatctaggaaggatttggaagaattcaacagcgctcaggataatgagaatgtggtcactccgcgcgaagtttaagaactaaagttttagaaacaaacaaacaaaaaacactaactgcccaataatcactgcaaatcccctttgactccctaaatgttgccttacttggaggattggccccagctcccaggggagtgcctgggaccaccttacctggcttgagagtgtcactgcatcctcaaggctctgcataaagcagtggcagctccctgaatgtaaggaccaagacttgcaggggccaactcttctgctagaggccctcctccagtgtagcccaaggggaagtagatcttttcagtgccctctnctttcctggggatgtagttgggtgttcaatcagtgattgttgaactgaattacctaaattgtttcaacttcatacaacttagggcatgcttgcacatatt

SEQ ID NO: 341 - DNA, 395 bp, Homo sapien
aagtgatagagacagggttgggaaggactctagagttagagccttccatgggcagtgctgtttattgtatacacaaataatagtgacaatcgctaatattgactgtggaatgctttacatgcaccttgtcattcacactttcttacaaataatggggcactattccttttatttcttctactcttagaaataacagaagctcagagtggttagtaacttgctctatcacctaggagagcaaatggggggagccagggcttcaaatgtggggtgtgtctgcctcctgatccccaactctttaagcattttgccatttcatctttcaccaaggctctcctgctctccagcatgatctgggggctctggaactgtttctccactagccatctgagggt

SEQ ID NO: 342 - DNA, 363 bp, Homo sapien
  misc_feature (1)...(363): n = A,T,C or G
tttcactaacacaaaagtcatcaacaaaatactggcaaatcaaatacagcagcacatcaaaaagcaatataccacaatcaagtaggctttatttctgggatgcaaggctggttcaacatatgcaaatcaataaatgtggttcaccacataaatagaattaagaccaaaaattatataatcatctcaacagatacagaaaaagctttaaataaaatctacctccctttatgataaaaccctcaatagactaggcatcaaaggaacacacctcaaaataataagagctntctatgggcaaacccataggacaacataatacctaatggggcaaaagctgggnaccntttcccttggaaaactggg

SEQ ID NO: 343 - DNA, 334 bp, Homo sapien
  misc_feature (1)...(334): n = A,T,C or G
gcactgttcaattagtcaagcaattgtnaaattctcccagtcttagaaaagatacaggtgtgtgtccctctgctgtggctgtnactgaggcttcggtaaaggttgccgtctaaaaccaccggccggcccttgaattcttttttttttttttttcagacggagngcanctctatcacccaggctggagtgcagtgacacgatctctgttcactgcaacctccgcctcccgggttcaagcgattcccctgcctcagcctcctgaacagctgggattacaggcacccgtccccatgcccgggtaatttttgtatatttagtagagatgggggttttc

SEQ ID NO: 344 - DNA, 111 bp, Homo sapien
gatggacttcctcaagcaaggaaactgggatatccactcccagagttcccctcgccttcccagcctggaaggttttactgttggccatcaacatgtcctgcttgcttgctt

SEQ ID NO: 345 - DNA, 435 bp, Homo sapien
  misc_feature (1)...(435): n = A,T,C or G
aacgacaagggcgggggttgcatctaaatgctgccggccgtgagttgttggcggttgcgagccgcacntgttggcattgcaacagggaataggccgggtcagacgcctggccaaagcgtntncngntatcagcgtgctgccttcttttgcacattattggttaatgccgcgcctgccatctttccacgcgacttatgccgacattgcactggatattgatgcatcgttggccgtgcaggatctatcgcgcaaagggttcgatgcggctatacggcttggcaatgggcaatgggccgatatgcaagcgcannantntgcctctggggaagtgggtaccggttgccactcccgctctggcgcaacagtgggcagaccgcattcgataatnggagcgccaggnatgccgctgttagagcatgacgtcacaccgttggc

SEQ ID NO: 346 - DNA, 460 bp, Homo sapien
  misc_feature (1)...(460): n = A,T,C or G
ctctatatcaactgaatttgaatgttggcctgtgttgtgggaagtcagggccccgaacggagggactggctgaagcacgggcagaagaacataaattgtgaagatttcatggatatttatcacttccccaatcaatactcttgtgatttcctatgcctgtctttactttaatctcttaatcctgtcatcttcgtaagctcaggagggtgtatgttgcctcaggaccctgtgatgatggcgttaactgcacaaactgtagagcatgtgtgtttgaacaatatcaaatctggggcaccttaaggaacagggataacagcaatgttcaggggaacaaggggaggataaccttaaagtctgggctgcctgtgggccagggcnggaacagagccatatttctcttcttttcaaaaggcaaatagggaggaaatatcgctggaattctttctcgtgcccgaattcc

SEQ ID NO: 347 - DNA, 164 bp, Homo sapien
acataaacattgctgataccgtttagctgaaacgacatacattgcaaggagtttataaatgagtatcaatgagttagagtctgagcaaaaagattgggcgttatcaatgttgtgcagatccggtgtcttgtctccatgcagacatcacgaaggtgtttatgtag

SEQ ID NO: 348 - DNA, 204 bp, Homo sapien
ggtttttgtttgtttgttttgttttgttttgagacaggtgcttgctgtattgcccaggctgaccttgaactcctgggctcaagtgatcctcctaccttagcctcccaagtagctgggactacagtcattcaccagccattgcacccaaccttttgcccattttaaaattgggttcttcatttttttttttgttttttttttaat

SEQ ID NO: 349 - DNA, 414 bp, Homo sapien
agaccacagggagtgatgaaaatctcagggaagggatgccatgtggacactggtgaccacaaagaacactctcccattatcttagcatcatggcaactcagctaatcctagttcaaatgtccctcttcccagacgcccctcatgacccctcctcactgggagggatgcaccccagctccgtctcccacttcagagccttctgtactctgctgactctgtccagaatcccagctatttgggttcaagcatcccagtgacctgggctctatacgtcttaatgtgggtatttctgatgtagggaacagtattttctaaaatggggaacagacacctagctcacacctcctcactgctttctcactactcacttgggccacaccattctctgctcagtgccccatgggaaggagacgt

SEQ ID NO: 350 - DNA, 445 bp, Homo sapien
  misc_feature (1)...(445): n = A,T,C or G
tgagacagagccgtgctctgttgcccagactggagtgcagtggcanagtcntcggctcactgcaacctctgcctcccatgcagactcagacacccaccagagaccagagactcgaaggcctgtccatggtcacacagcagcaggaggcagggcgngtatctggacccacacctgcaggctccggaatctaggactgcacaaggtccaaggacacantcaggtttacagacgcagccacacagaggatgggcgcaggggcagggcgggntgaagagcgagaggggtgaggggaaggagggcataaaaggagaccactgaaagcagaagccaagcgagttcccgaacatgcgcgntcccagcagcaccgttcccggcagccaccagcccagacgcccntccacagaggcgcggaaaaacagcattgcagttcacccgnaccgttgga

SEQ ID NO: 351 - DNA, 397 bp, Homo sapien
  misc_feature (1)...(397): n = A,T,C or G
atggacatagttcaaaatataatagtaataacaaaaaataacttttttttttttttttttttcctgagatggagtcttgctctgtcgcccaggctggagtgcagtggccgaatctcggctcactgcaacctctgcctcccaggttgaagcaattctcctgcctcagccccctgagtagctgggactacaggcacacggcaccaggaccggctaatttttgtattcatattagagatagggtttcaccttgttggccaggttggtcttgaactcctgacctcatggatctgcccgcctcagcctcccaaagtgctggggattacaagcatgagccgccgtgcctgggccaacaaagtgcattttttacactatgagtcaggttttgggagagaggnca

SEQ ID NO: 352 - DNA, 404 bp, Homo sapien
  misc_feature (1)...(404): n = A,T,C or G
cttgtgctgcttttgtctgatttgttatctgggtaatactggcctcaaaaatgaattgatgttttccngcttctctgctttgcaagtgtttgtgaaggattggttattcattaagtgtttaatagaattcactagtgaagctatgtgagcctgggctagactgaagaagagttctcattagtctaatctatttacttgctgtataagtacgcatatattctctttcttcttggttaacttttacaatttgtgtatagcagggaatttgtttctaatttgtagtatttcatgcttctaggtttttgtggcagttgagatgtaagaataaaagtaatgttgggagaaggaagttgtggacaatccntgaatatcccaacatctgttgtaggaagggttaaganttt

SEQ ID NO: 353 - DNA, 269 bp, Homo sapien
  misc_feature (1)...(269): n = A,T,C or G
ctataaaagggagaagagcaatgagacaggagctggaaagggatgaggggccaaatgaggttttcatttataaagatgagaaatatatcacaaatgtgtgctgatagaaagagcaagcataaagagagcactgatgacacaggagagtgaggggataactactcgataaatgggctggatagacagtggctgagtgcccatggagctttntgtaaataaatttntggtgagacgagccaagatggctgtctagtcaaatccagcccctt

SEQ ID NO: 354 - DNA, 220 bp, Homo sapien
  misc_feature (1)...(220): n = A,T,C or G
aagnccccngggggntttnattttttntttnaaanancctnttctgnggnttcctnggntnttttgncccnnatgccnaagagccgggcgttggnacgggccaaacggagannagcnaaggnttnaaaattnttntntncccnagnnangacncgagnttnccccttntaaaagacgtnccggacgggaangaccggnccggaaagctgggnggccantt

SEQ ID NO: 355 - DNA, 463 bp, Homo sapien
tttttgtttgctagtcctttctccaacctcaggtggtttccttccacacaggacatatcagcactctcctaacagcttgtgggaactcctttgcatgtctccaaggcactgtctctgtatgtagtttctttctgttaggctagtccacaaattctggctgccttggccccactaagtgtcaatctttgtgacctcaactctttgagactgtaaggttctgtttaagccccatctccattctttacactacatcctgtaaattgcttcaagggtgtgaggtcaggcaaatgtaggactcacatcattttttcatcttttctcaggaatcccactcctgctctgactggtatctaatatctaaaagccattgtttcatctgttttatccagttttctgggtagtataaactggggacaacaaatctaatctctgttactccatcatgggctatttgtgggaaatt

SEQ ID NO: 356 - DNA, 376 bp, Homo sapien
  misc_feature (1)...(376): n = A,T,C or G
gaggatgcatacaaacaagcccagacnnaaaaagactagtaaatatctaacatttccaacacccagatcagatacaggtggatttncacaagcatcaacaccatcctgaaaaacatgacctcactaaatgaactcaataaggcaccagaggccaagcctgaagaaagagatatgtgaccttctttcagaaagagaattcaaaatagctgctttgagaaaactcaaaganattcaagaaaacacagagaagganttcagaatgctatcagatannttaannntnttganntanacannnnnanaacagannttctnnagttttcaaatagctgtcttcaagttcactnnttttgtcttctgcttgnatccattctgc

SEQ ID NO: 357 - DNA, 358 bp, Homo sapien
  misc_feature (1)...(358): n = A,T,C or G
ggagtnttgctgtgnagccaggacanngcccactggcacgatcctnagcncactgnaaccccgggggaaggncctgaggtnttntctaaaagaaaaaancccccaaagattntctnanaaaacttttttcagngagctgctgtnatggnggtnaaaccagggacccnntggncagccgtnaacaggatntatgcagagnccnctggaggganttttaagcagataaatatacaaatagngtaacacagangcanttaaaaacaagcaggntnttcaaggctctcttcattgttcttttctcacctgnaaanttccatcagggcccaaatntttggtncatttcaaatgancattgttt

SEQ ID NO: 358 - DNA, 462 bp, Homo sapien
  misc_feature (1)...(462): n = A,T,C or G
gacgntangagcatngtgtttattagaaattnggcaccaagtcgtctttcaccagtgacaacagaaggaacagaaaacctccatggccacccttncccaccacgctgcgtnttcaggangagtcttntccaaatccccaccccctnagangatgaggattnctctgtggaaaatacactcagcagaccagacacagntcagcgcccacgtctgttagccttaggactggggnatgttttttttcccagagaaagaaagcanttttaaaaagcagtaatcaattaattcagaatgagcanaggcttaacctctattctccctgccctctgcagagttcacactgcagagcccttcttnctttgagacacccctaggagcagctttctcctgggctctnccctgctgctgngactgtcactgtcctctgatctncacctgggatctccttgcctgctggcatat

SEQ ID NO: 359 - DNA, 356 bp, Homo sapien
  misc_feature (1)...(356): n = A,T,C or G
ggaatgttacaaagcacaggtggcaaactgctgttcaaaatctagaaattcagctgtagcctgtgactttggtgtaagaaaatcagggaagtttggggttttccaggtaaaactgaactctgacggctggactttgagggcttctccctcagcttgcctcaggatatggtggaactttgccctttcttgacttgaaattctttaaacagaatccattttaattcactacaatttaaatactacacatgccataaatcactttcagggagagaaaggaagaaggggctgtggtgggaaaaaagagaacaaggatttccagaggtngggaaaaaatttccaggggttaacatttcaaa

SEQ ID NO: 360 - DNA, 401 bp, Homo sapien
  misc_feature (1)...(401): n = A,T,C or G
taacatttatgacagatgttgatgaacaataactcgttggagctattttgtcatacttgagattttccagaaaatagaacaagcccacagaatgggtttaatctgccaaagcatctccctctttacaagcatctacacaggcctccagccctaagtactttcacctgggacaatgttatgaagcttaatccagtactagtagcagaaagacttgtttactttgggagctaaggagtgagtaggacacttaagactttgttttgtccttgggcttcaaggccaaacttaatggttagccattcactcccagtttgtttgcttatcattttatttacttccatattgttagcctatggagttaacttggaggaaactngaaatgttaactgctggcatattat

SEQ ID NO: 361 - DNA, 354 bp, Homo sapien
tataaatgatgttgtatgtagtttgatagtaatagtattaactctgtagattactttgggcagtaaggcaattttaacaatactgatttttccaatccatgagtgtacaatgtttttccatgtgtttgtatcatctgtgatttctttcagcagtattttatagttctccttgtagagatctttcacctccttcattaggttcattcctagatatttcattttttgtgtgcctattgtaattggggattgtgttcttgatttgactctcagcttggaactttagtgtataggaaatgctgctgatttttgtgcattgattttgtatcccggaaactttactaaagtcatttatca

SEQ ID NO: 362 - DNA, 297 bp, Homo sapien
  misc_feature (1)...(297): n = A,T,C or G
ctgactctaactaaataaatcagaagaagaagaaaaaaagaaagactgaaggggaaacatgcagagttaattcacagaggagcctgccaagtggtctgggtggcagggagatgcacattaaaagaaaagtagatgtcctgccctagccaagtgtggtggggcacgcctgtaatcccagctactggggaggctgaggcaggagaattgctgaacccagaagccggagtttgcagtgagtcttagatcgtgccactgccttccagcctgggcgaccagagcaagggtctttnaaaaaaa

SEQ ID NO: 363 - DNA, 327 bp, Homo sapien
  misc_feature (1)...(327): n = A,T,C or G
ttttgtaaggcttaatacagtgtgttactctaaattaaaaattcttggactagatacagaaagaactaaccataaaagaaaaaactgggccgggtgcagtggctcatgcctgtaatcccagcactttgggtggccgaggcgggtggatcacaaggtcaggagatcacgaccttcctggctaacacggtggaaccccatcacttcttaaaaaaatacaaaaaaattagccgggtgtggtggcgggcgcttgtttagtcccagctatttggggaggctnaggccaggagattggcatgaacctggggaggcagactttncagttgagct

SEQ ID NO: 364 - DNA, 165 bp, Homo sapien
ttaaagcaagcaagcaggacatgttgatggccaacagtaaaaccttccaggctgggaaggcgaggggaactctgggagtggatatcccagtttccttgcttgaggaagtccatctggctccatgaaatgagtagacactggagaactacagcggcacgagcggca

SEQ ID NO: 365 - DNA, 204 bp, Homo sapien
  misc_feature (1)...(204): n = A,T,C or G
acgccgacgtcatcgtccacggctaccgcgccggggctgnganaaaactggggtatggcgctgaacagctcgagccctgtcgcctgggttgatcgacgtgtgcctgaacgcctatggtggacaggtccatggcgtggaagacgtggtttcgacagtttggtgcaaatgagttgtggcctggcagaatcaggtatggcctgggaa

SEQ ID NO: 366 - DNA, 338 bp, Homo sapien
  misc_feature (1)...(338): n = A,T,C or G
gaaagaagagaaatatggctctgttccgcctggcccacaggagccagactttaaggttatctcccttgttccctgaacattgctgttatcctgttcttaaggtgcccagatttgatattgttcaaacacacatgctctacagtttgtgcagttaacgccatcatcacagggtcctgaggcaacatacaccctccttgagcttacggaagatgacaggatttaaggagattnaaagttaaagacaggcatagggaattcaccaaggagtatttgatttngggggaagttgnttaattntcccatggaaattctttccaccattttnttgtttccttnct

SEQ ID NO: 367 - DNA, 404 bp, Homo sapien
  misc_feature (1)...(404): n = A,T,C or G
tctatatctataccttcatctacataaacaccttcgtgatgtctgcatggagacaagacaccggatctgcacaacattgataacgcccaatctttttgctcagactctaactcattgatactcatttataaactccttgcaatgtatgtcgtttcagctaaacggtatcagcaatgtttatgtaaagaaacagtaaggataatacttcaacccgatgtttgagtacggtcatcatctggacacttacagacgggggggcccgggtaccccnatttcgcccttttagtggagtcgtatttaccaatttcactgggccgtcgtttttaccaacgtcgtggactgggggaaaaccccgggggtttaccccaacttnattcgccttgccggcacatcccccttttcgg

SEQ ID NO: 368 - DNA, 331 bp, Homo sapien
  misc_feature (1)...(331): n = A,T,C or G
aaagaactncctacaactcaattaaaaaaaaaacaaaaaaaaaaatgaagaacccaattttaaaatgggcaaaaggttgggtgcaatggctggtgaatgactgtagtcccagctacttgggaggctaaggtaggaggatcacttgagcccaggagttcaaggtcagcctgggcaatacagcaagcacctgtctcaaaacaaaacaaaacaaacaaacaaaaacccaaaaacatgccaggtgtngtggcttcactcctattaatcttcaacactggttaggcttgttacttcgagggggggggccccgttacccattttngcccttttagtt

SEQ ID NO: 369 - DNA, 354 bp, Homo sapien
  misc_feature (1)...(354): n = A,T,C or G
tacaggaagctgccaatttacagcctggctgaaacccacttggggctgcttctacttccacatttaattggttcatccatcccatcattcttttattccacaaataattatcagccaccgcgcctggcctctcctgaatcttttatctatgccttaagccttttctgttcccttcaggacctaggcttttgaaacccaaaagccagggaaaacatgcctttgttatctgctttcttgcaatcacgtctcttccatgggggcacttgagcagagaatgggtgtggcccaagttgagtagttgagaagcagttgagggaggtgttgagcttaggtntcttgtttccccntttttnt

SEQ ID NO: 370 - DNA, 354 bp, Homo sapien
  misc_feature (1)...(354): n = A,T,C or G
atccgtggtgtggcatgtggagtgctgctttcctttttgtagctgagcaggcctccacggtgcgggtggactgcatgctgtttttccgcgcctctgtggatgggcgtctgggctggtggctgccgggagcggtgctgctgggagcgcgcatgttcgggaactcgcttggcttctgctttcagtggtctccttttatgccctccttcccctcacccctctcgctcttcagcccgccctgcccctgcgcccatcctctgtgtggctgcgtctgtaaacctgagtgttgtcctttggaactttgttgcaagtcctaagatttccggagcctgcaaggtnttggggtccaaaatcccc

SEQ ID NO: 371 - DNA, 308 bp, Homo sapien
ttttgaaatagaaatggagattttaacagatgaccacttacaatcaatttggtgacagagacattaactttgaactcccaattaagaaaaatgtcctctctccaaaacctgactcatagtgtaaaaaatgcactttgttggccagggacggcggctcatgcttgtaatcccagcactttggggaggctgaggcgggcagatcatgaggtcagggagttcaagaccaacctggggccaacaaggtgaaacccttattctcttaatattgaattacaaaaaatttaggccggtcctggggtggccgtgtt

SEQ ID NO: 372 - DNA, 225 bp, Homo sapien
cagagagcctagaaaatatcaccttgtgaatatctacttccatgaagtcagtgacacatttttaggtcttaaacctcaatatttaaaatatttgtctctggaatttgaaaataagatgtatgctttgtttactgggataaaaaggttaatcacttgttcatctgattagtaatcaaagtttctaaaatttatttaatacttgatgttactttatggttttatata

SEQ ID NO: 373 - DNA, 273 bp, Homo sapien
aagagaaacagatttaacccaaggggcctggatttgactagacagccatcttggtcgtctcaccataaatttatttacacaaagctccatgggcactcagccactgtctatccagcccatttatcgagtagttatcccctcactctcctgtgtcatcagtgctctctttatgcttgctctttctatcagcacacatttgtgatatatttctcatctttataaatgaaaacctcatttgggccccttcatcccttttccagctcctgtctcatt

SEQ ID NO: 374 - DNA, 290 bp, Homo sapien
  misc_feature (1)...(290): n = A,T,C or G
ttttngtagaganggggtcttgctctgttgcccaggctggtcttgaactcctagcctcatgcgatcctcctgcctccacctctcaaagcatgaggatataggngtgagccactgtggccagccctcatttaacatttattnagcattaacccctctgctaggcactgggtgtgtgctgaatatgacttggtctctatactcaggtttgcagccataaagagatattatcacaattctaatatggaaacatctagacaacgccaccgtggtctgtgcaaatgtgctcctag

SEQ ID NO: 375 - DNA, 267 bp, Homo sapien
  misc_feature (1)...(267): n = A,T,C or G
gcgaccgcacccgtggctttctctgggcgaccgggtcccagactccccccagcacagcagannattccctgcccacccgcggaaaccncccaggatgcagcaccgaggcttcctcctnctnaccctcctngncctgctngcgctcacctccgnggtngccaaaaagaaagataaggtgaagaagggcggcccggggagcgagtncgctgaagtgggnctgggtctgtctacccccgagcagcaaggatttcggtcgttaggtttccg

SEQ ID NO: 376 - DNA, 292 bp, Homo sapien
  misc_feature (1)...(292): n = A,T,C or G
aacacctgaaacactgagatcaaaccaacttgtttcttaacttctttaacttaggcccacatcttaatccacagaaaaaggaggaggagaagttactcaagaatttccacaaatagccatgatggagtaacagagattagatttgttgtcccagtttatactaccagaaaactgggataaaacagatgaaacaatggcttttaggtattaggtacccagtcagagcagggagttgggttnctgaggaaaaggtggaaaaaatgatgttgagtcccttccatttgcctggacc

SEQ ID NO: 377 - DNA, 227 bp, Homo sapien
  misc_feature (1)...(227): n = A,T,C or G
cngccatgcggtctcgcaccagtgcccatccccaggggcttggtgctggtcacgatgccatccctgccttgggctgggcaacggcggcacacgctgggacanaggaagtggaagtggacggtctgacggcctacgtggcaggtgagcnccctgacccactnggtcccaggtcccagcccgcatnccaggtngcccacganccccccagagccttccctcttttcttt

SEQ ID NO: 378 - DNA, 330 bp, Homo sapien
  misc_feature (1)...(330): n = A,T,C or G
aaaaatgcaaagtctaatagcagaatggatcaagcagaagacaaaattagtgaacttgaagacagctatttgaaaactttagaatttctgttttttttttgtttatttcaatatttttaatttatctgatagcattctgaattccttctctgtgttttcttgaatttctttgagttttctcaaagcagctattttgaattctctttctggaaagaaggtcaccatatctctttcttcagggcttggcctcctgggtgcccttatttgagttccatttagtgagggccatgtttttccagggngggtgtttgatgcnttgtggggaaaccc

SEQ ID NO: 379 - DNA, 396 bp, Homo sapien
  misc_feature (1)...(396): n = A,T,C or G
ttgcagtgagccgagattgtgccactgccctccagcctggcaacaagagtaagactccatctcaaaatagtaataataataataataatacccatcatataaggttgctttgggaattaaatgactctgtacagagaacacatagtgcatggtttcatacatagcaagaatacctgaagatcccaaggaaatgtcaattccacggccacctctgggtgcttcaagggcttgagcacctttcacccagcagggcaagcctgggtccctttcctcttcctattaaccttcctttttgatccacacttacaccttcaatccagctatttcccaagggggcaaacatgctttcttnttaggagttgccacacggtttnggaggccaggttttttnggggg

SEQ ID NO: 380 - DNA, 330 bp, Homo sapien
  misc_feature (1)...(330): n = A,T,C or G
aaaaaaaaaaaaaaaatgtagatcctggctnaggaggtctgggataggacctgggattctgagtttctaacaagctcccagggatgtccatgcttctggtccctgaaccacactttgagtgacaaggatgtaaactgttggaaacatggatctggtgctnattgcgggaaagggggtgtcctcagggcataggtcacagccaaagccctgacagcgggcaagagtccccagggganaggcttcctncacattttagggaggggnaagggcttggcctttagccagttggggagcattccattcttngccaggtttttcaagccangccaa

SEQ ID NO: 381 - DNA, 467 bp, Homo sapien
  misc_feature (1)...(467): n = A,T,C or G
taaaccgcagcgggcagcgtattgctggccccacgcctgatggactgcttaacctgaaaacgggcgacaccattgacgtgggcgatgcacctttgcggattgccggagaagtgattcaggaaccggattccggttttaaccccttccagatggctccgcgtctgatgatgaatctggcggatgtcgataaaaccggagccgtgcagccggggagtcgggtcacctggcgttataaattcggcggcaacgagaaccagctcgacggctatgagaaatggttgttacctcagcttaaacccgaacaacgctggtacggtctggaacagggacgaaggcgccgctggggcattcgatgggaacgcttcgcaacagtttcttgcttgcttttcggcgctttttgaccttgcttgcttnggcagttggccagcggttngcggttaggattggnattcatttanttgttcgca

SEQ ID NO: 382 - DNA, 439 bp, Homo sapien
  misc_feature (1)...(439): n = A,T,C or G
tccctcatccccctccnaccctttcccctgggtccccagaatcaattgtatcattcttatgcctttgcatcttcatagctttgctcccacctatgagtgagaacatatgatatttggttttccattcctgagttacttcacatagaacaagtctccaattccatccagattgctgcaaatgccattattttgttcctttttatggctgagtagtattccatgctacatatataccacattttctttatccatttgttcactgatggggcatttggaactgattccatatttttttcagttgcaggattgtgctgctataaacatatgaggaaaacacgcgggtgggcttcacggcctattaattccaggcactttggggagggctggatgcggggcgggattcaggaggggtcagggagatcgaggaccatggggggta

SEQ ID NO: 383 - DNA, 354 bp, Homo sapien
  misc_feature (1)...(354): n = A,T,C or G
ctaattttaaaatatagtataagtgcatgtcttcttttagcttatttgaaaactacataaaacaatttgtatataattttaccattggggctaaaacatatagaaatcaagcacatttgacaataacatcatgaaaaaattagtagggacaaaactgtgttggaataagaaaacgatgtcagattataatgagttcacagggaaaantaaagaggancctaaaagctaatatacccagctctgtaaggtatggtacttttatctcctttcttctctccnccatttttaataggatccaaaantttaccattaaaggtaattaaatgcggtaaatttttttgtttggccaaatnc

SEQ ID NO: 384 - DNA, 254 bp, Homo sapien
aggtattcgtcagccgtaagtcttgatctccttacctctgattttgctgcgcgagtggcagcgacatggtttgttgttatatggccttcagctattgcctctcggaatgcatcgctcagtgttgatctgattaacttggctgacgccgccttgccctcgtctatgtatccattgagcattgccgcaatttcttttgtggtgatgtcttcaagtggagcatcaggcagacccctccttattgctttaattttgct

SEQ ID NO: 385 - DNA, 360 bp, Homo sapien
  misc_feature (1)...(360): n = A,T,C or G
aatatctgcttccagttgaaggcatcccatctctcctaggactgctccttcctgctggctgacatgaggatgcatgtgacactggccatctggtgacctcagcaggcttgggcctcagggtgcgtccaggctgctgaggatggagttggagacagagcaaatcgaggtccccgtgtcagccctgggctgggnttatactcaccttggagcctgccctacttctggagtctttcttatgatttaactagatttatatcaagttgtctgtgactcacaaccaagagcatcctaactgatacatctatcatcagaaaggcaaggggaaaaaaacacgttactttttaaaaactgtattttntt

SEQ ID NO: 386 - DNA, 201 bp, Homo sapien
  misc_feature (1)...(201): n = A,T,C or G
aaaccggactgtccgttgcataaacaggtgacagactgagcttctcagttccactacactgaaatctagactacagttcaggttcctcccttaaagaaaaatatatatataaacaaatcatttacaaatgaagaaagacaaagagaatgaccccctttggngcaacccagtcagttttatggcacctctgcttccaagtat

SEQ ID NO: 387 - DNA, 437 bp, Homo sapien
  misc_feature (1)...(437): n = A,T,C or G
tagcgcaanngacatccgttaaaaaaatcctgttttttttttaagattttctacttatctttggttttttagtgataagtggtttgaaagtgaactgcattcgtatagttttcttcacatttcttgtgcttgaggttatttgagattcttaaaactgtgggtttattgttttcaccaattttgtattttttctactattatttcttcaattttctggggctttttaagcttttgttctgtttattctcctttgggtattccagtaacatgtaagttatgctactaaaagttgttttacagctcactgatcttttttttaatgtgtactttctttctgtgaatttatgctgggttgggnttctactgtgttcgcaggggttggccngggtgtggactctgtgggctttcttgagacatttggaataggaccaaatttt

SEQ ID NO: 388 - DNA, 170 bp, Homo sapien
  misc_feature (1)...(170): n = A,T,C or G
gtccccagtctctcctgtgggggctgcaacccagaccctgcacgcacaggtaccttaggatcttgcccctacccaccaaatacctggggaagccatcccaccccagacttcccacccccaccccaagngtgaggatgggcctaagggactnaagaagagggctcctcatc

SEQ ID NO: 389 - DNA, 110 bp, Homo sapien
  misc_feature (1)...(110): n = A,T,C or G
ttttttnaataaaagctttttgagttttatttttttcctcaggttggagattcatcgtaacatgcatgcattttcaaacagtaacagggtctcaaactttttaaagcagc

SEQ ID NO: 390 - DNA, 438 bp, Homo sapien
  misc_feature (1)...(438): n = A,T,C or G
aagtaggtcttggaagaacagttgtcgcctgcagcggggcngccntaagccagttcagaggaggaggttttcttttaccacccccaccacctcctgctctctttcatcctggccctggaggaggaaggttgagaattaagctgcagcggccgattcttgtctcagaaggtctggggcaggggatgctcaacataaaagttactcatattttagaccatccaggtttttgagactgtgagactctactctgctcttccagagtagttcagggattgacttgacttggctgatttgagtttcctcaggcttgaagcatttaaggcatttccaggggggtnttcagtcggacttttggagctttcagaagctncttcagaggccctggggaaacccttnaggaaattncgagatgggagggggcaccttaggggccacaag

SEQ ID NO: 391 - DNA, 403 bp, Homo sapien
  misc_feature (1)...(403): n = A,T,C or G
ttatctcaataaagctttttaaagacactttaaaaagacatatctgtataagctacaaaaataacacactgagagactaaaatgcttaatttttccatttttcttcttcagcgcaatctcaagtccaaaagtctttccttcctatatatgcatactttgtccagtgaaacaagaaactctattaacttttttattagaaattaaaaaaagccaggtgtgctggctcacagctgtgcttccagctactcagaaggctgaggcagaaggatcacttgaggccangactgggagttcaagaccagctgaggcaacatagctagntcctgtctttaaaantnttttttnggccaaccacggttgctcacgcctgntantcccagcactttaggaggccaaggagggc

SEQ ID NO: 392 - DNA, 461 bp, Homo sapien
  misc_feature (1)...(461): n = A,T,C or G
gaggacaannanntttatggaaaaacaaaccagttctaaacaactgcctctgacttaaagcaatgaaaatgttgttttcttgtgcctcacccagagganttctaggtgacccagtgagaggtggtggagagagagactagaacgtgcaaacttatcatcagctggagtgcaatctttgtagagttctagccaaatcgcaaactccagttccaaattgggtgagacaagtgtgcactttttggaaggagataaacacccactccgtgcaggctacattgaggagtctcataaggagctgagagatagcaaaggaaaaatatccctcttcatgantgggtgaacacagtgatgccagcttcattctggaacagccatccattctagggtatgattagaggccatnggatgagggagccaaangattgcccaggcagtccagttaaaatgcttgtagggcacca

SEQ ID NO: 393 - DNA, 344 bp, Homo sapien
  misc_feature (1)...(344): n = A,T,C or G
tttagccaggcgcggtggtgggggcctgtaatcccagctactgtggaggctgaggcaggagaatcgcccgaacgctggaggcganggttgcagtgagctgagatcgcgccattgcactccagcctgcgtgagcnantggaaggcgttgtcggctcgcaggttcttcttcaggaactccacgcaatgggcctcgagcgctggcaccgcgtacttnttggcggtgtatagcgtggtcatcaccgtctccgggccaatctgcacctcgtccgagtagagaaacttgagcagtgcnaggaaggcagcgggttccacgtcgggcagctcaatctccgtgggatgtttgc

SEQ ID NO: 394 - DNA, 425 bp, Homo sapien
  misc_feature (1)...(425): n = A,T,C or G
aaaagaagtgcctcagccttcaagntggngacagaagttggggaggagctgctctgccccaggctcaataccaatagaccttcttgtatttccgggtctccttgatccccatggcctccatcacctcctcctgcagtgtctttagacagggcacataggttctttctaaagcatcttccactgatgtgtctttggggccatcaatccacgtttcagggacgatgccatcagctctgggaaattcgggtttaggggataattctccctgatcgtgtgggagactcgtacccgctctcctgcttcagtaaatctccactcgatctcagtggggtttcctgtccatagggatccacaagtttgacctggggcggtgggagcaaggggggcttnactaggggatcatgggttccccggtaatccatggg

SEQ ID NO: 395 - DNA, 448 bp, Homo sapien
  misc_feature (1)...(448): n = A,T,C or G
gcagctgttgtcttccaactcagcggcaggtttgctttccccacggacactctggaccttgtagctcctcaagcttccctgtctattgagcagataggaagccgtgtcaaatatgtggcaccttgaggaaatgcctagtgaatgacagtatgtcctattgtgctctaactttatttcagccttatttcttttctgaatattatttttcatttatcttcatttccttacctattttcttttcttctaaagtatgtatctttgttagctccatcatcctttttgggaatgaggcaagtataaaaataaggtaaataaataaggaccccatccctaggtatttttaaggaaaccacccttttgcggggcacacttggctaccttggggtctttagggctctggggggctttngggtgtncctctngggcaggtcctggctggcattggcct

SEQ ID NO: 396 - DNA, 409 bp, Homo sapien
  misc_feature (1)...(409): n = A,T,C or G
gganttctcctgcctcagcctcccgagtagctgatattacaggcgtgtgcaccacacccggctaatttgtgtatttttagtagagacaaggtttcgccatgtgggccaggntggtctcganttcctgacctctggngatctgcccacctcagcctcccaaaaagntaggattacagatatgagcaactgcgcccggccaaatgaacgtntttcctgctcctttcaattccccattccctgggantgggaatgcctttgaactttagccaagtggntagagttctactacttgaattatcagacttatctgtctgaaatcctgatgaggattcctgtntaaggaccctnaagcccgggggtncccctngtttaggggngggccncaccgggtgggaagcttccagttttt

SEQ ID NO: 397 - DNA, 189 bp, Homo sapien
  misc_feature (1)...(189): n = A,T,C or G
aanaataaacaccttnatnananggggaaaganaaaanaaggttttntttcccttngngggccttantttcccaaagnaaganccccaantttntccccttnagnaaaaagccatntnntnggcnaaanttncccggccttnaagnnangnacgnaagaagtttccccngngggaactgcncccccngg

SEQ ID NO: 398 - DNA, 449 bp, Homo sapien
  misc_feature (1)...(449): n = A,T,C or G
atgaccaaagctatttaaagaatctacactggtatgtcccatttctgtacttatcttaaggtattgtttaacattttcccctactcactaaattcccgtaaacttgaagttagttctacactcagcttgattagatttgggttacacttctttctttttcttttttttttttttttgagactgggtcttgctctgtcacccaggctggagtgcagtagcngattccatagctcactgcagtctcgaactcctgggctcaatcgacccttctgcctcaacctcccaagtcacttggactacaggcacatgccaccacacctgggctaattctatgtgtgtagagacagggtcttgctatgttgccagactggtctccaactactggcctcaacaactntcccaccttagtctcctaaagtgctaggattacaggcctgagcactgcacca

SEQ ID NO: 399 - DNA, 517 bp, Homo sapien
  misc_feature (1)...(517): n = A,T,C or G
agtcccaagaggggctgcttccaaactgagcctcctcagacaggaacagctgcactcggcaccgggtgagaaggtgtggtggagcagctgccaggctgtgggcgccgtgatcctcctggtacttctgaaacgtaaagaaatgcccagacggtcactacaaacatggaattttgttggtgttaatatcattttttagagcagttttatatctgtaggaaaattgagtaggacgtacagagagatctgccctctcccctgtcagtaacacgtcacattcgtgcagtgcctttgtctctgcttttgaacccaatattcatattttagatttttaaaaatcatggncacttctaatactacaggttctgtcatagtacccgaagtcaatagttcacatcatgggggtcactcgatgtacacttgggctttncagaagtgtcacggccacacatcaccctaaggtcctctgggctccacctgtttgccctntcccagcctagctctgctgggccccgtcttt

SEQ ID NO: 400 - DNA, 206 bp, Homo sapien
caatttctgagtgattatcctgcaccaggcactgcctagttactggccatacaaatacgaataaaaccaagaaacttacagtcagtctaacagtgaagatggacacaaagaggtggtcaaaaagcactggggaaagcagcatgagagatgtggaagcccttagaagaggcaccacaaatgtttgcggaccgaatgaatgaaccact

SEQ ID NO: 401 - DNA, 329 bp, Homo sapien
  misc_feature (1)...(329): n = A,T,C or G
cggtcgagcagatcgccacgcaacaccagcagcagtncagcagcataaaggagagcgaaaatgccgaaagctgacttaacgttgaccacggctgacgtaacaggcggctaacccaggcgcagaggcagcgatttcagcgtcatgcgncgaagtacattcagcagcatccagcccagcacaccgcacagcaaagccagtacttaccgcgcccgccagcaccgcccaaagcagcatgttgcnacccattantccggcgagcagcagcacaaccaccacactgacantcggcagttaaaatttnagcgggncagactttcggttaccacatt

SEQ ID NO: 402 - DNA, 128 bp, Homo sapien
  misc_feature (1)...(128): n = A,T,C or G
ctcactgcaacctccacctnccaggatccncgtgcctcagtctnccaaatagctgggattacaggntggtgcaccgacattttttatagagatgggattttcccatgttggccaggctngtcttgaac

SEQ ID NO: 403 - DNA, 426 bp, Homo sapien
  misc_feature (1)...(426): n = A,T,C or G
tagtagagacggggttacccaatggtctcgatctcctgacctcgtgatccgcccgcatcagcctcccaaagtgctggaattataggcgtgcaccngcgtgttttctcatatgtttatagcagcacaatctgcaactgaaaaaaatatggaatcagttcaaatgcccatcagtgaacaaatggataaagaaaatgtggtatatatgtagcatgggaatactactcagccataaaaagggaacaaaataatggcctttgcaggcaatctgggatgggaattgggagacttgttcttntgtggaagttaactcagggaatgggaaaacccaaatatccntattgtttcttcactccntagggttggggagccaaagntattggaaggntggccaaaggccttaagggnttgataccatttggntttttt

SEQ ID NO: 404 - DNA, 360 bp, Homo sapien
  misc_feature (1)...(360): n = A,T,C or G
tattattatatattttacatttatgtattttgcaaacaaaaaatttacgcatttattactttatgtaatttttgatctattaaaatgtggagagaagaaaggagataaagtacatacttacagagctgggtatattagcttttaggttctctttatttttcctgtgaactcattataatctgacatcgttttcttattccaacacagttttgtccctactaattttttcatggatgttattgtcaaatgtgcttggatttctatatgttttagccccaatgggnnaaaattatataccaattgttttatgtagntttccaaataggcttaaaggaggacnggcacttataccatanttta

SEQ ID NO: 405 - DNA, 259 bp, Homo sapien
  misc_feature (1)...(259): n = A,T,C or G
tatctcccaatataactatttcccactacagtgatcttaatccagccactctcttgctgggacttttcgacaaaatccctcatgactatgttgtaatgattgactgacttgttacccccagggcagacctacaatagatgccactgggataaagccaaaataggaatgggtatacaggtgggatcttatttaagagggagagggatggganattttaggaggcagggntatgctgtgggtgttccntatgggagggtaa

SEQ ID NO: 406 - DNA, 330 bp, Homo sapien
  misc_feature (1)...(330): n = A,T,C or G
gacactcataaattacatgagcaaaattaaagcaataaggaggggtctgcctgatgctccacttgaagacatcaccacaaaagaaattgcggcaatgctcaatggatacatagacgagggcaaggcggcgtcacaagnttaatcagatcaacactgagcgatgcattccgagaggcaatagctgaaggccatataacaacaaaccatgtcgctgccactcgcgcanaanaatcagaggtaagggagatcaagactttacggcttgacggattaccttgaaantttattcaggcaggcaggattcttcaccatgtttgggcttcaganttt

SEQ ID NO: 407 - DNA, 151 bp, Homo sapien
atgccctttgaactttcccatttacgcaaatacttggaagcagaggtgccataaaactgactgggttgctccaaagggggtcattctctttgtctttcttcatttgtaaatgatttgtttatatatatatttttctttaagggaggacctg

SEQ ID NO: 408 - DNA, 211 bp, Homo sapien
  misc_feature (1)...(211): n = A,T,C or G
gcttcatggccaactataattattagtcctcaagtaagcagcaacacaaatatacctactcaatagcattaagtgggaacaaaaaatatttcctactttaaacaaaatttaaagctagattcagaattaaataatgactctataatatgtaacccaaaaagcagttatgattttttttaaccgtgttantgagtctttccaggctttngat

SEQ ID NO: 409 - DNA, 381 bp, Homo sapien
  misc_feature (1)...(381): n = A,T,C or G
ttcgccacagcccaggtagtgattaaaacgactgtcaagcggcagtggngtgggagctgaggagcacggggctgtgagtgacgaggccgcgtccggggctcacatcttggcactgactccccaggacaacttggttccccacccaatgcctccttccagggctgctatggggttcaaatgagataatgtctgtggaacacttggctcagggcactgcacatagcaagcccttccacagtgcgggctggtgtcactgtgactgtgggcttctctctgacacaagagccaactgccagcttgtctctggaaatgacacttaaacaccccattccaggggagccttgacctgggaggcggtggaggcatttttcatgggttgca

SEQ ID NO: 410 - DNA, 309 bp, Homo sapien
agaaagtggtacttggggcaccttgcttcatgtaaggtggctttcggattcccagatacttgcagttatcaggacccatctcttcacgattggtccttgaaaactgaagccccttgttttctgagattagaaaccgtcccttcccaagaacagctgtagcattaactcacgcctaattggtttttagtttccccttcgctttgggcctagaagggttttctttactttaatgtgaacttagctgtgaaataaaaaaagtatcactgtcatgttttaaccagatagattctattgcagaagcccctgttg

SEQ ID NO: 411 - DNA, 331 bp, Homo sapien
  misc_feature (1)...(331): n = A,T,C or G
tgacctctagatgaaggcccctggcgtgagttcctgttaattaacctctgggtctttgagtcccccagcacaaacttctttcctgtaccctgcggcttggggtcacagggcatgccgggaagccacagctgaggggcgcagactgaagcagtgctccacctctccttctttagctcaggggttgctggtctgtggcaggcgcagaagntggcccctgtggctngttctcagtngcagtctcttaagttcccaccacaggcagctctttatccccttctncctaatttgactntttcttctttgccttgttgcttttnggccttnaaaacag

SEQ ID NO: 412 - DNA, 400 bp, Homo sapien
  misc_feature (1)...(400): n = A,T,C or G
acagattgggagaaatcaccacttgggggaactgggagtatgctgggctgtgtctgagctgcaaatattaaaggccacagacagaggcagccggcacttcccatctttgtaatccttactggaaagggccttgtgntaagngngtgccccttccatctcgcattttctcagggtttccaggggcctctgagcagcttctgaagctccaaagctccgacttgacaccccctgggaaattgctttaatgctttcagcctgagggaaacttcaaattcagcccagttcagtccaatnctggaacttactcttggaagagccagagtaggaagtcttcacaagtcttcaaaanctgggggttggtctttaaaattnttgaggtaactttttatgttttgaggtt

SEQ ID NO: 413 - DNA, 244 bp, Homo sapien
  misc_feature (1)...(244): n = A,T,C or G
catcatctcccgtgaaagcgtcagtcaaccctgtgcagcgctactgccacactccnnttttgcacatgtagaaatcaaggatctgtggctcctctgagtgacttgttcaaggngttctcagtttccaagagatggaggcaggacttgtaattgagatttcccttncttgagaacctgtgttccttaaccattaaaaccacttaagaggtcttctctcttgatcactacctactaaggtgctagg

SEQ ID NO: 414 - DNA, 271 bp, Homo sapien
  misc_feature (1)...(271): n = A,T,C or G
aacatccacggagattgagctgcccgacgtggaacccgctgccttcctcgcactgctcaagtttctctactcggacgaggtgcagattggcccggagacggtgatgaccacgctatacaccgccaagaagtacgcggtgccagcgctcgaggcccattgcgtgggagttcctgaagaagaacctgcgagccgacaacgcctttcatgcttgcttcacgcaggcttgggagttgcaattggcgcgatcttcagcttcacttncaaccttccg

SEQ ID NO: 415 - DNA, 391 bp, Homo sapien
  misc_feature (1)...(391): n = A,T,C or G
ccaaagtcacccctttgtgtatcagagcagagttaagactgctttcctcagagaccttggccagtgctttgtgccaccttcctgtggctaacaagttccttgattttcaatacagatgcaacccttgccttttggngaacagttaagcaagtaaatctgcccttatttggcaatgtagtaggactgattgaacttgagtttattgcagaggaatgggcacatcacattttttaaattttccacttctttactaggaggactagttcttaagggggtaaccattcggtggcagttaggccttaaacttccatctatttcccncttanagtggccttttttggaatatttngttttttttnttganggtcggggggntaccntaaccaatttt

SEQ ID NO: 416 - DNA, 349 bp, Homo sapien
  misc_feature (1)...(349): n = A,T,C or G
tgctcatcaggatttcagacagataagtctgataatcaagtagtagaactctagccacttggctaaagttcaaaggcattccagtcccagggaatngggaattgaaaggagcaggaaagacgttcatttggccgggcgcagttgctcatatctgtaatcctagcttttngggaggctgaggtgggcagatcaccagaggtcaggaattcgagaccagcctggcccacatggcgaaaccttgtctctactaaaaatacacaaattagccgggtgtggtggcacacgcctgttaattatccagcttacttcggggaggcttgaggcagggagaattcctttgaacccgggg

SEQ ID NO: 417 - DNA, 342 bp, Homo sapien
  misc_feature (1)...(342): n = A,T,C or G
acagcctgggnttcagctgcatctcgggaccaggctgnttgctacatcaccaaataaaacatgcctgcttgagaggaattcatntctgagttgacactgtgcaacagaanggaagttacttactctggggtggcacttgagggcctggacagctgcgccaatctccttaatccagctgtgcatgtcttctggactgtctgcctgcaaaacatccatggctcttaccaagattttttaggcactatgatttcagcttccaagtctctgactcaatattaagtttataaaattacaccattaggggtagaaagcatcccagaaatcatctagtccagtagcttt

SEQ ID NO: 418 - DNA, 354 bp, Homo sapien
gctgttactctacaatagacagatgtggtagttgccactttaaccaagagctcgaatttagcataatgaattgtggataacttaacatcatgtacttcctgtagtgatacaatgtgaagtacacagtattatctatgacttatcgtcatcaaaaatgtttaacctggctgggtgcagtggctcaggcctgtaatcctagcactttaggagactaaggtgggagagttgttgaggccagtagttggagaccagtctggcaacatagcaagaccctgtctctacacacataggaattagccaggtgtggtggcatgtgcctgtagtccaagtgacttggggaggttgaggcagaat

SEQ ID NO: 419 - DNA, 356 bp, Homo sapien
ggatccggcgggtgattggggactttggggtgcccatcgccatcctcatcatggtgcttgtggattacagtattgaggacacctatacccagaagctgagcgttcccagtggattctcggtgactgccccagaaaagaggggctgggtcatcaaccccctgggagagaagagccccttccctgtgtggatgatggttgccagcctgctgcccgccatcctggtcttcattctcatcttcatggagacacagatcaccacgctcatcatctccaagaaggagcgcattctgcaggaagggctccggctttccacctgggacctgctgctcatcgtggccatgggggcatctgtgcct

SEQ ID NO: 420 - DNA, 218 bp, Homo sapien
  misc_feature (1)...(218): n = A,T,C or G
agagatctatcatgaggtcagtggttcattcattcggtccgcaaacatttgtggtgcctcttctaagggcttccacatctctcatgctgctttccccagtgctttttgaccacctctttgtgtccatcttcactgttagactgactgtaagtttctnggttttattcgtatttgtatggccagtaactagggcagtgctgggtgcaggataatcactc

SEQ ID NO: 421 - DNA, 478 bp, Homo sapien
  misc_feature (1)...(478): n = A,T,C or G
atctgaatgganttgactgctacggattagaatggaatggaactgaaaaggaatgaaatggatacaacacaaatggaatggaatggantggantggaatggaatngaatcaactggagtggaatggaatggaatggaatggtttggaatggaatacaatggaatnggatggaatggaatggaatcnaaacgagtggaatggaatcgaatggaatggaatggaatggaatggaatgatacagaatagaatggaatggaacgaaatggaatggaatngattcaaaccantaggantggaattgnaattcaattgnaattggaattggaattggaattggaattgganttggaattggaattggatttnggaattggaattcccattggatttggaattngaatccattcccccagttnggaattggaangggaattttaattccnagtttggatttggaaanggatttggattccacccc

SEQ ID NO: 422 - DNA, 223 bp, Homo sapien
  misc_feature (1)...(223): n = A,T,C or G
agacagagntcttgtcacccatggctggagtgcagtggcgcaatctcnggctcactgcaacctccgccttccaggntcaagtgattcccctgcttcagactcctgagtagctgggattacaggcgcctgctaccacgcccggctaattttttgtatttttagtngagacggggtttcaccatattagccaggatggtcttgatctccggacctcatgatccgc

SEQ ID NO: 423 - DNA, 441 bp, Homo sapien
  misc_feature (1)...(441): n = A,T,C or G
catgcnngagtccagaacttanggaggctnaggtaggcagattacttnagcccaggagttcgagactngcctgggcanacatggggagaccccgatctcactacacaatattagccgggtgtggtcagtgcattcctgtggtcccagctacccaggatgctgaggtggaaggatcacctgagcctgggagaatgaggctgtagtgagctgtnagtgtaccactacacttcagcctgggcgacagagtgagatcctgtctcaacaacagcaacaaccaaataaataaataaaagaggtccccagcctggccaacatggcgaaatcctgtgtctacttaaaaatacaaaaatgtgcttagggtgttggtngttcatgcctgttgattccccaagggagggagantcactttaaattccagaagcttgganctttccagttnag

SEQ ID NO: 424 - DNA, 399 bp, Homo sapien
  misc_feature (1)...(399): n = A,T,C or G
gtggtcttagataagatccagaataagtccttggattaccaggcagagatttcagttctcttacttttccccaatgaatggagtttctctctttgcagtgatccaagcacccctgtggccaccagcactggaactgcactgccttagacatgaaacatagcactgggtctcacttaaggcccactgtaataactttgtggctaccacctatgttcactcaaggtcctagcgctctacaatcagaaggtggcaaagcagccatgcttgtgttcttcccttcaggatgggtgcatttccctaggccctggggtccagaagtgcggtcttgggagccagagactaggaagtcaaancacataaaaattctacttgggtactccatacttactgtggctaacc

SEQ ID NO: 425 - DNA, 340 bp, Homo sapien
  misc_feature (1)...(340): n = A,T,C or G
gnttcctacggcctcggcttcccaaatnngttnggnttacaggcntgcacgtagcaccctngcctgagttantacatctggtctcactacgtcttaaccacgnacccacgaagaactcaagtcaagagagagtcggcaagagactctcagcattctgtcccgaaagcacgtgtgtcccgagctcctgtggtttcaggtngcngcgcgtagagganagatttccaatgtttccggagacgtgcgagccacantcantcggggcatccgagcatgagatggggtttctgacagcgactgaagggccagggaagggcagaagtctgccaaggcccggcgttcc

SEQ ID NO: 426 - DNA, 465 bp, Homo sapien
  misc_feature (1)...(465): n = A,T,C or G
aattctgctgtactacagtccatctacaatgccactagcaacatttacaaactagtatggtcaaaatcatctatgaggtttagagaaaaatgctaagtattggttggctaaacatattaactaagtccactgtatataagacatagtctttgattcctaattttagatttatacatcatatcattacaattagtagatggtttcttaaaagtctcctgatacgtactttctgttaagcctgaaaaatgttgagacttaaataaatagcactcaaaanaaattcacattacttcaactctcaggaataattttctcaatttctcttctgtattcaatgacctcactatccaagngctggagctgggaatttcacttatcttttaaaaataggtccccagtttatngggaaataatggcataatttaaatggcatggaggggtgtattatactcgttggaaaggctt

SEQ ID NO: 427 - DNA, 429 bp, Homo sapien
  misc_feature (1)...(429): n = A,T,C or G
ccccaaacnttaaaataaaagttaaaaaagagaaatatttagacaatgtttttagagctggcaagttgatatgttagttttatatgtgggcctcaacctctttcagttgaccatctgcatgacccaacaacctgcatgaccccgacaggccgcacgagnctaagttctcaggacacaaaacaagacagacaggaaagaaatagctgcccatgaaaaggagaaagataattataaatagggtcttccaaaccaaactttacacaagagtcacaaccttaaacaaatgattttctcctgccaacctgaatttaggggaggaaaggggataaagaggaaatgttttacctttccctttcttccatcagggtacttcggggtggagatccgggggagaggcttaaactttgggtaaaaatttctttattcttt

SEQ ID NO: 428 - DNA, 382 bp, Homo sapien
  misc_feature (1)...(382): n = A,T,C or G
cctcctttagcttccacagtgggatgtgtgaccctgcctcctgcctattttaggactctgcctaaactaagtgttctggtgctaggtgaccaaaaccaaaaatccacgaacatgttctaacaaaataatgctgtgaaggtttcctgatgatccatgttactcccatagtatctcccctcttcctccctactacttaccagcaagagaccgtaccacctatttaggatcaatgtaaagcagagctaatatctgaaatcccagtttcttttcaaatgcttccctttccaaatttgaagncagaggaaacaatgtatcactgctggatgtcaatatggccttcctcggctgggggaaccgtggggctcacacctggtaattccca

SEQ ID NO: 429 - DNA, 436 bp, Homo sapien
  misc_feature (1)...(436): n = A,T,C or G
gttttgtttttttttttgagacggagntangcttctgttgcccagggtggagtgcagtggcgtgatcttggctcactgcaacctccacctcccgggttgaagtgattctcctgcctcaacctcccaagtagctgggactacaggtgcccggtacaacgcctggctaatttttgtattttcagtagagacagggtttcaccatattggccaggntggtctcaaactcctgaccttttgatctgcccaccccagcctcccaaagtgctgggattacaggcatgagccaccgtgcccggcctgttaaagctattttaatagtaaacttattttctctatgcactcctttctaaattattcagccccactttctttcaaaacaacgtttatacactgacaattctcaaatttatgtctctagccccatccgctaatatgg

SEQ ID NO: 430 - DNA, 447 bp, Homo sapien
  misc_feature (1)...(447): n = A,T,C or G
tttttttttgnnttttgagacagagtctcacttcgctctgttgcccaggntggagtntggnggcgagatcttggctcactgcaacctctgtctcccgggttcaaggaattctcctgcctcagcctcccgagtagctgatattacaggcgtgtgccaccacacccggctaatttgtgtatttttagtagagacaaggtttcgccatgtgggccaggctggtctcgaattcctgacctctggngatctgcccacctcagcctcccaaaaagctaggattacagatatgagcaactgcgcccggccaaatgaacgtntttcctgctcctttcaattccccattccctggggactgggaatgccttttgaaacttttagccaagtggctaggagttctactactttgattatcagacttatctgtctgaaatcctgatgagcatntccttt

SEQ ID NO: 431 - DNA, 276 bp, Homo sapien
  misc_feature (1)...(276): n = A,T,C or G
annaaaanaaaaaacaccttnanaananggggnaaganaaaanaaggntttattncccntggngggccttnatttcccnaagaaaganccccaacnnttnncccnnaagnanaaagccanctgcncggccanantnccccggcctnnangngangnacgnaagangnttccccngcgggaactncccccccngggnactnctgatttgggnantnttttcccttnnancaaattnctncngaatttttnaagaccgttttttgttaaaaancnctt

SEQ ID NO: 432 - DNA, 450 bp, Homo sapien
  misc_feature (1)...(450): n = A,T,C or G
gagatcctgactgaaaaaaaaaattaaaaaagaaaaaaagggaaaaaatgacgaattgaactttctcaaaattaagaatctctgctctttggaggacactgttgaggcaacgaaaagacaagccacaaacagtgagaaggtatttgcaaatcacatctgataaaggacttgtatccaaaatacataaagaactatacaaactcaggccgggcgcagtgactcacgcctgtaatcccaacacttcgggaggccgaggaggttgggatcacttgaagtcgggagtttgaggccagcctggacccaacatgggaggaaaccccatctcttacttaaaaattacaaaaatttaggccgaggcaggttgggcggcatgcttggttaatcccagcttactttggggagggcttnagggcagggagattcactttggaacctgttgagggcgggggn

SEQ ID NO: 433 - DNA, 378 bp, Homo sapien
  misc_feature (1)...(378): n = A,T,C or G
catnccnttnggattccattccatgccattccactcgggttgatttcattcctgnccattccattcgggntgaatccattccattccattccattccattccattccattccattccattcgattccattccattgcacttgggttgattccattccattncattctattccattcggntccattccattccattccattccattccattccattccattccattccatttcatttcgttccagtcccttctattccgaaccattccattccattccattccattccattccattccttgccattccattccgtgacatgccactctgggttgattccactcctttccattccattcggggttgaaatccattccatt

SEQ ID NO: 434 - DNA, 463 bp, Homo sapien
  misc_feature (1)...(463): n = A,T,C or G
atgtttatgcctctctgtttattctagttttttaaaaatcaaatatacaagatctacaattatttatatccaagatgtctacaccactgcctaagaagctattaaaatatttgtatttgtgcaatggaacccattattcacatggtcctagaataaaaagtcaatttatattgtgaataaatttatcaaaaaacatgtcatccaattcccacaaatgagacattttaaatacagaatacactctgttcatgaatataaaatccccagggtgaaagtcccttaaaacactattatgggttatgtttcctaggaataattttataactttttcagaggaattccttttaaacttgttaaaataccttgtttgctaggtgctcaggaacatctnggggtccngtcttttatttttaggacngtatctatcctgggggcaatgnggggcttgtttttatgnatttag

SEQ ID NO: 435 - DNA, 481 bp, Homo sapien
  misc_feature (1)...(481): n = A,T,C or G
aataaagccagacctggcatggctcagtggcccatgcctgtaatcctggcactttgggaggccaaggcgggtggatcacctgaggtcaggagttcgaaaccagtctggccaacatggtgaaaccctgtctctactaaaagtacaaaaattagctgggaatagtggtgggcacctataatcccagctgtttgggagactgaggcaggagaatcacttgaccctgggaggaacaggttgcagtgagccgagatcctgtcactncactccagcctggggtgacagagcgagattccatctcagaaaaaaaggaaaaagccagaccccaaagtgcatctacttgtaggcttccagttgcagaaagtttaaggaacaggcaaactttaagccaggggttgataggagacattttgtttatttttgatttcgactnatgggcttacattgaaggtctattatttaattcaaaacttcattccaactt

SEQ ID NO: 436 - DNA, 468 bp, Homo sapien
cacaggagcttgaaaggagaacaaagctggcccaattcttcctcttttcaaatttaaagagttttgttttgttttgctttgctttttgtgcctctaattcctattgctttaaatactaaagtgtgcactagacctcactgagtttttaacacagatttctggtggtctaaactccacccatggtctctctgcctctgggaggatttattctgcctgcataatcctcatcatcatcctcaagacgctgagctgatgaatggccacaattccattccccacctccacgccattttaggaaagaagggaaggcaggaaagacggaaggcagcctccagagagggttcaggactttggaaaggaaattaaaatgtcttacaagacggaggacagttttaaaattgaggcagggacagaggaggaggcattttaccaaaacacggtttattatctgtggctggctttgggggg

SEQ ID NO: 437 - DNA, 410 bp, Homo sapien
  misc_feature (1)...(410): n = A,T,C or G
tcgcgtgcacgaatccattctattccgtaccattccattccattccattacattcaattccatgccattccactcgggttgattccattccattccattccattccattccactgcactcgtgttgattccattccattccattccattccattcatatccattccattccacacaggttgatttcattccattcctttacattccattcctttccattccattccacggggggttaattccattccattcctatccattccactccattcccttccattncaatcggggttgaattccattccttttccattncaatcggattacattccnttccaattcaatggggggatgaattcaattccattccatnggaattccattccaanccattccattccattccatttt

SEQ ID NO: 438 - DNA, 406 bp, Homo sapien
  misc_feature (1)...(406): n = A,T,C or G
accgtgccttggnctgaggggagcctactgcactgaagggtgagtctcaggcctgacagcattcaccacaagctgactgaagagcccttgggtcttaagtgaacagtggcagtagctgtgcagcactccccatgggtctgtggtaggagtaaaatggggtgagtctcctctgtggaaaggggaggaaagagtgggaaggattttgtcttttggttggagtgccaggttagccacagtagtatggagtaccaagtagatttttatgtgttttgactcttagtctctggctcccagaccgcacttctggacccagggcctagggaaatgcaccatcctgaagggnaagaaacacaaagcatggctggctttaccaccttcttgattntaagagcnctaggancttttt

SEQ ID NO: 439 - DNA, 404 bp, Homo sapien
  misc_feature (1)...(404): n = A,T,C or G
taaaagtacacttaaacatcattaaattatatagatagctggccacttaaaatttttctactttaatttacaagtgttgacatagtaaaagcaaattgtttaaggatgcttcaatatttgtatattcaacttcagaagctttcaacgagtataatacaccttcatgcatttaaattatgcattatttcctataaactgggactatttttaaaagatagtgaaattccagcttcagctcttgggatagtgaggtcattgaatacaggaaggaggaaattgaggaaaattattctgaggagttggaagtaatgtgaattttttttgagtgctatttntttaagtctcaacctttttcagggcttancagaagtacgtatcnggggncttttaggaacctctactat

SEQ ID NO: 440 - DNA, 381 bp, Homo sapien
  misc_feature (1)...(381): n = A,T,C or G
tcgcganaganaagtgactagaaaacatggtaaaaaagacacatatttgcaacaaccaaggaaatgaattatttttaatatcacatatccaaaaaactattatttcttattattctattattattctagtaattcagttttagattttactttggattttctatgancaaaattacatcattagaagttaatgctaattttgtttgttttttcttcttataccttttctaaaaatttaacctagtaaatctgggaagatcctcttatatcttttattttttgggcttacttcagcacaggctaggaatattcatttaggaaactggggatgctgggaanatagatccttatttaaaaagtcctttatagtttctctttgtt

SEQ ID NO: 441 - DNA, 411 bp, Homo sapien
  misc_feature (1)...(411): n = A,T,C or G
tcactgcagcctttgacctcttgggctcaagcagtcctcctgcctcagcctcccaagtaactggggccacagggtgtgccaccacactgagctaacttttgtatttttagtagagttggggtttcaccatgttggccaggctggtcttgaactcctgacctcaactgatctgcccacctcggtctcaaaaagtgctgggattacaggtgtgagccacggtgcccagccgaggaagtcatattgacatcagcagtgatacattgtttcttctggcttcaaatttgggaaagggaagcatttgaaaagaaactggggatttcagatatttagctctgcttttacattgatncctaaaataggtgggtacggtctcttgnctggtaagtaagtagggaaggaagaaggggagtt

SEQ ID NO: 442 - DNA, 400 bp, Homo sapien
  misc_feature (1)...(400): n = A,T,C or G
aagagatgctggtggcctggattaaggctgcgtcagtnggaggttgtgagaaaggctcaccttcctttttttttttttttttttttttgagacaggatcttactctgtctcccaggctngagtgcagtggtgcaatctcagcttactacaacctccgcctcctgggctcaagtgatacccccacctcagcctcccaagtagctgggatcacaggcttgcgccactatatccggctaatttttgtatatttcgtagagacagggttttgccatgttgcctaggctggtctcaaactcctgagctcaagtgatccacccgcctcagcctcctaaaagtnactgggattataggcctgagccatttgtncccggtnactttccagtattttgaagatagnagt

SEQ ID NO: 443 - DNA, 375 bp, Homo sapien
  misc_feature (1)...(375): n = A,T,C or G
acggggtttcaccatgctggccaggcgggtctcaaactcctggactcaagtgatctgtgcaactcggcctcccagtgtgctgganttacaggcctgagcaccacacctggccaaggtttccttttttcttcctacatagaagtgaggacatgaaatatttgtcattctgtgcctggcttatttcatttaatatacagacctgcaatctcatccattttgtctgcagtggagaggagtttcttcctttttaggctgaataatacttcactgggtgtttataccacagtttcttcattgaaacaaatttcttgaagagcaaatattttnaaagatgtcttgggaatgtggaaactttcacgggntacttgtgcccat

SEQ ID NO: 444 - DNA, 410 bp, Homo sapien
  misc_feature (1)...(410): n = A,T,C or G
tgctcatcaggatttcagacagataagtctgataatcaagtagtagaactctagccacttggtaaagttcaaaggcattccagtcccagggaatggggaattgaaaggagcaggaaagacgttcatttggccgggcgcagttgctcatatctgtaatcctagctttttgggaggctgaggtgggcagatcaccagaggtcaggaattcgagaccagcctggcccacatggcgaaaccttgtctctactaaaaatacacaaatttagccgggtgtggtggccacacgcctgttantatcagctactcggggaggcttgaggccagggagantccctttgaacccggggagacagagtttgcagttagnccaagttnttggccaccacatttccaacctggggccaacagag

SEQ ID NO: 445 - DNA, 421 bp, Homo sapien
  misc_feature (1)...(421): n = A,T,C or G
aactgctatgagatagctatgagaaaactaaaactgctatgagatagaaatgatgtaaaattatgtggaaagttttccctcatatactcacatacagcctttgaagggctctggctctgaccggttgatggccttgagcgagatgaaatcatgaaattgagtcaaatcaatttgacattgaaatgacaagaggaaactcttaaatacataaaaacaagctctcatttgcctaggatagatactgtcttaaaaataaagactgaacctaggatgttctggaggcacttagcaacaaggtntttttnacaagtttaaagggattctctggaaaaaagtttttaaattnttctaggggaacnttaacccttaatnggtgtttttaagggggantttcacccggggggtttttnttattccatgg

SEQ ID NO: 446 - DNA, 333 bp, Homo sapien
tctgccaggtactttggaagtagtggttagaaacatagacactggtcgggtgcagtggctcacgcctataatcccagcactttgggaggctgaggcaggtggatcacaaggccaggagtttgagactagcctggccaacacggtgaaaccctgtttctactaaaaatacaaaaattagccggctgtggtggtgcatgcctatgatcacagctactcaggaggctaaggcaggagagttgcttgaacccgggaggcggaggttgcagtgagttgagatccgcaccacttgcactccagcctggggcaacagagcaagattccgtcttcaaaaaa

SEQ ID NO: 447 - DNA, 403 bp, Homo sapien
  misc_feature (1)...(403): n = A,T,C or G
gaaagccgaggctaagtaggcatccaaatttaacttgaagctccctgatggtcagggcaaaaagagtagcatggtgggtttaggcttgcagtatctatttttggtatttgtaatgccatgtattttttctttgctttgttttattttttaccagtcgaaactcttattgaggtaaattttacatatcgtgaaatgtgcagatgttaaacagttagttgggatgaggttttttttttttttttgagatggagtctcactctgtcacccagggctgggagtgcagtggcctgatatcagctcactgcaacctttgtctcccgggttcaagtgattctcttgcctcagcctcccaagtagctggggnttacagggcatgtgccaccatgtccagntaatttttgta

SEQ ID NO: 448 - DNA, 280 bp, Homo sapien
acaccatgggctagtgcatcctgctgctggtgtccttgaaccaaagcgaaggcttaggggatgctcagtccttgcttccccaaagagaacagcttctttattctctgggaccagactgatgtccttgtgagcccaagaccatctctcccactccatcccattcctccaagcagcacagatataacgtgttttgtaaatgctctctctgtcctgctcattttaaactgtcttcgtcttgtaggacattttatttctttcaagtcttgagcctctctgggag

SEQ ID NO: 449 - DNA, 309 bp, Homo sapien
acaggccaagtagagaccccatttgcatagtaaaagattagggtggagtggccagcttcttcacgtgctatgtaaacatcacacctggtccaaccaatcttcgggccctatgtatatcagacaccatttcttcaagcctgtctataaaaccctgtgcactctactgcaggctggaagtctctcttgtaggagagggagctgttctcctttctctttcttttgcctattaaacctctgctcttaacctcactccatgtgtgtccgtgtccttgatttccttgggcatgagacaacgaacctcaggaattt

SEQ ID NO: 450 - DNA, 421 bp, Homo sapien
  misc_feature (1)...(421): n = A,T,C or G
tcccgacctcaggtatttcagccacttcgggcctcccaaagtgctgggattacaggtgtgagccaccgcgcctagccagctaatttttttttttttttttttgtatttttagtagagacagggttttaccatgttggccaggctggtcgtgaactcctgacctcaagtgatctgcctgccatggcctcccaaagtgctgggattacaggtntgagccaccgcgcctagccagccaattttttttttttttgtatttttagtagagacagggttttaccatgttggccaggntggtcttgaactcctgacctcaagtgatctgcctgccatggcctcccaaagtgctgggattacaggtttgagccaccatgcctgggccaatatttaattngataggantacttttacatatttataggag

SEQ ID NO: 451 - DNA, 349 bp, Homo sapien
  misc_feature (1)...(349): n = A,T,C or G
atgaaacggaataaaatggaatggaatcaaataacgtggaatggaatggaatggaactgaatcaaacagagtgnaatggaatggaatggaatggaatcacactgaatggaatggagtggaatggaatggnaatggnaatggnaatgaaatggnaatggnaatggnaatggnaatggnaatggnaatggnaatngnaatcaacccgagtccaattggaatggaatcgaaagaaatggaatgggaatgggaatgggattccaacccgaatgggagttgggaaaggaatgggaatccaaccccgagttgggaattggccttgggaattggaattggaattccaattggnatt

SEQ ID NO: 452 - DNA, 405 bp, Homo sapien
  misc_feature (1)...(405): n = A,T,C or G
ccattccattccattccctttcattccactcggagtgattccattcctttccattccactcgaatacattcccttctattcaactcggaatgattccattccattcaattccattccattccattccatttcgttccattccattctattccctaccattccattccattacattccattgcattccattccattccatgccattccactcgggttgattccattcctttccactccattcgggttgaatccattccattccattccatttctntcgattccattcaattgggactcggggttggattccattccattccattccattccattccattccattncattncattccattccattccatnccattccactccatnccattcagtgtggattccattn

SEQ ID NO: 453 - DNA, 157 bp, Homo sapien
tctgatagggataattttgtcaactccacctttctttctctctaatcctctttcatagcatgtgtatttgtgtctagatttagtttgggatggggagggaggacatagtactattacatgatatcatcgtggctctgaaggtatctcaaatcctgac

SEQ ID NO: 454 - DNA, 161 bp, Homo sapien
tgtggcatagtcaggatttgagataccttcagagccacgatgatatcatgtaatagtactatgtcctccctccccatcccaaactaaatctagacacaaatacacatgctatgaaagaggattagagagaaagaaaggtggagttgacaaaattatcccta

SEQ ID NO: 455 - DNA, 324 bp, Homo sapien
  misc_feature (1)...(324): n = A,T,C or G
tacataatgtcatatacatcttctcagtgaatagagagagacctgattccttttcatagctgcatattattccagtgtgtgagtgttatttatagttttccctgtgacctacaatgttgcaatgaataatctactaaataatttttcatatctcatatatttgtgagataaattcctagacgtagaccttttaggcgatacagtgtgtgtgttgttacatttctaatgagcaccccattctcttctctgcgagaagtgtgatttgaagatgtgcagggnaagaggaacgtgtagggaagcggcacatgcagagatcactgctgg

SEQ ID NO: 456 - DNA, 323 bp, Homo sapien
  misc_feature (1)...(323): n = A,T,C or G
agggaggaaggatggcttctgggatgctgataatgttctagttcttgaactaggttgtggtatctgggtatttgcttcataataattcctggatgtatgtgaatatgtatgtatgttttttgtatacttttctttatggatgctacatatcacaataaaggtttaaaaacatttaagtagacttaagcaaaataaaatgcttaaaatatgtgaaatatgtatccaaaacccttaaactacaatctcacctctggaaaaatgcttaacattaacanacagtaatttagctagccttgaaacaccatcatgggtttctggncata

SEQ ID NO: 457 - DNA, 265 bp, Homo sapien
tgttccacttgaccagccatttcccaatctgtccccctccgttttgggccttgctagtccctaagacacaacagttttgaaattagaccaactaataaccctacaatggcctctaagtgttccagtgaaaggaagagtagcacatctcttacattacatcaaaaactagaaataagcttcatgaggaagacatgtcaaaacccaagataggtagaaaactactcctcttgtgccaaacatccgagttgtgaatgcaaagggaaaa

SEQ ID NO: 458 - DNA, 189 bp, Homo sapien
  misc_feature (1)...(189): n = A,T,C or G
cctatcttgggttttgacatgtcttcctcatgaagcttatttctagttnttgatgtaatgtaagagatgtgctactcttcctttcactggaacacttagaggccattgtagggttattagttggtctaatttcaaaactgttgtgtcttagggactagcaaggcccaaaaggagggggacagattggga

SEQ ID NO: 459 - DNA, 336 bp, Homo sapien
  misc_feature (1)...(336): n = A,T,C or G
caaaagcagggggctnctgattgtaccttctgtggctctctctggtctcatgcactcgtctccttgccacacgtgcaggcactgtccactgtcacccaggtcttggcacacccacaaggggcaggagcttatgccaacagacaaatgccaacagagccaaagcaacagacatagctctgccctaggaggccttgagatcacaagtggtgattaggacagaaccggtgttatccattgctaggaaagtgacacaaccggaacatgccaagcagcccgtcgttcaggagggcaacagggacacagggcttcctgggcaaaccttaccggcnttagttg

SEQ ID NO: 460 - DNA, 358 bp, Homo sapien
ccagtgcccccgcccctgacctccacagtgctaaccgcttttcccctttggtagatgatctccataggacacacagaccagttgctgactcttgccttttctctcctttgggtctgcaggttgctctggaaatgctgctactgcggaagctgtcaggttaaaatgtcatcctttagcaaattaccactatgccggtagttggccaggagccctgtgtcctgttgcctcctgacgacgggctgcttgcatgttcggttgtgtcactttctagcaatggataacaccggttctgtcctaatcaccacttgtgatctcaaggcctcctagggcagagtatgtctgttgctttggctctgtt

SEQ ID NO: 461 - DNA, 380 bp, Homo sapien
  misc_feature (1)...(380): n = A,T,C or G
gtagagacggggtttaccagtgttggccaggctggttttgaactctcaacctcaggtgatccgcctgcctcggcctcccaaagtgctgggattacaggctgatccactgcgcctggcctatagttggtatttctaaactttaaaatctgggtntgaattggcactcttcagtatataagacagttgctagcatgattctaataagtgtctnggtactaggatacatgagatgcactttcggatttgagtatctgaccctgctttgtcatcaatagaaccaaggtnggaagctggcagtgcttnggttcatgtcacatgttcagtgatcaatatttggacaaaagncgaanaacagcaaantcatggnaaagcttttttct

SEQ ID NO: 462 - DNA, 198 bp, Homo sapien
  misc_feature (1)...(198): n = A,T,C or G
nttaatagaacgctagcgtagattaacaaagaagagatatccaaataagcacaatcagacagaacaaaagtgacattataactaatcccacagaaatacaaaagattctcagggactaatatgancacctgtatgccncaaatctagangaaattggataaattcattggaaattncacaatgttccaaggntttgat

SEQ ID NO: 463 - DNA, 255 bp, Homo sapien
  misc_feature (1)...(255): n = A,T,C or G
tttttagttataaatctaccanttagttcttacatctttggctgtttaaccactcatctcatgattaaagcttttttctaaaatatactctccaagaaggcttattataaaaacagtattccccaagttcattgcatataatagctctgtgactgttgcctttatgtttgacagcctgtctacaaaattcatgggtcacattctttttttttttgaggattttgaagttcttccagtgtttccgagaattgaata

SEQ ID NO: 464 - DNA, 393 bp, Homo sapien
  misc_feature (1)...(393): n = A,T,C or G
accnggtgccagaaaggaagcaatcaagcagcgactatgcataacgagaggattttgaggctgctgggtctcctttctcaggggtaccagtatcctttcctctggccccaggcccaattttggtaccccaggctatgggagccctcacttcactgcactgtactcctcggtccctttccctgagggggaagcctttcccccgtnctccgtcaccaccctgggctctcccatgcattcaaactgaggtgcctgcccttctaggaatgggggacagggggaggggaggagctaggggaaagagaacctgggagtttgtgccaggggctttttgggaatttaagttcttcatttcacttaagggaaggaatttngggaacacaaagggtngggggn

SEQ ID NO: 465 - DNA, 398 bp, Homo sapien
  misc_feature (1)...(398): n = A,T,C or G
gcctcttccctgcctccctgtcaccaagcagcctgctgggcaactcccctccttcttggctgcgacataactcagagtccaaagtttctgctgtctcaagcccttcagccaccaagacactcagcacagggatagggaaactggatcctggacatatggagatggcggaggagtcagagcttttgaagaataagatgcaagcccctcccctttcgaggtgtcctgagagccaaaaatgccagcaccagctgaggcttcatcactggaaacccagcgtccggcaccaggtgaaaacgccgtagccccgcttgtgcttccgcttcagccatgccaccttgcagaattgttcctgcagttcttggaggccaccacagccacacgtnaagaaacagttgatn

SEQ ID NO: 466 - DNA, 369 bp, Homo sapien
  misc_feature (1)...(369): n = A,T,C or G
cctgctcagagcctcccagagcaaagtaatacctngaccaagatctagaaccaaaaggcctgcttggttcactctggaaaggagaagatggcttacacctgtaatcccagcattttgggggtccgaggcgggtngatcacgaggtcaagagatccagaccatctggccaacatggtgaaaccccgtctctactaaaaatacaaaaattngctgggcatggtngtatgcacctgtagtcccagctacttnggaagctgaggcaggagaatcactaggaacccgggaggcggaggttgcagtgagccgagatcgcgccacttgaacttccagcctnggcgaacagagncaaganttccgtcttccaaaaaa

SEQ ID NO: 467 - DNA, 414 bp, Homo sapien
  misc_feature (1)...(414): n = A,T,C or G
gagctgagaaaaggccagttggaaaagtcctgcctagtcttcaaaagcctatatatacatatgtatttcaaagaaaagagaaaatacttacaagttttctaaggtaaatgtcctgagaaaaaggaggggagggaaatctcttctcctgttttcaccagagtaaattgaacctcttatttttaatttgcatttgcccttatattttctatgtgaaaacacattttcttttttcttttcttttcttttcttttttttttttgacggagcttccctcagccacccaggntgggaggtgcagtggcatgatcttgggctcaccacaaccaccatctcctgggggttcaaggtgattctccccatcttcagcctcccgaggtaggctggggattacagggcacccgccattcatgcccg

SEQ ID NO: 468 - DNA, 398 bp, Homo sapien
  misc_feature (1)...(398): n = A,T,C or G
gctcacacctcccccctccctactttcagcagatgtttttttctttaaatgcaagaagagttaactaaatcagcctttatatataaaaaaaagtgttttaagtttctcatagccgatgatcaaaaataccttttcttttgtgaattcaacaggggcactgagaaaagatacattataatgcgtcaaaggctacaatctagccattctttgactttaccttaaaacatctgtacaaatattcctgctcagtgtaagaaatctacctaagcagtcctaaacaaactggaactctgtttactttattaaaaganacaggactgccacacagggtcttacctagtccacacatcttcatcttgccgggnaaagctaattatcttagggncttaaccttccgg

SEQ ID NO: 469 - DNA, 404 bp, Homo sapien
  misc_feature (1)...(404): n = A,T,C or G
ttttttttttggtagagacagggtctcctgtgtttcccagggtctnaaacccatctctaacaaaccaagacacgtagtcagcccttttaatcattagacctagtggtctgcaaagtttgtgttggaaatactttatcttctctcttttgaactggtacatcggctgtgatgcccggagctgcttatactgtggttcccttggccaataatttgtttatgcctaaatcagccttgcctctaagngataaggagatacgtgctttttcttttgttttgtgtcagtgggattctctaataggccgggaacgggnctgcccaagtgatgcacagccccttggtgggggggcctataggatccccccgcaaaactgaaggttaggcctaaggatattagctttgcctgg

SEQ ID NO: 470 - DNA, 281 bp, Homo sapien
  misc_feature (1)...(281): n = A,T,C or G
ccgttgttggcagngntggtctcaaactcctggtctcaagtgatcggcctgcctcggcctcccacagtgctgggattaaaggtgtgagccaccgcgcccggcctgctcatccatttttcatagccacataaaatcagagcagttgtgtgtcattgtccttcctggttatttagcgaaggctgcatggttgtgagtcaagtccttgtccagagctgggtctccactgccctccaggntccatccacccgcctggtttcccgggtcgctgtggcccgcgctgg

SEQ ID NO: 471 - DNA, 213 bp, Homo sapien
  misc_feature (1)...(213): n = A,T,C or G
aagaattcaacaccagcctggncaacagagcgaaaccccatctctgcaaaaaaatacaaaaatgaactcagcatggtggtgcatgcctgtagtcctagctaatcaggaggctgaggcaggaggatcagatgagcccaggattcaaggctgcagtgatctaggattgtaccactgcattccagcctgggtgacagaataagaccctatctttca

SEQ ID NO: 472 - DNA, 347 bp, Homo sapien
  misc_feature (1)...(347): n = A,T,C or G
ggttgcaggttcactgagccgaaatcacaccactgcactccagcctgggtgacacagacagagtccttctcaaaaaaaaaaaaaaaaaaaaaagagagagagagagataattattttgtcctgtattagctggctcctttttttttttttttttttttttnaaagatagggtnttnttntntcacccaggctggantncagtggnacantcctagatcactgcagccttnantcctgggctcatctgatccncctgcctcagcctcctgnttagctaggantacaggcntgcaccnccatgctgagttcatttttgtattttttttncagagatgggggtttcgctc

SEQ ID NO: 473 - DNA, 367 bp, Homo sapien
  misc_feature (1)...(367): n = A,T,C or G
atctgagtgcatcatcctccctgtacaccagtatgttcaccaaccagaaaactccacgtgagtttcagngtacacatnttttatgtggaatatgattacacaggcatgattggatatgcaattggtcacataattgagctcagtctctagccctcttttccatgcaggtaaaactggcccaangttccagccttctaatcgtgtgtttggtctttctggngtccatctcccatcctgangctaactaggagtctgtcatgagttacctcattagcataacaaatantttctatctctcagggaaattcccngggatgtntgaagttctttgtcagggaacttanggatcanagggccagtttaaact

SEQ ID NO: 474 - DNA, 200 bp, Homo sapien
  misc_feature (1)...(200): n = A,T,C or G
gttgtggcacacaatatctcaacacgagacctcatcngagcggccaaacagaaggtgaagtgacacccgacacgacggaaccccagccgccctctgcagccccggtgccacctctccacagacgnctcagcccagtaagctgagtgatgacactntccattagtctcagttcgttgcactgtcttccaacaaaacagcac

SEQ ID NO: 475 - DNA, 395 bp, Homo sapien
  misc_feature (1)...(395): n = A,T,C or G
agatcacaacactgcactccagcctggngancaagagcaaaactccatctcaaaaaaaaaaaaaaaaaaaggaaaagaaaaagaaataaaaaactcaaggcaaagaaaaggtttttagtttgttcccctaccactgatgtgaaatggggacctaggggagatgtggaaggatgactaaaatctaacacattgcccaccatttttgaacttgaaggttgagtttgcaaatcatttaccgcctttgcctacctcatctgctagttgccttctgggaaattttgcagttccccctcaagtctagttatttgattcttaactttgggtacaanatttctggttggaggaaantgaggtgtaactggaaatttccggggtaaccattacttcntttcact

SEQ ID NO: 476 - DNA, 373 bp, Homo sapien
  misc_feature (1)...(373): n = A,T,C or G
agaccctgtatctaaagtgaatgaatgaagtggtagcctggaaatttcangttacatctcattttctccaaccagaaatcttgtaccaaagttagaatcaaataactagacttgagggggaactgcaaaatttccagaaggcaactagcagatgaggtaggcaaaggcggtaaatgatttgcaaactcaaccttcaagttcaaaaatggtgggcaatgtgttagattttagtcatccttccacatctcccctaggtccccatttcacatcagtggntaggggaacaaactaaaaaccttttctttgccttgagttttttatttctttttcttttccttttttnttttnttnttttgagatggagttttgctct

SEQ ID NO: 477 - DNA, 402 bp, Homo sapien
  misc_feature (1)...(402): n = A,T,C or G
ttccctgcctcttncagctcctagagaccacctccatctgtggcttgtggcgcctttcgcatctgcaagggcagcagcgtagagctntccactttcctctctctgcttcctttgtcacgctgccctcttctcgctctctacctcctgccttcctcctacgaggacccttgtgatgacatgggcccacccaggttatccagggataatctctcatttcaggacccttaattcagtcacttctgcaaagtcccttttgccatgtaaggtagcatgttcacaggctctggggggttagggatgtcaacatctttggnggggattattctttcagccttaccacacaggnacatnaataaaaattccatggggcaggagggngatagcaggcagtaaggtgtccct

SEQ ID NO: 478 - DNA, 394 bp, Homo sapien
  misc_feature (1)...(394): n = A,T,C or G
gctttgggaggctgaggttggtggatcacttgaggtcaggagttcgagaccagcctggccaatatggtgaaactctgtctctactaaaaatacaaaaattagccgcatgtggcttatgcctgtaatcccagctactaggaaggctgaggcaggagaatcgcttgaacctgggaggcggaggttgcagtgagccgagattgttcctctgtactccagtctgggtgacagagtgagacttagtctaaaaaaaaaaaaaaaaaaatttggaaaaattctaaattcttaaacccatttagtccaaaagccttagctacaggacagtgcacctgggacttttctcccttaaggaaacacagtcagagaggtccagtcacctncctcaggcccnagcttt

SEQ ID NO: 479 - DNA, 112 bp, Homo sapien
  misc_feature (1)...(112): n = A,T,C or G
tcttnttaaaaaaaggtttagttgcatagtggaaatcaatagatatcnttttacaaaaaaaggttagaataaagatctcacatttgtaaaggcacatatgaaacattttata

SEQ ID NO: 480 - DNA, 143 bp, Homo sapien
  misc_feature (1)...(143): n = A,T,C or G
atgaaaagaagaagagtctaaatttgaagaaatgaagaaaaagcatgaaaatcaccctaaagttaatcacccagggaagcaaagatcaacctaaaangagggtatnggaaggagactcatggatttggatccnaaatgacctt

SEQ ID NO: 481 - DNA, 358 bp, Homo sapien
  misc_feature (1)...(358): n = A,T,C or G
ttctttggctgnttaaaaactcctccagagtcaccaatctgtctttgttagtatcaacctcattcattacatgttccctcattctaagcctttcttcttccatttctaccatatcatcctcttcatttttagggtcatatactttctccaactctttagtaaatagggcttctaattcttgttcatccaggaatccatcactattgacatcatgtaatttgaaaaatgtcttggggtcaaagtcattaggatccaatccatcagtctcttcccatacctcttttagttgatctttgcttcctggggtgattaactttaggggtgattttcatgctttttcttcatttcttcaaattta

SEQ ID NO: 482 - DNA, 381 bp, Homo sapien
  misc_feature (1)...(381): n = A,T,C or G
tcaagcttccnttgctctcccttgtggcaaaaatatttgaattattcaattataccctgaatttggaatgggaattgagggtgttaggaaagtaacgtgtagaataaaagttttttttgttgacaagaaaataaattccttgctgtgacttccaaaagtcacccattcagcctgcatggtaactgaaaacagtgtcagtctggccagaaaggcatcagtgaccaaccgaatcattctagaccattaccccctatccaccgggtgttgcttgtcagagggaggaaatcattagggggacataggggttgggtagggcattcttagggaagccgccttgggaccatttngtccctttaattaaggcacttttcacccaatngt

SEQ ID NO: 483 - DNA, 237 bp, Homo sapien
  misc_feature (1)...(237): n = A,T,C or G
agnnattcactcacttttaatccttctaaatttttccccaatttctgaactgtcattcctatgaaagggatatggctcttcaacctttttttaaattttaaattaattccattgaacaaggattcatagtgtacctacctcatcttagtactatgatttctgtttcaaaaaacgggaaacatagtccctgctcccgggagttaaagaaaatcaagttttgngaggatgtgtgtcant

SEQ ID NO: 484 - DNA, 380 bp, Homo sapien
  misc_feature (1)...(380): n = A,T,C or G
tttggcatttaatatcagtaaagaattctgacagtgttgttgcctttggtgntgaccatcatcaagggccattggattatataagactgcaactgcacataccaaattagcctgaaaactttaaagggatcttctcaagtagaagatgaatatatggctgtgtctgaaccatcctcagtgacaaaaaggcaaagctgagacttaatgtgattcaaaggtgttaatctagatgtcgcttacctggaactgatgggggaatctgttaaggaaaaaagatgctggccgggtgcaggggcttcacacctgttaatccttaggcactttggggaggccgaggcgggtggggttcactggaggtccaggagctttagggaccagtt

SEQ ID NO: 485 - DNA, 201 bp, Homo sapien
  misc_feature (1)...(201): n = A,T,C or G
aagcccccagggggctttnatttttccttacnaanacccngtnctgcggctcccngggctcttttnccccgaangccnaagagccgggcgagggcacgggccaaacggngacnagcgaaggctnnaaaattcttcnnnncccnagnnangacgcgagcttnccccnncnaaaagacntnccggacgggcannaccggaccg

SEQ ID NO: 486 - DNA, 335 bp, Homo sapien
gtgggggtgattggatcatggggtcagtttcccccatgctgttctcatgatagtgaattagttctcaggagagctaatggttttaaagtgtggcactccctcactctagctctctccctctcctgccaccttgtgaagaagaagcctgcttcctcttggccttctgccatgattgtaagtttcctgaggcctccctagccataaggaactgtgagtcaattaaacctcttttgtttatacactaaccagtcttgagtagtatctttatagcagtgtgagaacagactaatacaagtgatttttaaaaaggtgcctaaactgaaagtaaagttttg

SEQ ID NO: 487 - DNA, 353 bp, Homo sapien
  misc_feature (1)...(353): n = A,T,C or G
ttccacagtatgaaaaccatgtggcccatggttcacagtatgaattacagcctccttttgtcaaatacctttactttcactgtatcctttactctgggcaaaaacatgtgaaacgttcaagacagctctaaagatttttcataattagaaattagtggctgggtgcagtggctcatgcctgtaatcccagcactttgggaggtcaaggcaggcacactgctggagcccaggggtttgagaccagcctgggccngacatggcgaggataccgcagtgacaaaaaccacaacaattagccagggtgcagtgccacgcncctgttaggtcccagcttacttggggagggcttgagg

SEQ ID NO: 488 - DNA, 399 bp, Homo sapien
  misc_feature (1)...(399): n = A,T,C or G
ctccactggctgtgagagtcggggagatcaaccacaaggacgaggccaggctatgtcccctgtccctttacaaaacctcagccttacactcagcatatcaaaaagtctcccttccggccaggcacggtggctcacgcctgtaatcccaccactttgggaggctgatttgggtggatcacgaggtcaggagttcgagaccatcctggctaacacagtgaaaccccatctctactaaaaatacaaaaaaaaaaaaattagccaggtgtggtggcgggggcgctgntagtcccagctacttgggaggctnaggcaggagaatggcgtaagtaaacccggggaggcggnctttgcaagtnagcctaggattgcgncactncactcaagcctngggtgacagag

SEQ ID NO: 489 - DNA, 367 bp, Homo sapien
  misc_feature (1)...(367): n = A,T,C or G
agcatgctaaaaaaaatgtttaattacaaaattaagttcacacacaatctaaatgttttaaagtactgcattttattacataaaagcacaatcaacaaaatgataattaattttaaaatgtttttttctcactatactgcaaaagaatgttagtctgaacatgtacgtcaagtagcacttaatattctaagttaatcacaaagggcatctctacattttcctcatgcatcttgtattttaattttcttactcttccacagaaaggggcataaataatgcccacctntaaaaaagaatctctcatatctctgattcagcaacaacagatcacttgctttcacatgtggaatataataggggatgaagg

SEQ ID NO: 490 - DNA, 370 bp, Homo sapien
cttgatcctgccatggcctggccttgccatgtccctgtcctggccctggttctgcgctgcttctggccctagccttagtcctctcatgtccctggctgtgaccctgcccctggtttttctctggccatgaccctgccccagttctgtcctatacctggccctgtctcagttctgtcctagccctggcctttcacagtactttatgcctagtaagggctccatggtgtctgtgagttgaatgttgtgttcatagtatctgccaaaacagaaagaaaaaaacgaaatattttgataaggaagttaaagctttgtatataaatatgccttgaattgtaaagtgcctgttattagttgtattacatatagggtc

SEQ ID NO: 491 - DNA, 372 bp, Homo sapien
  misc_feature (1)...(372): n = A,T,C or G
ttatttgtagagatggagtcttgctattctgcccaggctggtctcaaactcctgggctcaagcaatcctcctgcattggcaacccaaaatgctgggatgacagatatgagccacagtgcccaacctatttatttatttatttatttaataaagacaagttctcactatgttgcccaggctggtcaactcctggactcaaatgattctccaaacttggcctctcaaaatgttgggattacaggtatgagccaccatgcctggcctaaaaatagtattatattttttnttatcatataattttcaatttagggtaatatngaattattcttggacagggaantatgccctttaatttacattagggntttaatt

SEQ ID NO: 492 - DNA, 167 bp, Homo sapien
  misc_feature (1)...(167): n = A,T,C or G
tgattttatantttgaatttcaggtttaatgattttttacctttcctctgaaagacagttgaaaaggacacaaatgattcacaacagaggtttatgtttgaggtgancaccactaatacacactttgaaaagtcccatcaccatatatatatttgctttaaaaagat

SEQ ID NO: 493 - DNA, 382 bp, Homo sapien
  misc_feature (1)...(382): n = A,T,C or G
cctagatggtcatcagtggtgggctggataaagaaaaagtggtacgtatacactatagaatactatacagccataaaaagaacaaaatcatgtcctctgtagcaacatgaatggagctgaaggtcaatatcctaagcgaaataatgcaggagcagaaaaccaaatattgcatgttctcacttatgagaaggtgctaaacatagagtacacatagacatgaaggaagggaacaatatacacaagggcctatcttgaggatgggagagtaaggagggagggttgagggtttgaaaactaccttatttgttgttactattgcttcatttacctgggggncaatggaattaattcttgttaccaccacatcccccaccaaaacacn

SEQ ID NO: 494 - DNA, 408 bp, Homo sapien
  misc_feature (1)...(408): n = A,T,C or G
ttatttctnatcaacttttattttagatttagtggtagacatgccagtttgctacatgggtaaactgtgttttgtggggatgtggtgtacagattatttcattgcccaggnaatgagcatagtacacaataggtagttttcaatcctcaccctcctcttactctccatcctcagataggcccttgtgtatattgttcccttcttcatgtctatgtgtactctatgtttagcaccttctcataagtgagaacatgcaatatttggntttctgctcctgcattatttcgcttaggatattgaccttcagctccattcatgttgctacagaggacatggattttgttctttttatggctgtatagtattctatagtgtatacgtaccactttttctttatccagcccacct

SEQ ID NO: 495 - DNA, 201 bp, Homo sapien
  misc_feature (1)...(201): n = A,T,C or G
cnttttaaaagggtcncaaaanncngtgacaaatttttggnnaagttgttnccnnaaaaaagnaccganttnaaaaacnaanaacntaaaacngccncacgcaaaaaagaaaaccnaagngggccncaaaacantcnccctnccntcnnaaggtttnacgatgcattgtaatcattaaccngncttttacnacnaaacnta

SEQ ID NO: 496 - DNA, 203 bp, Homo sapien
  misc_feature (1)...(203): n = A,T,C or G
atctgtctcaaaaataataatantaatantaatantactnctncnncnnntccaaaaataaaacgtatgaagaacttaaganaatttgtagctcaggggattaaaattgacattttaatatgcccaagaagtcagatccctgagggtagcaaaagatcccaaaagtggaatgacttcanttttatcaacctnatgacttcaat

SEQ ID NO: 497 - DNA, 336 bp, Homo sapien
  misc_feature (1)...(336): n = A,T,C or G
agcattatttaggccaggtgcggtggctcaatgctgtattcctagcactttnggaggccgaggcgggnggatcacgaggtcaggagttcaagacctgcgtggccatcatggtgaaaccctgtctctactaaaaatacaaaaattaactgggcatggtngcgcacgctggtaattccagctactcagaaggctgaggcagaagaatcgcctgaacccgggaggtggaangntgcagtnagcagagatcgcgccattgtactccagcctngggcgacagagtgagactcagtctcaaaaagangaaaaagaatngacttttctaagcccacttcaaga

SEQ ID NO: 498 - DNA, 354 bp, Homo sapien
  misc_feature (1)...(354): n = A,T,C or G
aatccattcgattccattccattcgattccattccatactattgcattccattcgattacattatattcgaataagttccattcaagaccatttcttttgagtccattctatttgagtccattccctttgattccataacatttgagtccattcaattccattcctttcgtttccattccatttgatgccattccattcaattctgttctactcgactccaatacattcaattccattccatccggattccattacattcttttcatttcttatccatttcaagccattccactccattccattccacttcgtttcctttccattcggggtccatncctctccagtccattccg

SEQ ID NO: 499 - DNA, 416 bp, Homo sapien
  misc_feature (1)...(416): n = A,T,C or G
ttcgagtgntggngaatggaatcgaatggagtgaaatggaatggaatggacgcgaaaggaatggactggaacaaaatgaaatcgaacggtaggaatcgtacagaacggaaagaaatggaacggaatggaatgcactcgaatggaaaggagtccaatggaagggaatcgaatggaatgaaatagaatggaatggaatcgaaaggaatagaatggaatggatcgttatggaaagacatcgaatggaatggaattgactcgaatggaatggactggaatggaacggactcgaatggaatgggactcgaatggaatgggattgaacggnaatggactngagaggaaatggactcgaatgggaaaggaaacgagtnggaatgggaattggagtnggaatngcttnaaatnggataagaaan

SEQ ID NO: 500 - DNA, 355 bp, Homo sapien
  misc_feature (1)...(355): n = A,T,C or G
tagcatgnttaaaaaaatgtttaattacaaaattaagttcacacacaatctaaatgttttaaagtactgcattttattacataaaagcacaatcaacaaaatgataattaattttaaaatgtttttttctcactatactgcaaangaatgttagtctgaacatgtacgtcaagtagcacttaatattctaagntaatcacaaagngcatctctacattttcctcatgcatcttgtattttaattttcttactcttccacagaaaggggcataaataatgcccacctataaaaangnttctctcatatctctgattcagcaacaacagatcacttgctttcacatgtgaatataat

SEQ ID NO: 501 - DNA, 375 bp, Homo sapien
  misc_feature (1)...(375): n = A,T,C or G
ccgacctcaggtgttccacccgccttggctccaaaagtactgggattacaagtgtgagtcagcaagcccggccaactaaatgtataattttttagaagcagctattacgtaaataagatactttaaaattaatgtcatactttttactcatacacccattaatagctcagtatttactgtccacacaataatttccataatccatatcaaatgtacaaaaagaagctatcccaagtaacttcctttcttttcaattaaacaaactccttctccaaggggacaaatttggggggggaaaaaaaatcttcaggtttgtggaaaactaggattactttaccagttaacttggagttattcctnttggggtctttttcc

SEQ ID NO: 502 - DNA, 344 bp, Homo sapien
  misc_feature (1)...(344): n = A,T,C or G
tccacaatgaccctgtttccaaataaggtcacattctgtggtactgggcattagatctttaacatattttttaaaggangagggggacatgattcaaaccataacactgcactagggttcttttgatttctttaacctaaagccttagttttaactggacaggtaagtaccttgcccagtcacagatgtaatacatggtaggaaataggtgttgactgtatagccacggttcactcttctccaccagggctctgccaggaggaaacttagtgcaaatgccagccagccaagttgagggtggggaatcttntttaggaattttaaggttattaatgctgtatatn

SEQ ID NO: 503 - DNA, 432 bp, Homo sapien
  misc_feature (1)...(432): n = A,T,C or G
ttttnatttttttttgctctgggtagaaaagtgctctataatctctaaatccttataataagngttctataatctgtaagttcatatatagacataggcatgtgtatatatacagcattattatcttaaatttctaataagattcccaccctcacttgctgctggcatttgcactagtttctctggcagaggcctgggggagaagagtgaaccgtggctatacagtcaacacctntttctaccatgtattacatctgtgactgggcaaggnacttacctgtccagttaaaactaaggctttaggntaaagaaatcaaaagacccctagtgcagtgttatgggnttgaatcatgtccccctcttcctttaaaaaatatgttaaaganctaatgcccagtaccacagatgtgaccttntttgggaaacagggtc

SEQ ID NO: 504 - DNA, 242 bp, Homo sapien
ccgtttaacatgccgattgccaggcttaaatgagtcggtgtgaatcccatcagcgttaccgtttcgcggtgcttcttcagtacgctacggcaaatgtcatcgacgtttttatccggaaactgctgtctggctttttttgatttcagaattagcctgacgggcaatgctgcgaagggcgttttcctgctgaggtgtcattgaacaagtcccatgtcggcaagcataagcacacagaatatgaa

SEQ ID NO: 505 - DNA, 374 bp, Homo sapien
  misc_feature (1)...(374): n = A,T,C or G
tccactagcttcaaactttttcttcttgcagcttccccatctctctcagccttcagagaattgctctgcactaggctttggcttaagggaattttgtggctggtttgacctgctatccagaccataaaaatttacccatataagcaataagactgtttcattttcttatcattcgtttgttcactggagttagcactattaatttcctttaagaacttttcctttgcattcatgtcttggctaattgtgtggcacaggaggcctagcttttggcctatctgggcttttgacacaccttcctcaataagcttcatcatttcttaacttctgatttnaaaattaaagatgtgtaaattctttctcacttgaacatt

SEQ ID NO: 506 - DNA, 316 bp, Homo sapien
taaatgttaatcctttacaagttggttttagtggagtaggaaatggcggagaaggctggaggtggattcagatgcaacagggatggcacttacacctttcgatgaaaaagacgtgtgattccgcgattttgcagttgtgaattgtgctgctatacgcatgtgtgtgaaagtatctttttcacataatgacttcttttcctctgggtagacacccagtagtgggattgctgggtcaaatggtaattctacttttagttcgttaaggaatctccacactgttttccatggtgggctgtactagtttacattcccacca

SEQ ID NO: 507 - DNA, 372 bp, Homo sapien
  misc_feature (1)...(372): n = A,T,C or G
attgtcatgcctctgccagggaactcatctgaganacagggagtttatagctccaactgtcttcctcttagcattctgggagcatagcagggagacagggagtgggggactgaatgtgattgataggaactttgggggaggcctgtgaaaattagggtgatttggcaagtatgtaaccttaggttttatcttgctggggcaggaagatgagtaaataaactgtcttactggtagactccaattattaatttattttgtatatagagaaatttaagtttattgaaatgtgttagaagcaggggaagtatctacaagccagaatcgttaaagccaaggacatttcccaaattaataggaaaggaagggaaactc

SEQ ID NO: 508 - DNA, 437 bp, Homo sapien
  misc_feature (1)...(437): n = A,T,C or G
tggngaaacagtatgggttggatcatttgtttttaaaactacttaggtatgattaacatacaaaaagctgcacatatttaatgtatcctattgtgtaattaatttttaatttttttgtgtacttcctaaacttatagtcctgcgagtctgggaacagatcagtttttcacttatcctgatttaatgacagtttccaacattgttttgttattacaagtaggggatctttttttttgcccgtttaatgaagatactaaaaataatgcactggaaggagtggaagagttggaaaatttgtaaccatcataatacaggtgtaataggtttgggaaagaatcctcaaaantgttaaagcaaggggagggaaagtttgttgaggaagccaaggatgttcttctctcctgcccgaccccgccgttgggttgttggtgggtcag

SEQ ID NO: 509 - DNA, 368 bp, Homo sapien
  misc_feature (1)...(368): n = A,T,C or G
tttaanggccaagtgttgattgtatatgtgggattatatgttgaatattccatctctcctcttggatttgacctgcctcttctcatatttgcatttgagcctctttctggactctttcccatcgtgtgactgtccagggtctgtgttaattatcatggtcttagaatataaggcgtttcaggatgtgacatggcccatctctctccgtatgctccttctttcatgtgaacttcacaattgctctggatgggcctcctgattcattcaaggaacaagccgtcagtccaagccagggccagagaatgggccgtgggtcccagcactgggctttcatctgggttccatcccattggcctgtgccccagggt

SEQ ID NO: 510 - DNA, 323 bp, Homo sapien
  misc_feature (1)...(323): n = A,T,C or G
ttctgaactgagcattctcagtccgctgcctgctgccatgctggaacggatggctcagcagacgacacacagcttggctccctcctgggcactcctgcctgcccttgccgcttaggtnctctggtcatcaggcctctctggctggctctgcaaggtgcatgtgtgcagggcctgggctcagggctntgtggctcagcaggaccacctcccttcccatgggcaagtgaggacatccagaaagagggtcctctgccttngccactcccttgagacacccctccaccccaaggcctcgcgtggaaacagagtccagcactcagcgt

SEQ ID NO: 511 - DNA, 372 bp, Homo sapien
  misc_feature (1)...(372): n = A,T,C or G
aaggttgtaggagaaagggagagaagcggaagggggtggggagacagagagacagacaggaggcctcaaaccctgaaacactgagctaaggaaagtgatcatggcaagctacactaattacaatactttgtttccaagtgtttatttttactcatatttagggcaggcaatcctggtttctcgttgaacatagaggtttgaatttcattaataaataacttcatttattttttttcagtgacttgattcaaacatgaggattaagttaataatagcacaggttgtcganagggataagataattacacaagaggcaccagaaccacttgaatgtgggagagctcttcattaaattgacaagctgcctttggg

SEQ ID NO: 512 - DNA, 135 bp, Homo sapien
  misc_feature (1)...(135): n = A,T,C or G
ngttacanggacactaagttctagagcaattcatctccagaacaaaaactgaaatggaagcaagaaaaaaataaggtaggccactcctttcctttaaagaccttttatagagtagcatccctttgctagcagttc

SEQ ID NO: 513 - DNA, 111 bp, Homo sapien
actgctagcaaagggatgctactctataaaaggtctttaaaggaaaggagtggcctaccttatttttttcttgcttccatttcagtttttgttctggagatgaattgctct

SEQ ID NO: 514 - DNA, 373 bp, Homo sapien
  misc_feature (1)...(373): n = A,T,C or G
nttggagccacagtaaggtataaaaagcgcaaanccaaaatgcaggcggaaagatctcagagagggaacaagtgggttcccaaactgagccacatgtcagagtcaagaaagaaaatgcctctgcaagcaggcttgaatcaggccaacccaataaaggtgcgcagagtctcagtggaagtctttgagaagccaccgagtagagactcagtggaaatctgcccttccactgtgtcaagtcacaagcagtaaagagtctcaaggaggggcaactgttccaattcccagagttgctgagctcacagcttaacggtggcatgggaggagacgccatccaaagaatgtttaaacatttaagcctagtgcattcctcttn

SEQ ID NO: 515 - DNA, 434 bp, Homo sapien
  misc_feature (1)...(434): n = A,T,C or G
ttnnngtttttttttttttttttttgagcaggagtcttgctctgtcacccaggntggagtncagnggccttttctcggctcactgcaagctccgcctcctgggntcacgccattctcctgcctcagcctggcaagnagctgggaccacaggcgcccgcaccatgcctggnggctaattttttntattttnagnagagacggggtttcactgtntnagccaggntggtnttaanctcctgaccncgtnanctgcctgcctcggcacccagaagttctgggattacaggtntgaaccactgcgcccggccgggaccacagtcttaagacgcttngctctncttccgggttgccanagnttaccatcttttgnaagtntgnaaacttcattngcctggnatttgactnccnctngggnacattagtgggggaccatt

SEQ ID NO: 516 - DNA, 320 bp, Homo sapien
  misc_feature (1)...(320): n = A,T,C or G
aaaacaaaaaaacactatctgtagatacactgacattacatgaaataagatacagtttctgatttttttcttttttaagttacaatctaatttaaaagtgtgtgttcaccagggaggcagtgcaggggctcactgaggcctgttaggtgtggccctcccctccctgggcaggtcagatctgagcaccttcagctgcagggccaccaagctccctgtgcaggtngagccatgggtgcctgcacgtnaggctgggcaggtctcggcagccctccttgtccccgtgctcgtatttaaactttggcagccaatctnctcttctc

SEQ ID NO: 517 - DNA, 367 bp, Homo sapien
  misc_feature (1)...(367): n = A,T,C or G
cgccgcgtctgcgttngtcatggcggatcatcgaggtatcgccgatgtcctcgcccaccccattgaggtagaagcccagtacgccgaacagcgcattgcgcntgtccactgtgtgcaggtaacgttgccagtaagccacgctcacangctcgaatgcgtggcctgcctggcgaaaggcgtcgacgtaggtttcccagctcaggggctgcgggtnatgcaggttgaacaccgtccctccagcacggcagcggctgctctgggaacgcaattaaaccgggcgagaaagtccaccggcatcaggttcgaaaatttcaacttcaagggtgcggcaccagggccagttgggagtgaacctttgagcatcaaa

SEQ ID NO: 518 - DNA, 283 bp, Homo sapien
  misc_feature (1)...(283): n = A,T,C or G
ctggatccaagaaactccagtccacctctggttgggatggaattgtgtgtgtgtgtgtgtgtgtgtgtgtgtgtgtggtggagggggcttngctgggaaggcactgcttctggagtgtgccctagttctcataaataaacccatgttgtttctgagacctagtcctcacattgtatattgattctagcacagaactcccagctccttatgctcaagtccctgtttgccttcctgtttagttccctaattctgtacagaatggagaaacccacctgcttatgct

SEQ ID NO: 519 - DNA, 345 bp, Homo sapien
  misc_feature (1)...(345): n = A,T,C or G
tatagatactgagtctcactgtgttgcccaggtgaaaataaatttagaaatttaaactttaaatgtaataattgcaccaggtgagatggctcactcctgtaatctcagcactttgggaggtgaaggctggcagatcacttgaggttaagatttggagaggtcagatcacttgaggacaggagttggtcagcctggccgacatggtgaaacccatctctacttaaaaatacaaaaattagctgggtgtgggtgggtgcgtgcctgttaatccccagcttacttcggggaggcttgaggccagggaggaattccgctttgnaacctggggaaggccagaggcctncc

SEQ ID NO: 520 - DNA, 365 bp, Homo sapien
  misc_feature (1)...(365): n = A,T,C or G
nngttttgcttcgttgtcgaggctggtctcaaactcctgggctcaagcgatcctactgcctcggcttcctaaaatgctgcaattacaagtgtgagccaccacgctctgcagttattaaattaattaattaatataattaatttatttagagacatagtctcgctctgttgcccaggctggaatgcagtggcgcgatctcagctcactgcaggcctctgcctcccaggttcaagcgattctcctgcctcagcctcccgagtagctgggattacaggcacgcaccaccacacccagctaatttttgtatttttagtagagatggggtttcaccatgtcggccagggctgaccaactcctgtcctcat

SEQ ID NO: 521 - DNA, 281 bp, Homo sapien
  misc_feature (1)...(281): n = A,T,C or G
aaacaaaacccacctgtcctccaggagcggatttccaaggcccgccacgagactggagtctgagtcttccggtccaggagggaaccgcagctcggccccncagtctcctcccctgcctactancctccccagcctggcggctcagagcacgtgcgaccctgagccaagctccccctcgtctccaatgtccacctcgtcctctggctcggtcagcacgaagggaccggcgggcaggctcagcgaagcttngggacagntggcggccttctgaancgcggggg

SEQ ID NO: 522 - DNA, 324 bp, Homo sapien
cgtatgccttcctcactcctctccgaccaggctgggaacccgggtcagaggtaaatggtaagagttcaggcgagttcttgtcctgagagaagcccacacaaggagattttttccccctttctcacttcaatctctctcacagcggccagtgttcacatgcacctccgctccaaccccaacacacacactatggtttaagttctctccctgttcccctgtcctgagtggaagaaaggtttttatcttcctctagggcgctattcacctgcaacctcaaaaccccatcctctcttccccatctttcataggtctctacccggaaca

SEQ ID NO: 523 - DNA, 311 bp, Homo sapien
  misc_feature (1)...(311): n = A,T,C or G
nttgaacccaggagttagaggttgcagtgagctgagatggcgccactatactccagcctgggcaacagagcgagactctgtcttaaacacacaaacaaaaatgaccatccatatgacccagcaatctcactcctaggcatatacccaaaagaactgaaaacaagtgttcaaacaaaaatcggtacacaatgttcacagcgcattattcacaatagccaaaaggtaggaaacaacttcaaatntccatcaacttgatggaattgaaatgttgctatatcccaaaccattaggattatttaggttttaaaaaa

SEQ ID NO: 524 - DNA, 280 bp, Homo sapien
tagctaatattctattgtttggatatagcacatttcatttcatcagttgatggatatttgagttgtttctaccttttggctattgtgaataatgcgctgtgaacattgtgtaccgatttttgtttgaacacttgttttcagttcttttgggtatatgcctaggagtgagattgctgggtcatatggatggtcatttttgtttgtgtgtttaagacagagtctcgctctgttgcccaggctgggagtatagtgggcgccatctcagctcactgccaacctc

SEQ ID NO: 525 - DNA, 341 bp, Homo sapien
  misc_feature (1)...(341): n = A,T,C or G
gaggctgctcagctggatctggagccactggcttntgctccgttccctggctagtctgtgcctggtcaccagggaggctgagtgaggggctgtgaacagttgccggaagcaccccctccctccccggcccgtgcagcagtgtctgagctgtagtgaaagtttcagggcctgcaaaagaagaggcttgggcacaggactgaccatggctccaggggtttaggacccccagacctgtgaaggtggggagcagctcaccaccttcacgcaggcttttgtnatgtttctcttgagcctttagtttgatttttgggccccccaaacccaaattcccaaaggtttct

SEQ ID NO: 526 - DNA, 348 bp, Homo sapien
  misc_feature (1)...(348): n = A,T,C or G
ttttttcactgaacaagcattttattccagggattcccaacatgtgagcagggtggaagcctctgacaaggngggccagaacctttggatttggtttgggggccaaaatcaactaaggctcagagaacatacaaagccngcgngaaggtggngagctgctcccaccttcacaggtctgggggtccnaaacccctggggccatggtcagtcctntgcccaagcctnttnttttgcaggccctgaaactttcactacagctcagacantgntgcacgggccngggagggagggggtgcttccggcaacttttcacagcccctcantcagcctccctgggtgaccagggca

SEQ ID NO: 527 - DNA, 375 bp, Homo sapien
  misc_feature (1)...(375): n = A,T,C or G
caagatcagtgccatctgcactccagccatgggcaacagagcgagacgttgtgtccccaccacgccgacccaaaaaaaaaaaaaaaagaagcatctttcatgcagctgtgcagcgcctagtgagagttgcccaccctggaatgagcacatcaccttcccgcccagagaggtcagacccctggcttcctaccccaccaagggcacactcagaaacttctctccgtgcctgagcaagtgcaggccagactccctgctctgttctccttaaatgaccaccccctcccacttcctggggatttcccttgcagccagagggaaagggagcccaaggaggggacgggggattattcattgggggncacgatggttgatttt

SEQ ID NO: 528 - DNA, 346 bp, Homo sapien
gaactcctgggctcaagtgatccttccacctcagcctcctgagtagctgggaccataggctcatgcaccatgcccagctaaattttttgttttttgtagagacagggtctggttgtgttgcccaggctgatcttgtactcctgggctcaagctatctttccaccttagcctcccagtgtactgatattataggtatgtgtgcctgcccatccttttaccttgtatttattttttaaatttttatttatttatctttttatttattttgagacagactcttgctctgtcacccagggccggagtgcagtgggcatggatcccggctcacttaaaacctccatcttcc

SEQ ID NO: 529 - DNA, 379 bp, Homo sapien
  misc_feature (1)...(379): n = A,T,C or G
ttcaagtactgtatcaatacataatatatattaaatgttgtgattatatgtgtgcattatatagcttataaataatgtatgtatatgtacacactatagacaggtatgtaaacaacgtgtatatatacacatttacaattttatttagataagagtacaaatgctaaaacaaatgggataaaatgttaacaacaggtgaatctaggcaaaagttatataagtgttcttcatactattttatttttgctgctttgtaaacttaaaattatttctataaaatgtttaaaaattggtaaaatggatggggccagggccnggggcgntgggtaggctcacgcctggtnaatcgcagccactttggggagggcccaggcggggc

SEQ ID NO: 530 - DNA, 320 bp, Homo sapien
  misc_feature (1)...(320): n = A,T,C or G
tctggcagggatgggtttgctttggaaatcctctaggaggctcctcctcgcatggcctgcagtctggcagcagcccgagttgtttcctcgctgatcgatttctttcctccaggtagagttttctttgcttatgttgaattccattgcctcttttctcatcacagaagtgatgttggaatcgtttcttttgtttgtctgatttatggtttttttaagtataaacaaaagttttttattagcattctgaaagaaggaaagtaaaatgtacaagtttaataaaaaggggccttcccctttaggaatnaaaanaaaaaagggtg

SEQ ID NO: 531 - DNA, 386 bp, Homo sapien
  misc_feature (1)...(386): n = A,T,C or G
agcagaagaaaagtgaatcgccaaagagcatcttcaaatatattatttttaaataaaacttaaaacctaaacaattctaaatcaatttgtgtaagggatatattagtggtttctaaaattattttaaagtgcataagaggatgataaacacaaaaaggagagaacctacgggaaattccaacacaaccagggaatactctagttatgagttgttatgaaggttcatgggtaaccattattattacttattaacgtttaactcacatatattcttaaacttngggggggaaagtctcttattttgctttgggaggtncatggctttattttgcctaaacttgttttatgttttctaatccttttaggtgggggaggaaaccctggan

SEQ ID NO: 532 - DNA, 375 bp, Homo sapien
  misc_feature (1)...(375): n = A,T,C or G
tgngntnattggaaatttcatcacatcaaagggagggttttaaatgcccttttttgcaacgaacagagtgtgaaacagtgtccagatattatttgcactgtttccagccttcatcctaaaagttacattctgcaaagtcctaaacttccaggncacagatccttctatccttcctttagtgactgggggtagctgacagaaggttctctacggtgacatctctgcagggtccacaaggctgccatccaatgggantcaggtctagaggatatttttacctgaggacagaaacaaagggctctgggcagcagctcatcccaaactctattgtcttcctcttcatgtttctccctacttaaagatagaaacataact

SEQ ID NO: 533 - DNA, 280 bp, Homo sapien
  misc_feature (1)...(280): n = A,T,C or G
ttncnggtttnaggtttnccggtgggtttttgtnggtgnncgggtttacttttcaccagtctgttctggcntgctncttttgttgtcngngtcacctggntccttgttngcccgtgtgcactctctgtngttttntccgcttgctgtgcccngntcnttttttttgccactgtngtgttggncaccngttttngccngcttagcttngtactctttttcngntttcctcntngctgggcagttgttngcgagnttgncccttttcgctttgccttgtctg

SEQ ID NO: 534 - DNA, 346 bp, Homo sapien
  misc_feature (1)...(346): n = A,T,C or G
cactnttgccctgcgctggtcatgattctgctgcttgataaattttcaggtattcgtcagccgtaagtcttnatctccttacctctgattttgctgcgcgagtngcagcgacatggtttgttgttatatggccttcagctattgcctctcggaatgcatcnctcagtnttgagngggggaacttngctgacgccgccttgccctcgtctatgtatccattgagcattnccgcaatttctttngtggtgatgtcttcaagtngagcatcaggcagacccctcctnattgctttaatnntgctcatgtaatttatgagngtctnctgctnganncctctnctggccag

SEQ ID NO: 535 - DNA, 363 bp, Homo sapien
  misc_feature (1)...(363): n = A,T,C or G
cacaggtatctgctcccaaggtaacagctgggaacataagggtgatgtgttagtctgtctttgttgccataaaggaatacctaaggctgggtaatttataaagaaaagagatttaattggcacacagttctgcaggctgcagaagcanantgggtgctagcatctgcttctggtgaggtcctcaggaagcttacaatcatggcagaaggtgaactggtggccagtgcattacatggcgagacaaggagcaaggttggggaggtgccaccctcttttaaaacaaccagatcctgtgttgaacttcacttgagcaagganttccactccatcagttaaaaagggacagtgcttaagccatttcat

SEQ ID NO: 536 - DNA, 262 bp, Homo sapien
  misc_feature (1)...(262): n = A,T,C or G
gtgcactccagcctggnaacagagtgagaccctgtctcaaaaaagagtttgagtgctatgctaaggagactggagttgatcctataggcaaaaatgagccattgaagaaagttaagcaaggggtaagacatgactggatttacatgctagaaatatcactcttgaaacagtgtngaggaggaattaaggaatcagaattgtgggcagggagactagtaaggaagctattgcaaaaatctaaggaggagggacaaagacaggt

SEQ ID NO: 537 - DNA, 396 bp, Homo sapien
ccaatgtcagacccaaggacaggaaacagttgggctgaaggggatcccattgatctgggacttggaatcagctgagaagagaatggagggtcaggaagatctaccctttccctagaaatcatctgaagcaaacctgtggggcttgggaacccagtgccctgcatcagagcagttccttgcatgcagccaggtggggagccagtctgagttccagctggaatttcatagcaagcaggtagaaggcaacggccctcccagctcaccttcaccacccaccttttcactcgttttttggtctcttcctttttatctccactgcttggttgttctagttcagacctgtctttgtccctcctcttagatttttgcaatagcttccttactagtctccctgcc

SEQ ID NO: 538 - DNA, 354 bp, Homo sapien
  misc_feature (1)...(354): n = A,T,C or G
tgaagcttctcttcagtaggacttgttctccgtggaagtaatgcatgccttatggagccacctatctagaggggtcttacttttgactctgccaggaatctataggtttacttggctcactcatattctggcagctgatgctggaaagactcaaaacagctgagggctatcataactgggaatccttgggtatttctccctatctccaagagccctccccacaactcctcacagcatcatagctttgaagtagctgaactgacttcttacatgtaggatcaggattcctatgggngtatgtcaagagtgnagagctaggtgaaagctctatccattttattaaagtcacctctg

SEQ ID NO: 539 - DNA, 383 bp, Homo sapien
  misc_feature (1)...(383): n = A,T,C or G
acagttccaannaattcatttggtggaagtgatgctatgtgacttctgaggtgactttataaaaaggatagagctttcacctagctctcactcttgacatacaccataggaatcctgatcctacatgtaagaagtcagttcagctacttcaaagctatgatgctgtgaggagttgtggggagggctcttggagatagggagaaatacccaaggattcccagttatgatagccctcagctgttttgagtcttccagcatcagctgccagaatatgagtgagccaagtaaacctatagattcctgggcagagtcaaaagtaagacccctctagatagggtggctccataaggcatgcatttactttccacggagtaacaagtcct

SEQ ID NO: 540 - DNA, 365 bp, Homo sapien
  misc_feature (1)...(365): n = A,T,C or G
ttaacttgttgaaaactagtaggcagcatttaaaaggttctgtacaatgaatgaaaaagatactgtcatcactgggcattccagagtactagggataagataatatactacacatcttctagaaagtaaaagcaggttacacataaaggaacaaggattagaatgacctcagactttcaacagcaatgttgaatgccagcaaacaatgaagaagtgcctttataatcttaaaagantaatttcaaaaattatttgggctgggcacagtggctcgagggggggcccgggtaccccaatttcgccctattagttgagtccgtatttaccattccactggnccgtcgttttaccacgtcgtgactggt

SEQ ID NO: 541 - DNA, 209 bp, Homo sapien
agattataaaggcacttcttcattgtttgctggcattcaacattgctgttgaaagtctgaggtcattctaatccttgttcctttatgtgtaacctgcttttactttctagaagatgtgtagtatattatcttatccctagtactctggaatgcccagtgatgacagtatctttttcattcattgtacagaaccttttaaatgctgccta

SEQ ID NO: 542 - DNA, 364 bp, Homo sapien
  misc_feature (1)...(364): n = A,T,C or G
gtggcacctaggaaactcatcttgcttgactaatatgagtttcttggtagcagaaagtacttctcctgttctcttgaaattttttaagccaaacctctttctaaaattgtcaaaccatcatctgctggcattaaattcttcaccttcagatccttcatcttctctttgctttaagttgtcacataatgacttcactttttctcaaatcttattagagtctctagtattcctttcttatagcaatcctgcacccacataaaagctgcattttcaattacaaaattanaaaggtatttcacaaaaagtggaaaagtgtttgtgctagctgggcaaaactggaaggcaatggttttcacagatttcc

SEQ ID NO: 543 - DNA, 394 bp, Homo sapien
  misc_feature (1)...(394): n = A,T,C or G
gagatggngtaggtggtctgttgcccaggctggaatacagtggcatgatcttggctcactagctctgcctcctggnctgaagtgattctcgttcctcaacctcctgagtagctgggattacaggtgcttgtgccaccacacccagctaatttttgtatttttagtagggacgaggtttcatcttnttggctaggctggtcttgaactcctggcctcaagtgatctgcccaccttggcctcccaaagtgctgggattacaggcatnagccaccgcgcccagccctantaaaccttgaataacaccacagggtccacacagagtgattctgggaagtgggttccaaggaaggcagaaaaaagccatggatgctataagncaaagttgagttgcttg

SEQ ID NO: 544 - DNA, 388 bp, Homo sapien
  misc_feature (1)...(388): n = A,T,C or G
tagcatgtttaaaaaatgtttaattacaaaattaagttcacacacaatctaaatgttttaaagtactgcattttattacataaaagcacaatcaacaaaatgataattaattttaaaatgtttttttctcactatactgcaaaagaatgttagtctgaacatgtacgtcaagtagcacttaatattctaagntaatcacaaagngcatctctacattttcctcatgcatcttgtattttaattttcttactcttccacagaaaggggcataaataatgcccacctataaaaanggnatctctcatatctctggattcaggcaaccaacaggntcacttgctttcacatgngaatataatnggggaatggaagggaaaacatgganttt

SEQ ID NO: 545 - DNA, 356 bp, Homo sapien
accctttgcatttctaggataaatcccacttggtcatggtatataatctttttaatatgctgttggatttgttgtgctgggattttgttgataatttttgcatctatattcataaggaatattggtacgtaatgtttccttgtgatgtcttcatctggttttggtatcagagtaatgctggctccgtagaattagttagaagatattcccccttctactttttagaagagcttgagaaggattgttgttgactcttctttatgtttgttggaattgtctagtgaaaccgtctggtcctgggaattctctttttgggggaagtttttgattactggtctaatttcctcactctttat

SEQ ID NO: 546 - DNA, 386 bp, Homo sapien
  misc_feature (1)...(386): n = A,T,C or G
gatcantaaagagatacaggacttgaacattgggtatacatcaactagacctaacagacatatatagaactctgcaccaaacaatagcaaaaacacattcttctaaaataagtctcaatgaactttgtaagactaatatcatgtgaaattatcttcattgacaatggatgaagctaggaatcaacgccagaaagaaaaataaaaaattcacatatatatggagattaaacaacacactcttaaataaccaatgggtcaaagaagaaatcacaaggaaaatcaggaaaatactcaggaaatgaatanaaaccanaaacagcataacttaaactttatggggatgcagccaaaagcaggtgggtccaggagaggacgttttattacta

SEQ ID NO: 547 - DNA, 299 bp, Homo sapien
taacagccaaatggctcatggctgtacttttcccaaggcaaagcactgtctatatccaacaaggattaagaatactaccttttgcaacaatgagaaatggcacaagtgttgaaactatagttttattaaagccctccatgagcccatgctaatttattcagggatgaggattccagagcaaattatttcactgtttttcacctctacctcccccagggatctcttgcaagagggaaaagtttttccaccttacaactacctctttattagggaggtaggggaacctgggggtaaaaggg

SEQ ID NO: 548 - DNA, 416 bp, Homo sapien
  misc_feature (1)...(416): n = A,T,C or G
tgggtaattnataaagaaaaagaagacgaatggactcacagttccacatggctggtaaggctcacaatcattggcagaaggtgaatgaggagcaaagtcacgttttacatggtggcaggcaagatagcctgtgcagggtaactcccctttataaaaccatcagatcttgtgagacttattcactatcacaagaacagcatgagaaaggccttcccccataattcaattacctcccactaagtccctcccatggcacatagggattatgggagctactattcaagatgaggatttggggtggggacacagtcaaaccatataattaggctttatcttccatttcccacatgcttgggttaatggaaaagtccaaccttcaggctgcccggaaatcagcaaacatctccagnggcaag

SEQ ID NO: 549 - DNA, 357 bp, Homo sapien
  misc_feature (1)...(357): n = A,T,C or G
tcagcnntntanttttaaatttaggtaatctcacttttttcatcagagtttgtttgatatgattctactttccacatgtttcttattcgctgttttgtcttttaaggcagggaaagtgagtcaaaagcaaatcatgtttcatgtgaatattggactttgacacttctttccccctacacaaagaaaataaaggtgcaagttacctataattattaacagtaatagtttgagagaactgatatgttaaagaagtaatcattaatcttgctaatcgttggtatgttgaggaagtatttgggcctttggtgttggtgttttcttgttatgtgtctatgtgtgtgtgtgtgtgtgtgtgtc

SEQ ID NO: 550 - DNA, 374 bp, Homo sapien
  misc_feature (1)...(374): n = A,T,C or G
cctccancnngtngatcactccanggccaaaccaccattctgcttgagctgctcatccagattccagttcagctgtcctgctgtggagacagaagatgaggccttggaagcatctttggtatggtcttctttagcttgttgtccatgtggtgggagccctggtgctggaagtagattggacatgggtgccactctgggatcttggcgagctactttctgcacatgaaaatattttgaagcagcctgggattctttctcagccacctctgcaacttcatcatccccnatcctcatcttccaaacctccgtcctcttcctcaggctctgagtncatngttgccccgtttcaaacacttggggccactgctgcggtg

SEQ ID NO: 551 - DNA, 340 bp, Homo sapien
  misc_feature (1)...(340): n = A,T,C or G
cngttcgacgacaccctcggctcgctcaccgcgcgcccgggcttcttacggctctatggcaacgactcgctcaattcgaccttcacccaatcgaccgtggcgcgccgctggcagcacttcgccttccgggcagaaacgnggatggagttctcgncggtgcacttccagcagaggcnggnggctgacctgctactacaacagcaaaaactggagctactgctttgtggactacgagggggggcccggtacccaatttngccctattagtgagtngtattaacaattcactaggccgtccgtttttacaaacgttcgtggattgggggaaaaaccntggggg

SEQ ID NO: 552 - DNA, 169 bp, Homo sapien
  misc_feature (1)...(169): n = A,T,C or G
nagtagcaggtcagccccgcgcntctgctggaagtgcaccggcgagaactccatccgcgtttctgcccggaagcgaagtgctgccagcgngcgccacggtcgattgggtgaaggtcgaattgagcgagtcgttgccatagagccgtaagaagcccgggcgcgcggtgag

SEQ ID NO: 553 - DNA, 377 bp, Homo sapien
tcatctccctcctctccctcctctttgcctagtaccttgtaaagtagctgattaccttcattagcttagaatgtattaatccaggtttttttgtttttttttttttaaagaaaacctgcaggtcttctggcagctgaaggctactcttgactcttggctctgtgtcaggattcacataataagctcattagaggaaagttcccagtcccacagtgaccagattagtgggtgctcaggatgtgtactttgagggaaggaagatatctgagcaaagtcagaatgttaggaatctcccactttttttctcctgtaggttaatacagttcccatccgagaggtgtcaagagcacttacagggaggaggaccttctccttaa

SEQ ID NO: 554 - DNA, 151 bp, Homo sapien
  misc_feature (1)...(151): n = A,T,C or G
tcgcgttcntcagtcaaacaaggccattttgcaagagttttgatgggaaatcactaggcatccaccctacagtcctggtttggcaccttttaatttttgtttccnaatttttaaaaaaatttttnaagggaagtanaattttttncaaggt

SEQ ID NO: 555 - DNA, 412 bp, Homo sapien
  misc_feature (1)...(412): n = A,T,C or G
agtttgtntttaaatgcatttatttcacaaatttgtttaagggctataaacaaaatttgtatcaacttgtttgtatatatttacaaaacagaaaattaagtcagcattaagtcaacatgagcagtcacagaatttttcccctttataaatggtacatattcaaggagacttcaaaaagtttgtggaaaaatggttaaaagataaaaaatataaactatatttttgaacattagctctatagcattcaagacacttttgtaagtgatgataccngctatttaggtccatccctaaaggaactgaggaggttctgggggnatttatctaccatccaatgcaggtttctttatacatttaacttgagggnaaaatggtactgcccctgggaaaaattttttttagggttgggggg

SEQ ID NO: 556 - DNA, 189 bp, Homo sapien
  misc_feature (1)...(189): n = A,T,C or G
gtaaatctcagccaggcacaggtggctcacactttaatcccagtgctctgagaggccaagacaggaggattgctttaggccaggagttcgagaccagcctgggcaacatagtgagaccctgtgtctatattaaacattttaaaaacttnggcttgggcattggtgggttcaccgccttttagtncgcag

SEQ ID NO: 557 - DNA, 333 bp, Homo sapien
  misc_feature (1)...(333): n = A,T,C or G
cttgcacagtgtcatntggcgacccatctgcattgaggcaggcagctgcanttcgttggcactgctgggcattcttcccttatatgaatatgttaataccacgatatagtatctgaagtccatgttgatgaacatttggatggtttttattttttgctattacaaacaacagcgctggtaacatccacttgccctcttccctctttcacatggcaccttcttgttcttgggaggtctcagctctaacaatgtaaccccaccaaccccccgctccagctaaatggggnttctctggtccccacatgtgcctcccaagctgggcttttgatgggt

SEQ ID NO: 558 - DNA, 153 bp, Homo sapien
  misc_feature (1)...(153): n = A,T,C or G
aaatacaccctccaaagactaaaccaggaggaagatgaatccctgaatagaaaaataacaagttttaaaattgaggcagtaattaataggctaccaaccaaaaaaagnccaggaccagatggattcaggaccgaacttctatcagangtacaa

SEQ ID NO: 559 - DNA, 314 bp, Homo sapien
  misc_feature (1)...(314): n = A,T,C or G
gtcacccaggctggagtgcagtggcacatcttggctcacagcaacctccgcctcctgagttcaagtaattctcctgtctcagcctcctgagtagctgggactacaggtgtgcaccactacgcccagctaatttgtgtatttttagtagagacggggtttcaccatattggttggccaggatggtctcaatctcttgacctccggatcaactccccttggcctcccaaagtgctgcgattacaggcgtgacacncgcgcccggccgccaccttcaaatcttgttacgacataggcacattacccgtcttgacatg

SEQ ID NO: 560 - DNA, 446 bp, Homo sapien
  misc_feature (1)...(446): n = A,T,C or G
aaaggtttcactataaatacaattttgttaatacatataagactattcaggttgtttttcttcttaagtgagtttttgtagccttttttcccaaggaattagttcatgtcatctaagttgttgaatttatggtcataggattgtttttggnatctttttttttttttttacanatgtgatatcagcagngataccntattccnctcgaaaattgtagntgtgccntctcttttttcttaattagccngcctaggaaatttacngcttttattgaaattttcaaagaggtaggcttttgggnttcactggatttaatgcccctttttcnggaaaaccttttccanccatggggngcctataggaggntcaccaaatataccatttttaaaaaatcctggaatctacccccccnccataaatggctatgctggccttcacacgggggg

SEQ ID NO: 561 - DNA, 428 bp, Homo sapien
  misc_feature (1)...(428): n = A,T,C or G
tttacttgtaaaaagtccagaagtaggataggtctcagggttaggtgattcattcagtggcttactgatgtcactgaggacctgaggctgtcttttacccccacccccccaccccatgtcatcagtgtcatccagtcacaacaagggccataatctgtgtcccagaatcctcagggaaaatcctgagcttcttgtgattgggcagccttgaacctgtcactgaggctggaggaacgccaagactggctcaggcctgtggaaaggagatagagggttgccaccttagcccattcaggggcccacctggggggagctgggagcagcctcccacaccttcaggganggggtaggaatggggtgctgggaaagacaaaaacaatgtccccacaggaaagtgagctcctattcggacttttagatgagcaaga

SEQ ID NO: 562 - DNA, 438 bp, Homo sapien
  misc_feature (1)...(438): n = A,T,C or G
gacatggagtctctcactgtcctcaggctggagtgcagtggcgcgatctcggctcactgctatcacttcctttgaccaccagagaccagcccagccgttagccagaagggcctgggctgttcctcctgcctgggaaggaagactntccacacccttcaggtacctcctcagtctttctcttagaggcctccccggatgtccccacactaggccaggtntccctgtagacttaccacagttgtaattataagtgtgtttgtttagtgcctcccccaccccatactgggactntaaagcctccagagcagggggccatgggcaacctggggtntccagtgctgggacgcctggggagggtatttcttcttcaatattttctttgaatggaatttcacaaatattttaatggatattaaaagggaaaaaggataaagttgc

SEQ ID NO: 563 - DNA, 209 bp, Homo sapien
  misc_feature (1)...(209): n = A,T,C or G
ctatttaattagggtctnaagncatttagnncnccnntttnngaggaaaaatcccnttcgncagngcaaacacagnncncagggagcccnggggcngaggnnnagctttgatttttgggaaaatttnngagcccncagntttctgaccaatcttgcgctgcnccnnaatcncanattncncttttnctgngncgaagancncacctncc

SEQ ID NO: 564 - DNA, 366 bp, Homo sapien
  misc_feature (1)...(366): n = A,T,C or G
ttccatgctattccactcgggttgattccattcctttgcattccattccattccattccattgcattccattccattccattcccctacactcgcgttgattccattccattccattccattccattccattccattccattccattccgttccgttccataccattccgttccattccattccattccgttccgttccattccattccattccattttattcgggnnaattccattccattccaatcgattgcaatcgtgttgattccattccattccattccattccattccattncattncattncattncattnctttncatttcattaggggnggattncattncattggcattncattnc

SEQ ID NO: 565 - DNA, 442 bp, Homo sapien
  misc_feature (1)...(442): n = A,T,C or G
ttttganntagagacttgctctgtcgcccaggntggagntgcagtggtgtgatcttggctcactgcaacctccacctcccgggttcaagagattctcctgcctccgcctcctgagtagctgggattacaggtgcccactgctacacccagctaatttttgtatttttagtagagatggggtttcaccatgttggccaggntggtctcaaactntcaacctcaggtgatccacctgcctcagcctccccaagtgctagggattacaggagtgagccactgcgcctggggctcccccttccaattnttatagggcagcctggacatttagggagaaggaccagccttgcagcccgggggatccactagtttttaggagcgggccgncaccggtnggaagnttccagcttttttgtttnccttttaggttnaggggttaattttt

SEQ ID NO: 566 - DNA, 383 bp, Homo sapien
  misc_feature (1)...(383): n = A,T,C or G
tggccatgcactagagaaaatttaacagcaaaaaatcacttaggtggatgtaatcaggttcatagccattaacacgtacttattgtgaaagtcagatgaactataatagcctataaaccacatcacattgttgaacctgagtgaagttactgaggctttttcaaagtgctgcctctaaattctagttngtttatttaattgatcatntgatgtgccctgggggagcagactgaggacctangtgtgaattttgcttttattcctattaaatttaatcatgtttaggctcattaatcggaacttactgagganactgnaatcctgcatactattacccccccatattaattctcaggtgcccaatccatggccncctataatgg

SEQ ID NO: 567 - DNA, 397 bp, Homo sapien
  misc_feature (1)...(397): n = A,T,C or G
ataactctgtcttcgtgagctggatggcaagctctcacactttacccgcagctgtgctgtgacttcccacacagtgtctgagcagaggcggcgtgggaccagaccctctcccacagccagcctggncaaggtggcacagaccagagctctgtgcagacaagcacccaggggtctaggaatgctcccttctctccaggggccagaggggagaaccaagctgctcagccttccttgctctggccagcaggaggcccttntcctgggagcagccctcgtttctgcctgtcatgcccgagggacacaagggccatccacttgtgcttcctgcttacatgggggcacttgcttggggatgttgcttcccacttcttgaggtnttcccccacccagggggcct

SEQ ID NO: 568 - DNA, 439 bp, Homo sapien
  misc_feature (1)...(439): n = A,T,C or G
ttacagaaactgctgttctcaatgtcaccaatcacatggacatcacaaatcacttgcaaagtcaacagactcttgtctgcccgcacagtcttcagaaaatgtgtccaggtgaattcaaagcaaggcattctaattagaacaatgtacagaaggaaagaaggtatgagagtctgaggggagtttgaggaacagaaagtagacaggtatgtgtacagtaataaatgtaatagatgatgttttaggaaaagagtaaacaggggaatacgttctgaatgcttttgaatacccagttgggacatctgggactttccctccctacactttattggaaaccaccctcccaaaggagttttttacatgtngcttcttaaaaaatttaaagggccaaactcggtggcccggaatttccctggccggcccggggggggttcccccttan

SEQ ID NO: 569 - DNA, 373 bp, Homo sapien
  misc_feature (1)...(373): n = A,T,C or G
caaacaccacattgctctctacatgaagcattggccgtctgggctgcttaagcaaacacaagttttgaaggcacgttggggtcttcatggatgagctttcctctcaataacctctgtggtttcgacagggactcaacagcctccagcccccacccccaactcctgggtgaaatagtcgtaagnganggctctcaatcttacctgagcaaacagaggcagctgcttgggccagagaggctgactcttgatggcctcgggagatgttgaagttgcccctttcttgggctcttcagccacacttncttcgtnctctttcagagggcaagccacggcggtggttggttgttggttggtgggtggttttggaaggnaa

SEQ ID NO: 570 - DNA, 453 bp, Homo sapien
  misc_feature (1)...(453): n = A,T,C or G
cttcctgagagtcgagtctcgtcagaaaancttccaggtgctgattctgccctgaggtggccttgggtctagaacacatgtgattgattgcctctgagttttgtaagcagctcttaactcagggcttgagaactcccaaaaacagcccaaggcgggaataaagcgggactccggcatcacctgcacggcctatgcaatgtgtaacagtaaactcacctgccgggataatcgtctaggacagtggtctcacctgcgggggagcctttctctctacgggactttcgtcaatgtccggtgacagttgtggctgtctcggctgggtgaggggagaggtcaggggcgctgctcagcatcctaccaggcctggggacagcccccacaacaaaaaaccatctgggcctaaaaggtccacgggggccaaggttnagganaccctaccctgggantccaggg

SEQ ID NO: 571 - DNA, 408 bp, Homo sapien
  misc_feature (1)...(408): n = A,T,C or G
acgccattgaatgggtacttccggcgctggaagtggtggggagccgcattcgcgacctggtcgattcagtttgtcgataccgtggcagataacgcctcctgtggggtgtatgtcatcggcggtccggcgcaacgtccggcggggttagacctgaaaaactgcgccatgaagatgacgcgtaataacgaagaggtttctagcgggcgcggcagaagtgcctgggggncatccngctttaatgcggccgtctngctgggcacggcaaaatgggccagtcttggggtgaaccgcttgcgcaccggagatatcattctttaccggggcattagggtccgatgggtgggcgggtnaattccggggcgatccgttttttaaggcccatatttnaagggcattaggtttcagttt

SEQ ID NO: 572 - DNA, 481 bp, Homo sapien
  misc_feature (1)...(481): n = A,T,C or G
aaagtgctgggattacaggtgtgagctgccgcgcccgncaggtccttagctttgaatggggagtgaggcattaggggcatggagacacgtgaagaacatgtagcttgtcctttcttccttccagagctttctctagccatttgcaaaaattccacaagcacattatgcagtcatttttctaggaactggagagaggggagaggtggatgggaggggagggtgtcataagccttgaaaaagttagatattccaaagaaccttagcttttcccaaatagggaaatggagagttggggtggtagtttcaaatcattatttcattttctttacctctggaaaagatttcttagtttactgaggagcctacctttcaattgcatgggatgttgttacattttctttttncatttcccatggaaggatccctatttttttaggctttttaaggagctgttnacttnacaacttgagggttaccaaat

SEQ ID NO: 573 - DNA, 313 bp, Homo sapien
  misc_feature (1)...(313): n = A,T,C or G
ttctccctgcatcacagagagaagcaagcagaaggccggagagaacaagatccagctcctcctcctcttcttccagttcttctagctcctcttcttcctcctcgtcctcctcctcttcctccagtgatggccggaagaagcgggggaagtacaaggacaagaggaggaagaagaagaagaagaggaagaagctgaagaagaagggcaaggagaaggcggaagaccagcaggtgggaggctcttgcggnggccccttcgcttgggaccagtgggcaccgattcagctnggggagggaagagggatnggcccagt

SEQ ID NO: 574 - DNA, 173 bp, Homo sapien
  misc_feature (1)...(173): n = A,T,C or G
aatcttattgaaatattttcataaaatggaaaaatgggctaatttctgattcatgctatgataactctatgatctgaataccaaaaccaaagacttagtacaaaaccagaaaatgataggccagttatactcaggantgctgatataaaaaaaaaaaaaaaactcgctcgtgc

SEQ ID NO: 575 - DNA, 389 bp, Homo sapien
  misc_feature (1)...(389): n = A,T,C or G
ctcggggtgaggagtcgggggtcttggtgcactccagggcgctgggctgccgcgccncaacctaatcatctcgggcgtctgtccctggcacgcgggctccagctcctgggtcctgccgctcgcagaggaaggcgcgtgtgggcagggaaggcgccggcgaggatctggaaggaacttagagccggaccgagctaattatcattgagagtagagtaggagggggaaacatgtcctgttcttcttgacctgagccagatcaaggccatggggttaacagtacctgtggtggggctatttttgcccagttgcgccttgatacttgaacttgtttaaagatgagaaatagacatttttaagcattcgttagggaccccaacatttctttcctg

SEQ ID NO: 576 - DNA, 207 bp, Homo sapien
  misc_feature (1)...(207): n = A,T,C or G
cttcccgggcagctgggactacaggcgcctgcaccacatctggctaatttttgtatttttagtagaggcagggtttcgccatgtnggccaggctggtctcgaatttctgacctcaaatgatccgcccgcctcagcctctcgangtgctgggattacatgcctgagccactgtgnctggncaatactagcctctttgngtgctgaaag

SEQ ID NO: 577 - DNA, 279 bp, Homo sapien
  misc_feature (1)...(279): n = A,T,C or G
aaaggnntttnattgcancattnaaanatcacaaggaggnntaaagnnncancnggcatcttctttcngnagccngggaacnctnngancntattcancagcccgctgaacagtnccntttccagngacanagaaaccnnccaaaanttnccngananccntnttttaaacnnttggggcttgcngaatnaaagccccnganttngaaacangcncaatgncattnccnccanggntnaattcatctttcggggnttgnganactgaacangcaacacc

SEQ ID NO: 578 - DNA, 481 bp, Homo sapien
  misc_feature (1)...(481): n = A,T,C or G
tctttcttcttttcttccttcctgtcttccttttagtgaaggcaattttcattagtggtgtgatgaatttattgctttttatgttttgtgtatctgttgtatattttgatttgaggttactatgaagcttgcaaatactatcttataatctattattttaaactaatgacaacttaaagttgatggcataaacaaacaaatgagaaaaaaactaatagaaatgctacactttatctcactgccttttaactttttatgtttttatgtattcttgtactatgtcttgaaaagatgtaatcctttattatttttgattgggttcatcattgagtttntctattaccctaatacataaaatagggagtttatacccctcaaattacaggtgtttaatattctgtgtttttctgtgtgcttactattactgggngaggntttggtatcctaaggatgganttcctnattgctcattaatgnccct

SEQ ID NO: 579 - DNA, 102 bp, Homo sapien
  misc_feature (1)...(102): n = A,T,C or G
ggttcntnttctgttgaataaaagacagttacacttcagaagtacaaaaggttgggatcaaataaatagacaatttaaagtagataaaatcaagatctgatc

SEQ ID NO: 580 - DNA, 340 bp, Homo sapien
gtagcgatcaagccatgaatgtaacgtaacggaattatcactgttgattctcgctgtcagaggcttgtgtttgtgtcctgaaaataactcaatgttggcctgtatagcttcagtgattgcgattcgcctgtctctgcctaatccaaactctttacccgtccttgggtccctgtagcagtaatatccattgtttcttatataaaggttagggggtaaatcccggcgctcatgacttcgccttcttcccatttctgatcctcttcaaaaggccacctgttactgggtcgatttaagtcaacctttaccgctggattcgtgggaacaggatactctcttccat

SEQ ID NO: 581 - DNA, 318 bp, Homo sapien
  misc_feature (1)...(318): n = A,T,C or G
gtcgcccagggtggagtgctgtgacacaatcccagctcactgcaacctccacctccngggntcaagcaattctctgcctcagcctccctagtagctgtgactacaggcacctgccaccacgcccggctaatttttacatttttagcagagacaaggtttcaccatnttagccagggtggtnttcaactcctgacctcgtgatccacctgccttgggctcccaaagtgctgggatcacagacatgagccaccgcacctgggnctgntttcatttttagnttttcaatttctcagttcaagggnatcaatatataactnt

SEQ ID NO: 582 - DNA, 262 bp, Homo sapien
  misc_feature (1)...(262): n = A,T,C or G
nattngccaccatnngaagccngaacctcaaacagatccnnggacngggggtccanatccancagctcgnccaacngnagcacccgtctcggccccaggggcnnnnccagaactacngccntcaccangaagctccaggannggtcccaattcaaactngggcttctncagcatntngacnnntcgaacgangacagcanggagagganaaanagagtggcaagcctntnctangnctnnnccaangcngncnggaagcaat

SEQ ID NO: 583 - DNA, 472 bp, Homo sapien
  misc_feature (1)...(472): n = A,T,C or G
gcgcggtggctcacgctgtactcccaacactttgggaggccgaggtgggcgnntcacctgagatcaggagtttgagaccatcctggccaacatggtgaaacctcatctctactaaaaatacaaaaaatagctgggtgtggtggtgtgcacatgtggtctcagctatttgggaggctgagttgggaggatcacttgagcctggggagattgaggctgcagtgagccgtgttcatgctactgcactccagcctaggtgacagagcaagaccgtgtctccaaaaataaaacaaaaaaagtaggctaacttnatttttgccttatatttatttgttttacttaagctttgatccctatagggagcagcagtttttaaatgcttgatgcttgtctttaatgatccatcacaggctcttncatattagtccagtnaaacgcttcttngatttnactacactaattttccttccngggc

SEQ ID NO: 584 - DNA, 446 bp, Homo sapien
  misc_feature (1)...(446): n = A,T,C or G
gtgaccttaacgtgcctgcttcctgacccagtgtcccagcagagactcagtttcctcacctgtagtgtgtggtattgaccaaaggagatagcacatgtgaacatacattataggcagtaatgccttgggcaaatggagggttctcactaaataagttacagagataacctttcagcactcaaagaggctagtattgaccagacacagtggctcaggcatgtaatcccagcacttcgagaggctgaggcgggcggatcattttgaggtcagaaattcgagaccagcctgggcccaacatggcgaaaaccctgcctcttacttaaaaanttaccaaaaatttaggccagatgttnggtagccagngcgcntgttngttccccagcttgccccggggaagcttnaggcnaggagattcattttgaacccggggaggncagaaggtttnc

SEQ ID NO: 585 - DNA, 117 bp, Homo sapien
tcccgagtaactgggaggctgaagcacggagaatcacttgaacccgggaggaggttgcagtgagccaagactgtgccagtgcactccagcctggtgacacagcaagactccatctca

SEQ ID NO: 586 - DNA, 329 bp, Homo sapien
  misc_feature (1)...(329): n = A,T,C or G
gccactctcagcagcctctgcttttccccatgccatccacaggccaggccagctaatgcagacatcccacacatgctgtcctatacatgaaagtgcccaagtcctccccttcaactatgctgtttgatatgatcccaagagtgtttcacagcatccttgatttcttaagtaagatgctccaggctctagccagggtacagtggtgcacaactgtattccccactactcaggaggctgaggtagggaggattgcttgagcctattaaattcaaatcaagcctgggggaacacatttagggaccttagttcccaaaaanaaaaaaaaatag

SEQ ID NO: 587 - DNA, 360 bp, Homo sapien
  misc_feature (1)...(360): n = A,T,C or G
aacctttgggggcctcgtcagtcttgggctgccccatgccctgcacagcccgcctgaggtttgaggaaggggcagttggctaggccagactggagaaagccaccccaccatggctcttctgcaagaacccccggccagccacaagcctaagccccctccttaaaagctcctnctctgaccttagctgtgcatcaagggagaaaagaaagctccaggncgggtgcggtngctcacacctgcaatcccagcactttggggagaccaaggctggccagatcatttaggtcagggagtttcgagaccagcctnggcccagcaaggttgaaaacccccatcttnttattagnattttacaataca

SEQ ID NO: 588 - DNA, 78 bp, Homo sapien
taaattgtctatttatttgatcccaaccttttgtacttctgaagtgtaactgtcttttattcaacagaacatgaacca

SEQ ID NO: 589 - DNA, 372 bp, Homo sapien
  misc_feature (1)...(372): n = A,T,C or G
tattcccacctccggttaaggatggaagagagtatctgttccacgaatcagcggtaaaggttgacttaaatcgaccagtaacaggtggccttttgaagaggatcagaaatnggaagaaggcgaagtcatgagcgccgggatttaccccctaacctttatataagaaacaatggatattactgctacagggacccaaggacgggtaaagagtttngattaggcagagacaggcgaatcgcaatcactgaaagctatacaggccaacattggagttattttcaggacacaaacacaagcctcttgacagcgnagaattnaacagtggttgattccgtttacgtttacatttcatgggctttagatcggttacgg

SEQ ID NO: 590 - DNA, 382 bp, Homo sapien
  misc_feature (1)...(382): n = A,T,C or G
ttttatatacaataaatgtatagttatatattgatgccttgaactgagaaattgaaaatctaaaaatgaaagcaggccaggtgcggtggctcatgtctgtgatcccagcactttgggaggccaaggcaggtggatcacgaggtcaggagttgaagaccagcctggctaagatggtgaaaccttgtctctgctaaaaatgtaaaaattagccgggcgtggtggcaggtgctgttagtcacagctactaggngaggctgaggcagagaattgcttggaacccaggggggtnggaggttgcagttgagctggggntttgtgttcaccagcactcccagcctggggccgaacagagttgaggantccctcttcaaaaaanaaaaaa

SEQ ID NO: 591 - DNA, 79 bp, Homo sapien
  misc_feature (1)...(79): n = A,T,C or G
actncgccttcttcccatttctgatcctcttcaaaaggccacctgttactggtcgatttaagtcaacctttaccgctga

SEQ ID NO: 592 - DNA, 408 bp, Homo sapien
  misc_feature (1)...(408): n = A,T,C or G
tttcacccacctttggcctcccaaagtgctgggattacaggtgtgagccaccgcacctggcctggaaggaaaattagtgtagtcaattcaagaagcgtttactgactatatgcaagagcctgtgatgatcattaagacagcatcagcattaaaactgctgctcctataggatcaagcttagtaaacaataatataaggcaaaatcagttagcctactttttttgttttatttttgagacacggtctttgctctgtcacctaggctgggagtgcagtagcatggaacacggctcacttgcagcctccaatcttcccngggttcaaggtgattccctccccaacttcagccttcccaattagcttggggacccacntgttggcancaccacccacaccccggnttttttt

SEQ ID NO: 593 - DNA, 324 bp, Homo sapien
  misc_feature (1)...(324): n = A,T,C or G
ctacccattctccccagaaatctcaccagtgtgctcactgtgagaagacgttcaaccggaaagaccacctgaaaaaccacctccagacccacgaccccaacaaaatggcctttgggtgtgaggagtgtgggaagaagtacaacaccatgctgggctataagaggcacctggccctccatgcggccagcagntggggacctcacctgtggggtctgtgccctgggagctagggagcaccgaggtcttacttgggaccacctcaaagcccatgcgggaaggagnaagcccccttagcggnaaccaaggnaaaaggaagcaccagtt

SEQ ID NO: 594 - DNA, 356 bp, Homo sapien
  misc_feature (1)...(356): n = A,T,C or G
ggtttcattgagtggctgcgcgaacgtgcggtcntgctgaccggtgaaccacagccgattgaattcacagaccgcgtcgttgccgttgtgcgttaccgcgatggctcggtgatcgatgttgtgcatcaggtgaaggaataagccatgcacctgcttcctgaactcgccagccaccatgcggtatcaattcccgagctgctcgtcagccgggatgaaaggcaagcacggcaacacgtctggctcaagcgccatnctgtttccactgggtctccctttaaccgtnggttgcgcctggggccgatttaaaggncagcgaggtnacacgccgnaattttttantcatgggcgtggacagc

SEQ ID NO: 595 - DNA, 563 bp, Homo sapien
  misc_feature (1)...(563): n = A,T,C or G
gatatcacagagtaggggctcaatcccacaagactgccccccagcttcagatgccaatcacaataggttacccccaacttctgttccacttgactacaaatcggaggttcccatgaccccctccttgcatttgattaatttgctagagaggttcacagaactcagggaatcacttatgcttatcaatttattatattgaaaaggttataatgaaggaatatgggataaacagccaggatggaggaggatacataggggtgaggatctgggcaggatcttgaggtgtagggaggcttctgtccctgtggggagtttggaggtgaggccacccttcacaggccgtggggatgttgtttcacccacctaggggagcttcttttggaaccctggcagtttcactttatttttttattaagggctttcatccggtgggggcatggattgtttttattcagttcttccagcctctcttctattcggggggggggnggggttnttttagggggngtttcttcacatttgctggttnaccaaatacctgaggattggggggtattttttta

SEQ ID NO: 596 - DNA, 505 bp, Homo sapien
  misc_feature (1)...(505): n = A,T,C or G
gaaaggtcagggnggcttcgtcgggcgggnggaggtcttggccatcaacgtgctgacgtcgtcgtagaagccttgccatgggcgtcgagggtttcggccatgacgacctgctcttcgaacaactcactgccttgcttgaggctggccttgctcgcgtccgccagctcgccaatgctgcgtgggcgggcttgctggagccgaggnatcctgcagtttcaggccgtattccgcctgggagcttttccagttgctgcagcagctcgtcaaaacgagtgctggacgacgaattgagaaaaccctgggcccaacgaataagcccccatggcccggcctttcccccagggtctngggtgacttttccgggggttgacgcttggtnattcaanttcacttnagtttggccgcaaggtcgccttggggggtcaacggcttnaaacccgattgcctggcataattttttncttaagcatnttccgccttttttnaaggaatttttnccaatcaa

SEQ ID NO: 597 - DNA, 513 bp, Homo sapien
  misc_feature (1)...(513): n = A,T,C or G
tgcagtggtgtaatctcggctcacaacaacttccacctcttgggttcaagagattcgctcttgcctcagcctcccaagtagctgggattacaggcacgtgcctccataaccagctaatttttctgtttctagtagagatggggtttcaccatgttgtctaggctggtcttgaactcctgacctcaggtgatccgcctaccttggcctccaaatgtgctgagattataggtgtgagtagctagtcttaaatacttcactaaattgatgacactttcaagcaggccagacaattagtttaattaattaaaaatatttgtgtttgtttttatggggatttttgtgggggtttttgcccattaaccaaaggtaattggggttgttatttaggctttttctagggataaatgttttacttttccatggccctaactttttttattacctaatttttngtccttttttgccaggatggaggccctccnggattaacttcaggggcccgaggattngatc

SEQ ID NO: 598 - DNA, 351 bp, Homo sapien
  misc_feature (1)...(351): n = A,T,C or G
tttttntntntttttctggagacaaaatctcactctgtcgcccagggtggangtgcaatgatgtgacttcagctcactgaaacttctgccncacgggttcaagcaattctcccgtctcagccncccgagaagctgggactacaggggtntgccaccacacctggcaatttttntttttttagnagagacagggtttcaccatattggncaggctggtctgaaactccnaaccncagggaacccacccacctnggcctccctgagngctgcgattacacatgtgagccactgcacccagcccaaaagcattcagtgtttttttttttttttttgaaanggngtcttgctctg

SEQ ID NO: 599 - DNA, 348 bp, Homo sapien
  misc_feature (1)...(348): n = A,T,C or G
tgcccaaatgagtgcagaagcagcaggtattnctgtctgcctgattgcgtatancaccatgcctgccgtacagaatgtgacgcgatgaccgcacactattaccgcctgggangtatgccatgcaacatccagaggctcacgccattctgcgtattatcgactgaccgaagagcaacagatgaaacagctttcctttttacccggcgagatgacgccacaggaccggcgtctcattcagcgggcgctcagggctctggaccgccacctgcatgagcccggcgtagtttnnacctcttacccacgncgtacgtgaatgggctgcgacttgcattatgggccgcgtttnag

SEQ ID NO: 600 - DNA, 148 bp, Homo sapien
  misc_feature (1)...(148): n = A,T,C or G
gagttacnctnttctttatgtatngngngaacnttttcttgtaagcaacttcaacttctnccnntaaggngcncangtaancngcaacaatngggcccangangggctncccangtacctcngcattaaaacccctgnnttcagnttc

SEQ ID NO: 601 - DNA, 430 bp, Homo sapien
  misc_feature (1)...(430): n = A,T,C or G
taatgaganntcctgcttttttttggaatttatgatggggaagccagaatccctcagccaattactcctctaagtctggcagttggcagcattcagtgtaggtgcacctgacagcaataacttcagaagaagaatgtgtgttcagaattccgagctaaggaatccagagattcattccttgtctataaggaacatgtgaacccctggcccatcctgtggaacatggaccacacaagggattgaggccctttgctttgagttaaatgaggattgccatgtaggagcaggtgctaagtgaaggtgatttatcaacttgcaggctttttgcaagcgattggggattctcctgtccagcccacttgccactgggatcaccctgntaaggtcagtcctctcaataaaccctggtgttcttcattttggctggggt

SEQ ID NO: 602 - DNA, 444 bp, Homo sapien
  misc_feature (1)...(444): n = A,T,C or G
atggcacantnttgcgataagactttacttcttaggggcttaaataatgaagtcangtaaaagaggactgaaaacgaacataaagaagagctttantttgacgcaaagaattacatcagtgcttgacaaaaccgaggattcttaatttctaaaaacgctttctttaagcacttcctaacctttcattatctgagacaacatatcaagtgagcagcagtacaaaggatgcatgtgatttcgaaatgccacaattgagccaactgcagttgcacgcgtacgtagtataggagaggtgtgatcaaaaaaaggattataggggagcataggggcttcgtctgccatccaaaagntactctccccatcttcttataggcctttaaggtttttgcggaaggggtaaggttttcttcccccgctttggaaacttcgtggcccgaatttccc

SEQ ID NO: 603 - DNA, 327 bp, Homo sapien
  misc_feature (1)...(327): n = A,T,C or G
ccaataccagtagaaacagacgaagaatttcatacgttagccgcatccctttcacaaaagctggaaatgatggtggcgaaanagaagcagatgagagagaccaggtatgacaaccacggaatgcatttttctggcagcgggcttcatattctgtgtgcttatgcttgccgacatgggacttgttcaatgacacctcagcaggaaaacgcccttcgcagcattgcccgtcagcttaattcttgaaatcaaaaaaagccagacagcagtttccgggattaaaaacgtcgatggacattttgccgtaggcgttacttgaaggaggcaccg

SEQ ID NO: 604 - DNA, 236 bp, Homo sapien
  misc_feature (1)...(236): n = A,T,C or G
tgaccccatttgattgtccgatcattggctttccacccactctgggaggcacacactgctttattccttgtgtgtctgggtgtagagcctttcctctgtggcctgcagatacaagggatacaaaatgaagcatttactgacaccctccctgtctctgcagtgaaatgaacatatctgtgtagccagcagggcttagccttgggatagccattngggtatnaagggggcatcattcc

SEQ ID NO: 605 - DNA, 295 bp, Homo sapien
  misc_feature (1)...(295): n = A,T,C or G
ggctgcagtgagccataatgnaatcactacactctagcctgagcaatggagcaagaccctgtctcaaaaataaaataaaatataaaaaaataagagtcaaggacattaaattcaagtatccattaaataaaactcattaaatagcattatctcctaatcttctcattctttaagtaaaaagcaaaagagattctttaaataactagtatttggaaaaccttaaagctacaaacacacctggggatngggatttttcagcnatggaaattnattttccnggggccagtntccaccg

SEQ ID NO: 606 - DNA, 305 bp, Homo sapien
  misc_feature (1)...(305): n = A,T,C or G
agggtgctcaggccaaaaacccagaagtcatccttgagtcccctcttttctgtacatccccaaatgagccgtttagaaaattctattgggtctgcctagaatgtgcctttctccctcatnctctacccagtccagccccagcctagtcatcccccacagtctgccctccccacagcagctgagcatgtctgtgagtacctgagtcagggccttcctctacccacagccctccagtggctcccaccttnctcagggtcaaagcccaattnctcctgggaggactctgtggcgtngcgcatctttgt

SEQ ID NO: 607 - DNA, 393 bp, Homo sapien
  misc_feature (1)...(393): n = A,T,C or G
cantgattggtaagtttcctgaggcctccccagccctgtggaactgtgactcaattaaacctctattcttataaattacccaatctcaggtattttgttacagcaatgtgagaactgcctaacacacccatcctccaggaatagaagagaggctggagactgataaacaatcatgcctacgtgatgaagcctttataaaaataagtgaactgcagggttcaaagagctcctaggttggtgaacacatccacgtgctgtgagggtggctcacttcaactccacagggacagaagcttcttacactcagatcctgccagatcttcaccctattgttatctctttcatctnggctgttttatcccttattctttcatttttnaaccttttncaatt

SEQ ID NO: 608 - DNA, 414 bp, Homo sapien
  misc_feature (1)...(414): n = A,T,C or G
gggcacgagcttgatcgtatctgggagttgctgctgcgtgccgccngtgctgtggtacgccggctttgcatctggaccgtgctgccctgatttgccccccctgtaggagcgggcaagctcgctcctacctcgttaaccttaagttacaaacctccttttcgaattgagctatacagacagagcgccaaatagtggctatctgccgccgccctgcgncctcaataaaaataaaagaaaagggagttcacctgtgaagagcttgctcttatcccgccgtcgcgttcatgaaccgcctggacctttcggcattgaagttcagcctttattcagcgtgctgtttcctgttngcccgatggttgggccaccaactacttacctgggtgcgcgatttctgggngttgaattttccagggg

SEQ ID NO: 609 - DNA, 418 bp, Homo sapien
  misc_feature (1)...(418): n = A,T,C or G
aattaagctgttttgtcaccactgcaacccgagtgtttacgcggatnccggttcatggaagatactccataaatatatgtgaaataaatgaaggaatgaagaggttaggaggaagagagaaaagaaaggaaggcaggaaggaagggcagaaggaagannnggnnggggagaaaggcaaaggaggangggaggaaagtcgggngcagggnnntgnnggaggaggaggacggactcacttcaaatncttccaggtttaaggggtcacttcttttttgttcataccctccagacttggccccaaaagcaaacttcagaaaccaagagtccttttnaatcttcatcttcaattgtnccctcttggccttgcttactttattttaagttgaccccntaattgaattttctttcccctttgagt

SEQ ID NO: 610 - DNA, 534 bp, Homo sapien
  misc_feature (1)...(534): n = A,T,C or G
attccctgaagacctctntcatgccctggagatgttttccccattntcctggagattaacattctgctccttgttacttatgcaaatttctgcagctagcttgaatttctcctcagaaaatggtattttctttactattggattntcagactgcaaattttatgaattttaatgctctgcttccctttataaaactcagtgcaggctgggtgcagtggctcacgactgtaatcccaacactttgggnnancgagggngantggatcacctgaagtcaggagtttgaggccagcctngccacncatnagtnaatcccctngcttataantannaaanaaatatctagntgggatgatngtngtngggcnnctantaatncncnagcttacttgagttagggngagaggcaagntgaattcgctttcaaacccaggnatntaggangttntnagttnacgctgtanancacnancangggnganttacantcttggncaanaatgncaagaatccaatttnnnnnngnanggantn

SEQ ID NO: 611 - DNA, 404 bp, Homo sapien
  misc_feature (1)...(404): n = A,T,C or G
ttacaaaaccgatctcactctcctttgatgcgaatncaagcgtcagacatcatatgcagatactcacctgcatcctgaacccattgacctccaaccccgtaatagcgatgcgtaatgatgtcgatagttactaacgggtcttgttcgattaactgccgcagaaactcttccaggtcaccagtgcagtgcttgataacaggagtcttcccagggatggcgaacaacaagaaactggtttccgtcttcacggacttcgttgctttccagtttagcaatacgcttactcccatccgagataacaccttcgtaatacttcacgctgcttcgttggagttttngattttgctngtttccaagnttcaacacggcagtttccctactgtttagcggcaataatcctcgtt

SEQ ID NO: 612 - DNA, 396 bp, Homo sapien
  misc_feature (1)...(396): n = A,T,C or G
tggtatataatacccccataacatgcaatttacctatataacaaacctgcatatgtaccccaaacctaaaagttaaaaaataaataaaaaataaatgaaatggtgtacaagcaccgaattctcagcacctctttgagttactcatcactgagttttcccacatgaatacatgttgccaagtgtaaaactctattatgcatctccatgtcctcatcaccacaggtagctttactgaagaaaactaaaaaactttcaaacaagtggtctttgtcttattaaagtgctgggaaaataggattaaaaggaaaaagctgctttaagtttaatttacaactttactggttaattnttggattccaaagccagataggcaacagtcttaagggaaaattaccg

SEQ ID NO: 613 - DNA, 356 bp, Homo sapien
  misc_feature (1)...(356): n = A,T,C or G
cttccggcattcgatgtcactgaacttgccggtgatgctggcccggtcagccagataatgcagtcggttgccttcctgcaccagacgggctcccaggcgcagtgtaatctcccgctgcaggcccctggtagggttgctcattacagttctccactattgtcagttcagggtgatgctcatcaggcaggtatagggcccattgcggtcctggcggcgttcggcgtataccgcgagactccggcgatatccggaacgtncctgccggtgtaatgacagacgctaccgtnccactggtatttgccggtgcagttagcgaaagattcgggacttcagggatgctnggcggtatatcgtac

SEQ ID NO: 614 - DNA, 428 bp, Homo sapien
  misc_feature (1)...(428): n = A,T,C or G
nggcacgagctgagcatcaagtagggaaatctggtcaggttggcaagggtccccttaagaactatagttataaatttcaagtgggattgttcagtacaattctgtgttttttctctagttgctgggggactaaccaccgagattttactgagtaaatctgatggtgagggcagggagagcagtggggttgagagcataagagcctgcaacagcagaccacagaatccaagcggggctaataggaattgtggacacggttgggggatgaacagtacctgaatgtcaacaagccaactccacccttagccaaggcttgcatggttctcctattgtcttgggtgggctggggtctccttccagantctttagtgttcccgcccagccagaantacaacctgtccttcccntcctgcctgggccntcccacc

SEQ ID NO: 615 - DNA, 354 bp, Homo sapien
  misc_feature (1)...(354): n = A,T,C or G
tccccgcagctgaaacccgtgtcgttcagggtcagccgaatcgacacgntgccttcccactgcaagggcagaggcgaggagctgggacagagaccacgtggccagcaaagctgccacagcgaccatgcggccctntgcagagagtttgctgctcctgctctagctgggacctccctccttnctgggagtgtcctctgaggagcccgccgcctgtcacctgctnccgcgcctcactcaggaccagagtgtgccagtncctgcggcctgtcactgcctttttcttccagttatggtttcctactgcttgccagagcagggcccttttttaactnggggcttngtgccaacaancgt

SEQ ID NO: 616 - DNA, 484 bp, Homo sapien
  misc_feature (1)...(484): n = A,T,C or G
agaattctatatggggctttcctaagaagaatccatcccagcacatattttgaaaaggtgctgaattaaaaagtacaagagtttgctcatataaatcaagttgcccaggaaacctgaggtgatgctatcatttgtctcataatttagaaacgtgatctcttgagagagagactacgcattgcctgggcactttcagattccttaggaagtgcccctttgatatttggaatgtggatatatttataaaacaaatggattgttattccaaatccacatggatttataaccaagccccagaaggaatagggcagcttttgaaattagctagttcgtgggattngaacaggaaccttngatgggaattgccagttngcctgtgtgagggccagaaanccaaaggaggctgccttcagaccacattgcctatctaggggttaagtgnatttnttgaggggaccttttgtnggtgccttaaagatgacca

SEQ ID NO: 617 - DNA, 118 bp, Homo sapien
ttttgaggatggggtggcctgcaggctaagggagaggatcccggggataccatgtggtgtcttgttttgtactttgcaggtttctgcatattctcacatcagtgccatgggtcttaag

SEQ ID NO: 618 - DNA, 407 bp, Homo sapien
  misc_feature (1)...(407): n = A,T,C or G
ttcaagcggggagaaacttaccttcgcaaaacttaaggctatagaagatggggagagtatcttttgatgcagacgaagccctatgctccctatattctttttttgatcacacctctctatactacgtacgcgtgcaactgcagttggctcaattgtggcatttcgaaatcacatgcatcctttgtactgctgctcacttgatatgttgtctcagataatgaaaggttaggaagtgcttaaagaaagcgtttttagaaattaagaatcctcggttttgtcaagcactgatgtaattctttgcgtcaaagctaaaagctcttctttatgttcgttttncagtcctctttttactgacttccattattttnaggcccctaaggaagtaaaagtctttattcgcanttctt

SEQ ID NO: 619 - DNA, 304 bp, Homo sapien
tgtgtgtgtgtgcaaaacatgtctttgggattttgatatggatttgacaaaatttaacagtttttatgatagaaacattcaacagactaaaaatagaaggaaattacttcaacaccataaaagccaaataggaaaagcttacaactaacacactgaatgatgaagctgaaatttttcctgtaagatcaggagtaaggtaaggatgttcactctagccacttctgtttacatggtactggttttcctagctaggagcaaataggcaaggagagaaagaaagaattgcaatcaaatccatattagg

SEQ ID NO: 620 - DNA, 491 bp, Homo sapien
  misc_feature (1)...(491): n = A,T,C or G
cacggtttttgtacagcaccaaagcctgcgagtttttcggctcggcagcttcccagctgcgtgcctgccagtagcgccaacggttggtggtggccaggtcctgtgggagtttgcgggtcaactggtaggcgtcttcccagcgcgctaggcaaaccagcaggcgcagacgccacctcggaaaccgtattgtcgcgcaactcggggtcgtacttggtcatgacctccagcgcgngcggngtcgaagcgctttggccagggtcaagccgatctcgcgggcaatcgagactttttcgtcacgggagaagtgcatnctgctngcgtaaaccgtcgagcagcgacatggcttttgttccggatcctgcccgngccagggaacgcaggcccagggccacggnttccagaaattnggcttnggttggcagtttggaagcttgacgggtcnttgaagattttngggtttttccgcaaatncaacattaaagcgantttgg

SEQ ID NO: 621 - DNA, 325 bp, Homo sapien
  misc_feature (1)...(325): n = A,T,C or G
tgagccaagattgtgccactgcattacagcctgggnagcaganaagactctgtctcaaaaaaaaaaagctaagtcagatcatgatcatttctcctctactcaaaaccttccagggactccccatactcagantaaaagccaaagtcctaacaatggccaacanaatcactacttcacctgtgccccctttacttctccgacttcacctcctactgttctctctctcaatcacttnacccnaccacattaacatntttactgttccataaaaaatgtcagtcattctnctgcctcaggagcattcttnactcatatgtccacancg

SEQ ID NO: 622 - DNA, 360 bp, Homo sapien
  misc_feature (1)...(360): n = A,T,C or G
cagtctacactagcaaaccttacacagcccctaactgttgaggtcagagaagggaactgattctaggtatagcatattgcaaatactagaatccaccttgacctgcccactcaggtgccctggagtatttgaagaagatgacttcaggtttgtttgaacttaaagtgctatagcncnaaatgctattacaatttaggacataagcaatttttgtatgaaacatatcattctcactcttagttctccggagtcaggaaggaactaagaaaggtttacctgggaggtcagcaagagcaggatgggtggaacggggagccaggggaaaggaggggattggggntacccaggctttgggtacca

SEQ ID NO: 623 - DNA, 382 bp, Homo sapien
  misc_feature (1)...(382): n = A,T,C or G
aaaatttgaagtgtgcataggcttttgaccaaatagttccatttctagaaatttagctacaaaaaaaattctcacacatgtgcacaaagacctacgaacaaagatcttgaatctttcagtttgcaatagtgtccacagaagaatggttaaatatagtacagtacatccgtactatcaaattttatgcaatgttagaaagaacaagataactaacatattgacatgggaaagctctccatggaaatttgtgggacctctggattatgcagctggaacatagcctcttaattgcagcatgtcccacattgttacctcgcttttacttatttcagttaggtttccanttgtntttgggccttaccggggnggtggttttagggaa

SEQ ID NO: 624 - DNA, 370 bp, Homo sapien
  misc_feature (1)...(370): n = A,T,C or G
ggctggncntgtaaaggtgtgatctgggctcactgcagcctccacctcccganttcaagcgattctcccnccttagcctcctgagtagctgggaccacaggngcgcacnnngtncgtggctactttttctagttgttgtagagatcngattttncaatattgcccaagctggactcgaacncctgggctcaagcgatccgcccgccttggnctctcanagtgctgggattaccgtcgtgngccaccttgcctggccatcctttcctaaggtagtaagantgtngtaggctaaatgacggtatcctccactccgtccctaaaaatctcctgggtcctaatctctagaacctgtgaaaagattacctgtgta

SEQ ID NO: 625 - DNA, 516 bp, Homo sapien
  misc_feature (1)...(516): n = A,T,C or G
ggagctcactgttcccctcatccaggcannttggagcggcctcccctcttcctgtctcacaggccctggaagcttcctgttgctccaggcttctccttagggatctgattttcccagagaagacagcagctgctgttcctactctctcttccagcctggagtatttgaaagcttttcaaactttatccagcctggagtatttgagagctttccaaactttatctagcctggagtatttgagagctttccaaactttatcctgaacaccttgaagatgagtcctgtgttgactgtgccctgaattacaacgtgcccccccttttttttctcttgcccatgagaagaataaacagccttatctgttcactaatttaattgtcatagggatggcttcctagctctctgggccaagtgcctttaggaaactgttttaacattgggncatgtgggcttgcgattatctctttaaacaaccacgntcaagatgggcttcgtgtatatctgaatgggccctcc

SEQ ID NO: 626 - DNA, 472 bp, Homo sapien
  misc_feature (1)...(472): n = A,T,C or G
aaagtagatttgggtgtgttccaatcccttaagttgtagtagaggagggtggtcttttaccctggaaaaagcccctgctctgtggggtatcaatatgcccaactgccaatttacatttctcagtcctcattgcagatgggaggaggtaggttgtgagatgtgtcagagagtcacttggtgagggttttaggaaaacacttacacagctacacagcaatatttctcttttctccattcattgtgatccctaagtgacagttctgtaatcctgtatgactttgagaatatgttaagagtgggtatgacaaaggataaaagaggcctgggagtnttgatgacaatgtgggagccaccagggacttccaatccattgttaatggaggtaaaaaattaagcttgccccttgttttaaaccctgttgtttccatgtctttgctgcagcgcttgaatgcagtttccacctggncacagt

SEQ ID NO: 627 - DNA, 438 bp, Homo sapien
  misc_feature (1)...(438): n = A,T,C or G
ggctggtctcaaactccntgacctcgtgatacacccgcctcagcctcccaaagtcctgggattacaggcgtgcncncngtgcctggccaactcattcaacttttgaggaggtgaacactaagctgttaacatcccttttccactgcatcgttgttcacgctcatgtacagcaatctcattaacacctccatcttcttcagagtggaatgaatccaaagatgttgaatgtaatggatttgaaggttaaacctcttttccaatgaggattcaatggatttgaacatattttcacccaaagattttcaagggtcaacatccaaaactagttgatattctctgctttcacagccaactgaaaaaatggggtatacacacacatgcaatttctaacctgggnaggcttaagcagggggtaaaatacttaagggnaaatttggg

SEQ ID NO: 628 - DNA, 495 bp, Homo sapien
  misc_feature (1)...(495): n = A,T,C or G
gtcagacanttaagtgtgattgtcatacaacaatcatttattgaggacctgctaagtacaaggcactgctctaggttcttggaatagggcagtgaataacacagacaaagcagaaatgtctgccttcctggggtttgccttctgaaagagctgccctctcccgctaccatgttatcattaagatagggttcaaaagaggattgagcaaggcagggaaaaatcagctcctgaagtttcccatgtgatcaaaacagagtttccatagcatgtgtaaaccagttcccatgctgggtggccctggcccagagtccttctggggtcagctatttccttctgcaactgtctacctactgttgtgtcactctgcaggcctggggcttcactccactttgctcatcaggccacagggaggaagtatatgctgggtctgttgaatttaaatgctcaagttccctttcaggtnggatcatgggccagtgggagaaggaagggcct

SEQ ID NO: 629 - DNA, 458 bp, Homo sapien
  misc_feature (1)...(458): n = A,T,C or G
gagacaganggttttctcttgttgcccaggctggagagcaatggtgtgatcttggctcaccacaacctctgcctcccgggttcgagtgattctcttccctcagcctcccgagtagctgggataacaggcatntgcaccacgcctggctaattttgtatttttagtagagacagggtttctccatgttggtcaggctggtctggaactcctgacctcaggtgatccacccgcatccacctcccaaagtgctgggattacaggcgtgnnaaccaatgcccggccgattttgactaccctaggtacctcatataaatgggaatcacacactatttgtctttttgtaactggctgagtcactcagtctagagggaaccctcagggttttcatcatgaatcttacacctgttgctgggtccccantttcctcagagcagtttngggaagaggggnatggcccc

SEQ ID NO: 630 - DNA, 166 bp, Homo sapien
  misc_feature (1)...(166): n = A,T,C or G
ccacgaattcaaagggaaaaggncccancagcccaggccccntcccatggggtctcnnancgngngcttctcgggggggagcaggcnggcgcttnagntgaacccagggaccnttctnttnggcttctttntttttctgancantttccntnanacgtttnaggaa

SEQ ID NO: 631 - DNA, 185 bp, Homo sapien
  misc_feature (1)...(185): n = A,T,C or G
ttgagttaantattttattcttnattgtcacattttccaagttttgcgcattcaaacttggcaaacatcatggagatttgtacaaacatacatatacatatatacacacatatttatagccccagcttcctcattaaancttgtgctcaggctcctgttaaaagaggtaaaatggtgagaagata

SEQ ID NO: 632 - DNA, 325 bp, Homo sapien
  misc_feature (1)...(325): n = A,T,C or G
tgagactctgtttcaaaaaaaaaaaaaaancnaaaaaaaggaaaactttctaaggtttataaggttgaccctggggactagatatattagaagtagtgcaggcagctctccggatacacccacagcctgaggatgccacgagggnctcctaggccacagcagcatagctggaagcagcgggttcctcccagtntccccaggngtgataacagagctttggaaantntcaggcaagagaagtaccctcaagcttacccttcattaggttacatctgtctctgcctctgcctaacatgccctgcccaagatgtctgaggcatgtgct

SEQ ID NO: 633 - DNA, 370 bp, Homo sapien
  misc_feature (1)...(370): n = A,T,C or G
tttggcttttnttggctgaacaaagagtgaggccagttgatcaaagtggaaaacaatgggaaagcctagactggggtggaaatgggagtaatgatagggcaagagcataaagagatctatttnttcgtgctagagtttgaattgcttttgaaatacccaagttgagatgatagcatctctaaagtgaacctaatgataactgtctgacagggtggctctgtggattacaggagagagtgtctgtaaaatacagttcctgtcacataaaaggccctcagcaaaggtgaggagactactggagtgtgacatgtgtgtgcagttaagcttgtgtgcttgcatgtaaataatcaaaataatcctctccatttat

SEQ ID NO: 634 - DNA, 450 bp, Homo sapien
  misc_feature (1)...(450): n = A,T,C or G
agtagagacggagttttcaccatgttggccaggctggtctcgaactcctgacctcagatgatccacccgcctcagcctcccaaagtgccaggattacaggcatgagcaccgcgcccagcttagttatagttataatcaaacagtattgagcatggtctgccaggtaactgttctacatcctttacgtggaacatctcacttgagcctagtaaccctatatgtaggaaactgtggttaccctattttgccactgaagggaattacatacagagaggacacggggcattcagaggaacaagtcactttgccttaagttgttatggcttggcaagtgggtcggaggcttaacgttccaacccggggcagccttgactttcagagctttngttttttggatccatggctttacngagttntcacggggnttttaggttacccgnccaaggnaca

SEQ ID NO: 635 - DNA, 377 bp, Homo sapien
  misc_feature (1)...(377): n = A,T,C or G
cggtgatgcgggaggaatgcgtggtgcggccttcctacatctaaccgattaaacaacagaggttgctatgctgtcgcgtcggggtcatcggttaagtcgttttcgtaaaaataaacgccgcctgcgcgangtnttgcgtcagtantttttttcagagataaagtggtgccggangcaatggaaaaaccaagagtactcgtactgacaggggcaggaatttctgcggaatcaggtattcgtacctttcgcgccgcagatggcctgtgggaagaacatcgggttgaagatgtggcaacgcgganaggtttcgatcgcgatcctgaactgggtgcaagcgttttataacgnccgtcgtcgacagctgcagcagccaggaa

SEQ ID NO: 636 - DNA, 259 bp, Homo sapien
tactaaaaatacaaaaattacctgggtgtggtggtgcatgactgtaatcccagctacttgggagttgcagtgagctgagatcgagccactccactccagcttgggtgacatagtgaacctccatcttaaaaaaaaaaaagaagaagaagaagaagaaaagaaacacacgtggtctaatcgagtattatttgagttgatgaattttttttttgagatggagttttgctcttgtcgcccaggctggatggcacgatgttgg

SEQ ID NO: 637 - DNA, 242 bp, Homo sapien
cacaccctgttcactgcgcagtttccgaccaccatggacaggggaatcttggaacaccagtctcactcgatgatgccgcatgtccgtgctcacattgatagtaaacagagtaaatatcattcccatgacaatcggaataaagatgaaattgagggtggtgacctgcagtaggcagcagtcctgggtctggattggtatgaacatcttcgtacttgaacgggaggctgcaatcctcctcgtgc

SEQ ID NO: 638 - DNA, 194 bp, Homo sapien
gaaaagagttcacaggtcccatgtcggctttatggcatgaacacaacacattgttagtaaagcttccactggtaggaacaggccatcagagtaacttctgttacaaaactgtccagcccattagatcttaaagttattttcttggcgatgaagatgagcagacattcaggcagttttccagtggtggctttcac

SEQ ID NO: 639 - DNA, 391 bp, Homo sapien
  misc_feature (1)...(391): n = A,T,C or G
attgagttcctatatgttagcattgcaatcatagaaatggttaatctatactaaatatttttccaaagtgttcacatgtttttgtgtcatgtagttattaatactgtttctgactaaaatacacagaggcattcttttcagttcaagatattttgtcctctcagaaacatatttttatcttacatgcagtaatttgccttcccagtaactttatacaattttgctaaaaattgtaataggggaaataaaagtaggtatggaccttattcctggaggtttaaaaccaatatataattggttcccaaaggtttccctctgtggggccctttaccattggcttggtacctctgggaaaaaataaggcnggtggggtaattgggtataccaccac

SEQ ID NO: 640 - DNA, 541 bp, Homo sapien
  misc_feature (1)...(541): n = A,T,C or G
tatgtcaccctnggctggagtgcagtgggcgcaatctcggctcactgcaagctccgcctcccgggttcatgccattctgctgccttagcctccccagcagctgggactacaggcgcccaccgctacgcctggctaatttttttttgtatttttagtagagacgggatttcaccgtgttagccaggatggtctcgatctcctgacctcgcgatccgcccacctcggcctcccaaagtgctgggattacaggcgtgcaacttgcgcccggcctatgttaatgttttcacaaatatcatctcactgaatccctgtaacaatcctatgtggggaagtgctattaatattaatcattcccatgtcacacttttccaacatcatcaagatattaacaaaacttcgctttgactatgggtttgtctatatggacttcaaaattcatactntcacaaactgcaccctnaaggaccctggcattatctaagggggggaataaggcaatcngggatttaaggcctcaggttaaatctggcttttnaagggc

SEQ ID NO: 641 - DNA, 274 bp, Homo sapien
  misc_feature (1)...(274): n = A,T,C or G
ggcagggaagtcccactgtgaagggctgggacctggagagatgaagacaaaggctgggacccccagtggataggaagggaacccaggtcccgacctcagggtgggtnacctccatggttcagggctntgcagncccacctcctgcgggaaggtccgggcttctcccttgatcccccttccctaagggctgagcatcaaaaaaacgacgtagcagcagtaatggtatcagtaacagcaatgcagtggctagggctgagtgcatggtgatattatc

SEQ ID NO: 642 - DNA, 414 bp, Homo sapien
  misc_feature (1)...(414): n = A,T,C or G
tatgatttacattttaaaagatcattctggatgctgtatggaggatgtaaggaactcaaagtacggccaggcacggtggctcatgccgtaatcccagcaactttgggaggccgaggcaggtggatcgcttnagctcgggagttcaagaccagcctggccaacatgacgaaaccccgtctccactaaaaatacaaaaattagctgggtatgggggtaggcacctntaatcccagctacttggaggctgaggcaggagaatcacttnaacccaggggatggnaggttgcagtttagccaagattgagccactgcactccagcttgggcgacagagcaaggctccatctcttaaatagataaataaatctgggagtattaagcaaaatattttagggcacctacccttgatagtccc

SEQ ID NO: 643 - DNA, 561 bp, Homo sapien
  misc_feature (1)...(561): n = A,T,C or G
aattttggtgagggctttggtatatatacatatgtgtatatatatgtgtgtatatacacacacacgtatatatgtatatatacatacatatacatatgtgtacatgtgtatatatacatgcatatacatatatgtatatatacatacatatatatgtgtgtatatatatattccatcatatgtatatgatggaatgccactcagccataaaaaggaacaaattaattgcattggcagcaacctgggatggaactggaggctaatattccaagttcagtaattcaagaatgggaaaaccaaacattatatgttctcactcataagtggggagctaagctatgagggatgccaaaggcatcaggaatgataccatgggactttgggggaccttaggggggaaaagggtngggaggggggtnaggaggntaaaagacctccaaattggggntccagtgttatcctnccttggggtaatngggtnccaccaaaatctccccnaatcncccgctnaaggaccttccccatnttaccgnatgcccacctnttccccnaaaacccttt

SEQ ID NO: 644 - DNA, 573 bp, Homo sapien
  misc_feature (1)...(573): n = A,T,C or G
gatacatgacacggaaagtgaaaatctctgcgtcccatcctcctgagataaccactgccagcaacttctgctattgattttaaaggttcttctccacatagtgctcctgcagaggagaaattagaagtatttatgctggaatacaaaagttaagatttttaggaaaatttgcccctgccatttgtagaagctagctatgatcacatatcacaggaagtgaacacctgagggcttcttttttaaggaattctttcttagagcttttatatgaagatgacaaaaggtagagaccttagggcactggtggcttgactgaaagtgtgtgttgtcaaagatgttcttttcactgacccccctgggaaggactgttcccatgacagaggggagggctgacccagtctccagggcttgacctgaaaacctgttaccatgggcaacttaattcgccagatgtcagtctgcttaactggagcctacattcccgtagctgggagaaactatttttaaaatctcacgtctatttttgaagcaccatctgttaaatttgcgctctgtccaacatagncattcaat

SEQ ID NO: 645 - DNA, 370 bp, Homo sapien
  misc_feature (1)...(370): n = A,T,C or G
gacgtcgaaacattctgcgacgcgcntttctcccacgtcctttgctcatatcgcttaaggagtttaacgatgccaaaatccgtaattattcccgctggcagcaggcaccgctggcccccttcgttcccggcacgctggctgatggcgtggtgtatgtctccggtacgctggcttttgatcaacataataacgtgctgtttgccgatgacccaaaggcgcaaacccgccacgttctggaaactatccgcaagtgatcgagacggcgggtggcacgatggcggatgtgaccttcaacagcatctttattaccgactggaaaaattacgccgcgattaacgaaatctacgccgagttttttccgggtgataaa

SEQ ID NO: 646 - DNA, 425 bp, Homo sapien
  misc_feature (1)...(425): n = A,T,C or G
tgtattttaagtaattatgtccacccgtaagcaaatatttagaacatgtctgtgttgactggccctgtcgacctgntgatgggacttttaagacaaaatgaacacattgtttctgctccctgtgccctgagggtgggaaccaggctgtgatgtctttaaatagtgtccactttgaccaacaccaatgaaacctaatgatgacccctatctgacaatgatttagtgtgttaacaaacttaaatagaatttgactagcgctagggaaaatataatgtgtttcctgtatattattatgaggaaaaataaacacatatatggataaactatcaaggtgagggatgggaaagttncggaatggggattatttctgtcatctnctcttggataccaaatccaccttttttaaaagccaaggggaaaattgt

SEQ ID NO: 647 - DNA, 494 bp, Homo sapien
  misc_feature (1)...(494): n = A,T,C or G
gcatcctatgataccatctccttgaagcctcactgccccgtcccgcaccctgtcctagtgccagaaccccacgcacctntcagacgcctctatcaattccacacagagattgcaccctatgtggggacctctggcatnagacaacaccctgatttctcaacactttncattncaaacaaaccattcagacactatggctgattcangaagcaccttgccatagancataggcttgatgcactgagataggtcattgctctgagataatgcagcatcttgagagttcatccatccattcatcttaccccttcatcaatccaaanaatatgattagtgnctgggctaggggtgggatttttgcttttccatagcttgtgacagggggccagggctngtaggcattaaatggggtgcttttggggcttnagttntcacacaattgngggagtcggtgggagcttttggggagaccttggggggccacataggnccct

SEQ ID NO: 648 - DNA, 494 bp, Homo sapien
  misc_feature (1)...(494): n = A,T,C or G
nnnngatgtncacccgtaagcaaatatgtaggncntgtctgtgttgactggccntcgcgnccnggtggaggggacttttaagacaaaangaacacattgtttctgctccctgtgccctgagggtggcaaccaggctgtgatgtctttaaatagtgtccactttgaccaacaccaatgaaacctaatgatgacccctatctgacaatgatttagtgtgttaacaaacttaaatagaatttgactagcgctaggaaaatataatgtgtttcctgtatattattatgagaaaaataaacacatatatgataaactatcaaagtgaagaatgggaaagttacggaaatgggtattatttctgtcatcttctcttgataacaaatcaactttttaaaagcaaagggaaaattgtagcatgtattaaatgcttcctgggcntttcattctctggggnttatccatgtcacggccaaacctngttgantctcccaaatagt

SEQ ID NO: 649 - DNA, 285 bp, Homo sapien
  misc_feature (1)...(285): n = A,T,C or G
aaancaanaggnctttnattgcancattaaaanancacaagnagggctaaagggtcancnggcancntctttcngnagccagggaacnctnagancnnatncaacagcccgcngaacagtcccnttttcagagacaaagaaaccnnccaaaaattncccgaaanccntgttttaaaccgtnggggcntgcngaatcaaagccnctgaattngaaacaagcccaangncattncccncangggtnaattcatcttncngggcttgnganacngaacangcaacacc

SEQ ID NO: 650 - DNA, 531 bp, Homo sapien
  misc_feature (1)...(531): n = A,T,C or G
ttcttttttttctgagacacagtcttgctctgtcacacaagctggagcgcagtgacgcgatcttggctcactgcaacctccacctcccgggttcaagcgattctcctgcctcagcctcctgagtagctgggattacaggcgcgcaccaccacgcctggataatttttgtatttttagtacagacagggtttcaccatgttgggtcagggtgggtctcgaactcctgacctcgtgatcttgcccgcctcggcctcctgaagtgctggggattacagggggtaaggcaccgtgcccagccttgcctcaacttttttttttttttgagacggagttntgctctgtcgccagggntggagtcagtggcgcaatcttnggctcgctgnaagttcngcctnccgggttaaggcattntcctgcctaagttgccgagtagctggggatanaaggggccgcaacatgctgggggtaattttttngaattttaagaagaaacggggtttaccntttagcaggggtggtttggattttcct

SEQ ID NO: 651 - DNA, 393 bp, Homo sapien
  misc_feature (1)...(393): n = A,T,C or G
agcaattcttgacgctggctacctggagttcacatcagattccacaggtgaaaggggctcagtcccaaaaaactgctcccacttcagacacgagttgcaattacctagccgctggngcttctgaccgactggcaatagtttggggtttcccacagcttccgcctcatgttcaataatttactggaatagctcacagaactcaggaacacactttactnacaattgctggtgtattacaaaagatgggccaggtgtggtggctcacgcctgtaatcccagaactttgggaggctgaggcaggaagatcgcttgagtctaggagtttgagacccagggcngggcaacatagcaagaccccatctctacaaaangtgaaanaattagccagggcgt

SEQ ID NO: 652 - DNA, 319 bp, Homo sapien
gtacactgtagcagtcaatcaaagctcaccgtaacctcaaacttctgggctcaagcatcctcctacctctgcttcccaaagtgctgggacgataaactttgtagtcatacacggtcccaagcatttgaaaaactttatctcatgtattcttcccaacaatcccatggagttatcactatcatccccagctcacagataagagcaccgagacttagaggggcacgtgctctactcaagtcacacacggttggttaggagagagagacaagaatccagatgtgctggactctgggttttttccactccaccataaggaaca

SEQ ID NO: 653 - DNA, 239 bp, Homo sapien
  misc_feature (1)...(239): n = A,T,C or G
aggattgcagcctcccgttcagtacgaagatgttcataccaatccagaccaggactgctgcctactgcaggtcaccaccctcaatttcatctttattccgattgtcatgggaatgatatttactctgtttactatcaatgtgagcacggacatgcggcatcatcgagtgagactggtnttccangattcccctgtccatggtggtcggaaactgcgcagtgaacagggtttgcaagtca

SEQ ID NO: 654 - DNA, 511 bp, Homo sapien
  misc_feature (1)...(511): n = A,T,C or G
gtttgtacgaggaggaggaggtacctgaaaaaggaaagcttgacagaagatacgatgtttgttgtggcttttgaatatgagccacagttattgaacctgtgattacctggacaagggtaagcaactacatagagtgaaggctggaaagctctattggagtgagagagataagggtcctgtttgcctggcttaggtgtttagactttagcctgtagnaactgaaagtcattgaaggctttcaatcaggaggatgacataaccagatttgcatttttaaaagataactggcctccatcagtgagattaaatgggtcttgttaaccaagagaccagggaggccaggggagtctgcttggggagaactcntgttgatacacttgttgactccatgggtaagaaccnccaagttaaggttaaaggcacttgatattttgaggagcctttatcccctnttgctctnccaccaaagccttcaacttccaccnttttccattgtgtttaatttncccgg

SEQ ID NO: 655 - DNA, 406 bp, Homo sapien
  misc_feature (1)...(406): n = A,T,C or G
tgacagtcaatctttccatcactatttgttaaaaaagctatcctttctacactgaaattattttgcacatttgtcaaaaattaattgtctctgtatatgtgagtctgtttttagactcacttctatcctatggatctatttgttatctttataagctttgttcctcagtgcattatctttctcagtcttttactattaaccagtttgtgccttgatatttaaaacacgtttttattcacaaaatataatttgggtcttgggtttttcctgaggaatctctgccacataattgggtatgtttagatcacccatatttaacatggattatcggatatgggtaggatatggattttggttatcttgcctatttgtttgancctattccntggttaaccnttttctctgt

SEQ ID NO: 656 - DNA, 491 bp, Homo sapien
  misc_feature (1)...(491): n = A,T,C or G
ccagatggggaaagctgtgttatggggcttgtcagtttctgccagccaaggcttcagcatagctgacttgtaacaaagttgggaaggccttgcttttgagagccagaccaggagtacctgtgactaacaaggggtctgggaggatctgctgctcccatgccctcctttgtatattttaaatctgtttgagccttctgggctcctgtgaattagggagaggcagctcctcagtctaactcctattgtgaccagggttgcctaattggccctttggtttgggcacccacttgtcctcttgcgtggttggatgagatgctgctcccaatgtccctgnatctcttacagacccctcttgattcttnaattcttgggctttgagagcccctggatgccctgcagtcttgaatgagcttctaatggttgatcaagacccttgaatgttgagtctntccataattagaatngatatttnctgcccattgattgtaatt

SEQ ID NO: 657 - DNA, 275 bp, Homo sapien
atctccagcctgtttttactcagtaccctggggatggggctgctgatttccacgattacccgcaaccagttcaatgccgctcaggtcgccctgaacgccgcttttctgccgtcgattatgctttccggctttatttttcagatcgacagtatgcccgcggtgatccgccggttgacgtacattattcccgctcgttatttcgtcagcaccctgcaaagcctgttcctcgccgggaatattccagtggtgctggtggtttcattttcgagcagata

SEQ ID NO: 658 - DNA, 375 bp, Homo sapien
  misc_feature (1)...(375): n = A,T,C or G
ttcgcnntnttaatagtctagattttaatctgaggcctcaaattctctgatttgtcttatttcctcctaagataatgccatgggtgctttaggggtgcagtgtgtgagagtatgaattttgaagtcatatagacaaaccatagttcaaagcgaagttttgttaatatcttgatgatgttggaaaagtgtgacatgggaatgattaatattaatagcacttcccacataggattgttacagggattcagtgaggatgatatttgtgaaaancattaacataggccgggcgcagtggcttcacgcctgttaattcccagcacttttgggnaggccnaggttgggccggatccccgaaggtccagggagntccgagga

SEQ ID NO: 659 - DNA, 306 bp, Homo sapien
  misc_feature (1)...(306): n = A,T,C or G
ggcacgagtaaaatngagataatatcaccatgcactcagccctagcactgcattgctgttactgataccattactgctgctacgtcgtttttttgatggctcagccnttagggaanggggatcaagggagaagcccggcaccttcccgcagaggtgggctgggcacactgcanaccatggaggtcacccaccctgaggtcnggacctggggttcccttcctatccactgggggtcccagcctttntcttcatctctccagggtcccagcccttcacagtgggccacttccctccctgtgcacggag

SEQ ID NO: 660 - DNA, 389 bp, Homo sapien
  misc_feature (1)...(389): n = A,T,C or G
cttggcntcccaaagtgctggaattacaggcgtgcncctgttgccttcccatggtttcttatacttattttaacaatgttatntttgctttaaccatttcaaatatcaaatttctggtagatctgagatactttcaagtttataggacaactggcatctcaaacttgaagtatccaaaatggggctctcttgtcatctccaaccttggtcctcacctgcttttcctctattccaacagttactcaaaataaaaatntaagacttgtctttgggcttctctnnttcttcatcaatgccttcacactccttaccctggaacatcccaatcttaggcaggcaatttgtagttttttctgggggagggaggggggagtnccaaattntatatt

SEQ ID NO: 661 - DNA, 492 bp, Homo sapien
  misc_feature (1)...(492): n = A,T,C or G
atctcctgacatcgtgatccacacgcctcggattcccaaagtgctgggattacaggcatgagcaccgcgccgggcccataattttttatgatcatttctcttgagacatttcagaaggcatcaggcagcattaacaagaaacatcagcttgttttcacaggtgcacgtttttatttgatactgcctttaaaacattcctagtgattttatgtgagaagctttccttatctaatgcctaattgcattctatgctctttgcacagtgaattcttgattatccatgggtcatgggtaggaaaggggaggagcgtgggataantcttaaaaatcttcattttgcatccaacttgcctcttcttcacccaantctttttggcccaggggntaggtnattgagtgttttccaangttagtggggaagtaccaattggggctgtggaatgggccaaaaacacngtgtttgccccaatggaaagctcttggattattaca

SEQ ID NO: 662 - DNA, 450 bp, Homo sapien
  misc_feature (1)...(450): n = A,T,C or G
atttcgttaatcgcggcgtaatttttccagtcggtaataaagatgctgttgaaggtcacatccgccatcgtgccacccgccgtctcgatcaccttgcggatagtttccagaacgtggcgggtttgcgcctttgggtcatcggcaaacagcacgttattatgttgatcaaaagccagcgtaccggagacatacaccacgccatcagccagcgtgccgggaacgaagggggccagcggtgcgctgcttgccagcggggaataatttacgggattttgggcattcgttaaaantccttnaaggcgatattgagccaaaagggacgttggggagnaaagccgccttcncaagaantttttttcggacgtngtttngacccccagncccaaaaaangtttttcggtanttttnaaccaacggggtttttttttggggnaaattttttgggncccc

SEQ ID NO: 663 - DNA, 311 bp, Homo sapien
  misc_feature (1)...(311): n = A,T,C or G
ttgacattgagcattttaatgagtgcctggnaatatcaaggctggttgtaatatcaaggctggttgttcagggagcacaatgactctctaagcctggattcctcacttgcaaacgagagtgntgctgctcacaactcaggtactatttggagaatcaacaagatttgacgtgacatgataaacccagagaatgaaagccagggaagcatttaatacatgctacaatttttcctttgcttttaaaaagttgatttgttatccaagagaggatgacagaattattaccattttcgtaactttccattcttcca

SEQ ID NO: 664 - DNA, 380 bp, Homo sapien
  misc_feature (1)...(380): n = A,T,C or G
gnctatgtggccccaagttctccaaagtctccaccactcctcattgtgtgacactcagcccacagnacccattnatgctactagcctggcccctgtcacaagctatgggaaagcaaagatccaccntaggccaggcactaatcatattttttggattnatgaaggggtagatgaatngatggatgaactttcaagatgctgcattatctcagagcaatgncctatctcagtgcatcaagcctatgttctatggcaangtgcttcttgaatcagccatagtgtcttgactagtttgtttnggaatgggaaagtgttntagganatcaggggtnttgtnttgatgccaggaggtcnccccaccntagggggtccantcctnt

SEQ ID NO: 665 - DNA, 77 bp, Homo sapien
  misc_feature (1)...(77): n = A,T,C or G
cgctacganaaantcctggncagcagaggaatcaagcagaagacactcataaattacatgagcaaaattaaagcaat

SEQ ID NO: 666 - DNA, 337 bp, Homo sapien
  misc_feature (1)...(337): n = A,T,C or G
ttgacattgagcattttaatgagtgcctggnaatatcaaggctggttgtaatatcaaggctggttgttcagggagcacaatgactctctaagcctggattcctcacttgcaaacgagagtgatgctgctcacaactcaggtactatttggagaatcaacaagatttgacgtgacatgataaacccagagantgaaagccaggaagcatttaatacatgctacaatttttcctttncttttaaaaagttgatttgttatcaagagaagatgacaganatnataccatttcgtaactttccattctttcactttggatagttttntcatntgtggtgtt

SEQ ID NO: 667 - DNA, 338 bp, Homo sapien
  misc_feature (1)...(338): n = A,T,C or G
tcaatcaatcaatataatatatatttgaaatatgtatatatataaacatatatgtgaaatatatatatgtgtgttggggtggggattgggcgtagagctggcatgtggtatgagtatgatacactaagagtagtcctggccttgtttgtcctgggatcaagctcttggctgtacagattgccacctgattcatctccagggtttgctgtgagtcattctggatgcaggggcaaggggctgagaggtgttgagaatgtccctgtttatccctttgacgcaggtgggtggccaaaggaagcctgggggagatcaccaggttgagggantgatcctgttga

SEQ ID NO: 668 - DNA, 425 bp, Homo sapien
  misc_feature (1)...(425): n = A,T,C or G
atgtctgccctggntntggcaacaaacatgcagacatgagtgtttcatacctgccatctggggcctcctgaatgagacagtcctacacggattaatgcaatactttatcatagaggctgataagttaaaagggctgtattctatccacctgcagtgtgaaaagtgcacctgaacatgtaaatcctcctttaatgtcagaaggtagtattattatgctttgtccatggctttgtgtagcaaagaaagatacttggtgttttcccctgcttcctgggtgcagagttcctaaaacccttgggaattttcttttttaggaaaaaaaaaatttttttttttgagacagggtctctctgtcacccgggctggtgtgncagtnggtgtgattgtagctcaatggcagcctcagcctccccagggtaaaagca

SEQ ID NO: 669 - DNA, 272 bp, Homo sapien
  misc_feature (1)...(272): n = A,T,C or G
atgcaanancncctggganagagngtcctaggggcgcagtctnnccgcgaactcccacgtattgagaatcttctgtatagcaggcactgtgcaatatacatgcattcattatcttacagaatactnagaaccgggagcgggcgctattacgggccccagtttgcagtcgaagaaactngctcagancgtgaagggtccatggtcactgagagcggncggcngcgcagggagtccgacctgggatctgcccgactacttccactgtgccagtt

SEQ ID NO: 670 - DNA, 442 bp, Homo sapien
  misc_feature (1)...(442): n = A,T,C or G
tgcgatcactcccgagcaggagggaggcaccctgctgcccagtagtagcaccactcctagaggaggagggcccagcctgtatgggggcagtggggcccgcaccaggcatccatcctgcctggcccagatggtccctctgctggtggctggcttcgggtggtggctccgggaagcacacatttccaggaagggccctgtaatcaagtgaagttgccggatgtccttgagtcactggctcctcttcgtcttgactcctccgttgttgcttccggtcactccctagtctttggctcctttttctttcccttctnttgttgctgtttctaaattcccanggaggtgagggaaggttttcccctttcaactnctgctgaactggtttttcccctgggcttnaagctnttggttcttgggaatggggantaaggataaggattaaggt

SEQ ID NO: 671 - DNA, 363 bp, Homo sapien
  misc_feature (1)...(363): n = A,T,C or G
atttggttggtggtttcactattgctagaaacttgagantttcctgcttttaacttttctgttcatctctactgcctctccctttgtcagatctcaattatttatctgctganttactctcagatagttggttgatgggtctccagttgctgcctgttttgctctnattctagtctataactgttgtcagggtncttnggtaataaaaaactgnggttgcctctacccgttttttgnggatatctgttgcttcaagggataaaatgtaggngcttcttaacagggacccctcaggatctggactaggctcttgggggnccatttttcaggtctctttgtggccgggggnacccttaccctttt

SEQ ID NO: 672 - DNA, 258 bp, Homo sapien
gttcaagaacagcctggggaacataattcattatggggtttcacccacccacacacacacacacacaaaatttaataattagctgggcatgatggtatgcccctgtagtcttagctactcaggaagctgaggggagaatcacttgatcccaggagttcaaggtggcagctacaattgtgccactgcctccagcctgggcaatagaatgaggctctgtctcaaaaaaaaaaaaaaaaaatcaaaaatttttgtttatca

SEQ ID NO: 673 - DNA, 479 bp, Homo sapien
  misc_feature (1)...(479): n = A,T,C or G
gttttaggttctaccttcaggtctatgattcattttgaactagttttcatatatgatgtgaagtatgggtcaaggtcaggtgcaatggctcacccctgtaatcccgctactttgggaggccaaattggaagaatcacttgagctcaggagttcaagaacagcctgggcaacatagtgagaccccatctttacaaaaaataaaaaaaatcagcctggctggggaccacatgcctatgatcccagctactcgggaggctgaggtgggaaaatcgcttgagcctggggaaatcaaggctgcagtaagccatgatcacaccagtgcgctcctgccttgggtgacagagcaagaccctgtctcaaaaacattaataaatcagtaaggtaaacaaaantttaggaaggagtatggggtgagggttcattttttttacatgggggntgtcccgttgttccngtacaatttnttgaaaggctatcct

SEQ ID NO: 674 - DNA, 334 bp, Homo sapien
  misc_feature (1)...(334): n = A,T,C or G
ttaggcaatttcctcattgtgctaacatcgtagacagtacttacacacacctagatgggatagcctactacatacctaggctatntggtataggctattggtactaggctacagntccatacancatattactgcactgcctactttattataacacaatggtaagtattttgtatccngacatacctnaacataaggaaagntacaatncaaactgtgggtatancagggtttcaantgggtacacctgcanaggggcacttatcatgactgggagcttgcngggacttgggnggtttgctctgaggtgagggctgtgggggtgaggtgctgg

SEQ ID NO: 675 - DNA, 425 bp, Homo sapien
  misc_feature (1)...(425): n = A,T,C or G
tttttacatttacgtacagatgcttatatttaatcttaaaaggtagtcctatatagttctatcagaaaccgtaagagctctttcagaccacttttattaactcaggtattacgaaaggaaccattgaagaatatgaaagctcaaataagattaaaaaatgctttaatactgctgaagtctttcaattctagagcaggcatagaatatatagaatgtttaccttatgaccagatacaacctcccaagaaaaactggatcctgcagggcagctgggtcttcacagttcctgctggggactacagttgcagaaggtcattccatcacttttctctttttanggggagttaaggtacagggtaaagggaactcttctaggcaaaggntccttaataatctcttggattatcgntgtccgtgggnggcct

SEQ ID NO: 676 - DNA, 330 bp, Homo sapien
  misc_feature (1)...(330): n = A,T,C or G
ttttncgtgtgnnacatgaaaacctttctttttaatttggttgatacacatttgacaaaatattttagaataaaataatccatgaacaggtacaaggtatttacagtaacatanttgaaaaacataaaatcgatatatttctttaacagaaatgtctataaanttttctactgtgaatctggaagactttcagttcctacttatcaacctggggcttaagccccaacaggcgacatgtaaggccccgggngtagggntatacaaactctaacacatttgggcanttaaggantcatctnttaggtgtgagctgggcaggccggtggggtg

SEQ ID NO: 677 - DNA, 506 bp, Homo sapien
  misc_feature (1)...(506): n = A,T,C or G
gtcagcactagataatttctattggtttttggtcaattcagtttcattagcttgtccaaaacagcatatcctattttggtgaatgaaatactgaattatggatacaaaattgtagaagttttagataatacctttctccaaagaaggctgtttccttttagcagcagcacagcagtaactcattttcctgagggctggtctgttttagttttgccttcaatcttaggcagtggtcatgatggggccacagtgggaaaactcagggtgtaataaggcccctctaacttgggcagggatttgaacttcccatttttgccntctctgggccattaggatacctggaaatgtcctgctcaggatcctttaggcttttcagcntacctggttttctgctgggggtttcnttctcttgcttatggtggtaccccctggaggtcaggnccaatgactttaggagggggcccngactgcaggatttttgaggggtagggattttatgtgggggt

SEQ ID NO: 678 - DNA, 369 bp, Homo sapien
  misc_feature (1)...(369): n = A,T,C or G
gtgagacngggcttgctttgtcgccaggctggagtacagtggtgcgatctcggctcactgcaacctccacctccccagttcaagcggttctcctgcctcagcctcccgagtagctgggactacaggcatgcgccaccacacccagctaatttttgtatttttagtagaaacggggtttcaccatgttggccaggctgatcttgaactccggacctcaagtgatccacccacctggggcctcccaaagtgctggggattataggtgtgagccactgtgcctgggncatgctttaataattttgggaccccagttgaccacggggtaatttgacaccatggggaaagcgacgaaanaaccnaccaggatac

SEQ ID NO: 679 - DNA, 302 bp, Homo sapien
  misc_feature (1)...(302): n = A,T,C or G
gatcacgccactgcactccagcctgggcgacagagcaagactctgtctcaaaaaataaaaaaaaaaagaaagaaatttgtgtcgtatgaagtcccacagtttgtgggacattatttccagctgcaattggaaatgaatgctgatggattgctggatagatagagggatggacggatgtggaataaaacaagtatagacaaaggtgggtggtggactgtaggctgtgggtatacaagtgttcacttcaaactttacttggctgggagtngggncccatgcctgtaaatctcagcactttggga

SEQ ID NO: 680 - DNA, 460 bp, Homo sapien
  misc_feature (1)...(460): n = A,T,C or G
cacagctctctaaggatggaggagcaaaaatgtggaaaattaatatccctagagcaagctggtccaacccacggcccatggcacgactatgtcccaggatggctttgaatacagcccaagacaaattcgttaactttcttaaaacattatgaaatttttgtgatttttttttagctcgttagctattattaatgtgtgttttatgtgtggcccangacactttttctttttccaatgtggctcagggaagccaanaggttggacacccctggcctagagtctgtgagcatgcacttgctgctgacagtgctgctggggctcctaggaactccantgntgctgctgggagcccgtaattacctgcagtcacggggtgcttccactgccnaaagccaggtgcaggantagtttctctctcctctcctactttaattacctcgtgaggggagncttccattgg

SEQ ID NO: 681 - DNA, 404 bp, Homo sapien
  misc_feature (1)...(404): n = A,T,C or G
gnccagaaggctgtgtgcctgccatgaggaccttggaacaagggcatagtgtgggttggggtgaggttggggtggcaaggagtagtctcagcaccagtcccccactcttagctccccagggttttcaccagcttgtcaccatgagaagctgaagaatgaataccagcagccatggtgtgttccttgtggctctgagggcttacagaggctctagggggcttttcaagacatctggtacctgaatgggataccaaagtttaagtttcagaggcttttcctaaggcctaaagttggcagaaacactgtcaaaggcctctaaaataagagggcttaattcaatggggaaggacttcaaaaggtattttgtggccataattaaggaaataaattctttattggaacac

SEQ ID NO: 682 - DNA, 176 bp, Homo sapien
  misc_feature (1)...(176): n = A,T,C or G
ctgagcctcagcaggcacacagggcaggactagcaggagagctggcaccccgcagcanaccctcagcctggagcctacactgtcacccagagccccctggctgagcctgggctggccggagcgtcacccctgggcagaccactcccaggtgcacccactaggctgcgctgcgtctg

SEQ ID NO: 683 - DNA, 442 bp, Homo sapien
  misc_feature (1)...(442): n = A,T,C or G
aaaggctacaaactatatgattccatttatatgccattcttgaaatggacaaactatagagacagaaaaccagtcaacagttaccaggagctagatatggggaagggttgtctacaaaagagtatggcagaattttgggggatgatagagctgttctatataaagcagtccgcatttatctgtggttttgctttcctcagtgtttcagttacccacagtcaactgaggtccaaaaatattaattggaaaattccagaaataagcaatttgtaagttttaaactgcatgccattctggaataacatgataaaatctccatgccattgggattccagtcccgccctgtccccacctggggattccattcctttgtctaggcatatccaacggtgtatttaccacatggccctttngttcactggggtagccctcttcaatttat

SEQ ID NO: 684 - DNA, 236 bp, Homo sapien
  misc_feature (1)...(236): n = A,T,C or G
tttttttgagacagagcctcattctattgcccaggctggagtgcagtggcncaattntagctgccaccttgaactcctgggatcaagtgattctcccctcagcttcctgagtagctaagactacaggggcataccatcatgcccagctaattattaaattttgtgtgtgtgtgtgtgtgggtggggtgaaaccatnanatggaattatgttccccaggntgttcttgaactcctgg

SEQ ID NO: 685 - DNA, 554 bp, Homo sapien
  misc_feature (1)...(554): n = A,T,C or G
tctaccgtcatgctgaccggtaaaccaaaaagcgtaatggcctgatcaagaagatgtggtgctaaatcgtaccagataccgctgcctgggccgccctgttcacgccaacgatcgcgcacctgcgacggaagcggtcaaaatgagactcaaagtaagcaacttcacccagcacgccttccgcgagtaaaccttttagcgtcaagaaatcgctatcccagcgacggttatggaatacagacagcacacgccccaggntttttgccagcgcatccagctctcgcgcttgtgacagtgtcaggttaaagggtttatcaacgaccacattgtttacccgccttcaagcgccgnttttgggttaacggggaaatggggtatcgttggggtgttgggattgacattcaggtctntgtttgggttcgtttaaacagatgctttggctcagngacaaccgtccattncagtctgccgtattnggtttttnttgggggntttggcttttttgncagcggtttaactgggttttgtcagcntcgggcctttggcggattctgggc

SEQ ID NO: 686 - DNA, 460 bp, Homo sapien
  misc_feature (1)...(460): n = A,T,C or G
aaaagttaaccacctatgaagtacacgatcccaaaaggtcagggctgattctgccctgctggttacgaaagcgtcctctcccctggccaaacagactaacctgccctgtcatagagactgttcttagattaagttcagaagtaagcatcactgctagaatgtctgacctatttttccaaaacacagctctcttccccttactaaatatgcatttatactgaaatataccattgaccttgttttctataaaattatacacaataattcagaacttcatatcctactaacatagaccacaacagtcattttcaaagnatactgataattctatgggaatggcaatttaaggncattaaaagccttcttnttggggcnggaaatcttnccctnttacaagctgggccctgaaagtttaatttccntttgtccnatttatggggnctatggttnacctgctgct

SEQ ID NO: 687 - DNA, 226 bp, Homo sapien
  misc_feature (1)...(226): n = A,T,C or G
ggaaatggaagattcattngaggaaggggcatttttttagacccagacatgtccttggcaatcataatggtctcctggtgctgttntcaggagtcagacatgagtcctggggagantagaggggctgtcagtaagagcccaaagagctnttccactgaacaatctgtttcttatctgagcanacgcagtcttnttctgaagtttaggtaaganaggcattttttcc

SEQ ID NO: 688 - DNA, 464 bp, Homo sapien
  misc_feature (1)...(464): n = A,T,C or G
agaaatagaagtcacctattgaaaactggaatggcccattcagaaagacaggagaattaggagagagtgagtgaaagaagccaagggtcaagaatgcagaagcaaaggaaggactaaaaagcctccacggacatcgataatcaagagattattaagatctttgctagaagagttcctttacctgtacttaactcccttaaaaagagaaaagtgatggaatgacttctgcaactgtagtcccagcaggaactgtgaagaccagctgccctgcaggttccagtttttcttggggaggttgtatctggtcattaaggtaaacattctattatattcttatggcctgctcttaggaattggaaagacttccagccagtatttaaagcctttttttaatccctatttggagctttccatattcttcaatgggttccctttcggtaataccnggagtttaataaagtggg

SEQ ID NO: 689 - DNA, 422 bp, Homo sapien
  misc_feature (1)...(422): n = A,T,C or G
ctggtctctgtctatgtgactatcttgtaagtcaataaatttctgtatagtccagatggattaaacttctcatttcttttaaatatgtatgaataataatacaaggaagtaggcattccatttaataatcaagagcaagttgtactcaaagcattcagttaaagtgtatctgtgtgtggaactaatttcagacaatagaaaatattagttgaaatgtttaagaattaggcatgaaaaataaatttgaggaaattttgtttccttacatgtatttttaaatcataagggttattttctatcnggatgtaaaattaggtttataaatcntaatcagcttctggntgtttattagcctttatgncctggaaatgttggggtcccgggggtgccggattttccgcccanggggnaaattgaccagg

SEQ ID NO: 690 - DNA, 265 bp, Homo sapien
  misc_feature (1)...(265): n = A,T,C or G
tagagacggggtttcaccgtnttagccagggtcgncttnatctcctnacctnatgatccatccgcttcggcctnccaaagtgctnggattncaggcnggacacncgcgcccnancgaggttatctttttttaatttttttgagacagagatttgcgctgtcgctcaggctggagtgcagttgcaagatctccgctcaccgcagcctccacancctgagttcaagcgattntcctgcctcagcctcccgagttgntgggattacag

SEQ ID NO: 691 - DNA, 570 bp, Homo sapien
  misc_feature (1)...(570): n = A,T,C or G
taacctggttgttgtaagcatctaggattttagggttgtttattaccttagcataactgagactgtgctgatggacacaacttctttggctaaagggaagataaaaatagactgaaactaaaattgttctgctttacaaagacaactcccgatctgcagacctcaatttgaattacaatcagacagcaaggcttgaagaggctggcaatattccatcagagagaacaataaatgtatgaagtctgaataatgaaggaaacatttacaaatacacttgacagaagaagangggaggcagggtngtggctcacgcctgggaagcccagcacttttcgggantcccgggacaggccaggttngtttgagcttnagggattcgagatccgcctggggnaacctgggtgaaacccccgantcttaccaaaaattaccaaaattttggcccggccacggtttgccaccgggcntattgtccccagcttccaagggnggcttngggttagnggggttccctngccccggggggtccaagctttcagttnagcccnggtttcnccccttcactnccgc

SEQ ID NO: 692 - DNA, 283 bp, Homo sapien
tgtagagatggagtttcaccatgttggcaagactggtctcgaactcctgacctcaagtgatccacccgcctcggcctcccaaagtgctgagattacaggcatgggcccccactcccagccaagtaaagtttgaagtgaacacttgtatacccacagcctacagtccaccacccacctttgtctatacttgttttattccacatccgtccatccctctatctatccagcaatccatcagcattcatttccaattgcagctgggaaataattcccacaaactgtg

SEQ ID NO: 693 - DNA, 426 bp, Homo sapien
  misc_feature (1)...(426): n = A,T,C or G
catcatctaagttgaaaatttgtaagtcggtgactgttcttgaaaacacaagtaacctagattaaataatcaacttttctgaattaaaaccatgacctttatagtatagcccaatagattgaaatgtggttgcttatagcagaaatatagggagaaagacttttacaagacagaagtcatgccacatgcaaatatgaaaaggagaaattaatgatgccccgntcctacatgtgttagttcttcacccttaaacttcaggaagggtctctttgttcccgatagagctnggtctattccattcgnccaggnccataccgtgagttcccttaagggtaatttcccaatttttacccntgtttagggctncccggaacctggncctttggttggccccccncttaatggtttctgggggtggcctntacc

SEQ ID NO: 694 - DNA, 420 bp, Homo sapien
  misc_feature (1)...(420): n = A,T,C or G
atggatacatagacgagggcaaggcggcgtccaagnttaatcagatcaacactgagcgatgcattccgagaggcaatagctgaaggccatataacaacaaaccatgtcgctgccactcgcgcanaanaatcagaggtaaggagatcaagacttacggctgacgaatacctgaaaatttatcaagcagcagaatcatcaccatgttgggcttcagactttgcaatgggaactgggctgttgtttaccggggcaacggagtttggtgattttattgcggaaatggaagttggtcttgatattcgtaggatggggttatcttttattgtcggaggcaaagccaaaacagggcgttaaaaaatttgcccatncccaacagcctttgcctattttgatngctcttcggggnttttccattgnagg

SEQ ID NO: 695 - DNA, 314 bp, Homo sapien
  misc_feature (1)...(314): n = A,T,C or G
aaagatgcctccagaggttgggcgcggtggctcacgctgtaatcctagcagtttgggaagcagaggcgngtagatcacctgaggtcaagaggtcaagaccagcctggccaacatggtgaaaccccgtctctactaaaactacaaaattagctgggcgtttgtggcgggcacctgtaatcccagctactcgggaggctgaggcaggagaatccctttgaacccagggagggcgaagatttgcagttgagccgagattgttgccatttgcaccccagccttggggcattcagagcaaaaacttccgttttnaaaaa

SEQ ID NO: 696 - DNA, 279 bp, Homo sapien
aacattccagttagtaaagaactattgaacataggcaaggcagatacagagaaaagggaacagacacacgagacatttaaactgacccacaaacacagcactaccaatttgtgagtgcttgatgcgggccaggcaccatattatgtaatttgcatacattatttcattaatcctttcagcttcctttgaagtagggaacttacatcagatattgtctatggggtacttgagtccacaccttgactttctatctgttaatcttccctgtattgcccaggg

SEQ ID NO: 697 - DNA, 364 bp, Homo sapien
  misc_feature (1)...(364): n = A,T,C or G
gcaaagagaacaggatgatgctttggtgctagctgctggggcttggagttgggtgagagctgtaagatcaaatcttctgaagggatcaaccctcatgtagttacaacacgggctcatttttctcttgaaagggctctaagagtccttcacacagtgtccatccagctcttctcagtagagggctcactcccacaggacttgctgccactttgcaagcaattggttgtcacctattacttcttgatcaactgggcttattaaaccggggttcccaccaccccactcctccagttttgattnanttttgctagggatgggcttcacaggaacttcaatggaaggcacattttcgtggaataggcca

SEQ ID NO: 698 - DNA, 235 bp, Homo sapien
  misc_feature (1)...(235): n = A,T,C or G
gggcacctggggctcagtccagacgcagcgancttaggtgggtgcacctgggagtggtctgcccaggggtgacgctccggccagcccaggctcagcagggggctctgggtgacagtgtaggctccaggctgagggttgccctgcgggttgccagctctcctgctagtcctgccctgtgtgcctgctgaggcttcagacagggatgtggtatctccaggaagcttctttgcaaaat

SEQ ID NO: 699 - DNA, 351 bp, Homo sapien
  misc_feature (1)...(351): n = A,T,C or G
aaaggagagggtggagaagaaaaatgaaagaaaaaagaaaaaaggaaaagaaagatgacttctatagttgttgtgggttagaaacaatcttcagtgtaggaaggcaagtttaacactgaaacaggtttcagatttggttttcttcataaaataaacaacaaaccaaatatgggaaatgttcaaacagaaagaagaggtgcaaaaggagttttcaagttttgcttaatgtgcacccaaggaaacacttattacttaatttaattaaaaacatctnttattattaaaattttaaacncccantttaanttcctcctatttaggtccagttccttngtttccattaggtatttc

SEQ ID NO: 700 - DNA, 235 bp, Homo sapien
  misc_feature (1)...(235): n = A,T,C or G
ttttttttttttttttttggagacagggtctcactctgttgcccaggntggagtgcaagtggtgtgaccatgggcantgcagcctcaacctcccaggctcaagtgatcctcccacctcagctgcctcccaagtagctgggactacaggcgcatncaaccantcacagctaatttttttaaaaatttttttnttgagacagggtntatgttnttcacaaagtgctggcttcaggtg

SEQ ID NO: 701 - DNA, 476 bp, Homo sapien
  misc_feature (1)...(476): n = A,T,C or G
tcaagcaagnaagggggtttaatttctcacacacagagtctggggagcccagtgaggttgcaatggcagctagatgtgtcctccagctctgtcatccttgtcttgagggttctgtgttcacggcccctccaggcatggtttcttcatttaggtaggaacaaaaggccaaaagaacatacaagcccagctctctagaggctccaatcagaactggaccctttaactacaaaggantcttggatgaattatttttagcggggcttcaggagcaggtagcagtgcacactcaggccatcttcctcccaatgtcctccccgggggcatttcctttagggaaatggggagtcagtcctcacaaacacagaaagcagcttcaagggccacccacacagggtcgccaaaattncacattctngggcactncttttttaggcttccccaggacaagcttggggtccccnacattcctnggggga

SEQ ID NO: 702 - DNA, 496 bp, Homo sapien
  misc_feature (1)...(496): n = A,T,C or G
aaggaagtaggaatgccaggacttgttcagaggagtgcctctttccccattaagctcataactagaaattcagctgaggggcattgtgcaggctgcagcantgctctctaacaaacggaacaaccacaacgagatgttcaacacttcagtggaagcatctcttccagctatagtttaaaactcttcttggttcaccaaaaggccggaatgccacagggattaatgatatttgattgagcttcatccactcagcagtttgcttttggagtgggctttatgttctcacgagcaatttcctgggtagcaggcacataaggattttatttttcttattactattattatttttttgagacgggggtctcactctgtctctcaggctgggagtgcagtggccgatctcagctcactgcaacctctgccgcctgggntcaagcgattctcctgcctgcctcagcctcccgaatagctggggattataggnccctgccactgt

SEQ ID NO: 703 - DNA, 495 bp, Homo sapien
  misc_feature (1)...(495): n = A,T,C or G
tttttgagatggagtctcgctctgtcacccaggctggagtgcagtggcatgatcttggctcactgcaagctccgcctcctgggttcatgccattctcctgcctcagcctcctaagtagctgggactacaggcacccgccaacacgcgtggctatttttttgtattttttagtagagatggggtttcactgtgttagccaggatggtctcgatctcctgacctcaagatccgcctgcctcggcctcccaaagtgctgggattataggcgtgnacccgcgcccggcctctattttcaaaatttaccttcatatttaaaggctctgatctatttttcattgcagactttttttattgacttccaccataaaagataagggatttctctctctctcttttnttttttttttgagatggagtntctctntttcanccagggtggggtgcaatggcaaaatcatgggtcactacaacctnaacttcnggggtcaagnaatc

SEQ ID NO: 704 - DNA, 577 bp, Homo sapien
  misc_feature (1)...(577): n = A,T,C or G
ttttttttttgaggatgaatacgagtaaattttttaaatttttcatataatcaccatctggaaattttgcgaaaaaccactgtactaattgatgctattagtatgcacaggaaaaaaatagtgcaatggaatatataatggagtctttccttccattaattttcctatatgtgctgtgattacatatatttcaatacatgtaatttaatattctgattttttttttgagatggagtctcactctgttgcccaggntgcagtgcagtggctggatctcatctcattgcaacctccacctcccaggntcaagcaattctccctgccctcagcctccctgaggtagctgtggattacaagcacctgcccacccacagctgggctaaatttttngtaatttttaggaggagacaggggtttcaccattttggccagggctgggtttcaaactcctgacctcagacaatccacctgcctcagcctttcaaagtnctggggattacaggcatgagccaccanacccagcctaatattctgggtttaaggaatnttaggggctaaatnttaacaggctattgga

SEQ ID NO: 705 - DNA, 550 bp, Homo sapien
  misc_feature (1)...(550): n = A,T,C or G
tttaggcaagtaaagaaataagggagaaagtgaaaaaggaggaaaaataggggtatgactaaagctagcaaggaaaatagctgccatacatacttaagaaaggagggctggttgctttattttggctgaaggcaagtttgatttatccagactgctgatagacttttattttatatttcacttattaaatatttagtttaggtttttctaccctaccttcccagggatttgatggataaagtactaactggtattgtgacttgtatgttacaataaacaatctgtcaatttcaatttttttaataatcgagagagttttgaacatcacatgaagttttttggcaagtcagatataaaatacaccgaaaagacaaaaaatgtggcagctatgctatttcacttttcaccattttgccctatctttttatctgaaggttataggaaaggcnttttacctaaattccaagngaggncctcctaatnctacacctccatatggcccccctatgggggggcgggtntccgcccaagcnggttaggttccaaatgg

SEQ ID NO: 706 - DNA, 523 bp, Homo sapien
  misc_feature (1)...(523): n = A,T,C or G
cacatttaatgcctgtatcaaaatatctatgtaccccatacatatatacacctaccatgtactcacaaagattaaaaataaaaatgtatttttaaaaaagcgtgcagccactgtggataacagtttgatggttcctaataaagttaaacatagaattaccaatacaaccaagcaattccactcctagccatatacctaagagaactgaaagcagggactcggccgggcgcagtggctcacgcctgtaatccctgcactttgggaggccgaggcgggcggatcacctgagatcgggagttcgagaccagcctgaccaacatgggaggaaaccccgtctctacttaaaaatacaaaattaggccgggtgtgttgggtgcatgcctgttaatccagctgccgggggaggnttgagggcagaaggaattcgctttgaacccggggaggcggaggtttncggttagncgaggatttgcgncctttncacttccagccttgggnaacaagagttgaaacttgttgttca

SEQ ID NO: 707 - DNA, 296 bp, Homo sapien
ttgactaccaggataattttgagtctataaaatctttcttattccataatcttagcctggttagtagcactcttctcaattctttatccccttctttccttctctctctctcctttctcattctctctcttgtctattcatttaacaaacatttctgacagtttttctaccattatctatgagaatcataaaggactttcacagatacattaaaacacaatttcctaataaagatgtcatgatatatgggaaattatatggaatatcacttattgtttagctgttgggatgtcttt

SEQ ID NO: 708 - DNA, 457 bp, Homo sapien
  misc_feature (1)...(457): n = A,T,C or G
gctttggaaagactcttaaacacctctttgcttatggtttcaaagtccattttaaaatgcaaaaaaaaaaaaaaaatcagaaagcaattgtgtttacttttgttcctttcttgaggaaataatggcaaaataactgttgcctgaataacgagactgagcggacgggtagggataatggaagagaacagatgggagaagaggaaaagggaagttaatgttcaatattctgtcctgccacattcattgggttgttcttttctcccaacacagcttttcagggtagttctccaaatttgaggaatgccccatggaaattgttcagggggagttgctttaaaatgcaccagacccctgctttatttgggagaatactctgggacccaattgaaaccagggcctaatcctatnagggcctatggtttaccggttccaattgtggaccaagtcccaaatttga

SEQ ID NO: 709 - DNA, 253 bp, Homo sapien
  misc_feature (1)...(253): n = A,T,C or G
atcattgtgnttgctgctatttaaccagagtgcaattaatccatcttttgtggattttgatgccacagtgtaaatgagagggtttcacacagaaacactctgggggccttcggtgacaaaagggctaggctctggtggggagggggtggcaaaaggtgaagtggaattaggagagatgtggggagcagacccagggctgggagactgctccttccccatcacacatgcccatcaaggaccccaagactcgtgc

SEQ ID NO: 710 - DNA, 471 bp, Homo sapien
  misc_feature (1)...(471): n = A,T,C or G
ttttttagttnagacggggtttcaccgtgttagccaggatggtcttgatctcctgacctcatgatccacccgcctcggcctcccaaagtgctgggattacaggcgtgcaccagcgcccggccaatttttgtaattttttagtagagacggggtttcaccatgttggccaggtaaaatttcaacatgagtttttgaggagacaaacattcaaaccatagcaatctgcactttaacaagatccccaagggatttgtaatgccttaaagtgtgagaaacaattgtttagggggaaagggaccatagggggtgtcaagatctataggctataggggtccccaaagtatccctcaaagagttctttattcttttcggggaaaaattaaacctangtatattttgcattatcccttngtcacaacgttttcccggataatctnctgttgtgcttngtatgccatgatgtnccaagnt

SEQ ID NO: 711 - DNA, 120 bp, Homo sapien
cagccagccgctgtgctttcagtggatttcggataacagaaaggccgggaaatacccagcctcgctttgtaacggagtagacgaaagtgattgcgcctacccggatattatcgtgaggat

SEQ ID NO: 712 - DNA, 292 bp, Homo sapien
cctttgtgtttttgtaataccagtggagccttttcttaaaatgaaactaggcaaacctaagacaattatgcttaaggaaaaaaaaagggggggaatcttactcagaactgttttttgaaacggatcaaatggaatggctcagagcaggtgtgatggctcctcctgtaatcccaacactttgggaggctgaggtaggaggatcgtttgagcacaggagttcaagatgaagcctgagcaacatagtgagaccctgtctctatgaaaaaagttaaaaaaaaaaaaaaaaaccttg

SEQ ID NO: 713 - DNA, 628 bp, Homo sapien
  misc_feature (1)...(628): n = A,T,C or G
gnagagggtcagaggaaggactctggacctgccctaggtgggggtcgcgacagatggccacctgggtcttaggtcccagctcccacccggcagcagggactgggaacctctctccagaccgcgcggtgtgttgacaccaggtctagtcccattccaccgagggcaactcaccttaccggtcttctgaaagggggccctgcgcgaaaccttgcctcctgcactcggttgtgcaaagatcaaggatctcagacttgagagggttacatgggcaagggattgttatcactagattatatggatttagaattaggactttaggctcctgggggaagcctgctttaggacttcagatggtggttgtagaagattgcctttcagacttcaccctttggggatgttgattaggtcttggggcaggatccagggaaccttncattttatttctaaggtttccaaatttttgataaaggggtgttcttcagaccacgtttaaaaaacatncccaaagntctttttnccctcccacaaggcaaggcagcatcaacancagcgacttcccttnataatnttaccttcctaaaatttggattggattaagagccanccccaggaaggagcantcttgcac

SEQ ID NO: 714 - DNA, 447 bp, Homo sapien
  misc_feature (1)...(447): n = A,T,C or G
gaggaactgctttgtgagctgtgcattcagctcacagagttaaacctattttttgattgagagtttggaaacattgcttttgtagaatctacaacagaatatttgggagcacattgaagcctatggtgttaaaggaaatatctttggaaaaaatcaagacagacgctttttgagatactgatttgtaaagtgtgcattcatctcactgactttaaatgtggcttttgattgagctgtttgggaaacacttgtttttttgtaatctgccaaagtgatgctagggagcnccaaaaaggccctattctggaaaaagggaaatatgttccaggataaaacctgttaaggagccttcctgaggatccttatttgnccccagggcctttaatgtgtgccatccattccccagtggattatttttcccccttgatggggccntttgggaccccc

SEQ ID NO: 715 - DNA, 509 bp, Homo sapien
  misc_feature (1)...(509): n = A,T,C or G
taacaacttnaatgatcttttctaatttttttcttttataagttggaaagtaggtaaataataggggaagatctacctctacactgattccctagaacaacattgccaattattctgaagttctctctcttcccatctcacttagcagtatgtatcagggtgcctgaacctcatgttgttggcttgaggcatagaggtaatttggactgacagaggaaggttgacttctgttttccgaacattttgttttggggagctgccagggaattagtgggggaagagagaggtcatctctgaaggcggttcttagcaatttagttttgaggacagagctatttcacctaaggggacaaaatataggggtagatcccatttgaattttagaactggaaaggggccctaaagaccttcaggnccaagcttttcattttatatgaagcctcttttcgcatnccatgggnagtgggtaccaggtttncattcctccagctccattcccgcttgccacc

SEQ ID NO: 716 - DNA, 281 bp, Homo sapien
  misc_feature (1)...(281): n = A,T,C or G
ttttttgtanagatgggggtctcactacattgcccagggtggtcttgaacttctgaccctcaagcagttctcccaccttggcctcccaaagttctgagactacaggcatgaaccactgtgcctattttgcaagtaataatttaatgtgccagatgagggaagaggcacagtgggagctggttaaggggtggcagataggagagtccctcccagagaaggggtttctgagcctctgaaccctcacacaaggatagacaggcattttccagggaggagagagg

SEQ ID NO: 717 - DNA, 577 bp, Homo sapien
  misc_feature (1)...(577): n = A,T,C or G
tttttttttttgaggcagggttcccaggctctggagttcagtgacatgatcttggctcactgcaatctctgcctcccgggttcaatcaattcttctgcctcagccacctgagtagctgggaccacaggagcactccatcacacccagttaattgttggtttttgtttgtttgtttgtttgtttgttttttgagatggagtttcactcttgttgtccaagctgaagtgcaatggcatgacctcgtctcactgcaacatctgcttcctggggttccagtgattctcctgcctcagcctcctgagtagctggggattacagggtgctacagggcttgtgccaccacggccctgctaattttttgtatttttagtaggaacagggtttaccatgttcgcaggggttggnctcgaactcctgacctcaggngatcccggccgctcagcctncccaagtgctgaggatacagggatgagccactacggccagctaattttngaatttaagcagngacagggtttactatgtnggcatgtgatctnaactcgggggtaaagnaccctcctgntaagtacccaag

SEQ ID NO: 718 - DNA, 440 bp, Homo sapien
  misc_feature (1)...(440): n = A,T,C or G
aactatggaggccagaggaagtgacactatatgtggaagtgctgaaagaaatgaagtgtcaacacaaaattctatatccagctaaatatcatttaagaatgaaggggaaatgaaggcaatatcagataaagtgaaactaaaaagatttctcaccagtaaacttattctaaaagaataactagaaactgttcccagggacagaaaagataattagaaggaattttgcaacatcataagggaaaaaataatcatgggaaagacttaaatatatgggataaataccaaaacattttcccttctcttgagtttccctaaattaggtttggccagttggaggccaaaactatgacactgtctggatatgggttctttacntatgtaggganaaaatnctttaggctaattntatccataatgaggggcgggntaagggggtatta

SEQ ID NO: 719 - DNA, 387 bp, Homo sapien
  misc_feature (1)...(387): n = A,T,C or G
gagggaggaaggaaggaacgaaggaagggagaaaaaaggaaagaaaagagggaagaaggaaagaaaagagggagggtaggagagagggagggagggaaagaaaagagaagggaagggaaggagaaagaagaagaaaggaaaaggaaagaaaggaatgaaaagaatcaaggcttattttgcattttcacataatatattttatttatgatatagcagagataaatgtgaagcattctcttatgaaatgtcttgagacagacagctttaacagtgagtacccagacaagtacaaattgggacccaggctttgtaaatctagcccaatgcattttagtcatatcataagcagtgtaccattgatgacttgaaagcttnggctccccaggg

SEQ ID NO: 720 - DNA, 359 bp, Homo sapien
  misc_feature (1)...(359): n = A,T,C or G
attgagagtttggaaacattgcttttgtagaatctacaacagaatatttgggagcacattgaagcctatggtgttaaaggaaatatctttggaaaaaatcaagacagacgctttttgagatactgatttgtaaagtgtgcattcatctcactgacttaaatgtggcttttgattgagctgtttgggaaacactgtttttttgtaatctgcaaagtgatgctaggnagcacaaaaaggccctattctggaaaaagggaaatatgttcaggataaaaccttgtaagggagctttctgaggatccttatttgtctccagtgccttttaatgtgtgccattccatttcacagtgattattttt

SEQ ID NO: 721 - DNA, 238 bp, Homo sapien
gtagaagatggcaccaagccatttcaggaaatgttattgtttatgagggtctttagtgtgatatcctaagaaaaaggtaaaatggtgtccatcagtcatgcagccctatccctatttttgtatttcacaacatctttaaagtctgaatgagggaatgttggctacttttgcctaaactggcccttttctttccattgctgaatattaatttaaaaggaagtatagggccagggtaagg

SEQ ID NO: 722 - DNA, 195 bp, Homo sapien
agacatctaccccgtcggctggtgtgagctcaccggctaccagctccagcctcctgtggccgcagagctccttccttcatcttgcccactctgtcatatgttcgtgcccttgtgcacccaggtaaactacccaggtccctctgagcagccctgggtaacaagggtgggaagaagggacagctgttctccggcccc

SEQ ID NO: 723 - DNA, 369 bp, Homo sapien
  misc_feature (1)...(369): n = A,T,C or G
aactacaaaaattaggcaggcacagtggcaggggctataatcccagctattcgggaggctgaggcaggcaggagaatcgcttgaacccaggcggcagaggttgcagtgagctgagatcgtgccactgcactccagcctgagagacagagtgagaccccgtctcaaaaaaataataatagtaataagaaaaataaaatcttatgtgcctgcttaccagggaaattgctcgtgagaacattaaagcccactcccaaaagcaaactgcttgagtgggattgaagctccaatccaantatccnttaattcccttgttggcctttccgggcctttttgggtgaacccaggaggagttttttaaactttttggct

SEQ ID NO: 724 - DNA, 373 bp, Homo sapien
  misc_feature (1)...(373): n = A,T,C or G
ttgacagaaaaatatattatttactttgcagaggaacaaagcagtcagagaaaattgtgtaggactagtaactcaagaacagatgtagatttaaacaagtgacaagtgcagcaaaactctttattaggattttaatgatcttaattttgcaatgatctgtcataatttcaacaagaaagcttaaagtcaaaagaagataaattattaaaaataggcttctagtaactactgtaaggaaaacaacagcaatatggaaggagataattatataccattatagcccgaaaagttgggaagacttgtgttgtcttagttaataggggcnttttgtttattattgatacctttttaattccatnttaggtagtccacc

SEQ ID NO: 725 - DNA, 532 bp, Homo sapien
  misc_feature (1)...(532): n = A,T,C or G
tcacgcccggtgngcnaccacgcccggccaggaatgggtttctaagcaccaaaaacattctcctgttttgaggcagtctgtctctttgctatgcagttcccaagcacttgtcctagcttggttctcacatctgccaatcgatacacttgcctctgtaaaacatttgccttacagggctactgtgaagaacacacgtgttcttagatacaaaactatcccattcactacaatgataccagcttgaatttttttttttttttttttttttgagacagagtctcggctctgttgcccagggtgggagacggggtttcactgtgttagggggaaccccgaaggcagactgcttgtgcccaatatcatatgggtttttagtgaaacagccctttatgtttttactcaggagctcttgtttctcttaggggntcccgacatgctttcatggggnctagactggcgacagattttgagtaacaggtaccccanggtgnatttgttaactntccattcaatgantaaggntttcttgtag

SEQ ID NO: 726 - DNA, 354 bp, Homo sapien
  misc_feature (1)...(354): n = A,T,C or G
gaggtcctagatatcttccaaagacatcccaacagctaaacaataagtgatattccatataatttcccatatatcatgacatctttattaggaaattgtgttttaatgtatctgtgaaagtcctttatgattctcatagataatggtagaaaaactgtcagaaatgtttgttaaatgaatagacaagagagagaatgagaaaggagagagagagaaggaaagaaggggataaagaattgagaagagtgctacttaaccagggcttaagattatgggattaaggaaagattttattagactccaaaattatcctgggtagtccaccagtcccttcccattaaggcccagcctnct

SEQ ID NO: 727 - DNA, 275 bp, Homo sapien
ttaacttttttcatagagacagggtctcactatgttgctcaggcttcatcttgaactcctgtgctcaaacgatcctcctacctcagcctcccaaagtgttgggattacaggaggagccatcacacctgctctgagccattccatttgatccgtttcaaaaaacagttctgagtaagattccccccctttttttttccttaagcataattgtcttaggtttgcctagtttcattttaagaaaaggctccactgggtattacaaaaacacaaaggga

SEQ ID NO: 728 - DNA, 359 bp, Homo sapien
ttccttttccaccattggcctgagagcgctgccaaatatccattcacccattctacaaaaacactgtttccaaaccgttcaatcaaaagagggacttaactctctgagattaacacacacatcagaaagccatttctcataatgcttctttccaggttttatctgtaaaagtttcttttttcatcatagctttttgtgttacataatatctcttccagggttttgcaaaaacagtgtttccaaactgctcagtgaaaaggaaaggttttactctgaggataaattcacacatcacttaaggcagtttttccacaaagctcctttctaatttttatcttgaaatatttcccttttcaccg

SEQ ID NO: 729 - DNA, 458 bp, Homo sapien
  misc_feature (1)...(458): n = A,T,C or G
taaaagtttgtggctggtatccgagttcttttataaactagttgggaagaactgtgggggagagctgatgttccaaacagtagacaagcaggaatggagctgcagaaatgcaaacctgttaccactaccatggcatgcgaaaagaggcttcatataaaatgaaaagcttggacctgaaggtctttagggcccctttccagttctaaaattcaaatggatctaccctatattttgtccccttaggtgaaatagctctgtcctcaaaacttaaattgcttaaggaaccgccttcagagatgacctctctcttccccactaattcctgggcagctccccaaaacaaaatgttcgggaaaacaggagttcaaccttcctnttgttcagtnccaattacctcttttgcctcaagccaacaacatgaggttcaggcacctgnttacatactgttagtnaggtgg

SEQ ID NO: 730 - DNA, 292 bp, Homo sapien
tgaaatgcccttcatttcctctctcctcctggaaaatgcctgtctatccttgtgtgagggttcagaggctcagaaaccccttctctgggagggactctcctatctgccaccccttaaccagctcccactgtgcctcttccctcatctggcacattaaattattacttgcaaaataggcacagtggttcatgcctgtagtctcagaactttgggaggccaaggtgggagaactgcttgagggtcagaagttcaagaccaccctgggcaatgtagtgagacccccatctctaca

SEQ ID NO: 731 - DNA, 421 bp, Homo sapien
  misc_feature (1)...(421): n = A,T,C or G
caccatggaatactatgcagccatagaaaaggatgagttcatgtcctttgcagcgacatggatgaagctggaaaccatcattctcagcaaactaacacaagnncagaaaaccaaacactacatgttctcactcataagtaggagttgaacaatagaacacatggacacagggcaggggaccatcacacattgggggtctctcaggggttgggggctaggggagggatagcattagggagaaatacctaatgtaggttgacgagtttgattgggtgcagcaaaccaccctgggcacgtgtatacctttgttaccaaatcttgttaccttctgccttttgttacccccaggactttantgtattnataattggttaattaattattaattggtaattaaaaaggatttttctggtncccggca

SEQ ID NO: 732 - DNA, 412 bp, Homo sapien
  misc_feature (1)...(412): n = A,T,C or G
acagtagagagctcactactaggaaaggagaggcattcccaacacagagaagtaggggcggacaggtcctgaggctggagggcgtgtgcagatgggtcgggggagcaaggggctgtcagcttcattaaggctgagagcaggcaggagcgaaacagctggctttgctagccagttacacactcaccgctgtccacggatccctgacactggacgactgttgtgccggtgnccccccaggctgctgcagtctgaggagaaaagccagatggtgacactgcgtctctcctgcccctttacctccaggcacagttgaggggcccacctgggattattaggcattttncccggagcttgtcaggcagatggccccatttgggncttgttgggacgccgacttctgaccaggaaggcg

SEQ ID NO: 733 - DNA, 536 bp, Homo sapien
  misc_feature (1)...(536): n = A,T,C or G
gtttttatccggaaactgctgtctggctttttttgatttcagaattagcctgacgggcaatgctgcgaagggcgttttcctgctgaggtgtcattgaacaagtcccatgtcggcaagcataagcacacagaatatgaagcccgctgccagaaaaatgcattccgtggttgtcatacctgggtctctctcatctgcttctgctttcgccaccatcatttccagcttttgtgaaagggatgcggctaacgtatgaaattcttcgtctgtttctactggtattggcacaaacctgattccaattttgagcaaggctatgtgccatctcgatactcgttctttaacttcaacaggaggatgcttttgttgcatacagccccttcgtttnttatttatctccntcagcccggccgctgtgcttttcagtngggatttcgggttaccggaaagggccgggaataccccggcttggtttgtaacggggtaggacggaagtgattgcggcttncccggntatttcgtgagggtgcgtcatcgtn

SEQ ID NO: 734 - DNA, 428 bp, Homo sapien
  misc_feature (1)...(428): n = A,T,C or G
aaagaaagaaaaatatatagtgagcccaataaagctgtataatctaaatcaaacatgacttgcatgcctggagactttgcactagaaaaatatttctacctaaaaaatcaaattttattttctttctcacaaatattcaatctgctttcatctcagttcttcctaccttgtcaaacctctccccacatttcctattctttttctctccagcctgatatctctcattatactgcttaagagaaatgttatgttactattcttttctcccaggaactgtttctctgggttctttaagggtgtctggaggtacacactgtgccttcttccttttagccctctcttctccttgttccctggggccttacctttatggaccntaggaacttcaaggtcccactacaattttnaaatataggctattttgcttt

SEQ ID NO: 735 - DNA, 268 bp, Homo sapien
  misc_feature (1)...(268): n = A,T,C or G
cttggggtccttgatgggcatgtgtgatggggaaggagcagtctcccagccctgggtctgctccccacatctctcctaattncacttcaccttttgccaccccctccccaccagaggcctagcccttttgtcaccgaagnccccagagtgtttctgtgtgaaaccctctcatttacactgtggcatcaaaatccacaaaagatggattaattgcactctggttaatagcagcagcacaatgattaaaatctatattcctattaaaaag

SEQ ID NO: 736 - DNA, 404 bp, Homo sapien
  misc_feature (1)...(404): n = A,T,C or G
cttgctgctccaactgagggcactgggccaagacataaaggaaggcaagtagagatcagcaaaggaggaagggtaggacagcaagatggaagatatttggggaaagatgatgcaaaagccaggaatgtatcctattctcctgtttgttaggtaggcaatagagccaacaccaagacacccaacattctggtctacacatacacaggaacaagtcctcaaatactagtgataaaggagacagggataagcattcagagggccattaaatgtctgtcttaggacactttgcacattcattgcattaccaagcacaaccaggaaggtttttcttgggaaacgtttgttgaccaagggttattgccaattttantttagtttttaattttttccccggaaaagattaa

SEQ ID NO: 737 - DNA, 412 bp, Homo sapien
  misc_feature (1)...(412): n = A,T,C or G
caaatccgagactttagggtgagagccgtttgttaaacatcttccagaacaaaactgctattgccttcattcacagatgggtaaactggggcacagaaaaattgagtaatttgcccgtaatcatgcaactagtagttggtggagttgaaattttatcctaggcaacaccacctgggagcccaagctttcagtcatcatgttacactgcttatgatatgactaaaatgcattggctagatttacaaagcctggggtcccaatttgtacttgtctggtactcactgttaaaagctgtctgtctccaagacatttcataaggggaatgctttcacatttnttctctggctatatccntaaataaatntattatgtggaaatgccaaattaggcnttgatcctttccatnccttct

SEQ ID NO: 738 - DNA, 437 bp, Homo sapien
  misc_feature (1)...(437): n = A,T,C or G
ttccttttccaccattggcctgagagcgctgccaaatatccattcacccattctacaaaaacactgtttccaaaccgttcaatcaaaagagggacttaactctctgagattaacacacacatcagaaagccatttctcataatgcttctttccaggttttatctgtaaaagtttcttttttcatcatagctttttgtgttacataatatctcttccagggttttgcaaaaacagtgtttccaaactgctcagtgaaaagaaaggttttactctggggattaaattcacacatcacttaggcagttttttcaccaaagctcctttctaatttttatcttggaanatttcctttttcaccgtgggncttcatggcacttcccaatnactgtttggcacttctgnccaaaggggngtttcccaacnggtccctcaagggg

SEQ ID NO: 739 - DNA, 278 bp, Homo sapien
  misc_feature (1)...(278): n = A,T,C or G
ttgcatgaaagatgaaaggctgggacggtggctcacacctgtaatcttagcactttgggaggctgaggcgggtgaatcacgaggtcaggagttggagaccagcctggtcaacatagtgaaaccctgtctctactaaaaatacaaaaagtagctgggcgtgggttggtgcatgcctgtaattcccagctactcaggaaggctgaaggcagggagaatcacttgaaccctgggagccggangtttgcanttgagccnagattgcacccanttgtacccca

SEQ ID NO: 740 - DNA, 317 bp, Homo sapien
  misc_feature (1)...(317): n = A,T,C or G
ttcttcatccaaatgtctcctgcctttcaaaactgtggcctcgagggatctgttccagtagatatctatgaacttggcagtggagacagtcaaagatcaagtcattcttctgaaaaggctattccatccagagtcacaggaaatgggagaggacagaatttgccagagaatctaaacagtacagcacctcccgaggggccaaacacggtggagggccattcagatatacacgaagccatcttgacgtggttgttttaaagagataatcggcaagccacatgacccantgttaaaacagttttcttaaagggcacttt

SEQ ID NO: 741 - DNA, 463 bp, Homo sapien
  misc_feature (1)...(463): n = A,T,C or G
acaaatgtgctcctgaaatgtgactgtgccaggtggaaactgcattcagctgcttgcananangacatgaaacaacagggtttaaacaaggggcaagcttattttttactcattacaatgattggaagtcctggtggctccacattgtcatcaacactccaggcctcttttatctttgtcataccactcttaacatattctcaaagtcatacaggattacagaactgtcacttagggatcacaatgaatggagaaaagagaaatattgctgtgtagctgtgtaagtgttttcctaaaaaccctcaccaagtgactctctgacacatctcacaacctacctcctcccatctgcaatgaggactgagaaatgttaattgggcagttgggcatattgataccccacagagcaggggctttttccnggggtaaaagaccancctcctnttactncaacttnaagggg

SEQ ID NO: 742 - DNA, 256 bp, Homo sapien
  misc_feature (1)...(256): n = A,T,C or G
cacagattgcaccactgcactccagcctgagcaacagagtgagactcggtctcaaaaaaaaaaaaaaaaaaaaaaaagaggcctggtgtggtggctcacgcctgcaatcacagcactttggaaggctgaggtggacagatcctgaggtcaagagatcgagaccatcctggctaacatggtgaaaacccgtctctactaaaattacaaaanttagctgagcatggtggcaggtncctgntagtctcagctactcaag

SEQ ID NO: 743 - DNA, 162 bp, Homo sapien
  misc_feature (1)...(162): n = A,T,C or G
tcaggacgtaagacgtaagantgaccctattatncttctcnnggacaggatggtgnacagcaatctttccagtgtnganganctataggnnattgatgtngaagttaggnnggngannnagggngctgcccagnttgccacggccnttcctgagccaccttt

SEQ ID NO: 744 - DNA, 401 bp, Homo sapien
  misc_feature (1)...(401): n = A,T,C or G
gatggtccattgttcctcagcattctttctcttctcccaaattttccttagtattttaccctgctttagcaccaggttagaaattgcatgtgtgtgtatacccattttttcagttggctgtgaagagaagaatatcaactagttttggatgttgacccttgaaaatctttgggtgaaaatatgttcaaatccattgaatcctcattggaaaagaggtttaaccttcaaatccattacattcaacatctttggattcattccactctgaagaaggatgggaggtgttaatgaggattgctgtacatgagccgtggaacaacgatggcagtgggaaaaggggatgtttaacagctttagtgtttcacctnctcaaaaagtttgaaatgnagttgggccgggca

SEQ ID NO: 745 - DNA, 424 bp, Homo sapien
  misc_feature (1)...(424): n = A,T,C or G
agatattcagcaganccatggcatctctggacagacagtgggaaggggaagctctgtgggggccctaaaagaatttcttgttaaccccccgaggttggcccttcctctccactggccatgatccacctgaagggaacttgagcatttaattcaacagaccagcatatacttcctcctgtggcctgatgagcaagtggagtgagcccaggcctgcagagtgacacaacagtaggtagacagttgcagaaggaaatagctgacccagnaaggactctgggccagggccacccagcatggganacttggtttacacatgctatgggaaactctgtttttgatcacatnggggaaattnaggagctgatttttccctgccttgttcaatcctctttttgaaccctatcttaattgatanctggtagcc

SEQ ID NO: 746 - DNA, 404 bp, Homo sapien
  misc_feature (1)...(404): n = A,T,C or G
atctacctttacaaggggttgctgtgaaaattaccgagatagaacgttgaggtgcctggcnatgagtatgctgattacatgtgagtttccttcccctgccctcccctctgtgcccactctgatggatctagtgaactcctactgactcttcaatacccagcacggttgtctctcctctggtaagactcccctgactctcccaaaagaggtagctgatctctctttggtgctccctaaccatgctgtgaccacatgtgcaggacagccgtgcaggcagtgtgcttcttagctctggaacccccaactgggnctggggagtttctggncggcaaacaccatngcctttactcacattnactaactnttaaccctagtntattagcgangtgggccagtaatcgggg

SEQ ID NO: 747 - DNA, 387 bp, Homo sapien
  misc_feature (1)...(387): n = A,T,C or G
cagngngagacctggtgttccatgtaagtccctgatgtcttagagagactgtcatgagcacatgctcagacatcttgggcagggcatgttaggcagaggcagagacagatgtaacctaatgaagggtaagcttgagggtacttctcttgcctgacattttccaaagctctgttatcactcctggggagactgggaggaacccgctgctccagctatgctgcttgtggcctaggagtccctcgtggcatcctcaggctgtgggtgtatccggagagctgcctgcactacttctaaatatatctagtccccagggtcaaccttattaaaccttaggaaagttttccttttttttttttnttttttttttttgnaaacagagtctcactt

SEQ ID NO: 748 - DNA, 258 bp, Homo sapien
  misc_feature (1)...(258): n = A,T,C or G
aatatcggaaaaaccttctagagagtggcttaggcagagacttcaggactaagaacccaaaagcaaatgcaacaaaaacaaagatgaatagattgaacttaattaagctaaaaagcttctgcgtanaaggngaaataatcagtaaacagacaacccacagagtgangnaaaatattcacaaactatgcatctgacaaaggactaatatccagaatctatgaggaactcaagcaaatcatcaaganaaaaacaaatata

SEQ ID NO: 749 - DNA, 388 bp, Homo sapien
atagctttatattgctgagtttaaacataaatggagaggattattttgattatttacatgcaagcacacaagcttaactgcacacacatgtcacactccagtagtctcctcacctttgctgagggccttttatgtgacaggaactgtattttacagacactctctcctgtaatccacagagccaccctgtcagacagttatcattaggttcactttagagatgctatcatctcaacttggggtatttcaaaagcaattcaaactctaggcacggaacaaatagatctctttatgctcttgccctattcattactcccatttccaccccagtctagggctttcccattgttttccactttgatcatgggcctcactctttgttcagcca

SEQ ID NO: 750 - DNA, 359 bp, Homo sapien
  misc_feature (1)...(359): n = A,T,C or G
agaaagcaaaattagggctggtgcggtggctcacacctgtaatcccagcactttgggaggccgaggtgggcggcaccntgaaggtcaggagtttgagaccagcctggccaacatggtgaaacctatctctgctaaaaatataaaaattagccagccgtggtggcaggcacctgtaatctcagctactcaggagactgaagcaggagaatcacttgaacctgggaggcagaggttgcactngagccaaggattgcaccactncactcccagccttaggcaacaaagcgagaatccgtctncaaaatnaaaaaacaacttaaaaagnataaacanttaaaggggattgttcttttgatgna

SEQ ID NO: 751 - DNA, 502 bp, Homo sapien
  misc_feature (1)...(502): n = A,T,C or G
ggcagaacggtgtgatacccaggaaggctgcacaggcgagctcggggctgtcacactgctgtgtgctttggtcggtactaaatcccgtgatactcgtaagcatgatcaaaagcaaagctctgaagtcaggctgcctgggttggacgttagctcgaccacttgctagcatacaacttaggcaagtgacttgttctctgaatgcccgtgtctctctgtatgtaattccttcagtggcaaaatagggtaaccacagtttctacatatagggttacttaggctccaagtgaggatgttccacgtnaaaggntgttaggaccagttacctgggcagaccatggcttcaatactgtttggattattaactattaactaagctggggcgcggtggcttcatgcctgttaattcctgggcacttttngggaggctgaggcgggtgggtccatcttgaggtcaaggagttcggagaccagcctggcccaancttggtgnaaactcccgtct

SEQ ID NO: 752 - DNA, 278 bp, Homo sapien
agattgcagtgagccaacatcgtgccatccagcctgggaaccaagagcaaaactccatctcaaaaaaaaaattcatcaactcaaataatactcgattagaccacgtgtgtttcttttcttcttcttcttcttcttttttttttttaagatggaggttcactatgtcacccaagctggagtggagtggctcgatctcagctcactgcaactcccaagtagctgggattacagtcatgcaccaccacacccagggtaatttttgtatttttagtagagac

SEQ ID NO: 753 - DNA, 215 bp, Homo sapien
  misc_feature (1)...(215): n = A,T,C or G
ttgggctcctggaatccagccccatcctcctttgggattgtgctaactgggaccgcaaaatctctcccgagccagcccggggctccgnttgtggggagatgggaatacaccctgcttttaaaggctcccagagctgaggaagaaagtgaccaggcttaggggagccggnagcgcagggatttccgggtcggaggcatctgaggggcgcaggggcg

SEQ ID NO: 754 - DNA, 244 bp, Homo sapien
  misc_feature (1)...(244): n = A,T,C or G
ttgaccagagggaagccctaaagaaaatgaaggatgtctatgagaagacacctcagatgggggaccccgccagcttggagccccagatcgctgaaaccctgagcaacattgaacggctgaaattggaagtgcagaagtatgaggcgtggctggcagaagctgaaagtcgagtccttagcaacctgggagacagcctgagccggcacgncccgcattcccgacccccccggctagcgncccgccc

SEQ ID NO: 755 - DNA, 285 bp, Homo sapien
  misc_feature (1)...(285): n = A,T,C or G
ctcctgacgtcaggtgatctacccgcctcagcctcccaaattgctgggattacaggcgtaaaccacccgcacccgaccgatgcttcataaactttgaatgataggataagttgaagcctgagtagctgataaaaaataatatttacctcaagatattttttattttctcacattgggagcaccaccacttcaanggaggagtatgaatagggtttgccataaactgctatgacgggaggaagtctagggttctttcccaataggatgcatttcaggtngggcttg

SEQ ID NO: 756 - DNA, 400 bp, Homo sapien
  misc_feature (1)...(400): n = A,T,C or G
tttggcccacatggtgcttttaaaaccggacttttagcaatactttaaaaatcaggagacttcatagaataacccctggtttcttgcaaaagcaaagaattaagtttcaaagggccttgcttccttcacataacaattagccagacctgggggagtggccgtccctttacatggtaccttcctgccagttcactgccacccccaacgggcccgttcacccattatgtcctcgcctcgccccttcagacatgtgcgttcgagcccctgcctgggttggctgttggatccaagagaatgggcagagagtgcccaccccacaaggtgcagganctntgggggtatttttcatgttgcccccaagtgggcccagaagtagccagagagaccanctggngttagg

SEQ ID NO: 757 - DNA, 522 bp, Homo sapien
  misc_feature (1)...(522): n = A,T,C or G
ctcctggcctcaagcaatcctcctgcctcagcctcctatgtaactgggactacaggtgtgagccactgtcactggccaaattgttttaattagcaaggttcccactagttatatgttataggcaaaggggagacttatgacaaattcatgtcagccctgactgaatgttctgttttggcctccgaactccgaggagtgagtgagaagaactccctgggaaagtcagtgaacaccacatcgaagaccccggtccttctttttttttgcgacggatcttcactctgtcgcccagggctgtagtgcggtgggtgcgatcttcggcttcacttgcaacctccgccttgccaggggtttcaagcaatttcttccttcccttcagccttcccaagtagcttggggatttacaggcatttttgggcaccacacttcagcttantttttttttgtattttttttaggtaggagatggggattttcaccatatttnggcaggggttgggtcttcaaaacttcntggaccgt

SEQ ID NO: 758 - DNA, 241 bp, Homo sapien
agcacttaaaaaatattgtgcccattctttctggcctccatggtttctgatgagaaaaccactatcattagaatttatttttccctatagatatatgctttaaagatttttttatttgtcttttgttttcagatgtttgagtatgatgtgccttggtgtgaatttatttgcatttattatcttcgaatttcactcagattcttgaatctgttgctttatgttttttgtttttgcctcgtgc

SEQ ID NO: 759 - DNA, 500 bp, Homo sapien
  misc_feature (1)...(500): n = A,T,C or G
aggaacagatttctggaagtggctaagttctctggaagatcaaagggaaacacatgaatctgaggctgtgtgccgcatcaccccatggcagaaggcagaaggacaggaaaacacaagagcaagcaagagagagagggccaaactcactttcatactaacccattctcatgataacaaattcactcaattgataacaacattaatccattaatgaaggaggagccctcatggccttaatcacctctttaacagtcctacatctttaacaccagcaagatgggcaatttaaattttcaaggataagttttgggaggatagcctttccaaatcatttgcacgtgggcccatttattggacctctcttatttgagggattgggtaggggggcctctttattttcttgaggggcttcttgtatggtttgttttngaattacaggatagggccttttnaaaggcattgccaggggttgnaaatttcagggggccattattggacct

SEQ ID NO: 760 - DNA, 521 bp, Homo sapien
  misc_feature (1)...(521): n = A,T,C or G
caacactttgagagtgtctctcccaagnaccagaatctacgacagctcctcattgaattgactccactttgcctaggaagcgctctgcatataggatctcaatacctgtttgatgactgagtgattcattgaaattcaaactctttggcataaatcaccttcggtctgtcagcctcaccaccttcatttttccacattcctcaacaagatcacatttggtcatccatctctatcttcaagccaacacatccaaactgctttcacctatagggcatttgttaacccttcaaaactcagctctctataggatcagtgggttgtctaggggctggggggaaatggggatgggagaggggtgaagggtgctaggcccaaaaggtatggaggtttcagtcagggcacagtngggttcatggcctggtaatncccagcactttgggganggcctgagggtggggccagatccatgaagggtcagggcttcgtgccgnaatttccttgccaggcccgggggggatncc

SEQ ID NO: 761 - DNA, 424 bp, Homo sapien
  misc_feature (1)...(424): n = A,T,C or G
aggctagganctgggctctcttgggttcttccctgctgatggggagaaagggaagaaagagacagcccttggctggtcccagtcccacactgacctcatgtctcccccagcttcctcctcccagcccagctgcagcccctttgagcctctttatatcacctctcctctattcctcccttcaaaacaaacaaacaaacaaacttgtagagctttgggaagtgtttccaacagtgcccctgtcccttgccatgtctttgaccaagggtcctcgggatattcccagtctgtagcctgtcggggaccacttttccttcccatctttcctcatcatctctgagctaaggatcttgccagctttcacctcttcaccctttccagtttgaaggacaaggaaagtaataggcttatggngttttaattaacc

SEQ ID NO: 762 - DNA, 408 bp, Homo sapien
  misc_feature (1)...(408): n = A,T,C or G
tttttttttttttttttagaggcagggagggtctcantctgtcatccaagctggaccacaatctcaaactactgggctcaagatattctctcacctcaccctcccaagcaactagactacaagcacatgtcacatactctgctaatttttttatttttattttttgtagagtcaaggtcttactatgtcgcccagactgatcttgaactcctggnctcaagtgatcctcccacctggnccttccaaatcactgagattacaggngttacccactgcaccccaccaagaaaggaattctcataatatttgtagcaaaaggntaataaccttagcaagcaaagngctcttaggatgtcaataaggaaaaatagggcaaagggaaaaagaagnctgaggcagggcaattca

SEQ ID NO: 763 - DNA, 185 bp, Homo sapien
  misc_feature (1)...(185): n = A,T,C or G
tgggtgggtggcaggggctctgcaccctgnggagcctgagcctgtgggaacctgggggcagagatgagggtctcgggctttggggcaaccttggggggctctcaccacattccctttcctccagggttgggtttggcactcaacttccagccctcgctcatcatgctgaaccgctacttaagaaa

SEQ ID NO: 764 - DNA, 126 bp, Homo sapien
  misc_feature (1)...(126): n = A,T,C or G
ccaaacaagcaaaagctgaggaaattaatcaccagtagatgggccgtacagaaaatactaaaaggagtcttataccgggaagtgaagagcaatatttactgtcatgaaaccacaggaaattntaaa

SEQ ID NO: 765 - DNA, 291 bp, Homo sapien
ggtcccactattttgctcagcgtggtcttgaactcctggcctcaagtgatcctcccaccttagcctctcgaataggtgggactacagatgtgcaccactatctctggttctttaaagtagtttctatccaggaagctagggtactaataggatcttctttggtgagaagaaaacagagaaagagtccttttctttctagagggacagctggagtacaggagtttatgcacagtacctaagttcaaatccaaatccaagctctcccacatgcgctttaacggcacgagctcg

SEQ ID NO: 766 - DNA, 484 bp, Homo sapien
  misc_feature (1)...(484): n = A,T,C or G
gtgcagtggtgcaatctcagcttactgcagcctcagccttctgagcagctggggctacaggcgtgcaccaccacacccaactaatttctggattttttttgtagagatggggttttgctatgtttcccaggctggcttcaacctccagagatcaagtgatccatccacctcggcctcccaaagtgctgggtgttttaacaactttctgctcagtttcccatctgtaaattgggggtgacagtgatgcctctctgcaagtgatgaaatatgcttatgggtccttagcagagttttgttttttttttgagacagagtcttgttctgtcacccaggggctggnagttcagtgggttcgatctntgggctcactacaaccctgtgccctnccggggttccctcggtgcccnaatttcctgcagcccggggggatccactagtttntaggagccggcccccancggggtgggaagttccnaagcttttt

SEQ ID NO: 767 - DNA, 347 bp, Homo sapien
  misc_feature (1)...(347): n = A,T,C or G
cctcagtttccaagagaaagtgccaggacacggcttaggacacacagaactgagtgaggctggaggcgccacgctccgtccacacagggctgaaacacgggttggttcgnttagggtaccaaccccaggacgggggaccaganggtagcctcgggnctgcttctcacaccaaggctctccggatgtcctgaaaagcccagtccaaaggcggggttgcgacggcactggtgggcgggcatggaactggcggacttgaagcagatgcacggcagagacccacagtcaccacanggacaatagacttnaggggagccttcttggccttccccaganggggcgtnttcaag

SEQ ID NO: 768 - DNA, 356 bp, Homo sapien
  misc_feature (1)...(356): n = A,T,C or G
aattacagtttgggttctcagattgtcccagatttggctggggagagctctttccagctggcttctgacgtgtccgcatcattctttgagctcttctgactttccaggctcattctgtactttccttcctccccactggacttagcatggtttttttttattgtttgttgttgttgtttgtttgtttgttttgttttgtgttttgagacagggtcttgctcttttgcccaagctgggagtacagtggctcattgcagcctgggaactccaggggctcaagcgatcctctcacctcaggattccctacaggtacacancaccacccccagctaatttttttttttttttaaggacga

SEQ ID NO: 769 - DNA, 234 bp, Homo sapien
caaaaacaaaaaacataaagcaacagattcaagaatctgagtgaaattcgaagataataaatgcaaataaattcacaccaaggcacatcatactcaaacatctgaaaacaaaagacaaataaaaaaatctttaaagcatatatctatagggaaaaataaattctaatgatagtggttttctcatcagaaaccatggaggccagaaagaatgggcacaatattttttaagtgcta

SEQ ID NO: 770 - DNA, 523 bp, Homo sapien
  misc_feature (1)...(523): n = A,T,C or G
ntgactttactcacctgctttgcacntggcctcctgaaagtccatggtcttaattataccagtttcattattgctctgaattttcatccttgcatgcttttaaggctatctgtattcaaacaacatacagtagcctcagaaataagaggccccttaccattctcaatagagaggtctataatggccacgtgcaatgatttgaaggctatctccaaaacttatcttgaaatttaattgccatcttgctgggtgttaaggatgtagggactgttaaggaggtgattaggccatgagggctcctccttcattaatgggnttaatgttgttatccaattgagtgaatttggttatccatgtggatggggttagtatggaaagtgagtttgggccctctctctcttggcttnctcttgtgttttcctgtccntctgccttctgccangggggtgatgcgggcacacagcctcaggttcctgtgtttccccttgntcttcccggagnacttagncccttnccagatttt

SEQ ID NO: 771 - DNA, 374 bp, Homo sapien
  misc_feature (1)...(374): n = A,T,C or G
cntgacctcatgatctgcccacctcagcctcccaaagtgctgggattacaggcatgaaccactgtgcctgactgaaactcatactttttggctagcaccttcaccctctccatcccatttccccagccctagacaaccactgatctatagagagctgagttttgaagggttaacaaatgcctataggtgaaagcagtttggatgtgttggcttgaagatagagatggatgaccaaatgtgatcttgttgaggaatgtgggaaaaatngaaggtgggtgaggctgacagaccgagggnatttatgccaaagagttttgaattttcaatggaatcactcagttcatcaaacaggtatttnagatcctatatggcag

SEQ ID NO: 772 - DNA, 121 bp, Homo sapien
ggcaaaccaaagtttaccaggcagtccccatgatatatccaactctacaggaatcaaaattcatggacaggagttggtgttaaagcctaagacctgcgatgacaaggtggctgctttgcca

SEQ ID NO: 773 - DNA, 382 bp, Homo sapien
  misc_feature (1)...(382): n = A,T,C or G
caggaagccttccatgacttgcccctccctctgccttgccaccaattctttggactcccacagaccctgtatttccttttgtcacagcattgaccctctgtgttacttggaggcacacaagttcgtttgtttttgtctgctgctttttgactgtaagctccttgaggagacccactgtctcttgttacatctatgcccagcatcatgcctgacacacatgaagggctgtggcattgatgggaagggggctataggggactgcaggtctcaaggttatactgtgggcaaccagttaaatcctcaaatcctgttgtggacttaaatacaacaaagntttgtttctccttnaacatgatgtcttntgtgggagccagcagctctc

SEQ ID NO: 774 - DNA, 444 bp, Homo sapien
  misc_feature (1)...(444): n = A,T,C or G
cagaagtgacttatcctatccaaagtctggtccctgtctctctcacaggcttggagaggctgatgtgaatcttatctcttgttattagaatgggagtgtctagagggcaaggtcctgggttgactggaccttgctgagcaccctaagctgagcacaccatgtagtagctgtcagtaaatgactgaatgaagtcgatgcaatcatgtctttgcatatgggagttcctcttcctgggaatgcgactcaccccccttcagatccttcctgtccttcaggcccagtacttgttccccagcttctccagggncatcacagcaaccccctcttcttgcctttaccttttcccagcatttgaccgtnatttttcattgtggntgaantaactgggatgcttcaggggggagggtagttttgaccttctgtttantttcccagaagcccagg

SEQ ID NO: 775 - DNA, 143 bp, Homo sapien
  misc_feature (1)...(143): n = A,T,C or G
aggcatccggagctttngaggggagtctggcagcccggctggcccaggcctgcagcggcancgtttccacagggcgcaggcggccttttcgaggccttttctggggggtctgagggagacctggttgggaattggggctccag

SEQ ID NO: 776 - DNA, 144 bp, Homo sapien
  misc_feature (1)...(144): n = A,T,C or G
ccagaacagagttttaaagactaaataaatttagactttttcatatatatgagccatttcttttgtgaattgcctgctcagtcttcttttttctttncctattttttcttattgacatctangagctcttngcttgctanggtt

SEQ ID NO: 777 - DNA, 322 bp, Homo sapien
  misc_feature (1)...(322): n = A,T,C or G
nctttatttcctaatactgctcaaaccaggctacccaaaggacttgtaattcaagtttcattctccagcaagtaaaaaagtaagatgtgttttcaaggtgtcattttcacaaacaattgtccatggtaaaaattattctacaataaaactacccggtgtcattatttttttaatatcctgttttctagtgtatgtttacatacatcaacataaattaggccttatgagtccctgatttatttcccaactttaacaagaccaaaacacttttttgtcttttgtaccagactatnagcacccagagagcaaaaaacttaattta

SEQ ID NO: 778 - DNA, 380 bp, Homo sapien
  misc_feature (1)...(380): n = A,T,C or G
ccnttttcaatttttggaatagttttagaactggtgttagttctttaaaagtttggtagaattcagcagtgaagccatctggtcctgaacttttctttgttggaagactttttattattgctttgatcttgttactattgatttgatcaggtttcctagttctttctgattcagtcttggtaggttgcatgtgtcctgtaatctatccatttcctctaggttttctagttagtgtatagttgtacacaatagtttctgatgatcttttgtatttctgtattatcagttgcaatgtttcctttttcatttctgattttatttaagaccatcttnctttttttttcgtgggttagtctagcaaagtaccntattgaattttg

SEQ ID NO: 779 - DNA, 313 bp, Homo sapien
  misc_feature (1)...(313): n = A,T,C or G
tcngcgntnananagcgcattgtnggagagcttggatttggatttgaacttaggtactgtgcataaactcctgtactccagctgtccctctagaaagaaaaggactctttctctgttttcttctcaccaaagaagatcctattagtaccctagcttcctggatagaaactactttaaagaaccagagatagtggtgcacatctgtagtcccacctattcgagaggctaaggtgggaggatcacttgaggccaggagttcaagaccacgctgagcaaaatagtgggacctcatctcacagaataaaatttaaga

SEQ ID NO: 780 - DNA, 422 bp, Homo sapien
  misc_feature (1)...(422): n = A,T,C or G
aacccgggagcacaggttgtagtgagccaagatcgcaccactgcactccagcctgggtgacagaacaagactctgtctcaaaaaaaaaacaaaactctgctaaggaccataagcatatttcatcacttgcagagaggcatcactgtcaccccaatttacagatgggaaactgagcagaaagttgttaaaacacccagcactttgggaggccgaggtggatggatcacttgatctctggaggttgaagccagcctggggaaacatagcaaaaccccatctctacaaaaaaaatccaggaaattagttgggtgtggtggtgcacgcctgtngccccagcttgcttcagaaggctgaggctncagtaagcttgagattgcaccactgcactcgagcctggggcaacangagaccctgttttcaaa

SEQ ID NO: 781 - DNA, 413 bp, Homo sapien
  misc_feature (1)...(413): n = A,T,C or G
ccaaantgtcagggatgccccagcatggccccgagcaggactatgaggagggggccgtgcattcttcgctctttgggggcctgggcggaggaccctgctgagacgcccctctggaggccagaaggctccctgagtctcttgtcctgtggtgactgtgggtctctgccgtgcatctgcttcagtccgccagttccatggcccgcccaccagtgccgtcgcaaccccgtcctttggattgggcttttcaggacatccggagagccttggtgtgagaagcaggccccgaggctaaccttctggtcccccgtcctggggtttggtcccctaaagcgaacgaaagcgttncttttcagccctgtgtggaacggagcgtggcgcctccagcctcactcagttctgtgtgtcctaagccg

SEQ ID NO: 782 - DNA, 360 bp, Homo sapien
  misc_feature (1)...(360): n = A,T,C or G
nggcacgagcttgacctcgtgatccaccctccttggcctcccaaagtgctgggattacaagcgtgagtcactgtgcctgtcccagcatatgtatttttaaaagagaattcattctattggtataattagaaaaatatttatgaaatattatttatatagttcatgaagtctccaagaaaaacaaactgggataacaaagccagaaaatatcactgcagccttatcaggctatttagaatgaaccaagctattgcttaaagccagaagctgcatcgcattcttccccagggcccaggatgcctcctcaccctttttttgacagaaggtgagccttctattatactagtcttcactggagga

SEQ ID NO: 783 - DNA, 256 bp, Homo sapien
  misc_feature (1)...(256): n = A,T,C or G
gaccangaanattgggggttatggcttcaacctgtgaattttaggggaattcccttcagtctgaaatagaaagccattgttcaaacatagttttacatttgaatatggaaggagggccttgagagaagcctatactactttcctaatcactcttgtattcatacatgataaattttatgaaaataatggtctcaattttacttgggacttaggggactgggaacattggggtagttaaattccattgcctcgtgcc

SEQ ID NO: 784 - DNA, 415 bp, Homo sapien
  misc_feature (1)...(415): n = A,T,C or G
gctatgctaagccctgggacatggcggattcctgccacacagcctgggcccgggttcttacctgtggccaccgctctggcacgagccctcagtcttgggtggtttttgcctggtccaggatttggtgttgctgctgagtccagcctttccaccacctccgcatgggctgtgggtgttgtcagctgcctcccgccttggcttcagtagctcacccagcttacaggggagcttgccctgggnttgggagatggggcattgcaccctggggtcctactttgaattgaattgcaactttgagggagacccggccatattacacttggggccacaggtttacctttcgggcaattncccacattcaagccgtcagccttgagccttccccaggggngagcaaggtttaacacggacaaag

SEQ ID NO: 785 - DNA, 184 bp, Homo sapien
gggacagatggagaaaggagcaaggaaccaggaaacaacgttctattgcaactcacttccagtgagcttctcggggctcctttttcaatggaaagccctcatgctttagaatctttatgctaacatgtgaatacatacaaaacctgcccacacccgccctactggatccaagtcactcgaaata

SEQ ID NO: 786 - DNA, 371 bp, Homo sapien
  misc_feature (1)...(371): n = A,T,C or G
attcaaacaaagacagatttgccgcattcactcaagcagaatgtggccatgaagattcagcccctgcatacatacaaagatgtacgnatgattccccccaccaagcacacacacattcacacacgcacacacacacacatgcacacacgcgcgtgcacacacgacacatgcacacacacacgcacacacagccnggncngggcacacngcacacgtgtgcattattacaggcacatcttngtgcccgaattcctgcngcccggggggtccacttngttcttaggagcggccnccaccgggtgggagcttccngttttttgtttcccttttagttgngggtttattttcgagcttnggcgttaattcttggg

SEQ ID NO: 787 - DNA, 332 bp, Homo sapien
  misc_feature (1)...(332): n = A,T,C or G
cttcttctantttttgttttttcttttcctcctgagtgtgtgcgtctatgtgttttgtctttttggccgggctgggagtcggcaggggtgttcttgttcactctaattttccaccgaaaacgtgggccggggcggctnntgctgccccctgggattcctgggacgatggagaaggggcgagggaagaagacctttgctatcccagataccagggacggtccagggttgctggctggctgggtcgcaggccagcgagacaagatctttgagcgggtcctggggggttgagatgaggtgggtagcngatggccgttttgggggnaaataaggtg

SEQ ID NO: 788 - DNA, 463 bp, Homo sapien
  misc_feature (1)...(463): n = A,T,C or G
catctcagacaccactacattcagtagtttagatgcctagaataaatagagaaggaaggagatggctcttctcttgtctcattgtgtttcttctgagtgagcttgaatcacatgaaggggaacagcagaaaacaaccaactgatcctcagctgtcatgtttcctttaaaagtccctgaaggaaggtcctgggaatgtgactcccttgctcctctgttgctctctttgggcattcatttctttgggaccctacggcaagggacttgtaattgggtggggggacagctagtgggccctgctggggtttttcacacacgggtgtccctcccctagggccagtgccttcttgggagttcaggaactctgggtgggtattttcccttcaatgaagtngggagttaggctcttcttcattttttgaggatgggtattattgggaaggccacccagtcggnttttaggag

SEQ ID NO: 789 - DNA, 391 bp, Homo sapien
  misc_feature (1)...(391): n = A,T,C or G
tttgatggagaaatccgaggcctgccagcatccccaccagtagatttctttggacgaagaaaatccttctgtggattcagctttaccgcctttcctcatctgctggtgtcttcctcagagctttaatgtccgtcctgctctccgagtcaggaatctgattttccagcgtgccctgtaatgacggtgctgtcaccgctgtgatgtccgctgtgaggtnggggacaggacctgggaagtgggggtttccaagtgaggggttctggggcccgcccgagtcatctgatgttggggtcttgacaagccagggagcttgttgtgagcccggagaacgttcccttaaccttgtcttgttgccttcggctttccccattcttgttaaaaattggccgag

SEQ ID NO: 790 - DNA, 454 bp, Homo sapien
  misc_feature (1)...(454): n = A,T,C or G
aaccgccatcgcgtcttggttatgctgccagcggaattcggcttcagcangcggggcaggttggtggaaggcttcagtggatggcgtcagttacgttcgaccggctggtncntgtgcttaagttgttccagcagattcggtgcaatggtcagacgatcgcaaccggccaatgccaggatctgctctaccttgcggaantgngctcccatgatcaccgtctgataacggtgctgtttgtagtattcgtaaatgttgcgtactggatttcacacccggatcttgggtcggcatcatagtcagcggcaggctgtttggcctgataccagtcataggatgcggccgacgaacgggagagatcaaggaggacgccggctttcggccaaggcacgagctnggggncgaaaagaggaacagcagtgttcaggttgggatttnatgcnttctttttttccag

SEQ ID NO: 791 - DNA, 471 bp, Homo sapien
  misc_feature (1)...(471): n = A,T,C or G
atggccttgaaagttttgagaagtactggttaggtattttaaagaatgcttctcaattggaatttgtgtgatgtttttctcctgatcagacttgggttctgagttctggggaggaggaccacagaggtaaagtgccattcttatcacattctgtatgatgtgatgctatcaaggatacatgctatcaaaagggcttatcatggatgatgttaacctcaatcacctgggctgagctgggtgtctgtcagatttctccactgtaaagttactcttttcccccctttccatattatactctgcaagggaaggtcactatgcaggagcccactaagtgggggnaggtatcctaccatnaaattattttggaaattctttctggcaccaaggggatttgttccccatttccaatccattttattattaggtttggggggctttggttaaatatttattnatataggtttngggggg

SEQ ID NO: 792 - DNA, 374 bp, Homo sapien
  misc_feature (1)...(374): n = A,T,C or G
gtgccagcaaccaggcttggannccaantcagccagaagcaatgatgcagcaaaaagaaatgcccagccatanctcaggatggtaatagtggaaagactaccactgctacctcctgccttgcacttttaacttgagcctggagccaaaaactctgccacagctgtgtcaggaccagatacttcagctgctctgtttggcagaacattcatctccccaaattcagtttctgccccatgttgtgcacttatgcctccctgtctcatacatgggcatgtgaaccggcagcccagggtcataccccagcactctagtttgcaagggaatctggaaaatggattttttangctttttcaacctcttgaattccagnggc

SEQ ID NO: 793 - DNA, 415 bp, Homo sapien
  misc_feature (1)...(415): n = A,T,C or G
ctcaaatggtnaccatttggccaagtaaatttattgtcgtgagccgataacactatatattaacatatcaaatgaagggctgctttttttaaaaaaattgacaatttaataatcagtcattctttacctatttcattttgaggtaactattttagaccaaattaaaagtgatcatttttctttttaaaatatattctgtccctcaatattgttgcttttcaaaagtgcatctgacccattattaattcaaggaggtagggtaatggattaattaaaaatgttggggcaaaggtggggcatttttcccaatctcctgggggtaccttttcccacccccacctggaatggggggatttttggttatttttgggatnaatccttttttttaaactctgggtgggntttctctgggggg

SEQ ID NO: 794 - DNA, 174 bp, Homo sapien
  misc_feature (1)...(174): n = A,T,C or G
tgtgggatgctgacccacaagccaagtgtaaattcctcttctctgacacagctggagcctggtgttctgagtcttgcagccctcgggtcacctatggtgtnttctgagtagtgtgcaatggacagtaggtgtttatgcacatatattatgtgactgttttntaaatttcatggt

SEQ ID NO: 795 - DNA, 218 bp, Homo sapien
  misc_feature (1)...(218): n = A,T,C or G
ttatcctagcgctttgggaggccgaggtgggcagatcacttgagatcaggagttcgagatcagcctggccaacatgatgaaatccactctgtactaaaaatacaaaaattagccgagcacagaggcaaggcgccttttaatncgagctaatttgangcttaagnaaggagaattncttttaancctggganggaagaaggtttcaattagccccggtt

SEQ ID NO: 796 - DNA, 246 bp, Homo sapien
  misc_feature (1)...(246): n = A,T,C or G
agaagtctatacccggctcaagtcgcgggtcctcggcccaaagatcgaggcggtgcagaaagtgaacaaggctgggatggagaaggagaaggccgaggagaagctggccggggaggagctggccggggaggaggccccccaggagaaggcggaggacaagcccagcaccgatctctcagccccagtgaattgcgagccacatcacagattggggaaancccaaaggttnaagggcnccaggaggtt

SEQ ID NO: 797 - DNA, 344 bp, Homo sapien
  misc_feature (1)...(344): n = A,T,C or G
ttgattccattcctttccattccactcgattacattcccttccattcctctcggaatgattccattccattccattccaatccattgcattccattccattccattccattccattccattccattccattccatgccattccaattggggtgaatccattccattcgatttcgttccattccattctattccgtaccattccgttccattccattccaagccattccactcgggttgattcctttccattccattcctttcgggttgattatattccattncattncattccattccattncattccattccattggcaatnggggttggattccattncatt

SEQ ID NO: 798 - DNA, 375 bp, Homo sapien
  misc_feature (1)...(375): n = A,T,C or G
agtagagatggggtttcaccatgttagccaggatggtctcgatctcctgacctcgtgatccgcctgtctcggcctcccaaagtgctgggattacaggcgtgagcncgnctcccagcctaatttttgtatttttaatagggacagggtttcaccatcttggctaggctggtcttgaactcctgaccttgtgatctgcccgcctcagcctcccaaagtgctggggattacagggcgtganaacccgcggcccagccggttttgttcctcttttaatttgtctagtgtattcttaggccttcaaagggcccatggcaaantgtttggttccattaaattnattttaaacatatttatggaggggtttnaatgttcctt

SEQ ID NO: 799 - DNA, 385 bp, Homo sapien
  misc_feature (1)...(385): n = A,T,C or G
ggaactgctgctcatggaactggctcctctcctcttgccacttgagtctgttcgagaagtccagggaagaacttgaagagcaaaatacactcttgagtttgttgggttttgggagaggtgacagtagagaagggggttgtgtttaaaataaacacagtggcttgagcaggggcagaggttgtgatgctatttctgttgactcctagcagccatcaccagcatgaatgtgttcgtagggccttttgagtgtggccgatttgtcatattctgttgggataacaatgtattggggtgttccganttttcatgggggccagggggagaggggcagttacacctggggaggacccntttttgtcccaccatccgacacccntccagtctt

SEQ ID NO: 800 - DNA, 332 bp, Homo sapien
caatggaatttaactacccaatgttccagtccctaagtccaagtaaaattgagaccattattttcataaaatttatcatgtatgaatacaagagtgattaggaaagtagtataggcttctctcaaggccctccttccatattcaaatgtaaaactatgtttgaacaatggctttctatttcagactgaagggaattccccttaaaattcacaggttgaagccataacccccaatgtgactgggtcttgggagacaggggccttttaaataagggggggggcccgggtaccccaatttcgccctattagttgagtccgtatttacaatttcac

SEQ ID NO: 801 - DNA, 410 bp, Homo sapien
  misc_feature (1)...(410): n = A,T,C or G
angtgtcaacccttctgcctgtggaaggggctgctgaggctgcggagaggcagggtggaggctcgtccccttgtccagcccttgggtnggtctccaccaggtccccagcccaccagcgcagggccncctgagcctgctgctgccacgggccctgtctctacccaggacgtccccccaccctcgcagtgtcagggaaatgatcatggtggcggtgacactccgcaggcagggctgcttgagagaagcttgagaagggtcacaattncaggcaggggcccgtgttgacaaagccctttttaccccgagagagttnaccagggnagtttaangagcagagccaaattnccgggagttcgagaaagttcttgggttgggtttaacaacttnattttggncaagggaagnttttt

SEQ ID NO: 802 - DNA, 346 bp, Homo sapien
  misc_feature (1)...(346): n = A,T,C or G
agccctccgcagaccgggcaagcagtctctcccgaccttgggaaaaaacagacaaaggggccacctacaccccccaggcacccaagaagttgacgcccacagagaaaggccgctgcgcctccctgggaggagatcctatctcagcgggatgctgcctctgcccgcaccctccagctgcgggctgaggaacccccaacccctgccctccccaacccggggcagctgtcccggattccagggacctgggtaggcaagggaaattgggagggagattnagggagctttttgggcagaggtttcaggggatttgggagatggggaaggcgaaaggccaagggaccccctt

SEQ ID NO: 803 - DNA, 380 bp, Homo sapien
  misc_feature (1)...(380): n = A,T,C or G
tcagtgggaaaagcagggagctcccttgttcaaaaattataaagaatgtcaaggacggcgtggtggctcatgcctgtaatcccagcagtttgggaagctgaggtgggtggatcacttgaggtcaggagttcaagaccagcctggccaacatggcaaaacccagtctctactggaaatacaaaaattagccgggcatggtggcacgagcctgttaatcccagcttactttggggaagctgaggcagggagaatcgctttgaacccgggaggcgggaggttgcagttgagccgagattcgcaccatttggagccaagatcatttccagcntggggttgacagagcgagtttccctttttcaaaaaaaagatttttttttnaa

SEQ ID NO: 804 - DNA, 185 bp, Homo sapien
  misc_feature (1)...(185): n = A,T,C or G
ccgttgggaacggaggagtaaggactgcccttctagtggaggaagactttaagcctcctctaaacctctctgcaaccagagccctgaaggaacagccaccactctcaggacaggcctcagctctgcagggtctcccagcaccaggtaccaggttcctnccaggttccaaaaaggttccacctttt

SEQ ID NO: 805 - DNA, 317 bp, Homo sapien
  misc_feature (1)...(317): n = A,T,C or G
ccaatctcctctcaagtgataggcatgagcacttgcatctggccaaaaggactttttatacttaattcatcctttcagcatcctatgaaaagagtctgggctgggtgcagtggctcacgcctgtaatcccagcactctgggaggctgaggcgggcggatcacttgaagtcaggcgttcgagaccagactggccaacatgatgaaaccccatctctacttaaaaatacaaaaatcagccagggcgtgggtggtggggcacctgttagttcccagggtacttnaggaggcccaggtnggaaggttccancttttccngg

SEQ ID NO: 806 - DNA, 240 bp, Homo sapien
cttgttgcccaggctggagtgcagtggcgtgaccacaacctccgcctcctgggttcaagtgattctcctgcctcagcctcccaggtagctgggattacaggcatgtgccaccacgtccggctaattttgtatttttagtagaggcgagtcttctccatgttggtcaggctggtctcgaactcctgacctcaggtgatcttgtccgccttgggcttcccaaagtgctggggattacagggc

SEQ ID NO: 807 - DNA, 112 bp, Homo sapien
  misc_feature (1)...(112): n = A,T,C or G
ctgtcnttntatatgcacacgtgtcatgtgtctctngcctggctgtgtgtncgtgtgtgtntgcatgtgtgcgtgtgtncacggcggtgtgtgcatgtgtgtgtgtgtgcgt

SEQ ID NO: 808 - DNA, 282 bp, Homo sapien
  misc_feature (1)...(282): n = A,T,C or G
atggtggctcatcccagcactttgggaggccgaggtgggcagatcgcctgaggttgggagttcaagaccaacctgaccagcatggagaagccccatctctactaaaaatataaaaattagctggacatggtggggcatgcctgtgatcccagctactgtgggaggctgaggtgggagagtcgcttgagcccggaagcggnaggttgttagttgagcttgagattgtgccatttgttacttccagccttggggcaacaaagaacgaaacttttgttcttaaaa

SEQ ID NO: 809 - DNA, 269 bp, Homo sapien
  misc_feature (1)...(269): n = A,T,C or G
gggatcgccggagacaatggaaggaggcatctcgtccccggtgaagaagacagagatggacaagtcaccattcaacagcccgtccccccaggactctccccgcctctccagcttcacccagcaccaccggcccgtcatcgccgtgcacagcgggatcgcccggagcccacacccgtcctccgctctgcatttccctacggacgtccatccttaccccagacgggccttncaccttattttcccccacaagggccattncggttaaccca

SEQ ID NO: 810 - DNA, 157 bp, Homo sapien
  misc_feature (1)...(157): n = A,T,C or G
aaaaagaacaaactaagccagagttagcagaagggaagatataacaaagatcagaacagaaataaatagagacaagaaaacaatagaaaagatcaataaaatagagttgattttagaaaagataaaaatattcaaganacttttagctagacttaag

SEQ ID NO: 811 - DNA, 219 bp, Homo sapien
  misc_feature (1)...(219): n = A,T,C or G
ttaatgtgcaccggaaccccagtggctccatggaaggacctgggcatcctctaagccacttggtcgttcncattataccatctcaaaatgagagagcttactccacttcattgagggaaataccaccagagttctgactccagaggcactggcctagggaggacaccgtgtgtgaaagcccagcagngcaactaagctgtccccaccaattacagtcct

SEQ ID NO: 812 - DNA, 297 bp, Homo sapien
  misc_feature (1)...(297): n = A,T,C or G
cttgaccctgccctggaaccggcaccatccaacagacatgggaaatggagggacagtggccgcaggggatgctggaantcacgaaacctcctagggggcggccggggctgagggaagctcacaaaacctcctaggaggtngngccctgtccttggtgccgcccnctcctcgccacttccccccaccccttccagggaattgcaaggtncccggcttcagagggaggaaccacagcccttttnttgggangcacaaggagacggtttncccttgagaattcaaggattttaaaccaag

SEQ ID NO: 813 - DNA, 228 bp, Homo sapien
  misc_feature (1)...(228): n = A,T,C or G
tcagcatgatcgaactgaaggatctctgaaaggccacagctggagcaatttgagtaacaaaataaagtagtattgggttataacccaaactatataataaatatttacaagcccaaactaatataaatgattgaatggggaacaaatctcttgtgcagaaggaatttcaaataatttatgtngatactnccccacttagtgggctnctgccatangtggccttccttg

SEQ ID NO: 814 - DNA, 271 bp, Homo sapien
  misc_feature (1)...(271): n = A,T,C or G
cttgacctcaggtgactcgcccacctcagcctcccaaagtgctgggattacaggtgtgagccaccgcgcccagcttttcctttgctttttactctcaggcagtctctctccagggtggtggcagacatggttccagcatctccagtttcttaattctccagtttagtgcttttgggagcattaagctgggagagaaaggcctaagatttctctggggattttgttgcacaccctggggaagcaaagantattggtcagttgccatctttga

SEQ ID NO: 815 - DNA, 287 bp, Homo sapien
  misc_feature (1)...(287): n = A,T,C or G
agagtttcagttttacaagataaaaagttttggagtctgattgcacaacaatggaaatatacttaacactcttcaacggtgcacttaaaatagtgaagatggttaattttatgttatgtatattttatccactatgacagaattttaaaaataaactgttggaatctaatagcaatagggagactgaattactaatataaccatggtacaaaatgataaatctaaatcagggtgtagataccatccanattcccctatttgggtctcccaccttccagtngaccatt

SEQ ID NO: 816 - DNA, 223 bp, Homo sapien
tgaaggatcaatgaaatcaatgaatgatagcatctaaacatacttcctcctgggttatcttaacaggtatatgggaaaccagggtggagatagggggaagaaaaacaatcaaagaacctcagatagcttcaaacatttctatgtaatgtaggcccaaccaataatacacattaatatacaattaatgtgcatcccagtcacctttaggggaaacttgtttaaa

SEQ ID NO: 817 - DNA, 419 bp, Homo sapien
  misc_feature (1)...(419): n = A,T,C or G
aattagctgggtgtggaggtacttgcctgtagtcctagctacttgagaggataaggcaggaggattgcctgagcccagaagtttgaggctgcagtgagccatgatcatgccactgcactccagcctaggtgacaaagtgagaccctgtctcaaaaaagtgaaaacaaaaactgatcacctccttttatagtgaatcataaaaggagtatgtaaaacatatttatttcctatgctcacatcccaattattcccaaacaggantacagctggggaggttttcccatcctctcttgggganggagggcgaccttccaggaaggtgaaggctgggtgccangttaggtaattaggcacttnttaccctattcgcccccatacggggtgcctngcatttcnccaaacctgtgctagggttttgg

SEQ ID NO: 818 - DNA, 388 bp, Homo sapien
tatttttagtagagacaggatttcaccatgttggccaggtcggtcttgaactcctgggctcaatagatccaaccacttcaacctcccaaagtgttggaattacaggcatgagcactggacctagccttaacctttttattaatatgtaatatctctctttatccctggtaatattgcttgttttgaaggctactttgtctgatattaatatagccactccagctgtcttttgatcagtatttatatggtttaaccttttctatcattttacttttaatctatctatgtaattacattaaggtggggttttatgtaggagagccatgttattggggtcttgtgtaaaatgtggtatatatgtgtgttcaatccaatctggacaatgttg

SEQ ID NO: 819 - DNA, 471 bp, Homo sapien
  misc_feature (1)...(471): n = A,T,C or G
tttgagacntgggctngttctgtcgcccaggctggagtacagtggtgtgatctcggctcactgcaacctctgcctcccgggttcangccactctcctgcctcagcctcctgagtagctgggactacaggcgcccgcgccancacccaactaatttttttgtatttttaatagagacgggggttcaccatgttagccaggatggtcttgatctcctgacctcgtgatccgcccacctcagcctcccaaagtgctgggattataggcatgagccaccgtgcccggcctgcttttagctcttacaatcgagggnaaataagggtggattgcaatatgcatatatttgaagaaacctgatacacattgcttcattttttcatacagccttaangcagnattattaaatttacctttttatttnagtactaaacacttttcctacatagttaggagagaactgtttactccgtata

SEQ ID NO: 820 - DNA, 339 bp, Homo sapien
  misc_feature (1)...(339): n = A,T,C or G
gctagggctggtccaaatgctcctgtgtgtgtgggtgctgggtgagccaccntggctttgcttgccactatgacaggggagcaatgagttcaatgtaatgtcccccagttggtgtactctgcaagtgcagatactctccatgctgtacagctgttgccaggggataggggagggttggtgttggtgattcaagactgtctgttggaccctcctcaatacctttttcagagatatgaaatcaggtgctgtgattgctcacctgatttttggttcttgtgatggtgcttttctgtgtgcagatacttgttacaatttggtgttcctgtgaggggtacaaag

SEQ ID NO: 821 - DNA, 419 bp, Homo sapien
  misc_feature (1)...(419): n = A,T,C or G
cttagggacacatttctaaggaagacaacagaaaacagcacaagtgacactgcatgtgttccaaggctagactatgaaaggtactttagcctggctctctcttgggacgcttgctcttcaatccctgctgccatgttgtgaagaaacccaggcaacaatggagaggctgagtatattcattctagtcctcagccccagtggaggtcctggcaaacagacagcatcaacagacagcctttgagatgactgcacctcccatcaatgtcttattgcatcctcacaagagacccccagtgagaaccacctcctgagctcagtcaacaataaatgattgttttgtgtttaaaaaaaaangtcaatggggaatgtgttctgaaagcaagatgcatctcttggggcaanctgcctcccaagggtat

SEQ ID NO: 822 - DNA, 391 bp, Homo sapien
  misc_feature (1)...(391): n = A,T,C or G
tactaagctgacgggcaaataaaggaggagaactggtctcaaacaaactaaaggacatactacacagtatataggcatccaatgagtaccgagcgtggttccttgcagtgaataccagccctgctgctgagacgaatccccagggtgatggcataccctcagatcaatgccaagatctctacacatttgaaatgtaaaatataagcaatccgtgatttcctaggctaatgtgattctcagcaaatgtggagacttggcaggttatttgtcaaagtgtgggggcctgggtttggggtttcaatcagctacccaaaatacaggggtttgtgccttgtttcagccaatccccaaaatgggcaccagnccattgtctnctgggcgcccagntaag

SEQ ID NO: 823 - DNA, 447 bp, Homo sapien
  misc_feature (1)...(447): n = A,T,C or G
acagaatctcnttccgtcaccctggctggaatgcagtgacagatcttggctcacggcaaccttcacctcccgggttcgagcggttctcctgcctcagcctcccgagtagctgggattacaggtgcgcaccaccacacctggctaattttttgtgtttttagtaggagggggtttcactatgttggccaggctggtctcaaattcctgacctcatgtgatccgcctgccttggcttcctaaccctcacagggtttttatgagctttagtgggttagtacacgtagcatgctgagataagggtcagtgagacatggatttttcaagcctgtctttagtgctatttgggatggggagaaatttaagttaaatcatccagggngtggttngctcnatgcctggttaatcccaacacttttagggatggccaagggtaggnaggttttactt

SEQ ID NO: 824 - DNA, 197 bp, Homo sapien
  misc_feature (1)...(197): n = A,T,C or G
tgttatacatntttttcataggtatattgtgattaatgtaggagcagttcatgtaatgattgaaatgaagttttttcattatattctatttttgaaaaattaccaataactacatatataactgaaatcacatcatgtaactgtcagtataaaggantggctcagataanaccacatagaagttgtatatttaatat

SEQ ID NO: 825 - DNA, 337 bp, Homo sapien
  misc_feature (1)...(337): n = A,T,C or G
actgcattccagcctgggtgacagagtgagactctgtctcaaaaaagagagagagaaagagctggcaaaacccaggaaatacgtggaagagaaaaattaaagcagcacagaggagaagagaaaatggaaagtatcacaggaaaagcagatgccaccaaaaacacagagaggactgtaacaaagtgagtgagaaaatggaaaggggatagtttaaatggggaagtttacccttgttaagctctttctttccctagattagcttaaaaggaaattgacatnttggccaaaccgggccaagagactttattagatnccgcantttgttagtttcccttna

SEQ ID NO: 826 - DNA, 348 bp, Homo sapien
  misc_feature (1)...(348): n = A,T,C or G
ttcagtagagatgaggtttcaccatgttggccaggctggtctcacactcctgacctcaagtgatccatcctccgcagccttccaaagtgctgggattacaggcgtgcgcangcgcccagctgacttttcagttttcttaagcatctcaaagccatgaggtcaaaatggcagctgtgtctcgcggccctactgtcagggcccagcacacggtctgtgttcaataattcaattaatttatctgaacggaacggaaatgacagaggctcccaaaataagaggggaaatgtttgncattaatacaggaccatacccgatctagggggtaacccacaagtgggttagggccct

SEQ ID NO: 827 - DNA, 133 bp, Homo sapien
  misc_feature (1)...(133): n = A,T,C or G
tccccannnntttngcaacangcnaaggatcgtaatcaggtnccantcgnacntatgccntnttctctccagcaggccnaatcggggcnttgaccttggccacatcaatctcatacancttnttcccagcctg

SEQ ID NO: 828 - DNA, 308 bp, Homo sapien
caaagctttattattattatttttcttctcaaaacactgctttgctttgggggagcgcgggtccttggccagatcttgagtcttgagatatgtcttcagcatctcctgctcctccttgggaaacgctccacccgccagtgggcctgcgccctcctccccttcttcggggttcgggtccacctcgtttcccccaccctccccagggctgactgcaaatcggagggcgactgcagaggcggaattcggggcagagcgggggtctccccagcgggccacgtcccaccagcaggtggccgggtcgctcgtgc

SEQ ID NO: 829 - DNA, 232 bp, Homo sapien
tttttttttttttttaagctttctagatgattccattgcagtcaagtttgagaatgcactggggttagaagctgctaagatgcaggaggaggagtatctatcagtagaaagggcaattagactatgctgatacaattgatttattttgtcatagaatagcagtatgacaaaactatatttgtattgcccttttctttttctgttatatttgtggcatcttttttactcgtgc

SEQ ID NO: 830 - DNA, 317 bp, Homo sapien
  misc_feature (1)...(317): n = A,T,C or G
ccctggctggaatgcagtgacagatcttggctcacggcaaccttcacctcccgggttcgagcggttctcctgcctcagcctcccgagtagctgggattacaggtgcgcaccaccacacctggctaattttttgtgtttttagtaggagggggtttcactatgttggccaggctggtctcaaattcctgacctcatgtgatccgcctgccttggcttcctaaccctcacagggtttttatgagctttagtggggttagtacacgtaggcatgctgagataaggggtcagtnaggacatgggntttttcaagcctntct

SEQ ID NO: 831 - DNA, 270 bp, Homo sapien
  misc_feature (1)...(270): n = A,T,C or G
gggtcacagagggagattcgaatatgctttgcttctgactttgaagatgcagttaggggccatgagcaaagaatacgggtggctttacaactgggaaaggcaagggaaaacattcgctccagaacctccagaagggatgcagtcctgctgacaccttgactttagccttaatagacctattttggacttctggcccccagaccctgttaggtagtagatttntngtntattaagccactcaatntagggtagtttntaacagcagcaaga

SEQ ID NO: 832 - DNA, 219 bp, Homo sapien
  misc_feature (1)...(219): n = A,T,C or G
ttttttgggtnttttaagctttctagangattccattncagtcaagtttgagaatgcactggggttagaagctnctaagatncaggaggaggagtatctatcagtagaaagggcaattagactatgctgatacaattgatttattttgtcatagaatagcagtatgacaaaactatatttgtattncccttttcttttnctgttatatttgtggcatct

SEQ ID NO: 833 - DNA, 281 bp, Homo sapien
  misc_feature (1)...(281): n = A,T,C or G
aaatgctctagacagcaaacaaatattttactcactggaaacatacattctatgttatattccacagagactgtaactgtgaggataggaaattgttaatgacagctgtgtccctagttccttagaataatgcttcgcacaaagtaggttctttacaactatttgatgaatgantgantgtacattngtaaatggggattntcctttatnccacattctcttatgantntggttattgtgaatcactcctcaagtatctgttccatgatacatgctttagg

SEQ ID NO: 834 - DNA, 310 bp, Homo sapien
  misc_feature (1)...(310): n = A,T,C or G
ataattccgttacgttacattcatggcttgatcgctacgaaaaaatcctggccagcagaggaatcaagcagaagacactcataaattacatgagcaaaattaaagcaataaggaggggtctgcctgatgctccacttgaagacatcaccacaaaagaaattgcggcaatgctcaatggatacatagacgagggcaaggcggcgtccaagntttaatcagatcaacacttnaggcgatgcattccgaggaggcaattagcttgaaggccattattaaccaacaaaaccatgttcgcttgccattcggcggc

SEQ ID NO: 835 - DNA, 452 bp, Homo sapien
  misc_feature (1)...(452): n = A,T,C or G
cacaatctcgtctcactgcaacctccgcctgggtgatagaacaagactttgtctaaaaaaaaaaaaagacaacattgtcagattggattgaacacacatatatacacatttacacaagacccaatacatgctctctacataaaacccaccttaatgtaattacatagatagattaaaagtaaaatgatagaaaaggttaaaccatataaatactgatcaaaagacagctgggagtgggctatattaatatcaggacaaagtagcctttccaaaacaaggcaatatttacccgggggnttaaaggggaggttatttacatattttanttaaaanggtttaggggcttagggtccccgtnggcttcctggcntgttaatttcccancattttgggggngggtttgagtnggttngggtcttttttnggcccgggggtttccaggaccgnccggg

SEQ ID NO: 836 - DNA, 446 bp, Homo sapien
  misc_feature (1)...(446): n = A,T,C or G
attttagagtcagtttgctgatatccacaaaacaatttgctagtattttgactaggattacattgaatctagagattgcgtgggaaaaaattctaacttagtgatattgagtctttctatcaatgaacatctaatatctgtcaatgtatttatatctttgatatctttcattagacttgtataattttccttatattgaaccctgtgctattttgttagatttgctcctagtaaatgtttctattgcaaattcttattgttcattgttgttatggggaaatcatttgagttttttgtattaagnttgcatttgggcaaccttgtntataattgcttattaggtttcagggagttttttgttgaatcctttggggatttttcctacacaggacaggtngtcatctgtggaaccaatggacaggtttcatttcncactcttcccaaat

SEQ ID NO: 837 - DNA, 457 bp, Homo sapien
  misc_feature (1)...(457): n = A,T,C or G
attttataagcaatgctagcaaaaaaagacaacttaaaagattatggagaaaaaggcgtattttagatacaaaacacagattgagaaacacttaggggcaagaagtaatgcatcactggccagtgtaaatgaaccgtttaggcagtaaaatgtgtccaagcaagtggtgagtatatcctgttctcttttatatatctagacaagtgatttcaaacacccacgtgggagccctgagaccctggggtgttcacctnaatgtaaagccccaatattagggagcttgaggtcaacttaatttgaggggaatatgtcccaaccaattcaattaagccaaatttaggattgagcttaactgttcacacattctttacccttcntcccttttgcttgcctttaacttgaggcaaacagctcttcttcttaactatgttaggggnaaagtgtttagtacntccaa

SEQ ID NO: 838 - DNA, 385 bp, Homo sapien
  misc_feature (1)...(385): n = A,T,C or G
aaaagatttgcctggtgttagagagctgtttgaaaaagaacctcttcctcctcccagaaagacacgtgctgagctcatgaaggcaatcgattttgagtactatggttacctagatgaagatgatggtgttattgtgcctttggaacaggaatatgaaaagaaactcggacgaggaaaggcagccagggagaaaggaggggacgacagccagcagaagttcattgctcacgtccctgttccctcgcagcaagagattgaggaggcactggtncgnaagggaaggaaaatgggaactcctcccaggaagtattgccaagcnaggacccttgcaggccccaaagttgnagaagccagaaaggtncctgggggtatttaggaacccagc

SEQ ID NO: 839 - DNA, 448 bp, Homo sapien
  misc_feature (1)...(448): n = A,T,C or G
cggaatagaagcttacatcctttgtacccctcacaggaacaccaaattgtaacaagtatctgcacacagaaaagcaccatcacaagaaccaaaaatcaggtgagcaatcacagcacctgatttcatatctctgaaaaaggtattgaggagggtccaacagacagtcttgaatcaccaacaccaaccctcccctatcccctgggcaacagctgtacagcatgggagagtatctgcacttgcngaggtacaccaactgggggacatttacatttgaactcatttgctcccctgttcattagtgggcaaggcaaagccagggctggggcttcacccanaaccccacacacacagggagcttttgggaccagccttagccagagattnacccttttcgttggtcagaattngagggggggcccgttacccattttggcttttgttgagttgt

SEQ ID NO: 840 - DNA, 410 bp, Homo sapien
  misc_feature (1)...(410): n = A,T,C or G
gttacccagccttttatgttctgttccgtaacctgggaagctaacctctatgaactaaccaagattccttgttctctggcttctagatgggttcagccatggaaagcactggcagaagatcaaaggtgagggagacaggttggaatattattcctcccaaatacttctctgttaggccacagcttggaattggctgcactcttccaccaaaagttacatcttttgtcagacagccctactcctgtagttcttactaggttggtaactgcccagggnaccttgttccttcaaccttagggtgggtaacaactttgttaaccgcccaacggtttcaccttgcccgttgcntaggacaaagttattttatcaagaaggggattgcaatgggataggagacgcagagccagttt

SEQ ID NO: 841 - DNA, 480 bp, Homo sapien
  misc_feature (1)...(480): n = A,T,C or G
tcatacctagcttggcccttctcatatccttgggaggcagtttgctccaagagatgcatcttgctttcagaacacattcccattgacttttttttttaaacacaaaacaatcatttattgttgactgagctcaggaggtggttctcactgggggtctcttgtgaggatgcaataagacattgatgggaggtgcagtcatctcaaaggctgtctgttgatgctgtctgtttgccagggacctccactggggctgaggactagaatgaatatacttcagcctctccattgttgcctggggtttcttcacaacatgggcagcaggggattgaagagcaagcgtcccaagagagagccaggttaaagtacctttcatagtctagccttnggaacacatgcagtgttcacttgtgcttgttttctgttgtcttccntaggaatgtgtccctaagtccagggcatatttcaagattagggggatag

SEQ ID NO: 842 - DNA, 366 bp, Homo sapien
  misc_feature (1)...(366): n = A,T,C or G
nttacccagccttttatgttctgttccgtaacctgggaagctaacctctatgaactaaccaagattccttgttctctggcttctagatgggttcagccatggaaagcactggcagaagatcaaaggtgagggagacaggttggaatattattcctcccaaatacttctctgttaggccacagcttggaattggctgcactcttccaccaaaagttacatcttttgtcagacagccctactcctgtagttcttactaggttggtaactgcccagggnaccttgttccttcaacctttagggtgggtancaactttgtaaccgcccaacgggtttccaccttngcccgctggccttaggacaaagctt

SEQ ID NO: 843 - DNA, 513 bp, Homo sapien
  misc_feature (1)...(513): n = A,T,C or G
ggatgtggatgatgctggggactgttctggggccaggtataatgactggtctnatgatgatgatgacagcaatnagagcaagagtatagtatggtacccaccttgggctcggattgggactgaagctggaaccagagctagggccagggcaagggccagggctacccgggcacgtcgggctgtccagaaacgggcttcccccaattcagatgataccgttttgtcccctcaagagctacaaaaggttctttgcttggttgagatgtctgaaaagccttatattcttgaagcagctttaattgctctgggtaacaatgctgcttatgcatttaacagagatattattcgtgatctgggtggtctcccaattgtcgcaaagattctcaatacttcgggatccnatagttaagggaaaggctttaattgtcctgaataacttgagtgtgaattctgaaaatcagcgcaggtttaaagtntacatgaatcaagtntttgatgacacatcacttctcg

SEQ ID NO: 844 - DNA, 516 bp, Homo sapien
  misc_feature (1)...(516): n = A,T,C or G
gcaccactgcactccaggttgggcgacaaagcagaccttgtctcaaaaacaaccaaacaaaaatcttatttgagttcgaaacgcatgtcaattagcagtcacgcccattcttcccatccctcacagccctgagacaaccacctgtctctttagatttgtctatgctggatgcctcatataaatggagtaatacagtattggctctttgcccctggnttcttccacttagcatgttttcaaggttcatcatgttgtagcacgtgtcagcacttcctttctattttgtatattattccattgtatggctataccacatttcgtttacccattcatcaatcaatgcatatttagtttgtttccatttggggggctgatacggaataatgctgttatgaacattagtgtacaggtttttgtgggagggcatatgttttcatttctcctggggatataccgaggaggcggattacttgtgccacacgggactctctggattaaccatttnaaggactgcca

SEQ ID NO: 845 - DNA, 578 bp, Homo sapien
  misc_feature (1)...(578): n = A,T,C or G
gaaaaaaagggcttactcattctagcagattctagcagcctcatcttgctaatcctgtcagttaatttcctcttgtccagtccccctgaagctacccttgtttcctgcaccgtttttttctcagcttgtttctcgaactgtcctatgaacctgggcactaccaataccctcccaatgtattgcttttgtgcttagtattaagactcagtttctgttatttgtgccaaacagtttcccaaacagaaagcaaaagccaaaaagaaaataaacgcccaacagaagcaatttgctcaggtgctctggaggatatacacacaggtatggaacttgtaggggggaggtagggaaaattggggttcctgttcttcaggtctgttcacctgtctttgctgtgtgaacttcaacaaacccccaaattcatcagtaaanccaagtctngggcttngttaatcttcaaagtccttactgggggccaggancaatgantgtgcccattttggggttnctggcncaggacaancctgtnttttggtagctgntttgaacccaaccgggcccaattttggcaaataacctnt

SEQ ID NO: 846 - DNA, 386 bp, Homo sapien
ccaccccagccccccttaaacctcatgtccttctcatgtttcagaacacaatcatgccttcccaacagttcctcaatgtcttaactcattccagcatgaattcaaaagtccaagtccaaagtctcatatgagacaaggcaagtcccttccacttatgagcctgtaaaatcaaaaacaatttagttacttccaagatacaatgggagtacaggcattgggtaaatgctcccatttcaaatgggaggaattggccaatataaaggggctacagtctccatgggaagtctgaaacccagcagggcaggtcattaaatctttaaagctctggaaattaatctcctttggactttcatgtctggacatggcaaggcgtgctggatttggga

SEQ ID NO: 847 - DNA, 547 bp, Homo sapien
  misc_feature (1)...(547): n = A,T,C or G
agggcagggaattaaagtcaggaagaaagagacctgcatattgatggatatattttgtgatccagccttatgtatgttctgaagagaaatacaaaatttgtatctaaatacctgtcctgtgtccctcttttcaaattcttctgttttttcttttttctttctgttttttttttttttttttttttctgttttgagacagagtcttgctctgcagcccaggctggaagggcagtggcgccatcttggctcactgcagccttgacttcctggggctcaagtgatcctcccacctcagactctagagtagctgggattacaagcatgcaccaccacgcccagctaaattttaaaactttttataggagacagagttccactatgttgcccagggtggtcttgaatcccngggttgagtaaccctccttccttgggctcccaaagtgttgggattacaggnatgagccaccaaggctgggtgatttaacttaaattttcccatccaaataggactaaaggcaggnttgaaaaatccatgtctcaatgaccc

SEQ ID NO: 848 - DNA, 519 bp, Homo sapien
  misc_feature (1)...(519): n = A,T,C or G
ttagacagagtctcgctctgttgtccaggttggagtgcagtggcaaatctcagctcactgcaacttccacctccaggattcaagtgattgttgtgcctagacctcccaagtagctgggattacaggtgtccaccaccacgcccagctgatttttgtatttttaatagagacagggtttcgccatgttggccaggctagtctcgaactcctgacctcaaacgatccacccaccttggcctcccaaatgttgggattacaggtgtgagccaccacacctgggcctgccctaagcctcttaaatagatggggattacaggtgcctgttgccattacctgttaatcccatcccaaatccattaaatttgctgttttttgaatttaaaacagcaaaataggatgtcagcttaaggtgtagtttttttaaatcagtataacttttaattggnacatgaaatatttcatttgattgnattatatttttaaaacggngttaattttttgttttaaaattaggnattg

SEQ ID NO: 849 - DNA, 455 bp, Homo sapien
  misc_feature (1)...(455): n = A,T,C or G
ctgatattgattatcttaatcatcaagaggatagacggcaggggtggatggaacgtcacgctttttggcattagctagaaaatcgttaattcttttaagccttttcttcccctctgtgcaccaatcctctcttttctcagggcctaaccacttgtgttaccctagatcggtatgttctgtattatgcaacatttccctcttattttggagcctctgtcatttcgttcgttcagataaattaattgaattattgaacacagaccgtgtgctnggccctgacagtagggcgcgagacacagctgccattttgagcctcatggnttttgaggatgcttaagaaaacttgaaaagtcagctnggggcttcgggttcacggcttgtaatnccaggnattttgggagggttccggaggttgggtcactttaggncaggggtttttagaccagncttgggca

SEQ ID NO: 850 - DNA, 447 bp, Homo sapien
  misc_feature (1)...(447): n = A,T,C or G
aggactgattcacgcaaacccgctcaggagantccgttccgtcttcaaaaaacccaaaaagaagaacatggcggcactcccacccgatgagctgaaagagctcatggtggcaatcgcaattgccagcataaaaaggactacccgctgcctaattgaatggcagctccacaccatgacccgacccgcagaggctgctaccacccgctgggctgacatcgacatagaaaagaaggtctggacgattccagctgagcgcatgaagaaacgccgtatccacatcgtgccgctaacagaccaggncctagccctgctttgcagcaattcaagccctacagcgggacaccggggagttacgtgtttcccttncagaccgttaatccttggaacccacttgcaacagccaaaccgncaacatgggaattgaaacgnattgggatttggaaggac

SEQ ID NO: 851 - DNA, 316 bp, Homo sapien
  misc_feature (1)...(316): n = A,T,C or G
gaccgccacctgctggtggnaccgtggcccgctggggangaccccgctctgccccgaattccgcctctgcagtcgccctccgatttgcagtcagccctggggagggtgggggaaacgaggtggacccgaaccccgaagaangggagganggcgcaggcanntcggcgggtngagcgtttccnaaggnggagcaggagatgctgaagacatatntnaagactnaagatctggccaaggaccngcgntccctcaaagcaaagcagtgttttgagaagaaaaataataataataaagctttnaggaggaaaatgtaaaa

SEQ ID NO: 852 - DNA, 210 bp, Homo sapien
aaaaaagatgccacaaatataacagaaaaagaaaagggcaatacaaatatagttttgtcatactgctattctatgacaaaataaatcaattgtatcagcatagtctaattgccctttctactgatagatactcctcctcctgcatcttagcagcttctaaccccagtgcattctcaaacttgactgcaatggaatcatctagaaagctta

SEQ ID NO: 853 - DNA, 305 bp, Homo sapien
  misc_feature (1)...(305): n = A,T,C or G
agcaacaggaatggacctggaggnatntatcctaagtgacataacccagaaacaganaatccaataccatatgttctcacttacaaggcgagaagctaaacaatggatacacgaagacatgaagatggaaacaatagacactggggactccaaanggnnngngggaggagaaggggtgangatttaaaantcgcctgttgggtacagtgttcactgtgtgggtgatgggtccactagaagcccaancttcactcttatgcaatatatccntgaacccaaaccttcatatncaccacctgggatct

SEQ ID NO: 854 - DNA, 351 bp, Homo sapien
  misc_feature (1)...(351): n = A,T,C or G
aaaaccctccagccaaggntactgcacccaggagaaacccaagactccctgcacctgctgtgaaaggcaggacataaagtgtcagaaaaaagctcaaatctgctctaaaagtctccagtatttaagcctttatataagccaagaggaaagatggcttagtagtaaacaaaagcaatctgtttgtgcacttcctactccaaccacctggtgtcaaataagagagttcctaagggcagcaaggttctgctgcatttagatcccaaatttctagcttatggctaagncacaaaagagaaggaaagaaagagcccctcctctagggggcttaaccagggagaaggactttttaaa

SEQ ID NO: 855 - DNA, 297 bp, Homo sapien
ctgactctaactaaataaatcagaagaagaagaaaaaaagaaagactgaaggggaaacatgcagagttaattcacagaggagcctgccaagtggtctgggtggcagggagatgcacattaaaagaaaagtagatgtcctgccctagccaagtgtggtggggcacgcctgtaatcccagctactggggaggctgaggcaggagaattgctgaacccagaagccggagttgccagtgagtctagatcgtgccactgcacttccagcctgggcgaccagagccaagggtcttgaaaaaaa

SEQ ID NO: 856 - DNA, 412 bp, Homo sapien
  misc_feature (1)...(412): n = A,T,C or G
ggcagggcaattaaagtcaggaagaaagagacctgcatattgatggatatattttgtgatccagccttatgtatgttctgaagagaaatacaaaatttgtatctaaatacctgtcctgtgtccctcttttcaaattcttctgttttttcttttttctttctgttttttttttttttttttttttctgttttgagacagagtcttgctctgcagcccaggctggnagggcagtggcgccatcttggctcactgcagccttgacttcctggggctcaagtgatcctcccacctcaggactctagagtagctggggattacaagcatgcaccaccacgcccagcttaattttaaaaactttttattaggagacaggagttccactatgttgcccagggtggtcttgaatccctgg

SEQ ID NO: 857 - DNA, 282 bp, Homo sapien
  misc_feature (1)...(282): n = A,T,C or G
ttttttaagataaaaatctcgctgtgtcactaagactggggtgccatggagantcacaacgcactgagacctggaactcctaggtcaagaaatcgtcctgcctcagggcctctagtagctaagactacaagtgcatgccaccatacccactaattttttttccatgtagacagggtatcactttgttgcccaggnttatcccgaacccctgggccaaagcaaccatcctgcttcagcctcctaaatagctggaactataggtntgggccaccacccntgggt

SEQ ID NO: 858 - DNA, 209 bp, Homo sapien
aaaaaagatgccacaaatataacagaaaaagaaaagggcaatacaaatatagttttgtcatactgctattctatgacaaaataaatcaattgtatcagcatagtctaattgccctttctactgatagatactcctcctcctgcatcttagcagcttctaaccccagtgcattctcaaacttgactgcaatggaatcatctagaaagctt

SEQ ID NO: 859 - DNA, 296 bp, Homo sapien
  misc_feature (1)...(296): n = A,T,C or G
ctagtagagatgaggtctggctatgttgcccaggcatggctgcaatatttttgtcaatacataaccttgttttatgtgtatttctncttaacgacaccttatttaatacatattgttgattcagtagcattgaactcatggccaatgacaccataactcaagcctgaaagaagcttatctaacgtgtattttctccaaaaggcacatcatagccctcttgtgcttaggaaatactagacagcatttcagcattatacttgaggaacctncttacacactggaaatcgccaaccaaa

SEQ ID NO: 860 - DNA, 103 bp, Homo sapien
  misc_feature (1)...(103): n = A,T,C or G
catccttaaccnggagtgngaatatcctgcattcccgaacccatcgacgaactgtttcaaggcttcttggacgtcgctggcgtgcgttccactcctgaagtgt

SEQ ID NO: 861 - DNA, 214 bp, Homo sapien
gagctaagcaactataccaataaagttgctattaaataaacctggaaaagcataaggacaactaagcttggatgggataggaggaggtcaggagttcagtttcgacaaactaagtttgaattttctcttagacaccaaattggaaatgacagttggatctatgaagaggtaagtacaggctaaagataccaatttgggagtaaccgcctcgtgc

SEQ ID NO: 862 - DNA, 378 bp, Homo sapien
  misc_feature (1)...(378): n = A,T,C or G
ggttngagtgcagtggcgtgatcatggctcacagcaacctctgcctcccaggttcaagcaattctcctgcctcagnctnctgagtagctgggattacaggtncccgccagcacgcccagctaatttttntatttttagtagagacagggtttcaccatgttggccaggctggtgtcgaacttttgacctcaggcgatccacctgtntcggcctcccaaagtgctgggattataggcatgagccactncggccagtctggcatttactcttccttnggtagaatgtaagggaagtggctntcactttataggataaaggccagaaaaaggatgggagggggctttcaacangaagggaacccacccnctttnggagtgg

SEQ ID NO: 863 - DNA, 119 bp, Homo sapien
  misc_feature (1)...(119): n = A,T,C or G
gggcnggntnctggggagcngctgcctttttccccaccagnggcttctnctgnttctaaacaccaacagcagccttcttccctttntaaccnaccanaggnttntngcctgcaaccgcc

SEQ ID NO: 864 - DNA, 179 bp, Homo sapien
  misc_feature (1)...(179): n = A,T,C or G
ggnggttgctttgaactttatttgagaaaaacagaagataaanntatcaaaaggacananangnngncggggangnanaaccattngggccanaangggtnggcannccggntaangntttanttnggcgnaatntnaacngnttttncaanttnttggnccccaannttggcccncga

SEQ ID NO: 865 - DNA, 266 bp, Homo sapien
  misc_feature (1)...(266): n = A,T,C or G
aaagcacttttaattnnccncnattnnaaggcngaacntaaaanagattctnggncnggggggncaaanccnncagcncgttnaacttangcacccgtctcgnccccaggggcntttccagaacnactgccntnaccangaagccccangnggttncccaattnaaactggggnttcttnagcattttaacttttcnaacgnngncancagggggnggnaaaanagatnggcaagccntttcnanggctttnccaatgctgtcngg

SEQ ID NO: 866 - DNA, 331 bp, Homo sapien
  misc_feature (1)...(331): n = A,T,C or G
ggaagacaccaaggaagcggcnaccacgngcagcttgatgggctccggcaccatcctgcgtgaagtccgtgaagcgcngatcatcctgcgtgaacagttcaacatcggtgctnacgtctggagcgttaccagcttcaacgaactgcgtcgcgacggcctggccatgnagcgtcacaaccgtctgcacccaggccaaaagcctcagctgagctacgttgaagagtgcctgactggccgtaaaggtctttttnattgcctctaccgactacatgaagctgttcgccgaacagattcgccagtgggtaccggtcaaggaattcaaagtgctggg

SEQ ID NO: 867 - DNA, 360 bp, Homo sapien
ggctggtctcaaactcctggcctcatgcaagcctcccaccttatccttccaaagtgacaggcatgagacaccatgcccgaccccactccaattctgaaagaggttctacgacgggcaatatgttctcaaacaccactgcatgctacagagaaatgttttcgtgaaaagaagagtcaattgatgtaacaaacttcactgttgtcttattttaaggaactgccacagctatcccaaccttcagcaaccaccaccctgatcagttagcaagcatcaacatcaaggcaagaccttccactaggcaaaaagattaggggctttgcttgaagggttcagatgatccattagtgtttttttaggcca

SEQ ID NO: 868 - DNA, 355 bp, Homo sapien
  misc_feature (1)...(355): n = A,T,C or G
ttttttttttnttttttttttacanttagcatttgaatttacantgctgtatggngtgaagtttaaggacctgtcttttaccagtggttcagcattatttcagactaactcancagagagggcgctgggaagctctagcactccccactgaggtntccctgatggcacagggagtggagcaggctgggcagcagtggtgtntcctttcccantgggccctgggcttnggggagagatctcanagtgcacctggngctgagccctggctctgtggtatctgctctgggctntgcanccagtgaccggccactgctctcggcctttccctccagagagagcctcattcctgggcata

SEQ ID NO: 869 - DNA, 163 bp, Homo sapien
  misc_feature (1)...(163): n = A,T,C or G
gggacganggcgcngtnatgagcgncggganttacccnctagccnntatataagnnncantggatatnactactacagngncccnnggacgcgtgaannnnttcgantcngnananccaggcnantnnaagtcactnaagctatacaggccaacattgaagtt

SEQ ID NO: 870 - DNA, 481 bp, Homo sapien
  misc_feature (1)...(481): n = A,T,C or G
gtataggcaggttctgcagggctgactgcaggattgagtacgaggatttggttatttgctggtggtcctggcaccaatcccccgcatacactcagcgagactgtaacgacttttattaagcagttagcgccaaacaatttatttttatttttatttttgtcaaacaatttattaaggttttatgtcttaaacttttagatgcttgaccaaatatatatgaaaagtgaaaggaaaattacctattaatgtgagtaaggtacctgttgggatgctgcataagtcctcccaaccttggaaattgggaggatacctctccctcatatcctgctccacattgatttgaggctcttacctgctttttatcacaggcaaccgcttaaaaacccaactttcaggaaaggttccaagggattgtaggcgcacgtaaattattggggacttgcggactnttgggggagctgggtgggttcctggaggtatt

SEQ ID NO: 871 - DNA, 137 bp, Homo sapien
  misc_feature (1)...(137): n = A,T,C or G
cccagtnaagttntttaatgaatgagnaaanaatttcccttnaaagaggcccccaccccanttaacggccaactgcagtaacanttcagggtttcaaccctgnttccttccngctaggnggngccatgtcatttntt

SEQ ID NO: 872 - DNA, 517 bp, Homo sapien
  misc_feature (1)...(517): n = A,T,C or G
accagcctggncgacatggngaaaccccctaaaaatacaaaaattagccgggcgtggtggcctgcgctgtaatcccagctacccaggaggctgaggcaggagaatcgctggaacccgggangtagaggctgcagtgagccgagatcgcgccactgcactccagcctgggcgacagagcgagagtttgtctgaaaaaaaaaaaaaaaaaagccagggtgagcggtggctcaagcctgtaatcgcaagcaacactttgggaggcggcacttggggcagatcaccggagtccgggagttggagaccagcctgagcaacgtgggagaaaccccatctgtacttaaaantacaaagtttagccgggcgtggtngcacatgcctgttagtcccagcttgcttcgggaggctttaggcaggggantcgcttttnaaccccgggaggcggaggttttcagagagccttagntcgcgcctttggattncagggttnggttaacaagagggaccttcctttttnaaa

SEQ ID NO: 873 - DNA, 297 bp, Homo sapien
  misc_feature (1)...(297): n = A,T,C or G
cctttggataccacatttgcagaacatacctacatgaaagcaggaggcgtggcagttagacctaaggaagcacttcctgactgtagatgataaaatactgtcttgggagggttggatacagtgggcctccaccccgtgagatctgggatctctcaggcccagggtctaattctctttgagctcttggctcttgaaaccctcctcggaaagagtgagggcagccaggcatgaggcctcagggaacccatgtttctgtccttgggagaagcaggggcccagggccaagnagggacctgg

SEQ ID NO: 874 - DNA, 512 bp, Homo sapien
  misc_feature (1)...(512): n = A,T,C or G
aaaagtgtttgatagctcactggctcccaaatctggctgcccttgcattcacctgtggtcnttgttaaaaacaaacatttggggaacttgccctaggtctgtcagaggccttggaaccagagtgactccatcttgaataggcattgggtaaaatgaggctgaaagtcctgccctgtattcccaggaggttaagcattcagagtcacaggatgacattggaggttggcacaaaatacaggtcacaaaaaccctgctactaaaacaggatgcagtaaagaaggcagccaaaaccaagatggcgatgaaagtgacctctggtcgtcctcactgggtcattatatgtgaattattaatgcattaccatactttaaactcccaccagcaccacagcagttttacaaatgccatgggcaacatctgggaagttaccctatntgggtcttgaaagggaaggatttcccaggaaaacttcatggattattccaccccttaattatattcatattgatccc

SEQ ID NO: 875 - DNA, 451 bp, Homo sapien
  misc_feature (1)...(451): n = A,T,C or G
tctgtcagtgtctggggctcccagcctntacttctaatgccacacacccctgttgctgcagctgattctcatcttgcctcattttcccctttctcttctttccatgtgcttttcttttttctgttttctctcctatcatcagttctccatttctaggtttttggataatgtcttttataggtactgcaagccagtcaatgtatttcaaaaaatgacaaagaagtagggtttttttttattatctgtgttgtgaacttgtcacccctgttactttggaatcacttaattttaaggaaataaatgaggatatttgggggtaggggggaataggaggttcatcaggaataaggaggattcttgaggtgaggaagggggactttaggagggcccgtgtggggtcttgaccctaaataatacaggggattcccttctacaggaatccctggacagg

SEQ ID NO: 876 - DNA, 517 bp, Homo sapien
  misc_feature (1)...(517): n = A,T,C or G
tgggagacagcatctcactctgtcgcccaggntggagtacagtggcgtcatcttggctcactgcaacctcggcctcccaggttcaagcaattctcctgcctcagcctcccaagtagctgggattacaggcacccgccaccaagcccagctaattcttgtattttttttttttttttagtagagacggagttacactntattggccagcctgggnctcaaactcctgaccctnttatctgcatgntttggcctcccaaagtgctgggnttataggtntgagccactgtgcctggggcagcagcaactnttttaatcccaaacacagnttccttcgccatccagttccttcttctcttctcccacctcctcctttgttgctnctcctctctcttttgtataaccctctatatttcatcaggaaatacagtcaagaagggggtcattgggagcatgataaggnaaacaatnttcacagtcatcacaggggcagggntaggagttttngtcatttttnctt

SEQ ID NO: 877 - DNA, 510 bp, Homo sapien
  misc_feature (1)...(510): n = A,T,C or G
tcagttttagtgacggtttatttttaggaaatgtgcatggtgccatggtaagtctctggatctgcttctttgtgcacagagatagtcttttggagttacttccatggaaataaggtaattttggtcaaaagaggaaaggtgttagtaattggagttataaaatacaccattctttgtaagtaatgcccgagatggtttatcagagtctctcatctttaatgaaaacttttgctgcttttcaagcaaacttggttcccataatttggggattcatccacagaatgttcaaagtttagtgtcagcccattttcagcaggaaaataggaggctgaccaatttccctgtgttctttaggaaggctttggaaagcttcatgggggaaggaatgaaggcttattcttgggccctggaccatttgccccctgggggtgctgggaccccagcccaaacagccttgtatttggccaaggagggnccagtngaaggggncccttnttcctgcgccngggg

SEQ ID NO: 878 - DNA, 527 bp, Homo sapien
  misc_feature (1)...(527): n = A,T,C or G
ttttttttgctgcccttgggggtnttcattgcggtataaggtaggttcagttgactgggttcatttctggaagattttaggggccacggctcagctcagcactcctggnggactctaagtctggggagttggtaccaggaccccagctttgttatctggccccgtgagattgggaacctgctgcatcagagggtccaaggtnttcctggtccattagccacaaccctctgatgggtggtgccagacaaagtgcttctttggggcggtggcagcaggatctgtgctcactcacgtnttctggcacctntggccagcgcgcaggggtgctttatgccttgggtgggggttgggggtaccagcagaagtcgagctgctgcattcctgtgtgcactttgtaccctgtnggccagggtncaggtngggagcagggtttccaatttccatgcttacaatttncaccagtggtggcaattgcagggttcttgcaatcaattgggctncttaccttcatgggcacattnaaccct

SEQ ID NO: 879 - DNA, 299 bp, Homo sapien
  misc_feature (1)...(299): n = A,T,C or G
cttgaaaccagggccagcttcactgcttgcaacctgggcaggacacagggtcctcattcagaagggccatgtgccntntcagtgctctactatagtcatctcgaaactcagtactttttggacaaagggccccacatttttattttgtgtcaggtcctgcaaattatatagctagtcctgcctgaagtatctttgtgtctctcagactaaaaaggatgtagggagaggggtacagttctgtgggtggccctgttctctctgctctgtgcagggcctgcctcccactgtgagctgcaaag

SEQ ID NO: 880 - DNA, 207 bp, Homo sapien
cggttactcccaaattggtatctttagcctgtacttacctcttcatagatccaactgtcatttccaatttggtgtctaagagaaaattcaaacttagtttgtcgaaactgaactcctgacctcctcctatcccatccaagcttagttgtccttatgcttttccagggtttatttaatagcaactttattggtatagttgcttagctc

SEQ ID NO: 881 - DNA, 334 bp, Homo sapien
  misc_feature (1)...(334): n = A,T,C or G
gaagctgtagttggccataaagttgacgttggccaggatcccgttgggtcactagaggagttnccataagtagaggtacctcagtgaaaccacagtgtagatcagatccatgtatctctgagtgaggtccacagattctgcaaatcagaggtnctggcacacctgggacctgctggatcaggcccagcagctgagagtgcagctgggactctattttggacactttttcctcagttgattcttgatgcacctcaaagctttgagggaccagtgattaaccatccattttgacagatnggaggaatttgaggcttccaaagaagtccaggttttt

SEQ ID NO: 882 - DNA, 452 bp, Homo sapien
  misc_feature (1)...(452): n = A,T,C or G
ttgattctccctggntccccagcactgccctagactttcagtatgacaacccccatgttcctctcacttctaatttttaaaagtcagtctcaaatctttaactcacagctgcaaactgtactcttaaaatatttgtgaaattgtgcagatgttatttccatctgtccttttgagaactactgatagtgtgatttgggaatatttccaattctggctgaggcagggcagggcgagggccaaacgctagggctggactgggcatagtttacatcagccacaggtgtcaccccgccggtgtcagagggtttgcttccctgaaattagtaactgtttatntccactctggcacttgttaattaacatcctggccaaagggcncccattttnccacaactttttgcactangcagagatctgacgtccagcgtgtgctggtgagcaanacatctttn

SEQ ID NO: 883 - DNA, 387 bp, Homo sapien
aaaatcctgtattgctaaaaaacactaatgatcatctgagccttcagcaagtcctaatctttttgctagtggaaggtcttgccttgatgttgatgcttgctaactgatcagggtggtggttgctgaaggttgggatagctgtggcagttccttaaaataagacaacagtgaagtttgttacatcaattgactcttcttttcacgaaaacatttctctgtagcatgcagtggtgtttgagaacatattgcccgtcgtagaacctctttcagaattgggagtggggtcgggcatggtgtctcatgcctgtcactttgggaaggataaaggtggggaggcttgcatgaggccaggagtttgagaccagccttggccaacataccaagacc

SEQ ID NO: 884 - DNA, 467 bp, Homo sapien
  misc_feature (1)...(467): n = A,T,C or G
aagatggagagggaactccacccctcctcgttaaagacaggaataatcattcactttgcttagtggtccccaataaacaagcttagcagataagcnggaagacagggaaagggaatcagacttgggatccaggagctcgcaggaccctgttctgccccaggccactcaggaatggagagctgctagctggacctgggtaggtcaccattactcactggggcttttgtctggcatgaaaggtgacgggagaaaggggcagatttttatccaggcagccaccgtgggtgttggacacttgagtaattaaggaaagaaatngcagttcagaagcaaagagggaggagccaggtcctcttgagctcttctngagaaaccagngcccagttcgagcttttcagcttagagttggncagcttcggattgacagttgggtcagaagctttggtngggaggaagcttgacccanc

SEQ ID NO: 885 - DNA, 283 bp, Homo sapien
  misc_feature (1)...(283): n = A,T,C or G
cgatcaagccattgaatgtaactgtaacggaattatcacttnntgatngnnnntgncagagncttgtntttntgtccnnnangtaacncaatcttggcctgtatagcttnantaaantgcgattcgactntctctncctaatccaaactctnnacccgnncttcggngcctctagcacgtaatatccattntttcttatataaaggttaggggnnaaatcccggcgctcatgacttcgcctnntnnccatntnngancctcttcaaaaggccacctgttactg

SEQ ID NO: 886 - DNA, 365 bp, Homo sapien
  misc_feature (1)...(365): n = A,T,C or G
gtctcccccagtagccgggattacaggcatgctattgttttncnnctttttgtatttttagtagagacgaggtttcaccatgttggccaggctggtctcgaactcctgacctcaaatgatccacttgctttagcctcccaaagtgctgggattacaggcatgagccaccgcacccggccggcagttatctttcttaagtagcagttctatttctcagtataaattaatgctgcagttcctaaaccatttgctgangtgcctcagaacccagtagcaagttcgtggggcacagggataagttcttcaaggggaaggcgnttgcaattattggaacatttatttggaattatttcagggaaccacca

SEQ ID NO: 887 - DNA, 139 bp, Homo sapien
  misc_feature (1)...(139): n = A,T,C or G
agatcccatangagnagnaganattnttancnttaggatagaaggannagagattgctatagtgcaccnagtcntgacaantcatgaaagncaanatnggcatatcaananttngnncaanggagatantaatccggtt

SEQ ID NO: 888 - DNA, 141 bp, Homo sapien
gaataaatgacatggcacctcctagcaggaaggaagcagggttgaaaccctgaagtgttactgcagttggccgttaattggggtgggggcctctttaaagggaaattatttactcattcattaaacaacttaactgaggga

SEQ ID NO: 889 - DNA, 431 bp, Homo sapien
  misc_feature (1)...(431): n = A,T,C or G
ctggccaagctaggtggacagacccttgcagtgatgtccgtttgtccagattctgccagtcatcactggacacgtctcctcgcagctgccctagcaaggggagacattgtggtagctatcagacatggacagaaactgacttagtgctcacaagcccctacaccttctgggctgaagatcacccagctgtgttcagaattttcttactgtgcttaggactgcacgcaagtaggcagacaccaccgacttcctttctgcgtcaccagtgtcgtcagcaggagagaggacagcacaggcttcaaggttggtagtgaagtcaggtttcggggtgcatngggcttgtggtggtgttgatcagtttgctccagtgttttgaaataaagaagactcatgtttatgtctgggaataagtttctgttttgtgcttgaca

SEQ ID NO: 890 - DNA, 377 bp, Homo sapien
  misc_feature (1)...(377): n = A,T,C or G
ttactgtatgcgcattacttggattttgaggggcactctaccttggttatgattcagtagaggaaaaagaccacctttcttcaatttacaaattaaatcttctggagggtcgctatcacaaaacattgacgatgtatgtattataattttttaganaaaccaccatcgtgtcacgtcgacgatgccaaattatgttagcgtgcngganaacaccgtgggggaggaaggcagcagctctaagaaaaaagctcaaatgatcttagtcactttcgatacttgtactttcagatgcgnaaatgggatattcgnagtgggagacctcnaccaaagtgcgcctgctttttgatgtggaactcggtataggnccattgacccgt

SEQ ID NO: 891 - DNA, 116 bp, Homo sapien
  misc_feature (1)...(116): n = A,T,C or G
tggggcaggagaatcacttgcacccgggangcagagagtgcagtgagccgagattgcaccgctgcacttcagcctggcaacagagcaagacttcgtctcaaaaaaataaataaata

SEQ ID NO: 892 - DNA, 367 bp, Homo sapien
ggatattcacggtggactactgagtctttcggtgcccccttgctgttttagttttgtcctgcggccgagtgtttccctcgcttcacgccaacacaatctccgccgccctgtcttgtcatccccattctacagcccagcacggtgtagtatggcagccgctagccacaggtatctagggagccctgggaaatgtggtcagttctaatggagctgtgctgtaagtgtgaaatacacgtggggattttgacggcagtggggagcaaaattctcccaatttttttttttttttttttttttcagacggaggttccctcttgttacccagcctggggagtccaatgggcgcgatctagggtctcttgcaacc

SEQ ID NO: 893 - DNA, 416 bp, Homo sapien
  misc_feature (1)...(416): n = A,T,C or G
ggggtcagggccctcctaggaagcaactaggaaggaggggaggtttgcttgggagttgtccagctccaatcacccagaggccagtccccagggccccgcacccacggggcttgagccaggggaggcagcaggctgtgttgtcaaaggaagcctcagnccactgggaagttgctgggaaaagtttgcagcgtctcccccaggtgccctctggccnctgggccttgnctttctccaaggacagaaacatgggttccctgaggccttcatgcctgggttgccctcactcttttccgaggagggtttcaaagagccaagagttcaaagagaatttaganccttgggccttnagagatcccagattttaacggggttggaaggccattgtattccaaanctttccaagacaatntttttat

SEQ ID NO: 894 - DNA, 337 bp, Homo sapien
  misc_feature (1)...(337): n = A,T,C or G
acaactggaccttcgttttgtaagtatcttgaagattcctttctcatccaaatctgttagaatcaccgcagtttccaaagttggctaaacatcagaatcacctgaggtgctttgttaaacacagggaatgtcctgatagcctctggagattctgattaagtggaccagttaccagaaagcagccccaatccaggncccatgagaggattcttggatcttgcgcaagacagaattcgaggcaagtccacagattaaagtgaaagcaagtttattagggaaattaaagggaataaaagaatgaccactccatagggccaggagcaggccccagggtttg

SEQ ID NO: 895 - DNA, 428 bp, Homo sapien
  misc_feature (1)...(428): n = A,T,C or G
ggaaatcttcagtcatctgatcatcacttgtcagttaatttagtgtgtgtttaatctcgtctcctaattagtatatcagctccccacaggctgggaccaccttagaatcttcagtggcctccaaggcaccaagcacagcgantgagtccccacctctgtcttccacaaatactggacagctattgatttggtcaacctatgctaaaacacaactgtaggaatatttttaaagtgtactaggatcagtgggatgaaaggaaaggataggaaattttgtctttccattttttaaacatanttctttaacttttaggaactgtcccaaccatggaanttggcttaccntcttggaaatnaccaantttccctggacactnaaaaagtatttccaaaacacagtgttctggacccntttgtccggggggttt

SEQ ID NO: 896 - DNA, 328 bp, Homo sapien
  misc_feature (1)...(328): n = A,T,C or G
cagtacctacatatatttattcaaaagatttttctcaggtgcaatgagggtaatacataaacactccaggattttccaatgtaatttgtaaggtcttccttccaaagtatcaggttttgacctgggttcttaaaaaactgaatctagaaaaggatacttaaaaagccagactttctagtgatgaatttttatcattttcttgggtgattagtttatgcatcatctctccctttcctgggntattttagcttttgggcgatgtctccctgtaggaacgagaatgtgtggaatttttaggggcatttgctttccaaaaacggtctgggct

SEQ ID NO: 897 - DNA, 407 bp, Homo sapien
  misc_feature (1)...(407): n = A,T,C or G
tttggtatccccacacttgggtgagagccagcccctcacccaggggaatctgtgctctacttacgtgcaaatctcccggtgaaatgctgctcccttgcaacacacttggacaaaagggagctaagcgngngtggcccacctcgaagngagaacaaagagaacaaaaaggaagtttgttggtagtgtctgactaccccccctctgctagcctcctcatctatgccacatcttcacaaacctctgctctcagaggtgtcagctacttgcctcttcccacccccatagggtttttcaggaaagccttgagttggcatttcgattttcgggcaggtccacaaaacagcatcttaaaaagaggttccgtgttggccaatagggtttcaaggttacccttttttgagagctgg

SEQ ID NO: 898 - DNA, 426 bp, Homo sapien
  misc_feature (1)...(426): n = A,T,C or G
gtgaatgtgcccatgaaggtcagcagcccagtgactgccagcaccctgccactgccaccactggtgcaagtgtaagcatggacactggcaaccctgctcccacctgcaccctgccacaggtacaagtgcacacaggaatgcagcagctcgacttctgctggtaccccaaccccaccaaggcataagcaccctgcgggcgctgccacaggtgccaggaacacgtgantaggcacagatcctgcttgccaccgccccaaagaagcattttgttttgggcaccacccttcaggagggttgttggctaatnggaccaggggnacaattttgggacctttttgttggcaggcaggtttcccattttttaagggggggccagattaaccaaagttnggggttcncggggttacccaattttccccaggtttt

SEQ ID NO: 899 - DNA, 516 bp, Homo sapien
  misc_feature (1)...(516): n = A,T,C or G
tagggcgtaacattactcagcaataaactgntattccgtnagcgnggaatactctgatnnttagacgcaggaagcagtccggnttgcggccatttcagggtggttcgggctgtccggtagaaactcgctttccagagccagcccttgccagtcgggtaaggttcggttccccgcgacggtgtgccgccgaggaagttgccggagtagaattgcagancggagcgntggtgtagaccttcagctgcaatttttcatctgctgaccagacatgcgccgccactttcttgccatcgcctttggctgtaacaagaatgcgtgatcgtaacctttcactttgcgctgatcgtcgtcggcaagaaactcactggcgatgattttggcgctgcggaaatcaaaagacgttccggcgacagatttcaggccgtcgtgcggaatgccgcctttcatcaaccggcagatattcgtccgccagaatctgcaacttgtgattgcgcacgtcagacttctcgccgtcaa

SEQ ID NO: 900 - DNA, 369 bp, Homo sapien
  misc_feature (1)...(369): n = A,T,C or G
aaatggaatggaatggaatggaatcaatcattccgagtggaatggaagggaatgtaatggagttgaaagaagggaatggaatcaacccgagtggaatgcaaggcaatggactggaatggaaaggaatggaatggaatcaactcgattgcaatggaatggaatggaatggaatggaatggaatggaattaatcggaatagaatggaatggaatggaatgaaatggaagggaatggaatcaacacgagtgcaggggaatggaatgggaatggaatgcaatggnaatgggaataatccggaatggaatgggaatgggaatnggaatcaactccattgcaatgggaatgggaatnggaattggaattgganta

SEQ ID NO: 901 - DNA, 427 bp, Homo sapien
  misc_feature (1)...(427): n = A,T,C or G
gttccattccctttcattccactcggggtgattccattcctttccattccacttgaatacattcccttctattcaactcggaatgattccattccattccattccattccattccattccattccattccattccattccattccatttcgttccattccattctattccctaccattccattccattccattccattgcattccattccattccatgccattccactcgggttgattccattcctttccactccattcgggttgaatccattccattccattccatttcattcgattccattcaattggactcgggttgattccattccattccattccatttcattccattccatnccattccattccactccattccattcagtgtgattccattccattccattccattccactctgtttgat

SEQ ID NO: 902 - DNA, 421 bp, Homo sapien
ttctcctttcccagacctcaaaagcactccttttccccctctcccaccactaaacttgtggcaaagtctcttcaacaagctcagactcacacaaggctggacgaagggtggtcttcaaccagtttcttgaagcaaggacatgtgaagagtacagctttctgctcagaatgggcatggggaggagatagaaaaaagagaacaaaacactaataaactagcctgtctcattagtatcacgggaaactacaagccattagcagtgtcattattgtcatgttctcaaatatttttgtctggcgaacacttccatgcctattaaggatcctgtatcagatcattcgggagctgtcagtgtgtttgcaactctgtcagaaaaggatttgaggagtaatttcaaccgggaggaatgaggaggtaattc

SEQ ID NO: 903 - DNA, 285 bp, Homo sapien
atcagcggtaaaggttgacttaaatcgaccagtaacaggtggccttttgaagaggatcagaaatgggaagaaggcgaagtcatgagcgccgggatttaccccctaacctttatataagaaacaatggatattactgctacagggacccaaggacgggtaaagagtttggattaggcagagacaggcgaatcgaatcactgaagctatacaggccaacattgagttattttcaggacacaaacacaagcctctgacagcgagaatcaacagtgataattccgttac

SEQ ID NO: 904 - DNA, 503 bp, Homo sapien
  misc_feature (1)...(503): n = A,T,C or G
gacagatgtttaagttttctaattctgtggactattacccagcacctcagcctggttgttgagttagcatcctctgagacactctctctgtgtcctaaagccctgtgagtgtgcactcagtccgggctccttgctactgctcctcaccctggtgctcctgacttctaaaagtcttgagggaagaactgagagtaaatttgggatagtagaaaataaatgcaggttcttgagtagaaatcattgtgagggagcagtgtattgtagaatgttatgacaatcaatttatcaataaataagtaatagggtgttggcactgtgcaaatgtaactctcagagtagcagggaaaagagaaaacagtaacagatctgcagacccctgtaggttatagttgcaacccagagacagaggtccccttgatatggctcctaggngacaaatttatttaaatggggaaatgggggaatctgttgagaggggtaggggtggggtatattggcncttt

SEQ ID NO: 905 - DNA, 388 bp, Homo sapien
  misc_feature (1)...(388): n = A,T,C or G
actggtcttgaactcctgacctcaggtganccgcccaccttggcctcccaaagtgctgggattacaggcgtgcaccnacacccagactcaaacttctaagggaatgttatcattgccctcatgcccacctccctccatccccacacctgcacaccagcagtctaggttttttttcttttttcttttctttctttctttttttttttttttaaggcacagtctccctctgtccccaggntgaagtgcagtggcatgcaatcttggctcactgcaacctctgtctcccgggttcaagctatcctcctgcctgagtagggggactacaggngcgcaccaccacgcccagtgtattttnagnagagaagcggtttcaccatgtnggccaggg

SEQ ID NO: 906 - DNA, 366 bp, Homo sapien
  misc_feature (1)...(366): n = A,T,C or G
gaataatataacagttttattataaatcaaaacaccaaacttttgcaaactttacataaacgtgtagccatatgactgtataacaagagcccaagagcaaccattgtctaacaggtagaaatgcagacagtttcatgttaagcctttagantttcctttcacggcaggtttccaaaataaactaacttttctaacatttattctcacaaaantatatttcaagttaggattaaacaactcattggcttcagacatttanttgtatgtatttaacccatactcaggataattgtcatatttaggcccaaagggagggctttttctgtgnccctatttccnaaattctccggattctggggnaccatc

SEQ ID NO: 907 - DNA, 399 bp, Homo sapien
  misc_feature (1)...(399): n = A,T,C or G
tttttttttnttttttttttttatgagagggantttggctcttntcgcccaggntggagtgcgatggcgaattctcggctcaccgnaccctccgcctctcgggttcaagcgattctcctgcctcagcctccccaatagctgggattacaggtacctntcaccacgcccggctaattctgtatttttttttagtagagacggggtttctccacgttggtcaggctggtctcaaactcccgacctcaggngaaatccgcccgtntcagcctccaaaagtnttggggattacaggcgtangaacccacgcccagtgaccgggaccttaaaagaagaatccataagattcctggggaattcctatcatgtatatttctttttttttgtttttaagacggagtt

SEQ ID NO: 908 - DNA, 374 bp, Homo sapien
  misc_feature (1)...(374): n = A,T,C or G
aatccggggctaggctgggcatggtggctcacgttggtatcccagcactttgggaggccgaggcaggaggattgcttgagctcaagagttcaagacccgtctgggcaagatggcaaaactccatcaccacaaaagatgcaaaaagatgcgcacagtggcnacaacctatagccccagttactgaggaggttaatgtgggaggatcacatgaggctgcagtgagctgtgatgggtgccactgtactccagccttggngaacagtgagtctatgtctcaaataaataaggtaaacaaaaattaaaaaggaatccagtccacaggggcattttgaagggcaagagggaaaaggatgccaggaatcaggagnatgggg

SEQ ID NO: 909 - DNA, 409 bp, Homo sapien
  misc_feature (1)...(409): n = A,T,C or G
atgggttaccatttgggacttgcgatatcaataattatatttacaaaacagaagtggtgaggttagtactaactcaaaccagcttttgtttcttcaggcatttgaaatgtcttttgccccagtcgtggtggctcactccagcaatcccagcactttgggagactgaggtgggtggatccattgagcccaggagtttgagaccagcctggggcaacatggcaaaaaacacaaaaatcacaaaaattggccgggcgtgggtgggcgcacncttgttaggtcccagctactctgaaggctgaggtggggagcattgtttgagcctgggggagacagaggttgtaggtgaacccaagattgtgtcacttgcactccagcctagggcaacaaggaacaaaacttgtcttcaaaa

SEQ ID NO: 910 - DNA, 305 bp, Homo sapien
  misc_feature (1)...(305): n = A,T,C or G
ttttttttnaaattttttttttcatttggcaaaagntttagttnttgattatataaaaatgcccaacangggtcacattgcaaaagtaaaaccccaaagtntaacantgaaaacacaaacntttntacaganggtntacagggttttcgtttcccnaaagtntgangacnttttntttctttttcaantacttaantnttttatgaantctggcantgancttangactgtngacatacttccnctgggaantcatccntttcacttntttttaaangttncattttatacccggggttaaatgt

SEQ ID NO: 911 - DNA, 548 bp, Homo sapien
  misc_feature (1)...(548): n = A,T,C or G
ngagctaaggaaagatggagccaactccaacgagggcctctttttctctcttgtctagcctgtttctaaaccgaatgatccaggattcaagcttctattgtcaagtgaaactttcctcagatggactccaggtagccaggtcacctaaacctagtggtcctgtgcgatgctctttctgccagtccctgaatctctgcagcttctcttacctgtcttacctgtagtaaagcacaattgcagtggcgtcgcattcagaagaaggggaaggtcagcagaggctatgcatgttgtgtgatgatgagtgtttacagccaccttctcctaaaacggaaatttataccggggtgggataggtattcccattagggtaggactttatccggacttttggctaaggtggcttttttaggacaggctttaaaaaatttttcaaggatttttaaaaggtggtataagggttaaggttttgccaaatatanggggaaatgctggtatatccttttngaggtggaggaaatcccggtnggggattttaaaggnaaatatgt

SEQ ID NO: 912 - DNA, 486 bp, Homo sapien
  misc_feature (1)...(486): n = A,T,C or G
caacacggtctcattttggcgcccaagcacaaatcgtgcagtgcagtctcaaagttgaaagcttgagcctgttcttgcagcgcgctattagcgttttaccttgttgtgctgctatttgaagtgctttaacaatatcaaatgcttttaagaatgcttcttgaccattcctacgaacctcataggataccgaaaagaaaccacctgaaccgccgccctctgaacctgtgacaattctcttacctactgtccaaccatcttcaagntcaagaccttccaggcggataggggncgttcgggttgatcgttcatggggtaccccctagggaattggatcttttacggnggaggcattattacccaaccatggcgggaaatggggcgttaatggacaccatggcttcttttttattccttaacttatttncatcttnggacttggttccggtnaaatctttncattaaccttctgggaaaatcttatgggtt

SEQ ID NO: 913 - DNA, 242 bp, Homo sapien
  misc_feature (1)...(242): n = A,T,C or G
tccattccattccattccattctattcgggttaattccattccattccattcgattgccatcgagttgattccattccattccattccattccattccattccattcctttccattccattacggatgactccattccattgcattccattccattccattcccctgtactcgggttgattccattccattccattccactccattcggttccgttgcattncattctattngcattncatt

SEQ ID NO: 914 - DNA, 389 bp, Homo sapien
  misc_feature (1)...(389): n = A,T,C or G
atggaatcanctcgagtggagtggaatggaatggaatggtttggaatggaatgcagtggaattgaacagaatcattccgactggaatggaagggaatgtaatccagtggaatggaaaggaatggaatccacccgagtggaatggaagggaatggaattgaattgaaaggaagggaatggaatcaacccgagtggagtggaatggaatgggaatgggaatgggaatgggaatgggaatnggaatnggaatcatcccgagttgcaatgggatgggattgggattnggattggattggattggacttggattgtaccccgattggattnggattnggattggattcttattngccttnggattnggatttnaaacgggatttaaattnggat

SEQ ID NO: 915 - DNA, 355 bp, Homo sapien
  misc_feature (1)...(355): n = A,T,C or G
gacttttcacatgtagaagaattacttctcattcttcctgttgaaattactctcaaatcttttctgacagagttgcaaacacactgacagctcccgaatgatctgatacaggatccttaataggcatggaagtgttcgccagacaaaaatatttgaggaacatgacaataatgacactgctaatggcttgtagtttcccgtgatactaatgaggacaggctagtttattaggtgttttgttctcttttttctatctcctccccatgcccttctggggcagaaggtgttactctttcacagtccttgcttcagggaaacngggttgaggggccaccnttggtcccggcntgtgtgg

SEQ ID NO: 916 - DNA, 351 bp, Homo sapien
  misc_feature (1)...(351): n = A,T,C or G
acttgggcctcaacaggcagcgagggaggacttctctcagcgtgagagaggccagtgtgaggcagggctagcntgacctccctcagcgtgagagaggccagtgtgaggcagggctagcntgacctccctcagcgtgagagaggccagtgtgaggcaggggcccacgctgacctccctcagcatgagagaggccagtgtgaggcaggggctcacgctgacctccctcagcgtgagagaggccagtgtgaggcaggggcttcacggctttgggaaagggtgccagaggttgnagtttngggccttnaacagggcnaccgttgacgggagggagtttgggcccgcacacaggat

SEQ ID NO: 917 - DNA, 331 bp, Homo sapien
  misc_feature (1)...(331): n = A,T,C or G
caagccatgaatgtaaccgtaacggaattatcactgttgattctcgctgtcagaggcttgtgtttgtgtcctgaaaataactcaatgttggcctgtatagcttcagtgattgcgattcgcctgtctctgcctaatccaaactctttacccgtccttgggtccctgtagcagtaatatccattgtttcttatataaaggttagggggtaaatcccggcgctcatgacttcgccttcttcccatttctggatcctctttcaaaagggncacctgtttantgggtcggntttaaggtccaaccttttaccggttggnttcgtgggggancagga

SEQ ID NO: 918 - DNA, 358 bp, Homo sapien
  misc_feature (1)...(358): n = A,T,C or G
aactctgcgttcacaaggaggccctgtgttttcactggaagaaaaaaaaaaaaaggtggcatacaggggtgccttcccaaagtgccaatataccccacccctaccctctcaacagattccccatttcccattttaaataaattttgtctcctaggagccatatcaaggggacctctgtctctgggttgcaactataactacaggggtctgcagatctgttactgttttctcttttccctgcttactctgaggagttacatttggcacagtgccaacaccctatttatttattttatttgataaattggttgtccattaacnttcttacattacanggttcccttnacatggatttctt

SEQ ID NO: 919 - DNA, 377 bp, Homo sapien
  misc_feature (1)...(377): n = A,T,C or G
gtgacaaatttctccagtgcacccatgcactgtcnttgcctctgagaatccctttccacctccactttcctgtctcactccgattcattcttcaggcctctgcttaaattcacttccaccaggaagcttcccctgtgtgagctgctcccttggttgggttgggaacaccagctctgtgttcccatctcctagtatgcattgcatgggtgctttcccattccccatggcactgactacaggggacaaggcctgggagctcgctctcctgggggtatcttcagtgtctagtagggagctgggcacagagcaggtacttcgtnaaggatttgctggaatgaatgagtgttgccgggagaaaagttgggccagggggtttt

SEQ ID NO: 920 - DNA, 291 bp, Homo sapien
  misc_feature (1)...(291): n = A,T,C or G
ttacagcctggccactctagacatatgaatccaggctgactgcttaagtgcccatctcgtttgatataaactgtagaaaaggcaagcactttgttctgagtcttttatctccaaatacatagttgtctcaaaccaagcaagctttatcaaaatggcttatttgcagaatagttccaatgatataaatgccaactggcaagtcattccaaactgcttgaaggagtaggatgaaccaggaatcttgaggaatttgggaaatagggtcacaggnaaaagcctccatttgggctt

SEQ ID NO: 921 - DNA, 553 bp, Homo sapien
  misc_feature (1)...(553): n = A,T,C or G
naaatatacancttaatangatcatcgtggctcttcnncnagtttaaantatnttgagaggtagannnaaggatggancatnagagatcacnaaggaaattacaatagtccaagtaaaagcctgatgtntttggtcagatggaagcagtggagacggaaatacatgggataaattagagatgtatgtgtgagaggctgggnttacacctgtaatcccagcactttggggaggcccagggggntgggtcattgaggtcaggagttcttagaccagcctgggccaagatgggtgaanccttgtcttttacttaaatttagcccgggtattggttggcccttccttntaggcttgtttggnccttgactttttccnccaaaattttaggcccggttttttttgggccnagcctgttngtttccccngtttnnttnagggngggtttngggtttgggaggttntngtttttnaaccnngggggagtttgggaggtttnccgtttnggccnnanttttgncnccctttnnntttccngcntggggttnnccgngtttc

SEQ ID NO: 922 - DNA, 389 bp, Homo sapien
  misc_feature (1)...(389): n = A,T,C or G
ccaaattcacacaattagtaaggggtggggaggcatgacgaacacaggtggtcacaacgttaaaccgtttcctagaagctccaattattccccgataaccctgagagccctaacatttcatttccattcagaccagcctcagtctctctgcccatcctctctccaccccacactcagcctatctgtctcatttctcaacctcagcaggcgccagaagcccatcttctccccatctctggattctgggcatcttttcctcttgccttcaaatgccctgtgggactgggttcttttttaatttttgttttacttatttatttggaggacatggattcatgttggccagggtgggngttacagtgggcaccttcacggttnattggcggctt

SEQ ID NO: 923 - DNA, 133 bp, Homo sapien
tcagtcatttctcgcacattgcagaatggggatttgtcttcattagacttataaaccttcatggaatatttgtatgccgactctatatctataccttcatctacataaacaccttcgtgatgtctgcatggag

SEQ ID NO: 924 - DNA, 344 bp, Homo sapien
  misc_feature (1)...(344): n = A,T,C or G
ttttttgagacagttttgttcttgttgcctaggctggagtgcagtgacacaatcttggttcactacaacctctgtctcccaggntcaaacaatgctcccacctcagccttcagagtagctgggactacaggcgtgcgcaccacgccggccaatttttgtgatttttgtgttttttgccatgttgcccaggctggtctcaaactcctggggctcaatggatccacccacctcagtntcccaaagtgctggggattgctgggagtgagccaccacggantggggggcaaaagacattttcaaatgcctggaaggaaacaaaagctggttttgagttaggtacttaa

SEQ ID NO: 925 - DNA, 243 bp, Homo sapien
  misc_feature (1)...(243): n = A,T,C or G
atagatctattactacctttaccgactttaccccctttctttaatnngtataatttttgtactatatatcgatgtgtaaatgtttagagtcttcattatgaaaatatcaataaatatttcattagtttacatttaactctggtataaaatgaaacttttaaaaataagtgaaatgggatgatttcccagtgggaagtatgtcaacagtcttanggtcattgccagatttcataaaatatttaa

SEQ ID NO: 926 - DNA, 415 bp, Homo sapien
  misc_feature (1)...(415): n = A,T,C or G
gtcgaggacggcactccactacatccatgatgggatcggagccatggtgaggaaggtgctggaactcactggaaagtgacgcgcatggacggggcccagctaggcgccaggacttggcctcaccctctggctgaggagctgtcggctgctttccatccagctgggagtctggcaggcccttttttttttttttctttgccgaaacctgcaggcgttctctctctaaggaggatgtgctgcagtgcatggggggatgtttcttcctggggtgtggctgggctgctctcacatacagaggccgaggggcaaatttcgttcttttgccacaggggacttgcctcactgtggtcccaaaaacaaatcgnagccagctttttncagaantaggaaantctggccgtcttgaggttttata

SEQ ID NO: 927 - DNA, 163 bp, Homo sapien
  misc_feature (1)...(163): n = A,T,C or G
atccatccacccacccatccatccactcatccatccatccacttatccacccacccgtccatctgcttatccatccatccatccatccacccgtccattnatccatccactgacccatgcattcactcatntatccatccattcacccatctatccatccacc

SEQ ID NO: 928 - DNA, 381 bp, Homo sapien
  misc_feature (1)...(381): n = A,T,C or G
gcatgatatgttcacggcatacatggagtaacagaccccaggaaggaaattgcaatgccagtggacacccacccaatccgcattctctcgcaacgccttagcattgcgcccttctgcgagcaggacgctgttgagtctttctcttgtatctcaccgtctctgactcgctacatgtcctggggagccgnctgnctcactnggaagagtaangcgcaagtctgggggccggtggcttgcctgcgatagggattggggagcgacatcgtgtttcaagggtcagaggagttnggtcggttgttcgtttttatttggttttggttnggggtttnaaccataacnggcagtngaaangggangttttggggcnttttgggnttcgtt

SEQ ID NO: 929 - DNA, 430 bp, Homo sapien
  misc_feature (1)...(430): n = A,T,C or G
aatcaatcnaattagacagatgtttaagttttctaattctgtggactattacccagcacctcagcctggttgttgagttagcatcctctgagacactctctctgtgtcctaaagccctgtgagtgtgcactcagtccgggctccttgctactgctcctcaccctggtgctcctgacttctaaaagtcttgagggaagaactgagagtaaatttgggatagtagaaaataaatgcaggttcttgagtagaaatcattgtgagggagcagtgtattgtagaatgttatgacaatcaatttatcaataaataagtaataggggtgttggcactgtgcaaatgtaactctcagagtagcaggggaaaagnggaaaaccaggtaaccagttcctnccaggccccctgtaggtttataggtttgccaccccngggg

SEQ ID NO: 930 - DNA, 392 bp, Homo sapien
cctttcacctttggacaggtcatttcataaccttgagccacagttacttatttttaaggtgagcctctggttttgtattgctgtatagcaagccatgtcatacttggtagtataaaccatcaacactcatttattattataatctcatctggttctgggctcagctgggcggttcttaggcaggacctctcatggagttgcagttagttggtggctgggctggagtcacccggagcttccacactcatgtaactggtgcttgctgctggctgttggctggggatttcagaagggactgtcagcaggggacatctacttgcagcctcctcgtgttgcccttgggttcttcacagcataatctctggggtcatctattgttaaacacactcact

SEQ ID NO: 931 - DNA, 324 bp, Homo sapien
gtagagatggggtttcgctatgtggcacaggctggtcttgaactcctggcctcaagtgatcctgcctccttggcctcccagagctgtgggattacaggcttgagtcatcgtgcccagcctgattcgtatttttaaatgaaccctactgctgccatgttggagttagttgaaggagtgtgggattgtattgtatcagcttggctaaaccgaaattttttgttttgttttgttttgttttgtgttttttttttttgagatgggagtcttgctctgtcaccagggtgggaatgcagtgggtgtgatctcgggctcactgcaaccctc

SEQ ID NO: 932 - DNA, 428 bp, Homo sapien
  misc_feature (1)...(428): n = A,T,C or G
ttntttttttanncagggtctcactctctcacccagactggagtgcagtggncaatctcggctcactacaacctctgactcctggnttcaagcaattctcttgccttagcctcctgagtagctgggattacaggcacttgccaccacgcctggntaatctttgtanttttagtagagatggggtttcaccatgttggacaggctggtcttgaacttctgacctcaagtgatccacccacctcagcctcccaaagtgctggggattacggtgcatgagccaccatgcctggggctcattgctgtttttatactttctctatanccataactgtttcccatgtaagtntttgttttttngcaatttctcatttttattacttctgcatcatctgntaccctgaagggatctgggaaggnaaggagggcct

SEQ ID NO: 933 - DNA, 525 bp, Homo sapien
  misc_feature (1)...(525): n = A,T,C or G
gcgcggacgaccggcgaacncnccacnnttnaccagggccgcgagctgcgagggtgcagtctccgcccgcggtccctaacgcgcacggcgcgccctctacagggttgaagatccctcgggaatcttggaaactcgggttctaaaagtagatgtataatatcgacccacagtgtggcnccttgagcagatgtcttcatcattcaagctagaatcctcatgtctgtaaaataagggaggtgggagtaaggcagtcgtcaaaaattactaaccgcgcaaactttatgtccttggtaagctttcatctagttattcatatcaatcaccaacaagaaggagtcttcttttgcaacctgtttttgggaaattatcatacattaaataggaaaccatgtttttgggaaagtatcgtaaagganaaagtgattaggaaacctnctactcccaaaatcccggggcggggaaatgccggttngggttactnagtgtttgaggaacgcttaaagctaaggntcctggggtttatcn

SEQ ID NO: 934 - DNA, 459 bp, Homo sapien
  misc_feature (1)...(459): n = A,T,C or G
caccaattgttcttgtggaagactgaaatgcccgtgaatcaatgtgagcgcagaggctttggagtgagaagtgttctgtttagcgatgtaaattgggtgaatcttttagcagatttatggctctgcagcttgttttcctgagaaattcttcctcactcactgtactttagcttgccagatactatgtattcttgacgtgttatgtgtgttatttctccagcagttgggatggagagaggagcttgggatagagaggcatgtgggagggaacacctgcccctgcattgttgcccctaaatttcatgcatgagggagaagctngggcaaaggggacttggacttgggctttgggggtgttgcagctaggaacttgaacttgggggccaaaattaattttagggtttaggggttaagggttgagacttctaccctaggtgctctttcacaacttaaaacccc

SEQ ID NO: 935 - DNA, 144 bp, Homo sapien
  misc_feature (1)...(144): n = A,T,C or G
gcagtatcatnataaggcaatgctgctgtctattcattcattcattcatctagtcaacaacccagggtagtttgattcaacatcaaaatnatcactaaantaatcttctgggataagtgacctctctctctctctctctntctn

SEQ ID NO: 936 - DNA, 474 bp, Homo sapien
  misc_feature (1)...(474): n = A,T,C or G
ttttttttttttatagagacggggtctcgttatgttggctaggctactctcaaactcctggctcaagcaatctccctgcctcagcctcccaatgtgctgggattgcaggcatgagcattgcacccggccccgtgctttttctggagcactattttgttttgtttatttaatgcagttcaaccccttctccatcagcctgcaccagtaaccccagaatctagccatgcagtcctctgaattcattaagagctgttaatcactggctgggaaagaggggaagtgaggacactatgggggcggccagtgttcatgagggcatttctatttcaacagtctctgccattaggagtctcccggggnaagcttgcttgaaggtaaagccagtttttttttntttttttaaaggcattgccacattatcngggggggcttccccggnaaacaaggcatcccctggattaaaaggttnaaggc

SEQ ID NO: 937 - DNA, 225 bp, Homo sapien
ctaggtaatactgaggatttgcaacaaaggaatgatatcacctggcttacatgtttaacgaatcactcttttgagaatgagtgatgttagggaagtagaaacagggttaccagttaagagattatcacagtcattcaagccagagatgatggcagctagaaccagagtagcaagagaggaggtgataagaagtagtcagatgcttggcttatttttgaaggatac

SEQ ID NO: 938 - DNA, 160 bp, Homo sapien
  misc_feature (1)...(160): n = A,T,C or G
cctgagttatatatacattagaattttttccttttattcttgttcacatcttcgaagctgagcttgtttcaaaaggaaggataccagaggcaggaggagggtcacttgggaggggaggtggaatctccctcctctagcccccttgctacctnttaacagg

SEQ ID NO: 939 - DNA, 374 bp, Homo sapien
  misc_feature (1)...(374): n = A,T,C or G
ttgctttttnnnntttctttttaatacaaacttggatctttgggtgtgtcctgccaacagaaaacaacaacaacaacaacagaagagaaaacccaaaagagtgaaaaataagaaagaaaaaaaaagctcccgcaagaggttcttctccctcccccccaccatgcgaatttgcacaccacgggaccacagcaggtttacagaatgcaatatacaatccacgatttataataaaacagtatatacaataaatagggatattgttcatttttgtcaaacgacctgtaggataaatttctcaggtggcatacttgcagggggctctgggacacctcgggggccccgctcgtgccganttcctggcagcccgggggatc

SEQ ID NO: 940 - DNA, 473 bp, Homo sapien
  misc_feature (1)...(473): n = A,T,C or G
agtagagatggggtttcaccacgttggctaggctggactcaaactcctgacctcaagtgatttgcccacctcagtcccccaaagtgctgagattacaggtgtgagccaccgtgcccggccttttttttttttttcttttaagatgagttcagccctggnaggaacatcgtcagtcctccctcaggtctgcagacaccttgggtctgtgggccctcttgccacagctcccaagtttctctgtcccagggatctgggctgcagggggtcttgaccggggccctgttccctctttccgtgggcctcgtctctgttggggggccaactgctctgggtatctgggggacttgcctcctctttctctctcaggtcttgttgggancttttctaggttgtcaatcaggcttgaggacatggattcacatancatcaaatttcaacctttttaaatgtacaggctagtggggttttaggag

SEQ ID NO: 941 - DNA, 419 bp, Homo sapien
  misc_feature (1)...(419): n = A,T,C or G
agtccacggatgaggatctctgtggcacatctccctccatggggtttcctgtcaccaacacccagcacacctgggaaagaacagtccacatcttttgaagggcctgggaggtggttcaaataagggttactgttgccttgctgaggtggactagaaatagaacacaagccgcctgactgttgcttttgctttcacagatagctcgctgttgtttttgcttcagtcctgggtgggagagggtaagcagancctttttattcttttgcacctgtgtnggcacttgcagacctattaactcttaatctgtaggtcattttgggatttcaggacacaaattactttgattagtaagggnggaagttttattcttaaagctgcccttccttccttaataccnctttttcacatccttccctnaa

SEQ ID NO: 942 - DNA, 361 bp, Homo sapien
aactctgcttcacaaggaggccctgtgttttcactggaagaaaaaaaaaaaaaggtggcatacaggggtgccttcccaaagtgccaatataccccacccctaccctctcaacagattccccatttcccattttaaataaattttgtctcctaggagccatatcaaggggacctctgtctctgggttgcaactataactacaggggtctgcagatctgttactgttttctcttttccctgctactctgaggagttacatttgcacagtgccaacaccctattacttatttattgataaattgattgtcataacattcttacaatacactggttccctcacatggatttctacttcagggacc

SEQ ID NO: 943 - DNA, 441 bp, Homo sapien
  misc_feature (1)...(441): n = A,T,C or G
cattgtctntctagactctgcagccccgctcctgctacccgaaataattcccacctcccagggtagctataaagcttttgagacaccgtctgcagcgtggccccaaaatgcctggagtgtaagaactcagtgtgcagtaacttctttctttccctttctctgagcaaaaaagaaatcttaaaagaaagtgaaaatctgttgccttggagaagtttgagaaggaaccagaaagtgtgtggggaaggaattcgctcagcctggggctgccatgccggttctggtggggttccacttccgagcgtcccctgggcttgatggggggcattttaaccacctcctccagggtttttgtttcccccactttcacccacatgggaacagcagtttttcanaggcagacgggcttggtgagtttagcatctttncatgatgaacttttct

SEQ ID NO: 944 - DNA, 411 bp, Homo sapien
  misc_feature (1)...(411): n = A,T,C or G
aaccagggaggcggaggttgcagtgagccgagatcacaccactgcattccagcctggtgacagagcaagactccatctcaaaaaaaaaaaacacaaaacaaaacaaaacaaaacaaaaaatttcggtttagccaagctgatacaatacaatcccacactccttcaactaactccaacatggcagcagtagggttcatttaaaantacgaatcaggctgggcacgatgactcaagcctgtaatcccacagctctgggaggccaaggaggcaggttcactttnaggccagggggtttcaagaccagccttgtgccacattaggcggaaacccctttttttaccaaaaaattttttaaaaaantggccctnttttggtgggtgacntgttgcctttgtntttggaancttgggg

SEQ ID NO: 945 - DNA, 436 bp, Homo sapien
  misc_feature (1)...(436): n = A,T,C or G
agcgatacaagcggcatcggcagaagcagaagcacaaggataaatggaaacacccagagagggctgatgcaaggaccctgcgtcactgccccagtgcctggcgcnggctgtgtgcgcccccccagcccagctccaagtattnctcagatgactttggcatgaagctggcagccaaccgcatctacgagatcctcccccagcgcatccagcagtggcagcagagcccttgcattgctgaagagcacggcaagaagctgctcgaacgcattcgccgagagcagcagagtgcccgcatngcctttcagggaaatgggaacgccgattccattgagctttgaggccatcatttttacgttgccaagcaggcagggttttgcgcgaggatgagggagagcaacgagggttgacagttnattgacacagacttgcagttttt

SEQ ID NO: 946 - DNA, 212 bp, Homo sapien
  misc_feature (1)...(212): n = A,T,C or G
ttttcgccatgttgcccaggntggcctccaactcctgacctcaactgatccacctgccttggctccccaagtattagtattacaggtatgaaccaccatgctcggccatattcactatgttgaatttcagttatttatgttcctgagaaaaagaggcaagaagaaacaaaggatagatggtacagatagataacaaataacaagaccaanag

SEQ ID NO: 947 - DNA, 269 bp, Homo sapien
  misc_feature (1)...(269): n = A,T,C or G
caccttggcccaggctctttacctccagatccttcagggtaacagatgatgcagaagtaataaaaatgagaaattcaaaaaaacaaaaacttacatgggaaacagttatggatatagagaaagtataaaaacagcaatnagccaggcatggtggctcatgcacgtaatcccagcactttnggaggctnaggtnggtggatcacttgaggtcagaagttcaagaccagcctntccaacatcgtgaggnggatctcttctttttttacaaa

SEQ ID NO: 948 - DNA, 163 bp, Homo sapien
  misc_feature (1)...(163): n = A,T,C or G
agagagagagagagagagagagagagagagagagagagagaggtcacttatcccagaagattattttagtgataattttgatgttgaatcaaactaccctgggttattgactagatgaatgaatgactgaatagacagcaggcattgcttctncgatactgca

SEQ ID NO: 949 - DNA, 454 bp, Homo sapien
  misc_feature (1)...(454): n = A,T,C or G
aatgtcatcgacgtttttatccggaaactgctgtctggctttttttgatttcagaattagcctgacgggnaatgctgcgaagggcgttttcctgctgaggtgtcattgaacaagtcccatgtcggcaagcataagcacacagaatatgaagcccgctgccagaaaaatgcattccgtggttgtcatacctgggtgtctctcatctgcttctgctttcgccaccatcattttcancttttgtnaaagggatgcggcttaacgtatgaaattcttcgtctgtttctactggtattggcacaaacctgattccaatttgagcaaggctatgttgccatcttcgatactcgttcttaacttcaacagaagatgctttgtgcatacagcccctcgtttattatttatctcctcaggccagccgctgtgctttcagtgggtttcgggtaacagaaggccg

SEQ ID NO: 950 - DNA, 114 bp, Homo sapien
tttaaacagcctaataatggtttggcaacttgcttttctctttcaagtctttaatcttttattcagaggatgctttgttttctgggaagcaccaggataatgtggcaatgcttt

SEQ ID NO: 951 - DNA, 136 bp, Homo sapien
  misc_feature (1)...(136): n = A,T,C or G
ccatctcatccccaaaagacaaaaactaaataaacaaaacaaaaacaaaaccatactactattattatgaggcctgagataatttttaaggntgcctgaaacaacataaaacctcccctcatngggcaggngcggt

SEQ ID NO: 952 - DNA, 442 bp, Homo sapien
  misc_feature (1)...(442): n = A,T,C or G
ctantctttcaaaataagccaagcatctgactacttcttatcacctcctctcttgctactctggttctagctgccatcatctctggcttgaatgactgtgataatctcttaactggtaaccctgtttctacttccctaacatcactcattctcaaaagagtgattcgttaaacatgtaagccagggtgatatcattcctttgttgcaaatcctcagtattacctagaataaaagccaaagtccttacagtgatttaggaaagctctgccccagtctctggaccctctcccnggggactcaggctncttcttgcccggggggggcccggttancccaatttcggccntataggtgaggtcgtantttacaatttcattgggccgttcgttttttaacaacgtcgtggatcgggggnaaaactgggggggnttaacccaatntt

SEQ ID NO: 953 - DNA, 185 bp, Homo sapien
  misc_feature (1)...(185): n = A,T,C or G
ctgtattctgactttgaagcctgttaagaggtagcaagggggctagaggagggagattccacctcccctcccaagtgaccctcctcctgcctctggtatccttccttttgaaacgaagctcagcttganagatgtgaacaagaataaaaggaaaaaattctaatgtatatataactcaggctgga

SEQ ID NO: 954 - DNA, 335 bp, Homo sapien
  misc_feature (1)...(335): n = A,T,C or G
ggggccccgaggtgtccagagcccctgcaagtatgcactgagaaatttatctacaggtcgtttgacaaaaatgaacaatatcctatttattgtatatactgttttattataaatcgtggattgtatattgcattctgtaaacctgctgtggtcccgtggtgtgcaaattcgcatggtgggggggagggagaagaacctcttgcgggacttntttttttctttcttatttttcactcttttggggttttctcttctggttgttgttgttgttgttttctgttggcaggacacacccaaagatccaagtttgtattaaaaaaggaatgaaaaaaagg

SEQ ID NO: 955 - DNA, 366 bp, Homo sapien
  misc_feature (1)...(366): n = A,T,C or G
ttcaggctggcctcgaactcctgggttcaagataccctctggcctcagcctcctgagtagctgggactataggcgagcaccgctgtacttggcttatgtacaagatgttgtgtgaccgtgtctcaaagatacaaaaaaaacaaagcaaaacttacatacaaatgtttattacagcattcttcataatagccaaaaagtgaaaacaacccaaatgcccatcaacaacagataaaatggggtctctccatacaatggaatattatttaaacataaaaagggattgaaatggtgatatgtgctacaccgcataggtgganccttggaaaacancctgcttagttgnaaggncggccggttccgggggcc

SEQ ID NO: 956 - DNA, 297 bp, Homo sapien
  misc_feature (1)...(297): n = A,T,C or G
agaataccaacacaaacaaaactcagctatccttcaggaagaatgtgaaaagtgtataagtagtaagtcagctttagaataaaactttctccttactattcaagttatttgtgtctgaatcccaaatgactacagattagagttataggtctgcagtgccacacaggtgcaaagaataaaagcgctctgcttaccctctccaccagggncttgaagcaaaaacaacagcgagctttttgtggaaaggcaaaagcaacagttcagggcgggtttgttgtttcttttttcttagttccc

SEQ ID NO: 957 - DNA, 321 bp, Homo sapien
  misc_feature (1)...(321): n = A,T,C or G
ggtgggaagggcttgtggagagtgcaggaagctgagggggccggccaggataggaagtccctggggaggaagacatgggaagagagaagtgcagtgtgggaaagcccagaggctgtnggccacagggtgagacaggagcaagcctgcatgcaganaggcaacgaggccggctgtgatgggagggggattagaaccccaacttgaggagggtcctgggagcaccagtgctttgccagccagagaggatggcaggaggcaacagttggaccccacaggttttgnagtttccaattgggattctttttcagcaacccagcaaag

SEQ ID NO: 958 - DNA, 316 bp, Homo sapien
acattccattccattcgggtagtttctattccattccattccagtcctctccattccgttgaactcgggttgattccattccatgcattccattccattccattcaattccattccgttccattccattccattacattcggattgattctattcaactcccttactctccattacattccattccattcgggttgttccattccattccattccattccactccattccattgcactcggggttgattccattccattccattccattccattccattgcattccgggaaggattccattccattgcattccatt

SEQ ID NO: 959 - DNA, 196 bp, Homo sapien
acatgccgagggccaggcttaaatgagtcggtgtgaatcccatcagcgttaccgtttcgcggtgcttcttcagtacgctacggcaaatgtcatcgacgtttttatccggaaactgctgtctggctttttttgatttcagaattagcctgacgggcaatgctgcgaagggcgttttcctgctgaggtgtcattgaac

SEQ ID NO: 960 - DNA, 420 bp, Homo sapien
  misc_feature (1)...(420): n = A,T,C or G
accagcttggncaacatggtaaaacccananctctactaaaaatacaaaaattagctgggtgtggtggtgggtgcctgtaatcccagttactcaggaggctgaggcacaagaattacttgaacctgggaggcggaggttgcagtgagctgagattgcaccactgcatttcagcctggggtgacacagtgagactctgtctttaaaaaaaaaaaaatggatatagccaaattgtcttccaaagtggctgtgcaanaatatacttctactttaacaatgcagtaatgtatccatttcccttacatccttgccaaaagttgatgtgatggggtgaagacttgtactttttatccatttatccatacttatttattttgtggttttccctggtttttacttaattaaaacatctttttaaacca

SEQ ID NO: 961 - DNA, 478 bp, Homo sapien
  misc_feature (1)...(478): n = A,T,C or G
ggcgtgcttggtcgtgttcaccangtgctccatcangtcaaggcctgaagcttggtgagggagtcgagcagctggaagtaactatacttgaggtcgtattccatgtcataccagaaattcactgtgggaagaacggggatctgagcatgaagatccctcttctgacctagagcctcccaagcctccccccagaggccctgctggaccttggcagggctcttccccagggtggcctggggcaactcttcacctgcgatgcagccctggggacttgctgggacgtggtgggaaccnaaggagccggcagatagagcatcttcacccggcccgcacccgttgcaagcgaaggggccttgggcttgacttgttaacttaggggtaccgttgcttagggtctttggccgccaaggggttccagttgggattccaggggcactggggggaacacattcagattnccaggggagcaagcccccca

SEQ ID NO: 962 - DNA, 353 bp, Homo sapien
  misc_feature (1)...(353): n = A,T,C or G
cctgttcccgggcagcactgaacatgggctccacngatgtccgtgtacatgcggcggagggcattataccctccaggantgctctcaaggttgctcagggcccggtcctggtnccgcatcacctnttgcatcatggctngattccgagcaagctccattctctgatcaagggagagagacaaaatgggccccggaaccaggggagcaccaacctaggaaaagggtgggccttgaggaaggggggtctgtatcaggatcaggaccagggcccaggganctgccccacagtgacagggagtagagtaaactngacttccttcctctactntaatcttggctccaagcccgcctcc

SEQ ID NO: 963 - DNA, 243 bp, Homo sapien
aatggggggaaagagacatgtaagactagtgagtctatctctgcatgcattcatgtgtatctagacaaatgtaaatgagtgtacacaaagacaaagatggcttaaaaaaaaggagtcagatgtggtagcaggaacctatcgtcccagctatttgggaggctgaagcatgaggatctcatggggcccagggaggtcaaggcttcagtgagctattaattgtgccattaccctccagcctggggg

SEQ ID NO: 964 - DNA, 248 bp, Homo sapien
  misc_feature (1)...(248): n = A,T,C or G
aaaaggagtggtgctggtccaccatgtcgtgngacactcagggcctcagcacactccacctcggggggttncacnaaanggttnccnggnaaaaaggnatcccggggtgccntttanagtccgtcacatcangaagccctcggatgagcatgctgacccccggcatcacctgggtcaaacttgatgcaggacctccacgcagtncattcatgaagagcttgtccttcttgcggataggggggccccgg

SEQ ID NO: 965 - DNA, 220 bp, Homo sapien
  misc_feature (1)...(220): n = A,T,C or G
tgccactgcactccagcctgggtaacagagtgagaccctgcctcttaaaaataaaaataaaaataaaaccaatcctaagtaatttaactgcatgccagaataaaatctaatgctctttaaagganttcaataaaatgcgacattcaataatgtaaaatttgcaacgtttagcatgccacaaaaaattacttgaaatgaatagggaggagggnaaatatga

SEQ ID NO: 966 - DNA, 219 bp, Homo sapien
tgtgctttttcttttcaaaaacacatttttctgtgtgtatctctgtatatgacccagggcagtaggaaaaagaaaacttggttcattcaacgtattgatattcactgaaaatttatcataaacctgggcactgttggggtaccgggaacttaagtagaaaaagacaaggtcatgggtgcttgagaagcccactgtgcagtagggggaggcaggagtttg

SEQ ID NO: 967 - DNA, 221 bp, Homo sapien
gtaaattatacatcaattttaaaattaagagattctattattttgtttaaaattgtattactgaacactgtttggaatatttccctactttctagggcatgtgaaacatttttaggaattcttgtattttataaatttatcaacttaggtttatcaaggtatggatggacaacattaatgcatcccagtttcccttagggattaaggcccttcccaaaaat

SEQ ID NO: 968 - DNA, 394 bp, Homo sapien
  misc_feature (1)...(394): n = A,T,C or G
tcttccctgcccttcccagggactaagaggctggtgtctggctggattccctggaggtctgggaatggggagggcagaggcaggaagctcagcagcccaggcatccccggagccggacactttgcataccctctccagccccggactccttgctggttgctgaaagattcccattggaactcagaccctgtggnccaactgttgcctcctgccatcctctctggctggcaagcacttggtgttccagggaccctccttcagttgggggttcttaattcccccttcccattcacaagccggccttcgtttgcctttcctngcattgcaggctttgcttcctgttttcaaccctgttgggccaaaagcccttttnggttttttcccaaaantgcat

SEQ ID NO: 969 - DNA, 304 bp, Homo sapien
  misc_feature (1)...(304): n = A,T,C or G
cagagcaggggaggcattaaaaaaaaaatgtaggtgccaggcnanttggctcacgcctgtaatcccagtactttgggaggccgaggcaggaggatcacgatgtcaggagtttgagaccagcctgaccaacgtggtgaaacccaaaaattagccgggtgtggtggcacatgcctgtaatcccagcttctcaggaggctgaggcaggagaatcgcttgaacccgggaggcggagggtgcagtgagcttgagatcgcaccacttgcacttccagcctggggttgacagagttgagattccatcttca

SEQ ID NO: 970 - DNA, 126 bp, Homo sapien
  misc_feature (1)...(126): n = A,T,C or G
gctcttaggtcctagccaggagagggagatacctccactgctggggctggagaaagcggaccttctggaactcatgccactctcagaggattttgtgttgatnagggctcngctacagcaagatgt

SEQ ID NO: 971 - DNA, 348 bp, Homo sapien
  misc_feature (1)...(348): n = A,T,C or G
aagaacttggctcactgcaacctccacctcccaggttcaagcaattcttctgcctcagcctcccgagtagctgggattacaggcatgcaccaccanggctngctaantttgtatttttagnagaganttggggcanancnnncttgnccnggntgnttttaannnccganntcaagggancccncngccntggnctnccaaantgctagggattacaggtgtgagccactgtgttggggccttaagcttttttgaatctctggggtttattagtttttttttgaatcaaattttgaggaaaaatttctcttccaacctggggcaacaggagttgaggantgttctcca

SEQ ID NO: 972 - DNA, 481 bp, Homo sapien
  misc_feature (1)...(481): n = A,T,C or G
ntggcatctgatgactttgacatagtgattgaggccatgctggaagtccctataaaaaagaagaggtaatattttccacctcactcctggaattgggttaatgagaaagagtagttgtcgatcatcactttcaactttcaacattttatgaatcctctttccctgcttatttattatgtagaataactaatcataaaaggcatagtcttagtaagctttgctggnagactatggttaagagccatacttttagagacaacctcagaaaccggagtgggcacataatgtggtgttggtaatctgtgctttgctccaaaactcgaagtgacacagtaggaaagtcacttgtacctcagacctagcaccaatttcttttttttttcttttgagacagagtctcggcttctgttgccgggtggagtgcagtggcnaatcttggctcactgcaacctccgctcctgggttcaagccttctcatgng

SEQ ID NO: 973 - DNA, 416 bp, Homo sapien
ctgactgcaacatagtgtgtcttgttgtctgtgtgacctgcatagaattactttcctttctcattgggctccagtctgaaacacccttgaattttagaaacattgtaaggttaccccttcctcttttttttgtttttgtgttttttgtttttagaggcaaggtcttgctctgtcacccaggctggagggtaatggcacaattatagctcactgaagccttgacctcctggggcccatgagatcctcatgcttcagcctcccaaatagctgggacgataggttcctgctaccacatctgactccttttttttaagccatctttgtctttgtgtacactcatttacatttgtctagatacacatgaatgcatgcaggagatagactcactagtcttacatgtctctttccccccatcc

SEQ ID NO: 974 - DNA, 204 bp, Homo sapien
  misc_feature (1)...(204): n = A,T,C or G
tccaggggggccccacangtaaaatattccaggcttttgggtctctctgaagccactttggaggctgcttaggaggcatatttgcttgaccaagcgatagaaatcctagagaaactcaggcctcagcaaagatttttcctcattcaccanaaaagcaacaacagtagcagcagcagcaaggctgtaaggnttttcctnctgatc

SEQ ID NO: 975 - DNA, 165 bp, Homo sapien
  misc_feature (1)...(165): n = A,T,C or G
aaccaattagagctaataagcaagttcatcaagatctcgggatacaagatcaataaacaaaatcaactgcatttctacaagcgagaaatgaacaatcgaaaaataaaattaagaaaacaattctacttanaacaacttcaaaataaaatacttaggggtnaattt

SEQ ID NO: 976 - DNA, 391 bp, Homo sapien
  misc_feature (1)...(391): n = A,T,C or G
agagagagagagactagttctctctccggagaactcactgaggatgaggtggaacgtgtgatcaccattatgcagaatccacgncagtacaagatccaanacncncccttttttttttaaaaaaanggtttttanangggggaaaaaaacccgggggcnnnnccangggtttnggaaaaaaaattccctnaagacttgggggcgcttttaggagatttnggggcccatagagggcttgcgtcactttcttggggcctttcgtgttccgaggccagcacaccaagaccacttggccgccgtggccgccaccgtggggtgttgttcccaaggaaggaattaagttttgttagggcnttgttttgtttaattaantagttttnttatttaccca

SEQ ID NO: 977 - DNA, 447 bp, Homo sapien
  misc_feature (1)...(447): n = A,T,C or G
gctaagcttggtgtgcagancccttgcccccagtcactggctccaactgccagtgtaatgtggaggtngtcagagcgctnacggtgatgttgcacagacagtggctgacagtgcggagggcagggggacccccaaggaccgaccagcagaggcggacagtgcgctgtctgcggggacacggtgctgctgctgcacggcctatcgcagaaggacaagctcttcatgatgcactgcgtgggaggtcctgcatcagttttgaccagggtgatgccgggggtcagcattgcttcatccgagggctttccttgatgttgacggattgtgaagaggcagccttgggntgacctcttttgccgcgggaaaccgntgttggaagaccccgaggttggattttngcttnaggccntgagtnttccagccacatngtcgaacccagcancattnttt

SEQ ID NO: 978 - DNA, 142 bp, Homo sapien
  misc_feature (1)...(142): n = A,T,C or G
agnaggaagatnccatnatngactataaccgnganatcnangagancatgaanganattcnnaatctngagggcatcaggaagancttnccatcttgctgcttnaacaacccttgcatttaaaagaccnngggtttttnggg

SEQ ID NO: 979 - DNA, 386 bp, Homo sapien
  misc_feature (1)...(386): n = A,T,C or G
tctcctttatcatgctactatttttctccaaattcctgagtgtatggancatactttaaatagcagtttcaatatttttgctactaattccatcatctctgtcatttctggatctaattctactgattgatacttttttctttttgctttttgtttgtttgtttttatcacctgacattgagtatgtactattgattgatttttctactgtttgcagatcatattttcctcctcctattcatttcaaggtaattttttgtgggcatgctaaaacggttggcaaattttacattattggaatgtcggcattttattggaaattccnttaaagggggcatagggatttattcngggcaggcaggttnaaatactgggggatggggttt

SEQ ID NO: 980 - DNA, 465 bp, Homo sapien
  misc_feature (1)...(465): n = A,T,C or G
tgtaactgcagagagagccacccaactcatattaggttgtgatgagactgagacatgaacttttcttgtattaggctactgagctctagaggttgcctatcagagcagctgaggttgcttaccccnatggggnatnagcacgagcccttantttnttnagggtaaaanaaatggccttnaatncanttgacgtttnggtgaaatattactgagctacaaggtaagagacttgaacttctagcctaacatccaaaaactattcaagctcttggttttcagcaagtcactttctccttctgggcccttcagtttcttgatttccagaagggaggggagtaggaactacacttgcccacccatccatccccacattgctcttgaggacatcccacattgttgaaggccaaggggggttcagggccacccgatggattccntccacctgttatttgaantgttgcctaa

SEQ ID NO: 981 - DNA, 162 bp, Homo sapien
  misc_feature (1)...(162): n = A,T,C or G
ttnnaatttgagagcaggaacngttaataaaccaaccagctaagaaaaanaatcangggagacaccnaagntcantcttcnaaaaagccnntgnacctgggccccccnntngccagnatntccaccttcnanaaaangggggggctntttcnnaattccacc

SEQ ID NO: 982 - DNA, 293 bp, Homo sapien
ggaggttgcagtgagctgagattgtaccactgcactcccacctggtgacagagcaagacgctgtctaaaaaaaaaaaaaattaacaccagcaaagggttggatcaccattgggcttattgctttattctggctttgatggtgcatgagctctctaatgggctgagtggtgggcaacatctgccttacacaatgtgcttagctgtctgtatagggtatgattggtgcctcagcttctcttttgcttcaaattttaccaaactaaagtcatccctttcagttataaagtatcctt

SEQ ID NO: 983 - DNA, 388 bp, Homo sapien
  misc_feature (1)...(388): n = A,T,C or G
gaagtaaaacatagcacatngcaggctccccgnagagagggntgaatcgggatgggagctgggaaatngggcacactgcgttatgcttgatgggncttncaggaaacagaggctgcaacattctagtttctgtacaaagccgggacgcacacattgtattccnttacttaacaaacacctgtctattgaggagttattcaatatagggtaccatcttcaaggtccacagttttacagttggatttccccccgaccttnnttttttagaaatggaacctcgctctgtcacccaggctgtagtgcagtggcatgatctcggctcactgcaacctncacctaccgggatcaagtgattctcctgcctcagcctcctgagtngctgggattg

SEQ ID NO: 984 - DNA, 146 bp, Homo sapien
  misc_feature (1)...(146): n = A,T,C or G
tgtggactattacccagcacctcagcctggntgttgangttagcatcctctgagacactctctctgtgtccnaaagccctgtgagtgtgcactcagtccgggctccttgctactgctcctnacccnggggctcctgacttctaaaa

SEQ ID NO: 985 - DNA, 116 bp, Homo sapien
  misc_feature (1)...(116): n = A,T,C or G
tgttaaaacgaacgagcaaaaatacaacaaaacctgattctaatactcattaccttggtgatctctgacaacttacttactgtatctaggctctactttatcatcctaaaaatnag

SEQ ID NO: 986 - DNA, 378 bp, Homo sapien
  misc_feature (1)...(378): n = A,T,C or G
accaccagnnttaaaacccattttactttcccctttttatatggagaaacatatttgagtcagggaaggctttcctctaaacatcagtcctacggagaaactgggaaaatcctgatatttggcttatcactttggacgcaaaatccactttgctgtaacgggcatccgaactcccntnagngagcaagnaagnnaaantaagggtnnatactgggggctatngatggnaaagntttcnaaaaagtattaagggaaaattactgcagtttacccaaaaatatgaggggtgggtcaacattttctgataggaatgggtaaactgtttttttcttttttttttttttttttttgaggacaaaggntcccctctgccgcccg

SEQ ID NO: 987 - DNA, 465 bp, Homo sapien
  misc_feature (1)...(465): n = A,T,C or G
ggnaggggagagttngncggngtngtgatnntgtaaaagactacagttgggtacactgtacactgctcaggtgatgggtgaaccaaaatctcagaaaccacaactaaataacttatttaggtaaccaaacaccacttgttcccccaaaacctatggagacaacaaaagagtatacttnaacacattaaaggncatatatgacaaacccctaggtaacatacctagggggaaagttgaaagctttttctctaagatcaggaataagtcaagggtatccacttttaccacttttattcaatatgggtattgggagatcttaggaacaattagggcaacaggaaaggaaatggaaaatgggccgggcgcggtggcctcacgcctgttaatccccagcactttggggaggccgaggttgggcagatcacgagggtcagggagatccgagaccatcctggggcttaacat

SEQ ID NO: 988 - DNA, 507 bp, Homo sapien
  misc_feature (1)...(507): n = A,T,C or G
agatcatagtcaatataaggattgtgggataagctggttgcttctgttgaccctaaaatgaatgttgactttgtcagtctaactcaaactaggatgcaaagtctgaaaacctctatgaggaagataaaactgaggatcaggcccacagtcggatttcaggggttgcagaattgcagcccaagttaaatgcttatcctcaccaggtctctgatgcttagataaaggaagtgatggagacacactgaaaccctgaaattgggtagaggacacttgaagctgaggaaactgaaccctcaaataacgtaaaactcccttactgggtaggaagcattctggcccctctctgtctgagggaaacctggaatttacttaccctggaaatcatcttttaaattacttgtacttacagttgcctttataggaggggattcttcccccataacctacccctggacaaatcgtcatttttcttccaggcttcatggggttaatgcccagcctatttnc

SEQ ID NO: 989 - DNA, 499 bp, Homo sapien
  misc_feature (1)...(499): n = A,T,C or G
gatttgaatagtttttgagtactataatttaaaacatactaagatatgttacctccccttctggagattttcaaatagaaagtagatcgttgcgtttagacgaaatataatcttacctagaaacagtggtttgactatataacctcttaaggtcaattagagcatgcattttgttaagaaaaagctgatttttactcagaactgtgcaagacctatgaaatgataatagcagtaaaaatagcaatagatttgaaactccatctacaataccctctgcaagctcaggggggacagagaactaaggcattgtcccatcccaggtcatgcaggaatttaaaaaaanaaaaaagngtcatggggagccnatccggggctttcagtctcctgttcttcctgcttcatagcctcccctcattaggnctttttcattcgggtggcaggtccttgggggttcattccccttgtgtgtgttgcttggntggccctccttctttggccc

SEQ ID NO: 990 - DNA, 350 bp, Homo sapien
  misc_feature (1)...(350): n = A,T,C or G
cantttgaaattgctaagtagctggccccacgggttattcactcacagtgctcttcaggngactggtcagtgttggngaggataatgtttccattgctccntcagnctctttggnctgctttccngaaggngagtaatanaaatcctaattaaaatgaaaatgagaagttactaaaatgccctttcctttacagaactctatttcatttacagaggtcggatgttcgtgtttaactaccnaaatccctctatctcacttaggagctcagggagtcaaataatctaggacaaataaggtcaatgtaggttccctaaaggtgcccgaggtacttttctgcccattaattttt

SEQ ID NO: 991 - DNA, 466 bp, Homo sapien
  misc_feature (1)...(466): n = A,T,C or G
ctgccttgagagagtttgcaagccacaccacaaagaaaggggaacctgggtagaaccaaactccatgagtagagaatacagagcagagaatctggggagaccaaggctgctaggacattcctgaggtttgcagagggttcccactcaagtgttcagctaaggactgatcggcagatgcacatgaggaaactatcggaggccagaaaaaaaaacacccaaaaaattagaggtaactggctgggcacaatagctcacacctattaatcccacgtctttgagaggccaaggcaggaggattgcttngggggcaggagttttnagaccagcctggggcaacatagcaaggccctgtcttcttacttaaaaattttaaaagtttggccagggttttggttnggattgcacctnttagttcccagcttacttcagganggctttagggttggggggattggcctttagcccc

SEQ ID NO: 992 - DNA, 252 bp, Homo sapien
  misc_feature (1)...(252): n = A,T,C or G
tactaacacatcccaatggnagatatgtataagtgaaatgagtgcgttcttcctgcccctataatgacaagcctgacagagaacacatcacacagaagaatntgccaagaatcaagacctcttagaagaatgttagaaagttttctctccaaatggattctgtctaagtaggaaggccttggaactagaaaggtctaagatcaaatttatgacttgaaaactctatggctttgggcaaattatctgaactta

SEQ ID NO: 993 - DNA, 384 bp, Homo sapien
  misc_feature (1)...(384): n = A,T,C or G
ccaggttcaagcgattctcctgcctcagcctcccgagtagctgggattacagtggcgcgcatcacgcccagctaatttttgtatttttagtagagacggggtttcaccatgttggtcaggctggnctcgaactcctgacctcgtgatccgcctgcctcggcctcccaaagtgctgggattaccggcatgagcattatgcccggccagtatgttttcacttctcttgggtatatatctatttaggagtgganctgctgagtcatatgggaaattttacattaaaacttttgaggacctgccagacttttccaaagtagccttgtgactnggtggggagactnaggcccaaagagggnaactntcttctgcaaagaacacagttta

SEQ ID NO: 994 - DNA, 344 bp, Homo sapien
  misc_feature (1)...(344): n = A,T,C or G
tcgnccntngntgctgtctactgagtgcccgccagaccttgtgccaacagcttgacactgatcatcttcctgccctcccagcaagacccttttctcccagcttcctccagagtgaagagggggtcccagagctctgcagggtcctccagcccccacactggcccctccccaacacagccccacccccacagattgccctgaagaccagcagagttaccctccagggggccctttcttcctgttcacttcaaccattttgaggaggccatctttcataccngggggctcttgttcactgtggcagctcttgttccatcctttaattgtgaacaccaatttcccac

SEQ ID NO: 995 - DNA, 397 bp, Homo sapien
  misc_feature (1)...(397): n = A,T,C or G
cgatctcctgacctcgtgatctgcccgcctcagcctccaaaagtgctgggattacaggcatgagcactgtgcccagcctagtttttttctttcttttttttttttttaaggatactttataactgaaagggatgactttagtttggtaaaatttgaagcaaaagagaagctgaggcaccaatcataccctatacagacagctaagcacattgtgtaagggcagatgttgcccaccactcagcccattagaggagctcatgcaccatcaaagccaggaataaagcaattaaggcccantgggtgatncccacccttttgctgggtgtttaaatttttttttttttttttaggacagcgttnttgcntcttgttcacnggggggggggagtgccagtgg

SEQ ID NO: 996 - DNA, 418 bp, Homo sapien
  misc_feature (1)...(418): n = A,T,C or G
catggtcataggnagaagtttctcagcctagcacagtngctcacacctntaatcccagcacttcgggaggccgaggcgggcagattccctgaggtcaggtnttcgagaccagcctggccaacatngtgaaaccccgtctctactaaaaatacaaaaattagctggctgtggtngtgcacgcctgtatctcagctactcagaaggctgagggaggagaatcgcttgaacccgcgaggttggaggttncggtgagncaagatcgnaccatttgcaccccagnctggggcaacaagagcaaaantccatcttgaaaaaaaaanatttagcccggnctgggtngccaggttncattgcattngcaggccattcaggtngtttnaggcagggngattcatttnaacccngttagttggaagtt

SEQ ID NO: 997 - DNA, 382 bp, Homo sapien
  misc_feature (1)...(382): n = A,T,C or G
ggaagaacctcttactcttatacaactggttcctctacctggagaatagcttaatactgtccaatggagtaaagccccttggctggggaaggggaagtgaaggctccagcggcctntgngaaaaacaccaggcagatggctattcaagacccttgggccatgcagggaagggagggcagaggggagccactgctcaccagtctgtcccaagaaaggaaagaaaagatcatagaaaggctgggttggtccccaaccctccgagcaacaggaggttgggggtgcagttttccataagctttaggaagttcttgaggattgaaaaaacgacagtancgagatttttgagttcccctttttcattnaccgtttnttggagccctat

SEQ ID NO: 998 - DNA, 151 bp, Homo sapien
  misc_feature (1)...(151): n = A,T,C or G
gangaacttnaannanatnaatgtagaactcagcnttcttagacagganaanangangctccnngatnacngatggtngtntnacaaaaaggacntcnctannattcggantattnctagtcntgtacagtcnatgntcaagggtcttaca

SEQ ID NO: 999 - DNA, 476 bp, Homo sapien
  misc_feature (1)...(476): n = A,T,C or G
aactctgcttcacaaggaggccctgtgttttcactggaagaaaaaaaaaaaaaggtggcatacaggggtgccttcccaaagtgccaatataccccacccctaccctctcaacagnttccccatttcccattttaaataaattttgtctcctaggngccatatcaaggggacctctgtctctggggttgcaactattaactacagggggtcttgcagatcttgttacttgttttctcttttccctggcttactctggaggagttacattttggcacagtgccaacaccctatttanttatttanttggatnaaattggattgtccatnaacattcttacaattacactggctnccctcacaatggattttcttacttcagggnacctggcattttatttttccnactattccccaattttaccnttcagggtctttcccctcagggctttagggaggtaggggggcncgggggttag

SEQ ID NO: 1000 - DNA, 164 bp, Homo sapien
aaaatagataaattggacttcatcaaaactaaaagctttttgactgggcatggtggctcacacctataatcccaaagtattgggattatagggagatgagaggattgcttgagctcagaagttcaagaccagcctgggacaacatagtgaaactgcatctctta

SEQ ID NO: 1001 - DNA, 322 bp, Homo sapien
  misc_feature (1)...(322): n = A,T,C or G
gacttaccaccacttccttgtactaaaaaactaagtaccctctaaggggcaaatttatgtggtttgggcaggtcacagtcaagggtccaagcagctatgtagaaatgaagtcacctgtgcacatggggtctccatacacagatgtgccatccttgtcgacatctaataaaaatatatatgaagttggtaggtgtctcaaataagtaacttagtgaaatcagggcactagtgcagcatttgaaataaaagtcaaccagcatctgggcctnttatctggnctccctttaggncttgctgggtgcttagctgagatccgttncag

SEQ ID NO: 1002 - DNA, 391 bp, Homo sapien
  misc_feature (1)...(391): n = A,T,C or G
cttttagcaaatgatggtgttttgcttgcagcagagagacgcaacatccacaagcttcttgatgaagtctttttttctaaaaaaatttataaactcaatgaggacatggcttgcagtgtggcaggcataacttctgatgctaatgttctgactaatgaactaaggctcattgctcaaaggtatttattacagtatcaggagccaataccttgtgagcagttgggttacagcgctgtgtgatatcaaacaagcttatacacaatttnggagggaaaacgtccccttttgggtgtttccattgcttgttacatttggcctggggttaaggcactattgggcttttccagcttcttattccaggggtgancccctagtnggggaattaacgggg

SEQ ID NO: 1003 - DNA, 246 bp, Homo sapien
tctggagcagtgtgctgcgtagttcggcctgagtttgtgcagcttgttaagacaactcttgtgtacgctatgttgaagctcaacaaaaaagtcatgggaccacttctagaaatctttcagctgtcaggcctgtcagtctcatgacagtttgttggttgtgccaaacactttatttggggaaagggaaagcccagatttgaatggggtctttccccgggggccttatcctattaggaggccatttgt

SEQ ID NO: 1004 - DNA, 326 bp, Homo sapien
  misc_feature (1)...(326): n = A,T,C or G
aagacccagatgtctgtctccaaggcttatagctactattctacagtactatcagaaaattctttaaaagaaacagtggatttatataaaaggacttttttggaaaatttggccctcctcaaagcagctgtcttcttaggaaaggtgttctagggaatacccatgcctatgtgtagctnggcaaagtggtgatgtattgtcatgccctgcagatagccaatcctgcatttcaggggncaaaccagacagtgggntttaaggattttttccccgctcttttggggnccttnggccataattataacctttttccaagggttntagcc

SEQ ID NO: 1005 - DNA, 291 bp, Homo sapien
  misc_feature (1)...(291): n = A,T,C or G
gtctcgaagtaattactattccgaatattaggatcctactatttccttatcaatgtttttatttccacatagaagtctgttaaccgaacatactttgtagctcaataatcggtaaattctgattagcacctgattttgtttcagttagcccattctgtttacatgagtagatatatcaattatgcttaaggtttaggaggccatccataggaattctcagggttaattctttcccnctaggtggttcttgcctaaanaaccngccctttttcacagggttttcccccgtta

SEQ ID NO: 1006 - DNA, 122 bp, Homo sapien
  misc_feature (1)...(122): n = A,T,C or G
atggatacatagacgagggcaaggcggcgtcnaangtntaatcagatcaacactgagcgatgcattccgagaggcaatagctgaaggccatataacaacaaaccatgtcgctgccactcgcg

SEQ ID NO: 1007 - DNA, 394 bp, Homo sapien
caggtgagccgagatcgcgccactgcacttccagcctgggcgccagagggagactttgtctcaaaaaaaaaaaaaaaaaaaagaaaaaaacagtttaccattctatcagaaaatgttgaccaccctcatatttttggtaaactgcagtaatttttccttaatactttttgcaagcttttgcatgcataagctccagtatcacacttaattttgcttgcttgctctctgaaggggagttcgggatgaccgttacaggcaaagtgggatttttgcgtcccaaaggtggattaagcccaaatttccaggggtttttccccagtttttcttccgtaggggcttggatgttttaggaggggaaagcctttccctggacttcaaaatatgttttcttccc

SEQ ID NO: 1008 - DNA, 437 bp, Homo sapien
  misc_feature (1)...(437): n = A,T,C or G
taatggctgaatggaattccattgtgtatatgtaacacattttccttatccagtcatccactgaggaacatacaggtggacttcatctctccactgttgtgaataatgctgcaataaacatgggagtgcaaatatgttttctacatactgatttcattttctttaaatatatacccagtcatgaaattgctagattatgagatagctgtattttgatttcttgaaaaactccatgttttctataacagctgtttgtaaataggaattgtcttattgattttttttttcaggataaattcactattagtgtataggaaatgctattgactttgggtatgttaaatttggggatccngccaagnttactgatttggttttccttagggtcctaatccatttttccggacgtgggggccttggggaggtngtcccatatt

SEQ ID NO: 1009 - DNA, 297 bp, Homo sapien
  misc_feature (1)...(297): n = A,T,C or G
tgccagatcttgtacttttgcattggcaataggctgggcattaactcatgagcttggagaaaaatgacgatttgtcagggtaggttatggggagaatccctctataaggcaactgtagtacagtaatttaaagatgatttcaggtagtaaattcaggtttcctcagacagagaggggccagaatgcttctaccagtaaggggagttttacgttatttggagggttcagtttctcagcttcaagtgtcctcttaccccaatttcaggggttttcagtgtgtctcccatcactttccnt

SEQ ID NO: 1010 - DNA, 402 bp, Homo sapien
tgtcatgtgtttagggagcagccaaggtgaagttttcaaccaggccgaccaacttcagagtccactggcttcaaaacagtgctttacatcctccttccaacattattcacaagccgatcaagactgagagagtcacaagtgtgtgaaacctgtattctttctgacttcattttccctgggtaagatggttacttgcccaccaatctggcttatgctacagtgaaacacaacttctttatggttaacgtttttgtctgtgcttcattctttagctgtaaatcaagagggtgggcacatctttcccaatagggatattttatccctgtgttattttttcccaaaaactgggccatgcaggtcactaaaacatggggtccagaggagaggttcatggggaattat

SEQ ID NO: 1011 - DNA, 357 bp, Homo sapien
  misc_feature (1)...(357): n = A,T,C or G
atgaaatgacatgattgtggccattctgtagtctttaaaaggagatctatttgtgtcaataaacaacgagctcattaaaaactacccataaaacaattaggccaagggaattttgtctgataacagtgaaagaaggaagtgaggatttagctgcagattctggaatgagcctgtttatcctccaggaccacagcagttttgtcttcaggcttaagataaaatcactgtaagtgtgaaaggtgttcagaaaaataggttctgccattgctaactatgtcctgaaagtttcttccagtttgcctttgaaggancacaggccacttaaaccgccgcttaggatgttcctcaaaagttaaa

SEQ ID NO: 1012 - DNA, 254 bp, Homo sapien
tgcccaaagccatagagttttcaagtcataaatttgatcttagacctttctagttgccaaggccttcctacttagacagaatccatttggagagaaaactttctaacattcttctaagaggtcttgattcttggcacattcttctgtgtgatgtgttctctgtcaggcttgtcattataggggcaggaagaacgcactcatttcacttatacatatctacccattgggatgtgttagtagtggggaaaagtaaa

SEQ ID NO: 1013 - DNA, 401 bp, Homo sapien
  misc_feature (1)...(401): n = A,T,C or G
tggaactgaaacaagacctgcatgaccctgcagtgtagagtatgaaaggactgataaacatttggattgtacacttaaaacgggtgaatggggtggggtgcgaattatagctcactaaaactgcttcagaagacaagatgaggaggcagcactagggccagatggcagaggagcttataagtcatccctcagaggcggaacttcatcctgatgatggcagcaggaagcctttgtaggggactnggtgtgaaggggatttgctgcttgggcaaggaatgggaattggaggggncagaagttgggtatgggagagcacttggagttnagagtnagattgggtaattccggtccagagggaagaaggcccccatttgaaagtccattgtnccatgatttaggct

SEQ ID NO: 1014 - DNA, 413 bp, Homo sapien
  misc_feature (1)...(413): n = A,T,C or G
taactgcaggcaaagagtattaaagctccactctggatcaggggcatgacatgttctataagtaatttatctttatcagggngggggnccgccctagagggncttnttggnacnngnctttgttggggncngggcccctttcccccctttctctttnccanctcagtgtccngcttattctttccatccggactttttctgcccaatctgtgcagtgtctgaatgcctgcctcacaaatcctccttttaagattgggagccaggtgctagccaatgaaagataataaggttttttgcaataagtgacctcatccagcagcctgggcacagaccctgtcaactgcccgactttctgaatggggcactacctgcagcccttnccgatgggaggagctatggggangagaggntgc

SEQ ID NO: 1015 - DNA, 403 bp, Homo sapien
  misc_feature (1)...(403): n = A,T,C or G
aagaaaannngctggctttttaagaacacagaattaaccagaacattgcttcctgaatgtcatcttttccttcctccgcaaacagatttcatctactctttttaaaaacataagtttgtttagaatggcttttcagaactattttcacacccacattatgaacaaacgnatctgtttcaatcaatgttctttnaaagaaggcaagtttgcagatgtattaaatgtcttgctgatttttatcccgtcacgcttatttctggaacctctggccatcttttcaatagggctacattcctactgcttcaaagtctgctcacaaagggcaaccctcataaggtttttgtcatttaccccaaaatttcctattgggaggggttcgactcgtctgccgggggagaggata

SEQ ID NO: 1016 - DNA, 354 bp, Homo sapien
  misc_feature (1)...(354): n = A,T,C or G
agagattaactctgagatgggccaggaattaggtgtagaagacagggatttaaagttcctgctctcaaggtcattacaatttgttaagggaagcagatatgttaaaaaaaaaaattgctggccttgtgcagtggctcacacctgtaatcatagcactttgggaggcctacagntgaggcaggaggactgcttgaggccaggagttcaagaccagcctgagcaacatagtgagatcccatctctacgaaaaaaaaaaaaaaaagaaatctctcttatttatctttatancccagacacttataagtgtccagcaaactgtgtccccactantcaataagtctttatgtaaggaan

SEQ ID NO: 1017 - DNA, 381 bp, Homo sapien
  misc_feature (1)...(381): n = A,T,C or G
tcagtagatatctgggcagncggagaaattccgctcaaagtaatcccctgcatacaaccagtcgggggtcccagtgtaggggttattgcctgggtagaaccacctcgtctgccactctncctcctccttggcccgctccctccgtgcttctctctgcttctcctncagccgctccttctgctggctagccagatccatgttgccattntccatgccgcggatgtcagggcgcaggcggcagtccntgggtggcagggtcttctccatgcctgtctccagctcgttnaggctcacagtgaaactnggtgaaaattatacatctgggcagagttgggggaccgggtgttgatccttcaagagccagcttgctcaagggaatga

SEQ ID NO: 1018 - DNA, 364 bp, Homo sapien
  misc_feature (1)...(364): n = A,T,C or G
gagacatggaggaaggtgaatacatagggcagagagggaatgattggcagggaaggaagaaccttgagaagcgagacagngcatggagtncacaggttgaagtattgattttgaaggaaggagagatgcttcattctccaaaataggaggaagaaaaggtngatatgggcataaatactgctaaggatgtgaatgagaaaacagtccagatgaccatgaggatgggggataagccaggagggaatgtagactgtgtggataaggaagagtctaggatctggacaccttcacaagctaactnatggggtagtngggataaggggaatnagtgagcttgggangaccttaggagttttnagacttt

SEQ ID NO: 1019 - DNA, 199 bp, Homo sapien
  misc_feature (1)...(199): n = A,T,C or G
ttattaaaatcttacaaatcatatttccaaaaaggtttcacaatttttaaaaaggagtctctcatctccctcacatcatgcaacctggcttgtcctttggcctggctacatcatggcagggatctctgaagacactgtgtccaggggctgccagngacagtccatcagagcgtcatacagctcctcactctgttccatg

SEQ ID NO: 1020 - DNA, 157 bp, Homo sapien
  misc_feature (1)...(157): n = A,T,C or G
ggcggtcaccagcgagcccagcgntcaacagccaacagggcctcatcatcgctggcctccanattggggagcaggggggcggggggttctgcagacccccagtngctctggcgagtggggncccagggtgctgcttgcagtggagacctgggngtac

SEQ ID NO: 1021 - DNA, 119 bp, Homo sapien
  misc_feature (1)...(119): n = A,T,C or G
gttttaataagcctcagtttccttttctataaaatcggaatagtagtagttctgatgaaaaatagtataattgatatgctaaggaaggagattaaatgggctanctcatataaggcgtc

SEQ ID NO: 1022 - DNA, 132 bp, Homo sapien
  misc_feature (1)...(132): n = A,T,C or G
gccccgggtgatgttgaactcctggcctcaagcaatcctcctgtcttggcctcccaaagcgctgggacttcaggcatgagacaccacactcagccatagactcgtttgtcagttctcctaagaaacanagcc

SEQ ID NO: 1023 - DNA, 163 bp, Homo sapien
  misc_feature (1)...(163): n = A,T,C or G
aacacatatcaaataccaccaggtccttttaaagccttctcacttcttgagatagaagggaagtacttcgggctgggcacggtgtcttgtgcctgtaatcccagcacttttggagatggaggcaggaggatcacctgaggtcaggagttcgagaccagcctng

SEQ ID NO: 1024 - DNA, 187 bp, Homo sapien
  misc_feature (1)...(187): n = A,T,C or G
aaaaaaggtagtgggggaggacccaggaggtttacactgatggtttttaaatatctgtgaagactattgatttgttttgacctaggaggaaaaactaaaggcaaagcatntatgggagatcattaactgtggaaaggagctcagacaggcaggctagattaaaagangccancggaagctgctttnt

SEQ ID NO: 1025 - DNA, 365 bp, Homo sapien
  misc_feature (1)...(365): n = A,T,C or G
cggaaggnctttttctacttaaccatagcacagaacatgtacaggagagcatcacaaggctgaatggaaaaccagttcttgtggtcattgatgactaaaataataaatgtctttagaaaaagcgacactaagaaatgcatgttttgtgttaaaaattctgctctagagctttataaataattttaaagcttctggtgctcagtgttctcctttgaggaatacgggtttatgtggttcatctcccttagtccccactgcagctaggggaaaagtggggatgctctccatcccattcttcaccactngaacatgggagcccactgctttggggcttaaatccgtcttttttaccaatttttttcccc

SEQ ID NO: 1026 - DNA, 286 bp, Homo sapien
  misc_feature (1)...(286): n = A,T,C or G
ggtatcactctttcaatactttcttacataaagacttattgattagtggggacacagtttgctggacacttataagtgtctgggttataaagataaataagagagatttctttttttnttttttttcgtagagatgggatctcactatgttgctcaggctggtcttgaactcctggcctcaagcagtcctcctgcctcagcctgtaggctcccaaagtgctatgattacaggtgttgagccactgcacagaagncagcaattttttntttttaacaaatcttnctt

SEQ ID NO: 1027 - DNA, 139 bp, Homo sapien
gacggaattgtttgtggggcatagatcctgtttcgtatgaatccttcaagaagcaggagaggagaggtgaccacctgagaaaggccaagctggatgaagactccgggagggcttacagcgacgtggctgacgacgtgcc

SEQ ID NO: 1028 - DNA, 261 bp, Homo sapien
  misc_feature (1)...(261): n = A,T,C or G
cagnattatgcaccattgcactccagcctgggtgacaagagtgaaactctgtctcaaaaaaaaaaaaaaaaaaaaagattttggcagcaggctcacgacctttctctcccccatgttctgccaactgccagctgggtaactccagtntccaggaagacagtcctcctgatgcactanctcttccgatctttagtttcggcctcaatgttttcacgtagcctatactttgccatncggggatttnaacanccctaanttgct

SEQ ID NO: 1029 - DNA, 300 bp, Homo sapien
  misc_feature (1)...(300): n = A,T,C or G
ttacccccagtatggctatacccagagcaccatgcagacatatgaagaagttggagatgatgcattggaagaccccatgccacagctggatgtgactgaggccaacaaggagttcatggaacagagtgaggagctgtatgacgctctgatggactgtcactggcagcccctggacacagtgtcttcagagatccctgccatgatgtagccaggccaaaggacaagccaggttgcatgatgtnagggagatgagagactcctttttnaaaattgtganaccctttttgngatattnttttt

SEQ ID NO: 1030 - DNA, 210 bp, Homo sapien
  misc_feature (1)...(210): n = A,T,C or G
tttctacaacctaattcgctcctaaacttggctagtccccacctttgggngtgatnatttttgcgtccccgtcctcttaggacacctaaaccaaaatgagaggcggaggaagagcaggaattaggatggcaggccttcgnctctcggtccccacttggcccagcagtcgaaacccagaaaacaaaaaaaccttcccaggtnccgacccac

SEQ ID NO: 1031 - DNA, 222 bp, Homo sapien
  misc_feature (1)...(222): n = A,T,C or G
aaaacagcccctttacctgccaagacaagcagggctatatttcagtgacagctgatatttgttttgaaagtgaatctcataatatatatatgtattacacattattatgactagaagtatgtaagaaatgatcagnacaaaagaaaatttctattttcatgcaaatatttttcatcagtcatcactctcaaatataaattaatatataacactcctntattg

SEQ ID NO: 1032 - DNA, 236 bp, Homo sapien
  misc_feature (1)...(236): n = A,T,C or G
gttggctgggattccctgggggcagagaggtgagatgtgttcacagccaggaggtcacagccctcctgactcaggtagggtggaacagactnggtaggtggcatcttngattctgactttgctctcttaatctatggtcttatttacggctngcttcatggacattctacctgtacaatcacacanaagtnccatcttaaaattccttgtaatattnaacaangaactctatgttt

SEQ ID NO: 1033 - DNA, 258 bp, Homo sapien
  misc_feature (1)...(258): n = A,T,C or G
tgtatttttagtagagacagggtttcacattgttggccataatggtctcgatctcttgacctcagcctcccaaagtggtgggattacaggcgtgaaccaccccgcctggcgcctctttctttctttctttcttttttttttttttgagacggagntgcctctgtcgccaggctggagtgcagtggcgcaatctcggctcactgnaacctncacctaccaggttcgagtgattttcctgncttaacctncccgattagc

SEQ ID NO: 1034 - DNA, 215 bp, Homo sapien
  misc_feature (1)...(215): n = A,T,C or G
tcagtgctctctttcacaagttcaactttggctgcagcagccttctccntctttttctttntctcttcttcttttgctagtttcttggccagtttattcagctcctttgatttgtctgcacctaattttaatttcttctttctaggcttgtccattttctttaactccttggacttctgttttcctnntgcaaaangnngctctaccntttntag

SEQ ID NO: 1035 - DNA, 161 bp, Homo sapien
  misc_feature (1)...(161): n = A,T,C or G
ggcatgagacaccacacctagccttcttgtgcctcttgattggggcagcaggtntatataaggctgaggtnagcggcagtggngagatcagtgggagaaganatcatcccagggggtaagtctnggaagccttcatgganaagatnctttttgtatctagc

SEQ ID NO: 1036 - DNA, 119 bp, Homo sapien
  misc_feature (1)...(119): n = A,T,C or G
tgaacatcagaggacatatcctggagaaaagccctacgaatgcattgattgtgggaaagccttcaatgatcgctcaacccttagtaaacacgagaggacacacactngaggcaaaccct

SEQ ID NO: 1037 - DNA, 99 bp, Homo sapien
  misc_feature (1)...(99): n = A,T,C or G
agctgaggtggctatactaatgtcataaaatgagtcttaagtaaaaaattgttacaagagacaaacaaggacattacatgttgataaanatgttanttt

SEQ ID NO: 1038 - DNA, 345 bp, Homo sapien
  misc_feature (1)...(345): n = A,T,C or G
aaatcncccaggnatccaccagcttcacgcgggcaagtanaccaattttnttttgngaaaaggttggccttnttcaaaccttncaagcttancattnnccgcacggcttcggttnttttgccccagccacagtgcccgccacggctcggccagcgggccttccagcgcatcgtcaatcgattgcccgggcaaggcttgcagttgcgccanttcggcttncagggcgctttcgggcacgcccagctccagcagcggctgccagtgntgtngcaagacgtttgaggggcggcgcgtaacctgctgtttgttcgacgggcaggctgaccantttggtttnaaggggcc

SEQ ID NO: 1039 - DNA, 207 bp, Homo sapien
  misc_feature (1)...(207): n = A,T,C or G
tgantttttctgcatgcttccaatttaagaggtataaaatagtccttcgatgtggtttttattttgcctttctttgactgtgaatgaccttggccatttcctcatattttttggttattgtatttgcacttgcacaccttgtctctctagcttttgcctcttttttttttcctgttggtatctttattgatttattttatgagttct

SEQ ID NO: 1040 - DNA, 128 bp, Homo sapien
ggcttgtgaagatttgtctatatttgttttttttaatgggggaatgaaggctggtatctcctacttagccatcttgatgacaatacctccatgtattctggagtgttttaattgtttaaaattacaaa

SEQ ID NO: 1041 - DNA, 362 bp, Homo sapien
  misc_feature (1)...(362): n = A,T,C or G
cantcntgcaagtattaataagagaaactccagccaaaaatggcctaagtgtaagaatccagagccagctgcagtggtgcgcacctgaaatcccagctactcaggagactgggtcaggaggattggatcatttgagcccagggagtttgagaccagccaggggaatgtagtgagaccctgtctcaaaaaagaaaaggaaaggttgtggggcttcagtggcttcacgccttgttaataatccttaggcacttttggggaggtcttgaactccccagcccaacatgggttaaaaccttcgtnttcttattggaaaaatttaccaaaaaantttaggccaggtttttggttggttgcnttacctg

SEQ ID NO: 1042 - DNA, 366 bp, Homo sapien
  misc_feature (1)...(366): n = A,T,C or G
tgagatctctgggtgtgggtcagagagaagggaagagggggtacctcctggcaaacaagggaagtaatttcctcgctgcagtcttgcaaaggagagatgcaccctcgccagtcacctcatctcctagccccgtgccctctccttctgtgtgcactgaccaggccaggcgggtgccagcactgtaccagcctgtgtggactttctccgcgccttcttgatgtcctcctctgtcttgttgctcagcttgatctccagctgctgggtcttcatctccagggtctctctngccgctctgttgagggctttccgggcctgggggtccaaggacaaggagaagctggtcatacagttcggagccagtnggcc

SEQ ID NO: 1043 - DNA, 268 bp, Homo sapien
  misc_feature (1)...(268): n = A,T,C or G
agagagagagcgaaaaaccttgcctctaaaatcaaaaaccaacttgagaatggtgacatgggcagagattttaaatgagtgatttatttttctccaacctgactgataggagcttttcttctaaggtataaggtatttactagagtgtgaagctatttatatgcaattatataatgcaaagaatataattttattagcttattaattacaaaataaatacaacacattagggttgatccaatttaaatgttcntgccnttttttggcc

SEQ ID NO: 1044 - DNA, 341 bp, Homo sapien
  misc_feature (1)...(341): n = A,T,C or G
gattgggcgttatcaatgttgtgcagatccggtgtcttgtctccatgcagacatcacgaaggtgtttatgtagatgaaggtatagatatagagtcggcatacaaatattccatgaaggtttataagtctaatgaagacaaatccccattctgcaatgtgcgagaaatgactgataccgtgcaaaattattatcacggagtacggtgggaaacgatactttgccctctctgttacaaaacatataggatgatttaaacccaatatttacataacaatcctcgcactcgcggggggtttattttntctggaactcgctacggcggggtttttgtttttatggg

SEQ ID NO: 1045 - DNA, 397 bp, Homo sapien
  misc_feature (1)...(397): n = A,T,C or G
gccagggagnnagggngggctcactgagggtcaaacagcaggcgagttgatgcctaggtttggcactcctgcccgacaccctggtggcttgcggaggtcagcctgggaacaccctggggtgttgtntgggtnggggctgggtcctcaacccaggnctgcctcttgctcccggcctcactgccgtctccccctccccacctgtctttattctctttgcagcagaagaccccctgcttgcgcccagccggcccaccattattcccgnccaggcgagccattcnttgctnggattagggccttgaaggnggggcccngtaanccaattttggcntattaattcagttctatttacaatttaattnggccttntttttaaaaagtncttgatttngggaaa

SEQ ID NO: 1046 - DNA, 399 bp, Homo sapien
  misc_feature (1)...(399): n = A,T,C or G
tcacgcgcatgttcattgcagcactattcacaataataaagttgtggaatcaacctaaacgcccatcaatgacggattggataaagaaaatgtggtacatatacaccatggaatactttgcagctgtaaaaaaagaacaagagcatgtcttttgtggggaacatagatggagctgggaggctgttatgcttagcaaactaatgcaagaaggagggaaaccaaataccacatgttcttcactttataagtgggggagcttaaatggataactttatgggatacggaaggaaggggaaaccaacattcacccaagggtnttccagggccccantagtttattcctaccccttaggggaggggagggggagnagggagccaggaaaaactttttngggtact

SEQ ID NO: 1047 - DNA, 389 bp, Homo sapien
  misc_feature (1)...(389): n = A,T,C or G
cctgtatatgtgtgtatgtggcagggttcattctgacacttgctttttttcatttttcattttcctacctgttagtgaagtagaaggcaagaaaaataagtagtaatgtgtccggaatttattccttctggtaggttcttggtctcgctggcttcaagagtgaagccacagaccctcgtggtgagtgttacagctcttaaaaatggtgtgtctggagtttgttccttcagatgttcagatgtgcccagagtttcttccctcctgtggggtttgtgggtctcacttcacttctgggagtagttgaagccacagaccttttgcagtggggtgttacagctcttnaaaggtnggcacgtttgaagttgtttgttcttcccatgggtttcata

SEQ ID NO: 1048 - DNA, 366 bp, Homo sapien
  misc_feature (1)...(366): n = A,T,C or G
caangatcagtgccacgtgatntccagcatggctgancaaagtgagacanccgtctgaggaaaaaaaaaattaacatctatactctattatatattacaaatattcaaagaaccaagtgcttaacaaaatacacttattgttctctaccttcctattttctttaatttctgatcagaatgtaaagacgggacagaaggtgtctcctgtctctcctgagacagtaggagtatgggagtactatcttttgataatgggcaagcttacctttcgggaatcttaactttacttctntcctgaggaagattctagggggtactttcagggattaccaacaaaaggggatttgtttatttttacatcntccc

SEQ ID NO: 1049 - DNA, 420 bp, Homo sapien
  misc_feature (1)...(420): n = A,T,C or G
ntgaaatgcccnttagctcgggtagcctcagggttcacttcctcacccctttctngngtttctatgtccccttttnaagtnaggctgtccctaatcacactctatgaagtttgtacccttccccttcagtattatctacctcttccttgctttattttcaatggcatttaccatcatctgacatactttagatatcactgggttgcttgggtttgtgtctcctcttactaggaatgtcagctccacagggtaggaggttttgctcttattcacttgctggcataaccccagggcttagccagggtnctcttacaagagggggtagccgaaggttttatgggttgggataaaagggaagggggatggagggagggnttctttttgcaggggacgtgaggntttttgaatgggcagaaacct

SEQ ID NO: 1050 - DNA, 235 bp, Homo sapien
agagacctaaatcccaatcacgacccgtcacattattttgagtagattagtatcattaggattctgagtatagtacctggttttcttttgctgtgtatctttttgtttttttctaggcttggtttttctatggaatttccactaaatcaactaaactttgccatttatctaaatcattcacagcaatcagctttattagggtactctgtttcattttcctgagtaagcgtttcct

SEQ ID NO: 1051 - DNA, 208 bp, Homo sapien
  misc_feature (1)...(208): n = A,T,C or G
agagcagaattcagactcagctggtatcccccagggcaaccccaggatgganangggctggtctgtccccacccacttctccaggatcctcccagcccccaggggcntnttccctccaactgtcagctgcttagctgctcatctggggattggagctggagcatctgtcaaggtcntctccttgacaaacagcttcctctttngaaat

SEQ ID NO: 1052 - DNA, 164 bp, Homo sapien
cagataaatggagacaccagatctccctaacctctgacttctgccgttagccatactctgtgtagttagatctcagtctgggaatggcattccagggcaattgtgaacatgaggctagatttttcctttgatttagcacattcctaggcagacttttgcaagct

SEQ ID NO: 1053 - DNA, 139 bp, Homo sapien
  misc_feature (1)...(139): n = A,T,C or G
caccccagcagcaacagagtgaaaccctgtgtcaaaaaaagaaaagaaaagaaaagaaagatgaaaatgcacagcaaaaggactggcaggtttagtgaggggaatgtgttgggtntggaacaaggacttncttacctac

SEQ ID NO: 1054 - DNA, 115 bp, Homo sapien
  misc_feature (1)...(115): n = A,T,C or G
cccctcccaaatcccttgaggctaacccagtgcttggcccacagaaggcaccaatgaggtggttattagattgcttgcacttgtttagggcttactctagaccaggcagtgtncc

SEQ ID NO: 1055 - DNA, 292 bp, Homo sapien
  misc_feature (1)...(292): n = A,T,C or G
ttatctcctcaccagaagaggaacagcagagataagggaagcctgaagaattaaaagaaacgtagcgttggggcagtacagcctaggtaatttgctgagcttgatggatgtcagggtcagtccaagtgaaagcgaagagaggctgggattaagggggcaagggaacagtaaagnaagcatgtttgagatccngaacagagtaatgggtagtagagggaggtattgaggataggagagtatatgggtttggcaccatggggtgggataggcaaacccatattactctccttat

SEQ ID NO: 1056 - DNA, 396 bp, Homo sapien
  misc_feature (1)...(396): n = A,T,C or G
ggcagctctgcccatgcatgcctgctggtgggaaaaggaaagagaagacaaaaatggttgtgtgtaaccccctgaggcattgctgccttctgcctcttcatcccagcaccctctccatctcctctgcagcctttgctcacccncccngncttcagcctcngccancaccnngnaatnngagccaagnnncanccncangnnngnnnnnnnncacaaaaanannnnagggggntnnggggntnnccnnnggggcnncannnnnggggaannnnccnntntgngggannncnnccagnnccngnnnnctnccctnggntncccctctctgtaaatgacactcctntncacccagangccagagccaggaaatctggggnatcatcttgactncaccct

SEQ ID NO: 1057 - DNA, 140 bp, Homo sapien
  misc_feature (1)...(140): n = A,T,C or G
aacttgcaggggtnccaaggtgggactnacttgctccttcccaaagctgggtgggcaccaagtacctctgtgccaaggagcccttnanactttngcagggcaagccacggctctacccactgggcccgcagtagagcaat

SEQ ID NO: 1058 - DNA, 127 bp, Homo sapien
  misc_feature (1)...(127): n = A,T,C or G
catatggctagccagttttcccaacaccatttattaaatagggaatctttttcctgttgcttgcttttgtcaggtttgttgaagatcagatggttgaaaaaggangagtncatgtcctncccagggg

SEQ ID NO: 1059 - DNA, 228 bp, Homo sapien
  misc_feature (1)...(228): n = A,T,C or G
gctnttccantacaaaagtaagagtgttatttaagaataattgggaaattntnttaaagtaaagtaaagggaagaaaaattacctataataccattatctaaagacanntattgttaacatctcagtatattttgttctaatccagttcttttttctnagaattacacaagttaagcattctctntacaaaagattgaaataatacagaataaaatggccaggcntgg

SEQ ID NO: 1060 - DNA, 287 bp, Homo sapien
  misc_feature (1)...(287): n = A,T,C or G
gagaattncctgaacccagtgagccgagatcacgccattgnactccatccnggacaagaagagcaaaacttcntctaaaaaaaaaaagtcccagaatgtnacttctnnctcaagtgatgaatttttgcatctattcatcaaagcagtcacaganttagnccagattnaangaggtgaagaataannttcacctctcagtggaatagtggcctacaccnagggagggaataaatccatggtacttgatctttggagtctaatatcacacctaatcattcactggctct

SEQ ID NO: 1061 - DNA, 308 bp, Homo sapien
  misc_feature (1)...(308): n = A,T,C or G
ctttatcaaccaaattgttttgcctatccaccccatggtgccaaacccatatactctcctatcctcaatacctccctctactacccattactctgttctggatctcaaacatgctttctttactgttcccttgcccccttaatcccagcctctcttcgctttcacttgggactgaccctgacatccatcaagctcagcaaattacctagggctgtactgccggcaaaggtttcccaggacaggcccccattnatttcaggtcaaggcccaantttctttccttcatntgtttacctatnttggggata

SEQ ID NO: 1062 - DNA, 387 bp, Homo sapien
  misc_feature (1)...(387): n = A,T,C or G
ngaagggggtatggttagtggaggggagattgttgataggactcaaaagcaatttaggaggaaggactgaccagaattggggactgatgggtggggcagggtggagtcaagatgatgcccagatttctggctctggcttctgggtggagaggagtgtcatttacagagagggggagccgaggggaggagcaggactggaggagtgctcagaaagggtgagttgccagagtgggagggcccacgcagnacccttgaagcaccttgctttgggattttttggaattcagacaaaccttgagggttgaatctttggcttcaatttacaaaggttnattggccagaggcttgaaagacaggggagggttnagcaaaggtttnccagaagga

SEQ ID NO: 1063 - DNA, 384 bp, Homo sapien
  misc_feature (1)...(384): n = A,T,C or G
tctcctacagctcctgttcagggacgggagggcagccaggcaagaaaccaaacacgaggtcaggcctgagcagagtccttgaatggaaggcccccaaagtggcaattttagggtttcctgtctattcccatgggtctggccgccaagggaactggcaggttggaagaacttgccactgggggcagctcctgccaggggtggcaagcacgggcgagcacaggggtggggacagcctcctggganttgggtcaactttgttcttccaacacttgcttccctgataatttggcaganttttnggattggccagtttagncccagaagctttttccttntttcccccanccaggttnagcaacctttaaatttcccgggggaacttgg

SEQ ID NO: 1064 - DNA, 429 bp, Homo sapien
  misc_feature (1)...(429): n = A,T,C or G
gaggctgctcagctggatctggagccagctgnttttgctccgttccctggctagtctgtgcctggtcaccagggaggctgagtgaggggctgtgaacagttgccggaagcaccccctccctccccggcccgtgcagcagtgtctgagctgtagtgaaagtttcagggcctgcaaaagaagaggcttgggcacaggacttgaccatggctccagggggtttaggacccccagaccttgtgaaggtggggagcagctcaccacctttcacggcaggcttttntatgttcttcttgagccttnagtttgatttttgggccccccaaaccaaattccaaaggttttttggcccaactttntcagaggtttttccancttgttcacatttttggggatccttggggttaaantgtttttttcaagtgnaaaaaa

SEQ ID NO: 1065 - DNA, 375 bp, Homo sapien
  misc_feature (1)...(375): n = A,T,C or G
gtaaaagaagttatagttcatccctatggtacataaaatacattcccacatctctccaaataatactgggtgtctttatatggttgacatataaagatgttcctagtatatgttaattgagacaagcaggttgtaaaatgaccttctcttcccattcttctcatgttgtcctcaaaaaagatatacttcttttctttcttttttctttttctttttttgagatagacaggactctctctgttcacccggggntgggagtgntgtgggccgtggatcttcagctttactggcaaactctggcctcccaggggnttcaaggaggnttcttccctggcctnttggccttccccgagtaggttgggggtttgcagggtg

SEQ ID NO: 1066 - DNA, 316 bp, Homo sapien
  misc_feature (1)...(316): n = A,T,C or G
gagagctcaaaagaaagcatcaaaaatgaagcacagaaaacaacaaacagaaaatgcagatgaggctcagaaacagagacaggttgagaaatacaaatactactgtgttatagttgcctacagtattcagtacagaaacatgctgcacgggttttcagcctagggagcaactggttataccgtatagcctagggtgtgtagtaggactccacttgtcttcgcttcttacaatgttttgcacagccaacggaantcaccttaatggacacatttctttagggattgttttncccttgttccatttaagttaaccaca

SEQ ID NO: 1067 - DNA, 296 bp, Homo sapien
ccaaattgggtaagagaaagagaaacatttattcctgatatgaccatcatatatatgcatgtatatatacatgcatatatatacatataggcctatcagatgagaaaaatccaccagcgacccagaacttacaaaacagaaaacatttttaagaattcatgggataggccgggcgcggtggctcacgcctgttaatcccagcactttggggaggccgaggcgggcgggatccacgaggttcagggagatccggaggaccatcctggggttaacacgggtggaaaccccgttttctt

SEQ ID NO: 1068 - DNA, 252 bp, Homo sapien
  misc_feature (1)...(252): n = A,T,C or G
tggggaatgccttcttcaagacgccacagggacttcgtgacaaagctgcggggggagagaacagttcttatagggacccattccgctgccaagttcctccactacccctagcctccctctattccccccgancccccccctaaaaacctacgccgacttgctcctcctcttgggcccggccttcggaaaggggcccactttaccgttccgggttaaattaacagggccttggggttccctgttttttatgga

SEQ ID NO: 1069 - DNA, 312 bp, Homo sapien
  misc_feature (1)...(312): n = A,T,C or G
aatgcagaatatgcagttaccgagatgttccggtatttgcaaatcgaatggttgttgcttccaccatgcgaggatatcttccttctcaaagtctgacagttcagcaagatatctgattccaggctttggctttancgcctttcggttcatcagctctgatgccaatccacgtggtgttaattcccttcgcccgaaatgggtcatcacagtatttgggtgaaggggaacggagtttttaatctgttcagtggcaggaacggcgccgccgacgtatggggagttgccatattttcnttttacccatantccgat

SEQ ID NO: 1070 - DNA, 348 bp, Homo sapien
  misc_feature (1)...(348): n = A,T,C or G
tgaaaacgagttaaaacgatcacgtaacagcatttgtagcttgaaaaagaaaataaaagaaacaacgattagtcttaaaagaggtttactaaatactgtgtacctaagttacaaattaatgtaagccatcctacttatagtttacctttttgtgacagttattaaaatcatcaatcaaatttaattgattttaaaacttaatttgcaggctggggcacggtggcntcacggcttgttantccccaggcactttagggggggctgagggcaggttgggatccactttgaggcttcgggggagtttccaaggacccagttgggggggncaacatgtttttggaaacccct

SEQ ID NO: 1071 - DNA, 314 bp, Homo sapien
  misc_feature (1)...(314): n = A,T,C or G
ccatgtaaccacgcgcggtcatctgtttttccagcacttcttgcagcaggaaacgcagatcgcgggaggcggtcagggtaacgatttgattatcgcgggtgacttttgccagcgcctgatcggnacgctgatcggcaccattaatgcttacggtgacgcccatcaggcttggatcctgctgtggcagtgtaaatcgtcgggggaaactttcaatagttgtttgggcngttttgcggnatccttgcaagcattaaacaggggcaacttaacggggaaggaggatttttttttgaacatgtttcggggcttttcaa

SEQ ID NO: 1072 - DNA, 329 bp, Homo sapien
  misc_feature (1)...(329): n = A,T,C or G
aatgcagaatatgcagttaccgagatgttccggtatttgcaaatcgaatggttgttgcttccaccatgcgaggatatcttccttctcaaagtctgacagttcagcaagatatctgattccagggctttggctttagcgctttcggttcatcagctctgatgccaatccacgtgggtgtaaattccctcgcccgaaatgggtcatcacagtatttgggtgaaggggaacgagtttttaatctggtcagttgcaggaccgcgnccgccgacggtntgggagttnccatatttccttttaccatnttcggntaaatgggctttnaaggacaa

SEQ ID NO: 1073 - DNA, 329 bp, Homo sapien
  misc_feature (1)...(329): n = A,T,C or G
nnnatgggacaatgatacctaactcagaggaggattgtaataatagaataacctttgtaaggcaaaggcttattaaccatggttaaaaacccattaaatagcagttattaaatagcattatcaccaacccagttagcaatgctggggaaaagtcagggaaggaatgtcagaggagagcacatttaagccagttattgaagaatcagcctaaggacacagcacatgactgacaagcctatgggattgggattatctggggaaaaggagattggtatatgggatgcaacagaccttaaaccttatcctttaaaaccaccatggantcacca

SEQ ID NO: 1074 - DNA, 347 bp, Homo sapien
  misc_feature (1)...(347): n = A,T,C or G
atcattgtcagtaaattttaaaagagggaagggcatgagccaaggcagagtgccctaggncnacagaatctctgtttctctattggctttgctatccctcctccagcctggangacaaagtgaaactctgtctcaaaaaaaaaaaaaaanannnnnaaanttttnaattttncacttttaaaaaattttttttnaaatnggctctttgtcatggggcatgcctgtagttccagctgcttggggaggctgaggcaggagaatagcttgagcccatgagtttgaggctacagtgtgctatggacttgcactccagcttggggtaataggagtgaggnccctgtcttcna

SEQ ID NO: 1075 - DNA, 134 bp, Homo sapien
  misc_feature (1)...(134): n = A,T,C or G
agatggtccntnctgggntagggttgacnacatgggtggaaggcggggtgggggaagtttgcactgacgctgcctgtgctgggcccgatctggggaaagagagagggcatcagggcgacatgttctcacccctc

SEQ ID NO: 1076 - DNA, 155 bp, Homo sapien
  misc_feature (1)...(155): n = A,T,C or G
gnnaaaaangccnttttnccnnngggggnncccccngggaaaatggggaatttnccnaacccgggggtccntantttttggannggcncaccgggngggaatccagttttnttcccttagtaggggtaatttcgagttngggtaatatggncatn

SEQ ID NO: 1077 - DNA, 502 bp, Homo sapien
  misc_feature (1)...(502): n = A,T,C or G
agactcataggttccatttagagccagaaggaatcttcactcatatacacatgcatatgtgtacaatacatatgcatatgaatattnaaangnnnantannannggggggnncccnanaannttattaaanangggcnnnannnaaannnnccccantttggggntttttntaaaannggggaatntgaannnncnccnngggngntnncnanttaaanccccattncccgncnggaaaattntccngccccnnggnattngggcttnannttaaatcactgcatgctggggtgggggttttttggctttctttgtgggggatgtgacagactcgacccgggnactctttgtaatcagtgcaggagctttggagggaaatccacagcagtggaagntgaatgtcctnaatcctgcctcatctctatgtcttatcttctctcctnggagcgagtnaccactgcctgggatgcaaaatgtcccttgggggaaggcatgacactt

SEQ ID NO: 1078 - DNA, 224 bp, Homo sapien
  misc_feature (1)...(224): n = A,T,C or G
ggcatgcacttttagtcccagctacttcggaggctgaggtggaggatcgattgagccagggaggttgaggctacannnagctgggggtgttccaccccntgnttccacccgggggaananacaagaccncttttnanagacaagctgtatatatgtatacagttannttngtgccgatttcctcagcccggggatncccnngntcttgngnnggcccancnggt

SEQ ID NO: 1079 - DNA, 133 bp, Homo sapien
  misc_feature (1)...(133): n = A,T,C or G
agcctattcaaaagggaacgctacatggtcgcatcttggcgtgagcagcgctattccgtgggtgctataacangaccagcagnacttgggngntgatnncccacccccccngnnatnnnnnnnnnncnnaaaa

SEQ ID NO: 1080 - DNA, 361 bp, Homo sapien
  misc_feature (1)...(361): n = A,T,C or G
acaggcataagcgaccacacctggcctcattctccgggtagatttttaagaaatatttcagccaggnacagtgtcacangccngtagntncnncntctcttgnggcntangnaaggnggattccttnagtccagggngatcaaggctgtagtgtgctatgattgcatatgtgtatagccacttcactccagcctgggctacatagtgaagacccatctgtaaatttaaaaaaatcattcttttcaggaccaaataggcaacctgggagttctaaggaaggcacatgacttcttattgttgttgttaattttatgtacacttattttaggaaataggtaatatatgtactaaattaggaggg

SEQ ID NO: 1081 - DNA, 307 bp, Homo sapien
  misc_feature (1)...(307): n = A,T,C or G
actctgtcacccaggctggagtgcagtggcatgatcacggctcattgcagcctcaacttcctggnctcaagtgattctcctgcctcagcctcctgaatagctgagaccacaggcatgcccctccacacctggctaattttttaattttttgtagagatggagtctcacttagttgtccaggntagtctaaaactcctggggctcaagtgatcctcccaccttggcctcctgagtagctggacccaagggcgcttgccaccactcccagctaagtacttttcatattaaaaaaaaagaagaaggaaaa

SEQ ID NO: 1082 - DNA, 320 bp, Homo sapien
  misc_feature (1)...(320): n = A,T,C or G
gacgagcgcccatttcatgttccagttgctgtattgccgccgacancgtggtttttggcatcatcaggatttgcgaggcacggatgaaactgcccacctcggcaacctggataaacacccgtaatctccctattttatccaccgattgtccatcctgataaataggctgcggcacgnccnagaagancttgagattaacgggtagtatagccaccgttggcaaanaacgtctgcccggtgatncaccaggcatcgggtgaccaaaaatttgagggataggcgccaatgtcctgaatgttnggttaggcccggtttttcgg

SEQ ID NO: 1083 - DNA, 419 bp, Homo sapien
  misc_feature (1)...(419): n = A,T,C or G
cctcaacttnccggggctcgagcaatcctcgtatctcagcctcgcgngtagctggaacaacaggcatacaccaccatgcccggctaatttttgtatttttagtagaaacggggtttcactatgttaagcaggatggcctcgaactcctgggcacaagggatccgcccgcctccacctcccaaagtgctgggattacaggggagagcctaccgcacccggctgactttgcttttttttttttttttttttaaggtgtctctgcctgtctccctgtaaggcaatgcanttnaccacttttgcatgcacacggtcctaggccatctttcaatgtctaggtacagctagggggggaattcttcggnggccggaattcctgncaggnccgggggggattccacttggttnttggaggcggggcc

SEQ ID NO: 1084 - DNA, 443 bp, Homo sapien
  misc_feature (1)...(443): n = A,T,C or G
acagcttttaagaaagagtgtgtaatgccctagaaagatttgaaagaagaaagagaacagccacaaaatgttagctgtttgtctttaaaacaaaaaacaaaaaaaagcaagaggcttacctccagctgtgtccagttgatgagatcagcaatacaaagccgtgttttttcttttgttcatcaagaagaggactggtttttttttaagcatcatctgaggtgtaggaattttttttcccctaaggagaggggttggggttttgtttttgtttttgttttntttctcttttattttcacaaggaggaagttgggtgacagctgctgagttttggggctttttttattggcttngtcattttgtgttttgaggaaccgctacccataggcatccatcatccccccaaacccttggtcctggtcctccccataancagggnggtatt

SEQ ID NO: 1085 - DNA, 385 bp, Homo sapien
  misc_feature (1)...(385): n = A,T,C or G
ttcattagtagaaaaaagcagtgctggtgnaaaacttcggaagcccacagtctgtagcaatatcaagggaattttgaacnatggaaagncccaaatcataatcagattggaacatgtcccagccccttcatgggccctttacagtgtttctcaaagtctagtccnaggccaccacccacaaaactatgcaaggagctcaataagatgcagattcctggggcccccaaccagnacctactgggnttaatttctctgaggggaaagacctgggggaatctgcatttaaactcactgccctacctctctggggtgaattctatgcccattaacatttttaaaccccaccccggggggcttcaggattaagggattcccactggcccnc

SEQ ID NO: 1086 - DNA, 354 bp, Homo sapien
  misc_feature (1)...(354): n = A,T,C or G
gagacagagtctcaccatgttgcccaggctggcctcaaactcctgggctcaagcattctgcctcctcagaatcctgagtagctgggactatatgtgcatgacacctgcacctgggtcagcatcttattgctttaaattgcatttatttaactactatgaatacaaataatccttcataggatttattgggccatttaaatttctttctttttcgtaaattgggctattttgtctttatcaatgttttattcttttcaatattaatactaacaatcttttaggctatatggttattctctggtccatcccctccctnccctcaacttttcatttggaactttacccattattgtg

SEQ ID NO: 1087 - DNA, 225 bp, Homo sapien
  misc_feature (1)...(225): n = A,T,C or G
tccaagttttggttccatgtcactttctctgggaagctttcctggncccctcccaaagactgcattaagagcccttcaactgagctttctgtatcagtctattacagaaattgtcacaagcactgttcacttgtatccactgctatgatctgaattccagggactcagcactcctgggcctagcacaatgtggggagcccagtgtctacaggcgctcgtgccgan

SEQ ID NO: 1088 - DNA, 466 bp, Homo sapien
  misc_feature (1)...(466): n = A,T,C or G
gggcaagtatcgtttccaccgtactcgtgataataattttgcacggtatcagtcatttctcgcacattgcagaatggggatttgtcttcattagacttataaaccttcatggaatatttgtatgccgactctatatctataccttcatctacataaacaccttcgtgatgtctgcatgggagacaagacaccggatctgcacaacattgataacgcccaatctttttgctcagactcttaactcattggatacttcatttattaaactccttggcaatgtatgtcgtttcagcttaaacgggtatccggcaatggttttcctggcagcccgggggggatcccactangttctagggaggcgggccgccaccgggttggggaggcttccagctttttggtttcccctttnggttangggggttaatttcggggcttggggggntaattaagggggcaataggctgtt

SEQ ID NO: 1089 - DNA, 405 bp, Homo sapien
  misc_feature (1)...(405): n = A,T,C or G
gtttaaaactccttagcaacataaccctgttcaaatgaaattttagataaaaatctcaaatatttccntaganctctgttctacctgatgcnactttcangctcttctataanttcttccatatgnattctatccactaattttaaagggatnaaatggggnaccttnnaaaaggggnaagctccatagnnaaacttcntttatttggactctnccaaattccttaggaaatatttatgcaagtaggggtgtgggtgggcttatgccttattaatcccagccctttgggggagcccaagggcagggagggattgcttgagcccggggggtttgagaccagcctggggccaaggaggagttaggacgcctgtcttcttattaaaaaaaaatttaacgtgggggagg

SEQ ID NO: 1090 - DNA, 450 bp, Homo sapien
  misc_feature (1)...(450): n = A,T,C or G
gttagccagggtggtcttganctcctgacctcatgatccgcccgactcggctcccaaagtgcncggantacaggcgtgnggnccgngncccgncncccccntctnttnttcncncncgnnnnannnnntaggggnngggggngggcnnccccntntnntcncgcnagngggagnnttttccccccngggggggaaaaaancccccaaanttggggtttnnnccnnggggntcggggngnaaaaaagggcntcaacttgnaggantctnggganaatgacacnttncantnggggagctgcagantttagcagctggctngggtctgccctcggggggagggggagggagtttgcaaaaaaaggaggccctnagggtnaggatatcttggggggcccaccagacaggttttaaagagggaaacctctttcattcacagctttcgtttgagt

SEQ ID NO: 1091 - DNA, 426 bp, Homo sapien
  misc_feature (1)...(426): n = A,T,C or G
atggacttgaatggactcatcaatgaatagaatccgactggaatcatcaaatggactcaaatgaaatcatcatcaaatggaatctaatggaatctgagaatggactcgaatggaatcatcaacgaatggaatcaaatggaatcattgaatggcatcgaatggaatcatcatggaatgggaatgggaatagaatcatcgaatgggacacggaatgggagtcatggataggattgggaatccgaatgttaatatttggaatgcactccaatttgaaatccatccatcggaatgccaaggtggaatggggaatccatccatccggaattggggaattccaaattggggaattccatccatccggtattggggggattccattcccattcccaaatnggggnatcccggaattgggggattccatcccat

SEQ ID NO: 1092 - DNA, 96 bp, Homo sapien
  misc_feature (1)...(96): n = A,T,C or G
attgctgataccgtttagctgaaacgacatacattgcaaggagtttataaatgagtatcaatgagttagagtctgagcaaaaagattgggagntat

SEQ ID NO: 1093 - DNA, 475 bp, Homo sapien
  misc_feature (1)...(475): n = A,T,C or G
tgccacggatcaggaaagcctggagctgaagccaacctcccgagcaggcatcaaacagaaaggccttttgctaagtagcagcctgatgcactccgagtcagagctggacagcnaatgatgccatctttacanngccaaanccaganaagggcaaantcctgcatggtcagaatggctctgtacccaacgggcagacccctctgaaggccagggagcccgcgggaggagatcctgtagccacctgggtctgtctcctcagggcagggccagncacacttgcccggccagtcctcctacctnccgagtctgcgggcagttgctgttcccagcatnttgctggtncattttcggccctggacagtncccaaccagnaaccnttggggattttgaattcccagagaagttcttncaggnaacccctttaaaggagcttttgaattgaaggaggtttcnttttttnaaacttgtnttggt

SEQ ID NO: 1094 - DNA, 399 bp, Homo sapien
  misc_feature (1)...(399): n = A,T,C or G
gaaagtccagagtctagggtggatatgtgagctactgctggtcaatggaagtgattaagatgatccttgaggaagataatcattgctgctgttcttaggttaaacatagtggnaggctagaagctcagatttggtgttggccaaatggcaagnagcatgagtattaggaattgaaagagtatagagccagggctagagagaggcaagttttgaaatgtgtgtccaggcggtgactaaatccatacccccagcaatggggcttagggaaatctcaaggccaaagagacaagaggggaaatgagggaatgagctgttgacaaaatgatccacggggaacagtggcctcccagatagtctttgtgttcctccagttgaaattttgccccttaggagtttaag

SEQ ID NO: 1095 - DNA, 378 bp, Homo sapien
  misc_feature (1)...(378): n = A,T,C or G
ttcaattccattcgatgatgattccatttgattccattcgatgatgattccattcagttacattggatgatgaatccattcaattccattcgatgatcattccattctatttcattcgatgatgattccattcaatttcattcgatgattccattcgatcccattcgatgatgactccattctattccattgggatgattccattctattccattcgatgatgatcccattcaattccattcaatgatggattccattcggattccatttggatggatggattccatagggtggatggattccatttggattccnttcggnggatggattccattcanttggcattcgggnggatggatttccantggaggtggcatt

SEQ ID NO: 1096 - DNA, 361 bp, Homo sapien
  misc_feature (1)...(361): n = A,T,C or G
ctctngttgcccagggtggagtacaatggcacaatctcatctcactgcagcctctgaccacaaggctcacacaactcttctgcctcagcctccccagtagctgggattacaggtacctgcaaccacacctggctaatttcttgtatttttagtagagacagggtttcgccatgttggccaggctggtctcaaactcctgacctcaggtgatccactcatcttggcctcccaaagtgctgggatgacaggcatgagcaccacctgggccaatcttcttgacaaattaacacatttatcaacatgtaatgtccttgtttgtctcttgtaacaattttttacttaagactcattttatgacatt

SEQ ID NO: 1097 - DNA, 413 bp, Homo sapien
  misc_feature (1)...(413): n = A,T,C or G
aggaaattgtgctaaatgcagaacacagagatgaggagtaattagaaggagggagaggtaggatcaaggagaacttttttctttttaatctaggtagctcttctagcatgtttgtaattgacatgagaaatccagcaatgacgcgggtcactgctgcggagggtcctggcgaggtaggagtggaggtgatcagggcccaagtggacagctgcactttataggagcagagacactccttccatctgaacaggagggaagacaggacatgggggggtgtncgtgtncaggtgagctttgttaaattggttaaattngttgggtggtnagattgagtnagtttcttncttaatttgctatttttctcacctaccatatgagatgagctcctcaccaggncttttttggggaagggg

SEQ ID NO: 1098 - DNA, 318 bp, Homo sapien
  misc_feature (1)...(318): n = A,T,C or G
gccctcaaccaactggtcagcctgcccgtcgagcaacagcaggtacgcgccgccctcaacgtcttgccacagcactggcagccgctgctggagctgggcgtnncgaanagcgccctgcaagccgagctggcgcaaactgcaagccttgcccgggcaatcgattgacgatgcgctgagggcccgctggcagnccgtgggngaactgtggctgggcaaaaacgccgangggcnggcaatggtcagcctgcaaggtttgaacagcgccactgtttgcgcatacaagcactgggactttncccggcgtgaagttgggtggga

SEQ ID NO: 1099 - DNA, 445 bp, Homo sapien
  misc_feature (1)...(445): n = A,T,C or G
ttatcatgaaaaaaagaattttgtcagtatgatttttatgcatcaatggagatgatcatggatttttttcccttcattctgttgatgtggtatagtacattgtttttncttcatatgttgaattattcttgcattccaggnataaattctactaggtcatggngtataatccttttactatgctgtagaattcagtttgctagtcttctgttgagaatttttgcatcagtgttcataagggatattgttccatagttttcttttccagtagtgtctggctttgggnatcaggggtaatgctggccatcataaaatgaggtttgggaagttttctncccncttcaccttttttgggaaaagnctgaggaaggggttgggtgtaagttcgtctntaaatgcntgggtaggaatttncccagtgaagcccattagggcctagggccnt

SEQ ID NO: 1100 - DNA, 469 bp, Homo sapien
  misc_feature (1)...(469): n = A,T,C or G
ctgtgttgcccagggtggtctcaaactcctgggctcaagtgatccacctgccttggctcccaaggtcctgggattacaggcgtgcacntgtgcccggcttctaatacacatcttttagagaacatatgtatgtgtttctgttgggtgtatactcagagtggagtgtgtccttgagcaggaagggtgctggggtctatggtccaagctctcaagggagagtcaggaagcagagaggaggcactgggggcaagaatttgccaagccctgggaagggagttaagagagccgggaatctcaaccacagcctcccaacaccaagctgctcggcccccagaaagggttctgacacctgctttggggcaaaatacaagagaaggtcttgggagggaggcagtnacaggaaattcggtactngggcagacaagggttaactngaagcaaaaaagaaatnttttggaaactngggant

SEQ ID NO: 1101 - DNA, 307 bp, Homo sapien
  misc_feature (1)...(307): n = A,T,C or G
tatttttagtagagacggggtttcaccaagttggccaggctggtctccaactcctgacctcaagtnatctgcccaccttggcctcccaaagtgctgggattacaggcgtgnaccngtgcctggncaaggtgtgcatttttnaagggcactggttgttatgcatagttggactggtggggccagagtgggcaggagaagcagtgaggaagccatctgtgacttagggcagaggatggtngctttgcatcaggaaggtngctagaggccagggagaaaagggganggagaactnataaagctcanggtc

SEQ ID NO: 1102 - DNA, 133 bp, Homo sapien
  misc_feature (1)...(133): n = A,T,C or G
cccacctcagcctcccaaagtgctgggattacaggcatgagcactgcgcccancgagtggaagtttattttaaaagcttcagaacagaaaagaacggaagtacacttgaaagagacccaagcaggcgccctga

SEQ ID NO: 1103 - DNA, 298 bp, Homo sapien
  misc_feature (1)...(298): n = A,T,C or G
ggnnnnaannnacgtgcctttncgtgntggatcttagcaagtcatttaacctgctcaggcctcagtttcctcatctctgaacagggatgagaagcagagatgttgtgaggattcatgtctgtgcagctggcctgggctgggtacagcccgtcctcagtggccatggctgctgttttaggattctcatccatcaagtgggaaggatgcgtttgtctccactgcgtgaaagggaggttgtaggacagccagaactttgatccctaggggctggagggggagcttagagggatgctcgtgc

SEQ ID NO: 1104 - DNA, 432 bp, Homo sapien
  misc_feature (1)...(432): n = A,T,C or G
gnnnancntacancgttgnttagaatttaatagattggacttaggcatcatgggaaagaagatagactggaaaactacaatttgaggaaaaatacattttgaaaagtttcaataaattaagaaactgaaaattcctgaattaaaactacatgtgaatattaaatttatttagtaaagacctgagcgaaaatgaagctaaaattgatggaatgcaaaattaaagtaataagttgaaataattctgacatgaagatgctaattgtaatgaaaaatgacttcaagttacaccnaaagcaggtaacttacggtaggaggaggaggataccatggttggaacnccagggtantttaangggctttttggtattggtggtttattaatccccctttaatggaggtggggacttgnggtccattattaacggtggttgg

SEQ ID NO: 1105 - DNA, 250 bp, Homo sapien
  misc_feature (1)...(250): n = A,T,C or G
aaaatttnatnaaagggcntaagagagcaacacccngaccccngaanacagcnnccnaggngnccccnttatgcngnggggacnggccggggcanggcaggcggcncnggcnncccacccnncngngcnnagacgggggnggggggcannnncccnncttngggtnccncaaggcncacggggncaggcaggggcttcngagggccaatcttacccnttgggncccngggcagcatgancnncaccctga

SEQ ID NO: 1106 - DNA, 227 bp, Homo sapien
  misc_feature (1)...(227): n = A,T,C or G
tgttttaatggntttttttctaattattactacttcacaagtttctttcacaaacttcttcacagggttaaaaattttttttcttgttataaagttctgggtttcagaatttcttcaccaccagactggnacatatatccacatttatctttattcatttctatgaagtcgttttttctatatgcttcacctttgacattcatganccngtcacattttcctcgtgc

SEQ ID NO: 1107 - DNA, 128 bp, Homo sapien
  misc_feature (1)...(128): n = A,T,C or G
ttgcaggnaggcaggggcggtggtcacaaggtcgattgattagttggagtggggcaggaacaaatcacaatggtggaatatcatcttttgtggttcttcagttgctccaggccctctggatgtataca

SEQ ID NO: 1108 - DNA, 357 bp, Homo sapien
  misc_feature (1)...(357): n = A,T,C or G
aaagtgctgggattacaggcgtgcncntngtgcccggccaatcttttttttttttttttgagatgtagtctcactctgttgcccaggctggggtgcatgatcttggttcactgcaacctctgcctcccaagtagctgggattacaggcacccaccactacatccggctaattttttttgtatttttagtagagacggggttttgccttgttaaccaggctggtctcaaactcctgacctcaagtgatccacccaccttggcctcccaaagcgctgggattacaggcatgaatcaccatgaccagccaaaacaaagatttatttgtttgtttatttatttaggaaacaaggtcttgct

SEQ ID NO: 1109 - DNA, 113 bp, Homo sapien
  misc_feature (1)...(113): n = A,T,C or G
cataaaataaatcaataaagataccaacaggaaaaaaaaaagaggcaaaagctagagagacaaggtgtgcaagtgcaaatacaataaccaaaaaatatgaggtantggccaag

SEQ ID NO: 1110 - DNA, 110 bp, Homo sapien
aaacaattaaaacactccagaatacatggaggtattgtcatcaagatggctaagtaggagataccagccttcattcccccattaaaaaaaacaaatatagacaaatcttc

SEQ ID NO: 1111 - DNA, 102 bp, Homo sapien
ttcccaaagtgctgggattacaggcatgagcactgagccagacctttcctttccttttctttttcttctcttcttcttcttttttttttttcttgagatgga

SEQ ID NO: 1112 - DNA, 154 bp, Homo sapien
  misc_feature (1)...(154): n = A,T,C or G
nncanannncaaaaaanggggggnnggggnaaaaantttaagcnngggggggcccaannnggggggnanannccanttaaattnggttnggggtaattnccccntttttccagtcgggggaacctttcgtggccactngcatttaatggaatcg

SEQ ID NO: 1113 - DNA, 504 bp, Homo sapien
  misc_feature (1)...(504): n = A,T,C or G
tcagcacctgccatggagtagatgttcgataaataggactcacctgagaccttctaattgaatggcattcattcgactgttctttactgaagccgcgtaccccagtcactgtgctgagnncttngagacacagncgntnannnagnnnntnnncnnngannnnncncnnnnnannnnnnnnnnnnanngggggggggnnaannaannannnnncnnnnaannnnnngggggggaaaaaaaatnnttnggggnntnnnnnantantnngntttngntnnnttnnntnngntnnnnttttttttgagacccaaggnctcactctggtcacccagggntgaaggtgcagtggcacaaatctcgggctcactgcaacctcccagggntcaagtgatttcctgcctcagcctcctgaggtagctggggattacaggcacctgccaccactcccagcnaatttgtgtgtgtgtgtgtgtgtgtgtgtgtgtgtgtgtgtgtgtgtgtgtt

SEQ ID NO: 1114 - DNA, 164 bp, Homo sapien
ctccgtctcatttaaaaaaaagaaggtagcaaagctacaacagcaccctttaactagggtgaccatatgtcccaatttgcctgggatagtccagcttaacacctgctcctgtaacatatttattgtcagcactctctttcactcaaaaggcactgcaatttaga

SEQ ID NO: 1115 - DNA, 237 bp, Homo sapien
  misc_feature (1)...(237): n = A,T,C or G
ctgcaaagagaataaagacaggtggggagggggagacggcagtgaggccggaagcaagaggcaggcctgggttgaggacccagcccccacccacacaccaccccagggtgttcccaggctnacctccgcaagccaccagggtgtcgggcaggagtgcaaacctaggcatcaactngcctgctgtttgaccctcagtgagccccctnccctncctgggcctcagnttccccaactgca

SEQ ID NO: 1116 - DNA, 496 bp, Homo sapien
  misc_feature (1)...(496): n = A,T,C or G
ggatagctaaattactgtgggaaagagaaagatgagagatctatttctataataagtagcacattgtgtattcaggctaaaaatacctgtaaagtccaatgattggggatgtaagagtggaataatgttgcatattatagaattggtcattcacaatcactgaattatgtttgatagatttcagtaaaattttgctgacctacaatagttaaaggtaggggattatggccagggcgtgggtggcttatgcctataatcccagcactttggggaggcctagggtgagtgggatcacttgggggtcagggagttcaagacccaacctggacccaacatgggtggaaactcccatctctacttaaaaatacaaaatcagcccggtntgggtggcacgtgtntgtaaggcccncctacttggggaggcttagggcagggggatcactttgaaccnggggnggccggaggttncagttagcccagatcctgcctttncctt

SEQ ID NO: 1117 - DNA, 361 bp, Homo sapien
  misc_feature (1)...(361): n = A,T,C or G
cccctatttcttttttcagctaagcttcttaagatggaagttgttccttaataatggcaaaagcctatgggaatatgttctttcatttattacaataagttagaaagtccttattactgtaaggccaagatgctaactttatgaggcaccagtttctcctaatggagagttttttcccccacctcacagaataatcgcatataataaaagctaatttacccactcctgaagggtaaaatactttactcactttcacatatctctatataggtacattactggggatggatggtaaataaccaattctcttttggttggtatccnggagggncccctgggaatcttctcgggggaggaggta

SEQ ID NO: 1118 - DNA, 345 bp, Homo sapien
  misc_feature (1)...(345): n = A,T,C or G
gaccagcaaggtcanttcacctcctatgccacctttctcaggaggacactgccagagaaaacaggctccatcaaacaagggagtaaaccaagacactaggtaacagaaaacgagatatantaagagagaagaaaagganttcccggacantagtgaagggagttcccagattacagtcacatntcaggcatagagaagggagttcccagattntagccacacacatcaggcataggaaggctattcagtccagtcagggggcggggtcaggaggctccggggaaacgctttacttcagggaaanttgaaacagagttccctaattaaggcttgatttgcttgttg

SEQ ID NO: 1119 - DNA, 274 bp, Homo sapien
  misc_feature (1)...(274): n = A,T,C or G
aaaagtagtcancctggatgttggaggncctntcggcntccnatttnnccccnttnttgagaaattntncttttttgtanagnagttcctnangggtttcngtggagaattaaaagttggggccttggaggatggcatncacggganaggnttcttgggagaagntccagtagatgcattcggncatgttgatgtnatagcgggtggtctgggggttgnatnagttttnggttaagcttngnatggtnatggnttgggnggggaagatggcttc

SEQ ID NO: 1120 - DNA, 130 bp, Homo sapien
  misc_feature (1)...(130): n = A,T,C or G
aggggggtgnggnnnaagttnagcnggtggnccncattaggggnaggacncctntggncnaagggnnagaggccaaaggttgggaggggnnnaggatggacctgaggagcnggtgggggcatttnnccct

SEQ ID NO: 1121 - DNA, 503 bp, Homo sapien
  misc_feature (1)...(503): n = A,T,C or G
tttgttnnnaagtnagaatttctncatcatttattcttnagtnaattgaaacatagtcaggaaaaaatggngccaattccccccaaacaacacatggatgtttttgcttcttgacccacttagagtcccaaaaggacaaaaaatacatggaccaatattagttcacgaaacatgttttaaagancagagaatgaggtcttcatcccacctcagtaaggcttgggctgatgaagagagggtntattcagggtcctctcttgtcatatgtacaagctgacgcttgtttcccaagcatgatagtagtggggtagactgcctttattgttagcccctaataggantcagntcagcacantgaagaanttccaaagaggggcagtgaagtgacaacagcttcagctcgtcatcgatgttattacaggntcacaaagggntcccggggctcttgnggaaggngagggccttgccgtntttcagggcaccccagggcgggcacanaagtg

SEQ ID NO: 1122 - DNA, 405 bp, Homo sapien
  misc_feature (1)...(405): n = A,T,C or G
aactttttagttttaaaaaattgacacataataattgtacatgtttatggggtacatagtgatgttgcaatacacatgatggacagtgatcagatcagggtaattggcatacccatcatctcaaacatngatcatttctttgggttgagaccattcaatatcttcattctagctatttaaatctatgtattattgttaattctgttcatatttaactacagtgttatagggatactccggtctctttttataagggncactaatctcatcagggggaccccacacttgtggacctcatctaaacctaattacataaatctaattaccnacccaggggggccttctcccaataccctcacatgggggngtcaggggcttcaacattagggctggggggnctacacg

SEQ ID NO: 1123 - DNA, 380 bp, Homo sapien
  misc_feature (1)...(380): n = A,T,C or G
aaatgagatagtgcctttaaatatgacttcatagcccattatccattaccattcattcatccactcatttgttcattcatgaattcatttagttcaaataatatagaggtggagatggggagaaatcactggggtgggggtggatgtcaggaagtaagcaaatgtaagactgcagctctagtatagaagagatgatgaacataaacaagtcttaggagaggacaggaagaaaaccttccctgtaggcccgtaaaatgtgcttgaatgaagggaggttgggcgctaccagtgggaacgtaacaccacaggcaaatgtgcgcccacaggtaggaggggttacatgttcgcctttgtaggtttaaaaaagnaaggtatagtcc

SEQ ID NO: 1124 - DNA, 154 bp, Homo sapien
  misc_feature (1)...(154): n = A,T,C or G
gcncttccgtngggantnnngcngggcnaagggaagagnnaggctgaggctacagccaaanaggcnnganaagccaaggncanggntngangggnagaggacagncagcatntccagcctgggntctnggtgtagggttatcccttatccctgt

SEQ ID NO: 1125 - DNA, 364 bp, Homo sapien
  misc_feature (1)...(364): n = A,T,C or G
agaaacttgaggtattttctccaccagaagctgcccatgggtctgtaggagctccggttctgccaggcggtggcctggcctgccccgaccccaggccctcgtccctgaatcccacacccagcagtggctgcgcatccagacaggacatgctccaagggtttattaataacctctgccagagactctgcccccagggagcagcctccccatggccgtggtgcaggtgtgcagcaggaaggggatggcgacacagatgaccacgtcatcgtcttctgagctgtggttattctttgaaagggcaggaggaagtcccactgctctggaggtntgggaagggtgggagtctggtcttcctgggaggccg

SEQ ID NO: 1126 - DNA, 226 bp, Homo sapien
  misc_feature (1)...(226): n = A,T,C or G
cngggagcggggnnttgcccgccnnngaantnantnacccgggnanagggagaggntctncggcgngaagnggttnngaanagcccnaagnannanggagnannagaanacgnnccccngctnccaccngnttttttccacgggnagcttnnnanagaggaagaagganccctcggagnccaanacgggaggcgtggtntngaagttttncnccngctgcccantg

SEQ ID NO: 1127 - DNA, 411 bp, Homo sapien
  misc_feature (1)...(411): n = A,T,C or G
ccaattcctcaaagcgctgcatggggtgggggcagagacagaagagaatgtaaacattgggttccaccccctggagctcaagggaagacccttacccagatagggactaactggaggggtggaagggaacaaggtgaaaggtatgggtcctggtgagacaaaagcaggggggcctgagaacacagagcaaggtgggtttggagggagcacagcagggtgcaggaagggagatgggggacatttcctattccagtgcatgtccccttaaataaactgggtacaggagcattatggaaggagaaccaaaggacagaagacaaagcgagcacccccaccccagggccaacgccatcctctnttacacaattncaacacaggttccagatttaggagccttgggccagggaagtt

SEQ ID NO: 1128 - DNA, 336 bp, Homo sapien
  misc_feature (1)...(336): n = A,T,C or G
ttttctattnattgataaacatttattctgagaatctaaaatctggacaaagtactggactttagaaaaagcctacacaaaattgtctcattcttccctaatacattaataatctaagaataaggaggtgaaaaaaaccctttaaaaataacattgctccagtttgtctgcaggtatgtgatttaaaatatccctgttttattgaggtataggctgcaaactttggnaaaattagaaaaattaacaaaccctttcaaaagaaaaaaantacaaaaacaaaaacaaccaaaccctaacgttatatctttcttgggtacatatacaggtaactacaaa

SEQ ID NO: 1129 - DNA, 292 bp, Homo sapien
gatttcttatacgccaggggtcctcaacccttgggccaccaactgatagcagtccatggcctgttaggaactggatagcacagcaggaggagattggtgggcgagcaagcgaagtcattctgtatttacagctgctccccacggctcagggtaccacctgagctctgcctcctgtcagatcagcagaggcattagattctcataggcacgtgaaccctattgtgaattgtatgggaggggatctaagttgaatgctccttatgagaatctaatgcctgatgatctgtcattg

SEQ ID NO: 1130 - DNA, 172 bp, Homo sapien
  misc_feature (1)...(172): n = A,T,C or G
ctctcttgttgagagagtcatctgtcctgtttgttaggggtattttttcttgttaaaatgtatctcctgttgaatactcggganattcaaagggaagtgtggtcagcacacactgagcgttcttttctggagaggccggttttagcctcgtacctttagcaggaccgatagc

SEQ ID NO: 1131 - DNA, 417 bp, Homo sapien
  misc_feature (1)...(417): n = A,T,C or G
gaattttcccaataaagagcacataatttacaaataacaataaaatgttcagtattctttgttctaaattccatgtacccaatcgtttctttaagaatgtttttattgatttttgccaaattattgtatctatagctaacctatgggtgcaactgatgaatgaatatagtcccaaaataatatggttagtatttttggttaccttagtaggtaagaagaaggtgaaaccaaaaagacctgtgttggaacctcatttgctcctccataatattagtaacttccttactgaatcaaataacagttttcaaattaataggaccaccactattttttccagttttgtgctggctcatggatggtaatggtcttaccaaaccaccggcacactttggaaggttttaattanggtaattattt

SEQ ID NO: 1132 - DNA, 340 bp, Homo sapien
  misc_feature (1)...(340): n = A,T,C or G
tgcttctctgccccttttccatttcttttgtatttgttttctgtgagagcactgaaatggcggccctggaatctacaatttggctctccactgagcaccttatcttgccaccttagccttaagaatgaatatgaagaaaaatacacagccacctctggtccagggcagtaagaagggctgcaaggaaggggaggatggggacaaggaaaggatcagatacctgctccagtagttntgaggccactgtgtctncaggggnctccagggaagagcaagatgaggggattccnacgaaggttattttttattggcagctgtgggnccaggagagnttcagaat

SEQ ID NO: 1133 - DNA, 276 bp, Homo sapien
  misc_feature (1)...(276): n = A,T,C or G
gagactgaggcatagcaggcttcaaaagcgatctgacatgaaagtcattaacaaagccagccgtgaaaaggtgccccagagttgctgtggacagacctgtaaggacttgcaaaacaaaagaaagtgaggggtttttttaacctcagagctagctgctctctgcagcctcctccactggcttctctggctcacccaagctctcccttacagaggcaacacagaattataaggaatcagaaatcccccttctaccaggntgcaaatgtggctctnagc

SEQ ID NO: 1134 - DNA, 350 bp, Homo sapien
  misc_feature (1)...(350): n = A,T,C or G
gggggaatctccgaccccgacaccctacacatctggaagaccaacagccttcctctccggttctgggtgaacatcctgaagaacccccagtttgtctttgacatcgacaagacagaccacatcgacgcctgcctttcagtcatcgcgcaggccttcatcgacgcctgctccatctctgacctgcagctgggcaaggattcgccaaccaacaagctcctctacgccaaggagattcctgagtaccggaagatcgtgcagcgntactacaagcagatccagggacatgacgccgntcagcgagcanaggagatggaatggcccattcttggccgaggaatttgagggaatac

SEQ ID NO: 1135 - DNA, 373 bp, Homo sapien
  misc_feature (1)...(373): n = A,T,C or G
ggtgattatttatgtcacgatatgacccagccataaatgtacttcaggtaagaaggacactgacatgatatcttactgatcaaatgcagtcagtaggtatatatgaacttttttctctgtgaagaaaagctattaataagtttgacttaataggcctatagtatgcacatactggccaagattctaaatggattattcagcggttctgtttttgtggaggtgcttattctcatttctccaaagccttaagattcctgggaatagaggaaatgttgctgccaccagctttgctgtganatttcaaagagaataggngttttgctgttttgnatttcctagtgaccctttttggccganctcctgatttattaag

SEQ ID NO: 1136 - DNA, 322 bp, Homo sapien
gccaaagcaccctgctcttcctccctctacttaagtgacctgtaaacccaacagctcacctccgcctccaggaagaccagactcccacccttccacacctccagagcagtgggacttcctcctgccctttcaaagaataaccacagctcagaagacgatgacgtggtcatctgtgtcgccatccccttcctgctgcacacctgcaccacggccatggggaggctgctccctgggggcagagtctctggcagaggttattaataaacccttgggagcatgtcctgtctggatgcgcagcacttgctggggtgtggggattcag

SEQ ID NO: 1137 - DNA, 340 bp, Homo sapien
  misc_feature (1)...(340): n = A,T,C or G
gcaaaccatgccaaccacgctggcaactgctgctgtccagtccctgtgttttctgaccaccgtcactgtgcaactcatcgcctctgccacttaggaccaggaaagaggctggttttgctcccactcttagttgctgataaagtggggagaaggaaaatggacactctacagagtttggggaagggagagtagggagcccatcttgtccagaaagattcatctgtggtctgtctgttaaacacagctgatttcagtgggctttcccctggccctgggggancagacactgactggggttgtnggcagaggaagccatcctggcgggaccttgcttncaagg

SEQ ID NO: 1138 - DNA, 282 bp, Homo sapien
aggcagctcctggagcagagtcggcactcttgggttaacaccacggtactcatcacaggctgcaccaacgctgcgggcctcttggtggttggcaactttcagcctcgttttaggtggagtcttctttgtccatgagagttctcagctgcaacatggggcagccctgtgtgagtgggtgtgtgtcatcgatatcctcattttctatggcaccttcagctacgagtttggggcagtctcctcagacacactggtggctgcactgcacttagcccctgggccggg

SEQ ID NO: 1139 - DNA, 365 bp, Homo sapien
  misc_feature (1)...(365): n = A,T,C or G
gtctgtcgctcctgccccagttccctctggnncccctcctaggtgctgtcctgaatggcccgttgtcatcccaggggtgactcctggtgatgggagtcagcantttcagattcttacactccatagctccccttaccatgaggtggagctggcttccttttncctgtcttcagccctccctgtctcccccacttcctggccagggctctcattctggacctgtgttgtaattgtgtacagaggatggcgttggcctggggtgggggtgctcgctttgtcttctgtcctttggttctccttccataatgctcctgtacccagtttatttaaaggggacatgcactgggaataggaaatgtccccca

SEQ ID NO: 1140 - DNA, 358 bp, Homo sapien
  misc_feature (1)...(358): n = A,T,C or G
tgcaggagaaaccagaccagaaggatgggatcttcaccaaggttgtgctggaggcgccactcatcacagagagtnccctggaggtggtccgcaagtactgcgaggatgagagtcgcacctatctgggcatgtccacacttcgagacctgatcttcaagcgcccgtcccgccagttccagtacctncatgtcctcctcgacctcagctnccatgagaaggacaaggtgcgctcccaggccctgctgttcatcaaacgcatgtatgagaaggagcagctncggggagtnatgtggagnaaatttgccctcaagtacctagcagctnctgggtgcaccccaaccaacccgttatgtggctg

SEQ ID NO: 1141 - DNA, 384 bp, Homo sapien
  misc_feature (1)...(384): n = A,T,C or G
gctcatgcttactgaaacattgtgccaagaaactctgtgggatttgtgtcccttaaaccagactcacttttctgaaaaatctccattgttgaggagaggctgctcaatcgacaccccgagttctcatgactgggaagatagttttcttcaggtgtcaatggcgttagactcccaggaagactagccctgcccacaggncaacctgttggtttgagagcgtgttcgtgttctcttgccctccctgcctaagagctactgggatcacgttagcgggcatttaggctttgatgagagggcacagttttgagttaggtttanctcccccttttctnttgcctggggaactgttttggtccagntttaagaactgtnggtttttggact

SEQ ID NO: 1142 - DNA, 457 bp, Homo sapien
  misc_feature (1)...(457): n = A,T,C or G
taaagatggaatcagaaactacgtggtgtggaggctgttgatgtttctggtgtcaagttctcagaagttgctgccaccaactctttaagaaggcgacaggatcagtccttctctcgggttctggcccccaaggtcagagcaagcatcttcctgacagcattttgtcatctaaagtccagtgacatggttccccgtggtggcccgtggcagcccgtggcatggcgtggctcagctgtctgttgaagttgttgcaaggaaaagaggaaacatcttcgggcctagttcaaacctttgcctcaaagccatcccccaccagactgctttagcgttttgagattccgcgttgaaaagttcctttggcccacggaggagcaggggaantttggggnccacgnaggaaaattggccttnaagggggattttngttttccacgttgggggcccaggggtntttttt

SEQ ID NO: 1143 - DNA, 230 bp, Homo sapien
  misc_feature (1)...(230): n = A,T,C or G
gattcggcanaggggtgtctctgaattagaagatgagttttaggattctcttacccctgcctcgcattctgtggactgcctggtatgtcatggtcgctcagcaagatttttagaaacgaatgaatgttgctgctcggaatctgagaagtgcataatgacgctgcgagtatcatcgtgattagagctgggcctgccacacagctcacattcagtcaacacgtgctgaataa

SEQ ID NO: 1144 - DNA, 205 bp, Homo sapien
  misc_feature (1)...(205): n = A,T,C or G
cntnnaaatcntcttgtttattcagcacgtgttgactgaatgtgagctgtgtggcaggcccagctctaatcacgatgatactcgcagcgtcattatgcacttctcagattccgagcagcaacattcattcgtttctaaaaatcttgctgagcgaccatgacataccaggcagtccacagaatgcgaggcaggggtaagagaatcc

SEQ ID NO: 1145 - DNA, 282 bp, Homo sapien
tgagactatactggtagcttttttgtttgttttcttcttcctgcataatcatcgtttcttccacgttgctctcttctgtttattttgatgtctgtgtttcgtgttcagggttttctttgattagtttcttggcttagaatcacacaaaggccaaatcctcataatgagaatccttatttgcagttttgtgtagttctctaattatcgtgaaatgtaatagaaaggtagggatagtgtattgctcacagaaggctgctaagttaaaagtgctcagaattctag

SEQ ID NO: 1146 - DNA, 427 bp, Homo sapien
  misc_feature (1)...(427): n = A,T,C or G
ttttattacatgtaagtaacacctcaatctgaaaagtatcagggcaacaccacacactgcagaggggcagggctcctccggcagttactcacttcccttgaaacagaagctcaaacatggagtagtcttctgtgactaaacttgttttccgccctcccaacttccagggaagnaaccttcttctgaataggatttgaggtaacttaggaaactgctctcaatacggaattttaaagttgggtgaggaagtcgacagaaggggaagtcacagtagggaaaatcaagggtactatcagggatgaagttcagcacgtcagagcaagggccagcgaggcccagggcgccagggncttgggtccctgnccccaccttcacccggggncagccaggacaggcacgggnctgccctacaaggtcacctcaggag

SEQ ID NO: 1147 - DNA, 409 bp, Homo sapien
  misc_feature (1)...(409): n = A,T,C or G
ctatgttccccaggattcagctattctggaagatcagcaccctaagagatgggactaggacctgagcctggtcctggccgtccctaagcatgtgtcccaggagcaggacctactaggagaggggggccaaggtcctgctcaactctacccctgctcccattcctccctccggccatactgcctttgcagttggactctcagggattctgggcttggggtgtggggtngggtngagtcgcagacagagctgtctgaactcacgtgtcagaagcctccaagcctncctcccaaggtcctctcagttctctcccttcctctctccttatagacacttgctcccaacccattncactacaggtnaaggcttttcacccccatcctggggnccttnggttgagttgcctggtta

SEQ ID NO: 1148 - DNA, 418 bp, Homo sapien
  misc_feature (1)...(418): n = A,T,C or G
ttcatttctttcaagtctggtggtttgtcactgcatgtacacttcattacacagacagcaaagcatgtagttgtgttgcagtgctaaacccaccatgacattttacaagaatacataatcaaaagagggaattgaccaacagagaagaaagtacacaaagaaacaaaagtatatggagttatagaagcagcagctacctctgggaatgttgaccctgcagtcactcaagagactctagatattggaagctgatccaaacttagaaaggagtatgacagtttgccacaggacaggaaaaatgttcactnctatattnataagctatgcaatggaggaagaaacccaagccctgcttnaaacgacttctttattatgtnaatttnacaaaggacaggaaaaacattttnaatttntcaag

SEQ ID NO: 1149 - DNA, 229 bp, Homo sapien
  misc_feature (1)...(229): n = A,T,C or G
tctttttagtaggacacttcacccctcaggccctttccaccctcaaaccttctgcacaggagactcaacaggcacagcttctttccccgttgctttagacggccccgcgcgtngactctgagcaggagggcagcaaagaccacagccacccccngccctcccaccacagtgacagtgtgggccntagngaaggcaggaaagngggttggcaaaggcctgggcggagggt

SEQ ID NO: 1150 - DNA, 384 bp, Homo sapien
  misc_feature (1)...(384): n = A,T,C or G
tctcccccatttatttggaaaacagaattacattaaaaggaaaaagtaacagcatgttgaaatttcacttaagtcgataccctttgatacaaactgggttattatgcatttataaaagatgccccttgttggccatggaaaagatacattttatgatctacagcggcagtatattcactttaagtaggatttaggattataaatgcaaaaaaaatttaaaatgtcacattttctctccccnttctacagattagattttttttgctccattacttnggagctcgcacctccctgcctccctgtgaggatgccatgcacctgttgcaggctgtcagcgggttgttgccccctgaccattcctctggctntaccccttaccccaac

SEQ ID NO: 1151 - DNA, 346 bp, Homo sapien
  misc_feature (1)...(346): n = A,T,C or G
taataaaaacaatctataacttaaaaattacaaatttatatagttagcccgttttgcatcactataaaggaataactgaggctgggtaatttataaagaaaaaaggtttgttttggcttacggttctgcaggccatactagcacggcaccaatatttgcctggcctttgatgaaggccccaggnaggttacaatcacaatggaaggcaaagggggagcagactcttttaagccaccagatctcacacgaactgagtgagaactcactcatcaccagtggctctaagccatttcatgagggatcatccaccatgacccaaacactncccatcaggccccacctccac

SEQ ID NO: 1152 - DNA, 404 bp, Homo sapien
  misc_feature (1)...(404): n = A,T,C or G
ttggtttgtacagtattatatatgtttttgcttttctttgtgtgttaagagaagtctgatttagggtaatgctgacatttttaaaattttatgaaaaaaaattcccagcttagttcttctcaactcttcctaacttatgccattgtaatattctctcattctaactcttgtatgtacctaccagctagggagattttgtcactttttattttctaaagcttgtcttatgaaaacagtatatattagatatactttngttgttcacacatgccctctgggaaatgtataggaatgccatctcttcctcatggctgattgaggaattattcttccnggatttttatacatcatattaggtaataaatattcttgctaggcttaatatggacaaggttttaataggc

SEQ ID NO: 1153 - DNA, 414 bp, Homo sapien
  misc_feature (1)...(414): n = A,T,C or G
tggcattcaagcaggattccactatgtaaatatctgtaatgcatttataataagtngtgtagtttgtcctgcatccatactacactatttgctaaagtctcagtgccatctcctaatgagactgacattttaaaagtctgtatggaatatccttgataattcaaggaaatatccctcctgcctaagttccaaactgggaaacattcaaattatataaatgacatttcaggactttaagtatgaagataatgggaattttattgttttgctttttaaaatgagagcatttttatttgataattttttttaaatttttaatttttaactaatttccattattttaaagtaatcagtttttcaaatncatggatttttgatatccttattccaagggggttatnctcaaagggcaca

SEQ ID NO: 1154 - DNA, 351 bp, Homo sapien
  misc_feature (1)...(351): n = A,T,C or G
nattgaagatgaagaaaagacaattgaagattatattgataaaaagatgaatgatgctgattccacttcagttgaagctatgtactctgttgctagtcaatgtctgcatgaaaagaaaaataagagaccagacattaagaaggttcaacagctgctgcaagagatgacagcttcttaaaactttattggaaaagactcttgactttttatatacacctatctcaaccatttttttaactgatttttttcctaaatattcttctttacctttaacaaggcataggctgttgcaggacagtggttattaaaggcatgggttggaacttccaaaatatnaaaaatagagccacc

SEQ ID NO: 1155 - DNA, 441 bp, Homo sapien
  misc_feature (1)...(441): n = A,T,C or G
tgttaccaatctgaagtgggagctaaataaaaatttcatttgtgatagatgtattaattgaaacctcagtttattctgtatggatatgaattttctacaatgcacagtcctactcacccgaaggctaataaaactatactttccaaaacaaacactttaggaacccttctaagttggtagaatgcttagatatctcacagagggtagtcaataagcggggatagaacaaggccatacacacatttggaaatttttaacggtacntttctgggaagccaaaaagtatgctattaaaatcttgtcatattaagctagccaagaatatttattactaatatgatgtataaaaatccgggaggattaattcttcaatcaggcntgaggggnggaggtgggcttctnttacctttttcccgggggncctgttgtggngcccnccat

SEQ ID NO: 1156 - DNA, 500 bp, Homo sapien
  misc_feature (1)...(500): n = A,T,C or G
atttaatggacatttatcagttcccaaaattaatacttttataatttcttacgcctgtttttactgcagtctcggaacataaagtgtgaagatttcatggacatttatcacttccccaatcaatacccttgtgatttcctatgcttgtctttactttaatctcttaatcctgtcatcttcataagctgaggatgcatgtcacttcaggaccctgtgatgactgtnttaactgtacaaattgttngtaaagcatatgtgtttgaacaatatgaaatcagtgcaccctgnaaaaagaacagantaacagcaattttcagggaacaagggcgataaccatnnnggtctggactgcctgcggggttggggcagaataggaggccatatttcntcttctcacaggaaaggcctataggtgggtgtggcaagtngggagaatatcggtggaatttcttttncccaacagggattnttaatnattgatagcctgggggagggntgcc

SEQ ID NO: 1157 - DNA, 400 bp, Homo sapien
  misc_feature (1)...(400): n = A,T,C or G
taatctaatccctggactttcctgcaggtgtgattgtgtgcattgcaaagcaccttagtgatttgactctcctgccttggccaagcacacaaatgagattgtgacatatggcttgactctgaacctccaagatgtgactcttttttccagccttggagctgcccacatgttgcattgtgacatattcctaagccctngcactcaggttatgtgactctccttttntaacttaggccctgaatatttttcatgttaagacatattactaggtccaacacctataaaatgggagactaccacctgggctctttctacagagggccttgtgacatacctctggcatcaatgaacctagggagatgtgatgnttccatttttggcctgtacgtgtccccacaga

SEQ ID NO: 1158 - DNA, 395 bp, Homo sapien
  misc_feature (1)...(395): n = A,T,C or G
gcgtgttccctggaaaagagggacggatgaacctggaagtaagtaaaagacattctaggtgtgtagcatcaaggcagttaatatccaagcatcagctttctctttatacatctacactgcatggcctgcaccaaataaggaactgaaccaggggtatgtttttacctccacagctgcctccttccatcagagcaccttgatgaacttaatgtctagtcacacgtcattggcatgttttctccccagcatttaattacaaagctgggaaacaaaagatgatagatacagttttactactgcatacaaacatttcttttttacattcagtattaacttatgcaatatagggagatgtgcatacttattttcctgaggctnactggaagtttttttta

SEQ ID NO: 1159 - DNA, 406 bp, Homo sapien
  misc_feature (1)...(406): n = A,T,C or G
cggaacaggaatgagcgtgtgatccattaccaagtctcctcatgaaaaccacagtgagtcagcccttcacagaactactacggaagaaaattattcatcacagtgtacagttaaacaaaggaatctcagtnacacnaaaccaacctttttatttcctgctctctcccctcttttgtgaagaaagcgggtccaaatgtgattcaaacaactgtacggagtggccatattagaattgccctaaactgaactgcaaataattatgtgtgtatgtatatgtgtgggaaagagaatgtactgtatatgtgtatgttatacagacattatacacattacatacattgacccacaggacattgttaaaattattnatcacatggacatctttaaggtaggaanttaggtaggg

SEQ ID NO: 1160 - DNA, 311 bp, Homo sapien
  misc_feature (1)...(311): n = A,T,C or G
accggggtngtcagcgaggagccattcacactgaacttcaccatcaacaacctgcgctacatggcggacatgggccaacccggctccctcaagttcaacatcacagacaacgtcatgaagcacctgctcagtcctttgttccagaggagcagcctgggtgcacggtacacaggctncagggtnattcgnactaaggtctgtgaagaacggttctgagacacgggtggaccttcctnttgcacctacctgcagcccctcagtngcccaggtcttgcctnttcaagcaggtgttncatgagctntagtcagca

SEQ ID NO: 1161 - DNA, 253 bp, Homo sapien
  misc_feature (1)...(253): n = A,T,C or G
tgcctccctcagatagaaaacagcccccactccagtccactcctgacccctctcctcaagggaaggccttgggtggccccctctccttctcctagctctggaggtgctgctctagggcagggaattatgggagaagtnggggcagcccaggcgntttcacgcccacactttgtacagaccgagaggccagttgatctgctctgttttatactagtgacaataaagattattttttgatacaaaaaaaaaaaaa

SEQ ID NO: 1162 - DNA, 286 bp, Homo sapien
  misc_feature (1)...(286): n = A,T,C or G
aaaaaataatctttattgncactagtataaaacagagcagnncaactggcctntcggnctgtacaaagtgtggggcgtgaaaccgctgggctgcccccacttctcccanaattccctgccctagagcagcacctccagagctaggagaaggagagggggccacccaaggncttcccttgaggagaggggtcaggagtggactggagtgggggctnttttctatctgagggaggcaaagaagcagaggagaaaactggagtgggcggaaccctcccgccctcgtgcc

SEQ ID NO: 1163 - DNA, 362 bp, Homo sapien
  misc_feature (1)...(362): n = A,T,C or G
ttcggcacagggacctgatgtaccacatccaggacaaaggccgctttgaactctaccgtgccacgttttatgccgctgagataatgtgtggactgcagtttctacacagcaagggcatcatttacagggacctcaaactggacaatgtgctgttngaccgggatggccacatcaagattgccgactttgggatgtgcaaagagaacatattcggggagagccgggccagcaccttcttgcggcacccctggactatatcgcccctgagatcctacagggcctggaagtacacattctctgtngactngtggtcttttggggtccttctgtacgagatnctcattngccagttccccctttcc

SEQ ID NO: 1164 - DNA, 260 bp, Homo sapien
aaaagcaagaagcacttgccagatttaactataattcctaaaaatgatgaacattttcatcttcaggaacatgaaacatcatcgactattctctacagacaacaggcaaaggttcttactggtccagtacatacaagtccttcaggaagaaaaacatgattctaccaggattgggttgaatagagagagaattgcagtttaagattcatgagtatggaaataaacagctcttatggctaataaactctctatgaacttta

SEQ ID NO: 1165 - DNA, 410 bp, Homo sapien
  misc_feature (1)...(410): n = A,T,C or G
ttcgttctgcgtcatgccaactgcattttatggtgataacattctccaaatagcacctctacaatcatttttcagtcgttacccttttaactcagcaggaaaggctattacagatacttctttaaatcagtgtttattgacagggaaaagcaccagcaatacacacttaaccaaatccttgcaaatgtcatctattaaatatcttcatccttattagtctgttttactttgaatatcttctgagtgaaattgagtgcattcccatatcttttcaccaattatatttgttttcctatgacccaatttgttcatttttctattcaatggaaccctctccccagagagttccccatgtgccaatttttctactncaattnatttacctgttttggcatttaaacttatnaata

SEQ ID NO: 1166 - DNA, 473 bp, Homo sapien
  misc_feature (1)...(473): n = A,T,C or G
ttcggcacaggcaaggagcatgcaagttgtccccttggacaaacagatcacaatcatagatagtccgagcttcatcgtatctccacttaattcctcctctgcgcttgctctgcgaagtccagcaagtattgaagtagtaaaaccgatggaggctgccagtgccatcctttcccaggctgatgctcgacaggtagtactgaaatatactgtcccaggctacaggaattctctggaattttttactgtgcttgctcagagaagaggtatgcaccaaaaaggtggaatcccaaatgttgaaggtgctgccaaactgctgtggtctgagtggacaggtgcctcattagcttactattgccatccccctnacatcttnggactcctnctccatattttaaatgaggagtattgtggtaggacatggaaaagtcggctttcatctgggaggaanggganaagancattgcacagagcta

SEQ ID NO: 1167 - DNA, 559 bp, Homo sapien
  misc_feature (1)...(559): n = A,T,C or G
gcagatccctcaccggtagcccccactccaggccagactgaaacaccgcggtnggctcctggagcaccccccacgcccggggctggctggcctgggaggaggggacacaagaacttgggacggcagttctcaaaatgcagtctggggaccgcagaggttcctgagatgctctggggggtctgtgaggccaaacttattttgatgatgaaactgacacattatccgtctttctcattctcgctctcacgaatgttccaagtacaaaacccacgatgcagtttcagatctcacgtcccaacagacctttaagacaggaccgcttgttgtgtttggggatcgaatcgaagcttatccacagttattttgagaggactgccgaggcactcctccttccaagtgttgcggtgaggccagaattttccacagatttgcccaaaacccctttgcagtgggttgaacacagaagcagctncgagaaccagctgttttcccgtgaagccagacancgaacagattgggaaaggggaaaacagtgctttttctcacagtttttccnttc

SEQ ID NO: 1168 - DNA, 481 bp, Homo sapien
  misc_feature (1)...(481): n = A,T,C or G
ngnaaataganatttttaattaaaacaattaaattatcgtttcccgaacggaagatctgtgaggaatatgcactgtttttcccttttccagtctgttcggtgtctggcttcacgggagacagctggttctcggagctgcttctgtgttcaagccactgcaatggggttttgggcaaatctgtggaaagtctggcctcaccgcacacttggagggaggagtgcctcggcaggtcctctcagataactgtggataagcttcgattcgatccccaaacacaacaagcggtcctgtcttaaaggtctgttgggacgtgagatctgaaactgcatcgtggggttttgtacttgggaacattcgtgagagcgagantgaggaaagacggataatgtgttcagtttcatcatcaaaataagtttgggcctcacagaccccccagagcatttcagggacctntgcggtccccagactgcttttgagaac

SEQ ID NO: 1169 - DNA, 335 bp, Homo sapien
  misc_feature (1)...(335): n = A,T,C or G
ctgaaatacttgggactagtagaagcatcttggatttgggatgtttttccaaattttggaatacctgcatacacacaataagatatcttggagatgggacccaagtttaaacacaaattcacttgtttcatatataccttatgcacatagcttgaaggtaactttatataacattatttttaataattttgtgcattgagaccaagtttgcataccttganccatcngaangcaanggtgtcattatctcagccactcatgngggtaatttgtggtgggttgatgtcaccatcattcctgactgantgtatatgctnccaatnagcagttatttt

SEQ ID NO: 1170 - DNA, 346 bp, Homo sapien
  misc_feature (1)...(346): n = A,T,C or G
cacaacacagtttattcggtctccctaaaggaaaaaacccattttaaaaagccatccagcagantccacatccctagaaagacccacttcctggcccttcagctgcttctgtttctcttcacctacaaaantaaaattacagtntacaataaccttttaaaatacagcatcattaagtgggaaactgaaagcctgccattgttgttgccgtttaacagctgatacaggtttctgggtgatgctactgttgcctagctaccctgaccacattattttttcactgtatcagtgggngtgtcatatttttttttttgccatccttgttcctgtgcgagttatgncatat

SEQ ID NO: 1171 - DNA, 265 bp, Homo sapien
  misc_feature (1)...(265): n = A,T,C or G
tgtgtctgagctttggcctgtgcattcccaggaggctccagcttcttaatgtttttcttgatttcctcccagctagaagagaggcatccttctcccccagtcccctgctctgactcagtttgtaaactggtcaattgtctcatccattccctatgccctgaggtagcacctgccaccatctttgaaatgctatcaaaaagcatcctccacttctctcctgccctgaactttgggtnaatactgtnttccanggcccntttcccaa

SEQ ID NO: 1172 - DNA, 398 bp, Homo sapien
  misc_feature (1)...(398): n = A,T,C or G
ctgtttagaatatgctcttcctgaggcttagcgtnggaanccttcggcactggatgttagggaagggggtacgtttcggtaaacaatgacagtgacttctgtttggaaccatagtttctttgttggaacgaagctcaactcatataaggagtttggaaccccctgccggacttacaacctccaacttctctctaatgaggctcttgggagctgtacaaaaaggtgaggctggagtttgactgttgtcttctgttgcaggttctgggcatttgggaaaagtttctcttcgggctnttaagcaaggatttgtctctgtttatccaaagngctgcagcgntggcntaagtaggtgttgaccngggggcatccncttaaagctaggtaggaaaaagctttna

SEQ ID NO: 1173 - DNA, 166 bp, Homo sapien
  misc_feature (1)...(166): n = A,T,C or G
gngttccccccccgtnggnttngggggaacncccccatnggngaaaacccccccgggacagcagcactgcaactgccnagcagccggggtngggggggcgcccnnggcacagctgggcccctgngncagcagggnttcgntgtcaggctcgatgtcaatggnctgg

SEQ ID NO: 1174 - DNA, 293 bp, Homo sapien
  misc_feature (1)...(293): n = A,T,C or G
gtttaatnttaagaattattaactactaagtgttataacaaaaagtgaaactcaaaagaatacagcaataacagatatagagtgtctctagggctgaggcagaacatcaaaggtaagaacaaatttgcaggagggtgccacaacttcccctttcctgccagggtcttagatccagggccttgttggagagggcacagccacagcccactggatgggagatgccactgcagtgctgagctgggcagaactcactgagggagccacactctgggggtnctaggaagctccccatg

SEQ ID NO: 1175 - DNA, 364 bp, Homo sapien
  misc_feature (1)...(364): n = A,T,C or G
taatattcatangtanttctttattacgtttttaatatacttgccttatcagaattataatgaagactgtatttctgttttccataaactttcctccagtaccttaaagttacaaacatttagcaaatgaaatatagggaattagctcacttttgctaagaccatcttccagattgggtactcagagcaacaatgcatgtcagggattattcacagggtaatgaggcatgggtaaagtaaaacaactgaggaaattcttttccccctaattcttgttgacaatctatatattaggactgtcttcaattagggccctaacataggatgcttcaggnaattacatttccggtcatcagttttggcc

SEQ ID NO: 1176 - DNA, 390 bp, Homo sapien
  misc_feature (1)...(390): n = A,T,C or G
ctcactgcaacctccgcctcttgggttcaggcgattctcctgcctcagcctcccgagtagctgggactacagatgcccaccaccatgcccagtnaatttttgtatttttagtagagatggggcttcaccatgttggccaggntagtcttgaactcctgacctcaggtganccgcccacctctgcctcccaaagtgctgggattgcaggcgtgacaggccatgggagcctggggcaagagcaatgtcctttctgaaagtcacctnactgtaggatatgaatcacatgtaacaaatgccatcgcagttaatgcctaggatcagtgttccattaaattaccaggggacttttgcctagctaaggntgacacagggaaccattttttcagnatg

SEQ ID NO: 1177 - DNA, 282 bp, Homo sapien
  misc_feature (1)...(282): n = A,T,C or G
anaaanangggcactttantgaaanccantggngaaaagcgngngnggaaaaagggctgaaanaggacncggccccgggggcagggcgaggaanggaagtnggngnacgggggaaanaggncangggcanagccccgggncccaggnaanccccccganctanccaaaggccggggagaccannacngggangacgangagcanaanggncaagagganccccanaatcagggcccanatttncangcanttggcggnggaggcanaggccngggccccggt

SEQ ID NO: 1178 - DNA, 162 bp, Homo sapien
ctgtttagttccctactaaatctccagagcctggaacaatgcctggcacacagtaggcgctcaataaatacctgttgaattagtacttgagtgaatgaatgaatgagtgaattgcagccttctgaagtgggtattagccccatttttgcagataaggaaaaa

SEQ ID NO: 1179 - DNA, 263 bp, Homo sapien
  misc_feature (1)...(263): n = A,T,C or G
ngggnggaagcatttaaancaganggncggggagggnaacactnaacagggngaacncanagcnccaagngctnccccccaaatnangangaagtccccgaaaaaaacnngattncccanagccggggcccctgcccngggganggnggggaaanggatgtnaaaagcaatggggnctgcccccccgtcattcaaagaccccgttntgngcacagctcgggnaatctaccngttccccagggnnaaaccacaagccgatctcc

SEQ ID NO: 1180 - DNA, 234 bp, Homo sapien
  misc_feature (1)...(234): n = A,T,C or G
caataggaacatcatgtgcaaaactgacagccgtccaagggcccagccgacagactggctctccctgcccgctcggccggnnnctccccgagcgggacacactgcagggcttggctgagccctggnggacaaggcaaagagccttccaccccgcactgaggctcgtgtccctcggcagctccctgctccttcacagtagaggacctggggccgcccggggccaatntgcgccgg

SEQ ID NO: 1181 - DNA, 210 bp, Homo sapien
  misc_feature (1)...(210): n = A,T,C or G
gccccccccctntnaaaggggnnaananggaaactntnaggngggganatnnagngngggggggnnctaagnngggcagggnccccccagnaggnagggncncncncncccnnttgnccnctnccnggggctgggggcccaggggtntaaccccngggnggcnattnggncattnaggcccaccacccttttnctnaanccaaattcgtt

SEQ ID NO: 1182 - DNA, 338 bp, Homo sapien
  misc_feature (1)...(338): n = A,T,C or G
ctctgtttattcgctcacaataatacacagcccctggatggggagggggtaggaggggctacaacagggtggggtgggaggggaggagacatccacttccctggcccctctcccctctgtgcttgggggggaaagggagggagggggactcccctaaccccccagantntaaacagcagcagatgnccaaaantaaaattacaaaaggccggagaaaagtcccagggatcccccaaaccctgggngtcttcttctgtcaccctcgntgccgantttttgggcctcgagggccaaatttccctatagttnagtcgtattaaatttcgnaatcatgtcaa

SEQ ID NO: 1183 - DNA, 366 bp, Homo sapien
  misc_feature (1)...(366): n = A,T,C or G
atacagagaaaagacctcaaaaaaagttttttttttaaagctacatttcaaacagtatgcaaaggtacaattgaaaagtatgcagcatccttctcccagctgacaattggttcagtttcttgtgattacatccagaaaggggaacataaaaacttctaagtctgtaccagcataatgtctgttgatatattttttaaggtatacgcagaaaggatctttctatttatacggctataggtctgtataccttacccggggtaataggaccacatttgggntttggattcatcttaccaaaatcatatggttaggttccataaaggttaatggaatgaggnacccctttggcttttnaccatctttttc

SEQ ID NO: 1184 - DNA, 274 bp, Homo sapien
  misc_feature (1)...(274): n = A,T,C or G
attcacaggtgggctggggtcagctgagatttattcacaggtgggccagggtcagctgagcgtgaagtgctgggccagagttcacccggccgtcccagcaggcccngggctgggataaactccagtggcaccggctcgggccccttcttcttcaggtcccgntcaaagatctcgtaggccgtgagctccagcagtggcgcgatgctgacctcaggcatggacagggcctgggttgatgacgntggcggctttggacacctcagggtggntagtg

SEQ ID NO: 1185 - DNA, 367 bp, Homo sapien
  misc_feature (1)...(367): n = A,T,C or G
tatttttcaacaagtgggggcaatatgaagtgttttgaatgttgtgtgcaaaacgaatccatctcaccgtctcactgtcatgatttaacacagcaaggtagatacactggtttccagcattacaggcaacactagatgtactttttttaatgaataatgtaaacttgagttttaaggcagcgggtactaatgctgcacacagacttaggctcggtgcccatttcagaaacgggtcagtcaggcactcgaaacaagaaactgtgagggggagaaaaggggagccaccagtgtcatctgacaaaaacggatccgtcaaagtgtttttcccttttcacacggcacaaantgaaatattttggaacctttt

SEQ ID NO: 1186 - DNA, 382 bp, Homo sapien
  misc_feature (1)...(382): n = A,T,C or G
aaaaaataaacgttacatttgacatagaaaaagacattttaaaaatgttcttaaaaggtttaaaaaggcatttgttctggccaggcatggtggctcccgcctgtaatcccagcactctgggaggccgaggcggatggatcacctgaggtcaggagttcgagaccagcctggccaacatgggtgaaactccgtccctaccaaaaacacaaaantttgctgggcatggtggtgtaatcccagctactcgggagggctgaggtaggagantcacctgaacccgggaggcaaagtttgcaggcgagccgagatcgcggccacttgcactccagcctggggcgttcagagcgagactctgtcttcaaaaaaaaaaaaaagctttgtt

SEQ ID NO: 1187 - DNA, 287 bp, Homo sapien
  misc_feature (1)...(287): n = A,T,C or G
ttattgtcagcaaggcagggaatggtgggaaccagggtntcccgctggagggtcaggagggagccacaagccgcctgggaggccgtatccggtcgttgatccagtccacatagttggccacgcgggtttagacccccggnttttggagccgcccgnagccgtcaccccagntgatgatgccgtagaggtaagccangccgtttttntcgcaggccagggnccccctgagtccccctggnaggcntcgganttgcagtcgaagtagccggcacagagcattttngggc

SEQ ID NO: 1188 - DNA, 258 bp, Homo sapien
  misc_feature (1)...(258): n = A,T,C or G
agtaagtaccactggtgctgctacgtcacctgccgcagtgtgagcgtaccgtggagcgctatgtctgcaagtgaggccctgcctccnccccacgcaggagcaggactctgctcaaggaccctcagcaactngngccagggctgtgtagacactccatggagctctgcttgtgaattccagatgccaggcatgggaggcggcttgtgctttgccttcacttggaagccaccaggaacagaaggtctngccaccctggga

SEQ ID NO: 1189 - DNA, 249 bp, Homo sapien
  misc_feature (1)...(249): n = A,T,C or G
gagctccctctgccagccccagggtctgccgagttcacttgacgaggccgggaactgcaggggcgggctggggctcactcagcatttatttcatacagctgcttaaaaagctagttttaaaatagagancattatatatatacatatatatttatatatataancncnataaagngganttgagaagtgccaccccaaagacaaagctatgttttataaatatttctgtaggcttccacatcccaaagg

SEQ ID NO: 1190 - DNA, 267 bp, Homo sapien
atagtttacaaatggttttttcagtcctatccaaatttattgaaccaacaaaaataattacttctgccctgagataagcagattaagtttgttcattctctgctttattctctccatgtggcaacattctgtcagcctctttcatagtgtgcaaacattttatcattctaaatggtgactctctgcccttggacccatttattattcacagatggggagaacctatctgcatggacctctgtggaccacagcgtacctgcccctttc

SEQ ID NO: 1191 - DNA, 442 bp, Homo sapien
  misc_feature (1)...(442): n = A,T,C or G
cccaggctggagtgcaatggcccatcctggctcaccgcagcctccaccttgtaagttcaagcgattctcccacctcagcctcccaagtagctgggattacaggtgcttgccacacatccagctaatttttctattttttaatagagacatggtttcaccatgttgaccagggctggcctcgacctcctgggactcaagtgatccgcctgcctcagcctcccaaagtgctggggactacagggcatgagncactgcaccccacccttgaggtgggntttttaggacaacaatagagagctgacacactacttctgtgggcaggaattntgcccgggngaaggaaaatacccnggggacttaaggncataggcccctgtttttgcagatgcttaggagtnttacttagggnaaacaggcattttaacagggggnttttccaagg

SEQ ID NO: 1192 - DNA, 216 bp, Homo sapien
  misc_feature (1)...(216): n = A,T,C or G
ncgaaggggnctgggangggnaccccgttggnctgcgnggcnagcttgggcatgggggcccccacggncagtntccccncaggggncagggaggaggaancttgggggggncccacaccggggggcagcntttattcccccgnaaagcnccggganatnnagccatgctcgcccnnccnttccncgngcttcccggnnanccccaccacgccancc

SEQ ID NO: 1193 - DNA, 483 bp, Homo sapien
  misc_feature (1)...(483): n = A,T,C or G
ggcaccgtanttcctctcccaggtgtttgtggggctggaaggacctgctcccacaggggccatgtcctctcttaataggtggcactaccccaaacccatcttttgttctcctatatcctccttctcctgttccatttcagttcagtttcagcggtgccaacctctttgcgtttcctttttgttgatgaggacccagagctgctgcacacactcacctctaaccccctccccttgctgctgggccccatctccacaggagagactggttcagctctagggcctcagtctggagtgggataggagcagtgagtgacaaagcctctgaaagatggcatcatctcttcctcacacccatttagtgggggatgggtcctctagaatttgaggggctanctggggaagctgctgtagcttcagccagggcaagaaagcttccttcaacctgcattagccngttggtgagggagatttnccaccttccnt

SEQ ID NO: 1194 - DNA, 462 bp, Homo sapien
  misc_feature (1)...(462): n = A,T,C or G
gggtgtgaccagccacgtggatgatgaataccgatgggcaggagtcgaggatcccaaggttatgatcactacctcccgagaccccagttcccgcctcaagatgtttgcaaaggagctgaagctggtgttcccgggcgcccagcgaatgaaccgaggtcgacatgaagtgggggcactggtgcgagcctgcaaagccaacggtncaaccgatctgctggtcgttcacgagcatcggggcacacctgtggggctcatcgtcagccacctgccctttggtcctactgcctacttcacgctgtgcaatgtggtcatgcggcatgacatcccagacctgggcaccatgttcggaggccaagccccacctcattcacacacgngcttctcctcccgcctgggcaagcgggtnttttgacatcctgcgataactatttgcccttgcccaaagatgacagtnaacgggtt

SEQ ID NO: 1195 - DNA, 440 bp, Homo sapien
  misc_feature (1)...(440): n = A,T,C or G
aggatctggtgcccagcctctatcagagcttgcctacctggcaaagctgcctacccttcaagtgggaaaatataatccactgtttaacaaggctcaccctctccaccctgtcctaacgaccttttgtgaatgtgctgtgatattttcttgctcaatagcaaggtggtagctctgctttcattttaagaaagtggaggctgagggcattgtatcaatactgttgcaactccaagaagttttccttgtaaaattaaaggaaagatcttgttattgattaaccattttcttatgccttgctattgacatattcatgctctttctacgtctagtggctgaaaatgtttgcatttgttcatttgactaatggtgtgatttttgtttcnatattattagaccngtaatgttttaaatgtattttatnaaattgggangggtgtatg

SEQ ID NO: 1196 - DNA, 456 bp, Homo sapien
  misc_feature (1)...(456): n = A,T,C or G
ttgactgtatttcttctccccataacctggaacccagccagcatctatggcttcctgctgtctgcttcttgaaagtggggccttgggaacatgtttggaggctatggaaggtgggaatctcctcacccaccggctatgcaggttgaaggaagctttcttgcctggctgaagctacagcagcttcccagggtagcccctcaagtctagaggacccatcccccactaaatgggtgtgaggaagagatgatgcatctttcagaggctttgtcactcactgctcctatcccactccagactgaggccctagagctgaaccagtctctcctgtggagatggggcccagcagcaaggggagggggttagaggtgagtntgtgcagcagcttntgggtccccattcaacaaaaaggaaacgcaaagaggttnggcaccnttgaaactgaactgaaattggaac

SEQ ID NO: 1197 - DNA, 381 bp, Homo sapien
  misc_feature (1)...(381): n = A,T,C or G
tttaattgacacataataattgtataccaaatagcaatttttaaaaatagggagacccaagagttaaaaacacaaagtttttccactgttctttgtaaaatttctcatactgaggaaactgtttttataaagcaaccatgtatgttgccattacagtgtactgcatacttattagacaattgacaggaaaaacaacttttggcacaagaatgccaatttattccttttttggacacataaacacaaaatatccctgcaggccaaaaaaaattgcaaaatttaaacgaccatcatcttatctcaacatgaggatacaacccctcccttaatagtttaggaaagtacctcgtattgctagggncatacatccagtccaaattt

SEQ ID NO: 1198 - DNA, 496 bp, Homo sapien
  misc_feature (1)...(496): n = A,T,C or G
atgatctgctcagagctcttccatgccattctccacaccaagaagctttatcagttttcctcctgctcccagaatgtcctgtgatgcatgattctaagaactggaagaacctggtngttccatttgcaaaggctgtgtgtgaaatgagtaaacaatctttgcaagtcctaaagaagtgttgggcatttttgcaagaatcttctctgaatccgctgatccagatgcttaaagcagccatcatctctcagctgcttcatcagactaaaaccgaacaggatcactgtaatgttaaagctcttttaggaatgatgaaagaactgcataaggtaaacaaagctaactgtcgactaccagaaaatacttttcaacattaaatgganctctccaactnatttaaacttttattattagattaggagggaagnacagctcttttcggggttaaccacctgattacccggcagaaacccccagtcctgttattttcagtggtttt

SEQ ID NO: 1199 - DNA, 420 bp, Homo sapien
  misc_feature (1)...(420): n = A,T,C or G
gcatgggttccatnaaagttggtgttattctgcccccaagcacacagacatgcaattactagacatcttagtatgtgccgggcctgctaagtattcatttgtgtgctgccttttcatgatctgaaccctttgaggtgtagctgctattatgattctctctgtgtcttcacttcctcatctctaaaatcaggataggtatttgcccaaggctacacagagtaggggagggctggagtttgaatgtgagctaacataggcttataagaaaatacaaaaactgggattataggcgtgacacncacccccggtccaagatggctatctcttaacacacttgtaacccatttgtggcacacaggtgtgccgtggacttcactggtnggattccaanaaaaagctgaagcctacatttncccagag

SEQ ID NO: 1200 - DNA, 389 bp, Homo sapien
  misc_feature (1)...(389): n = A,T,C or G
tccaatttttattgattctataacatatatatgtgcatatattgtagtatctttatcaatcaggatttacttgctgataacagaaaccactgcaacctagtttagacacaatgtgcttttgtnagtttctggccatgcacagaagcctcctgcttacaagatgaatggaaaggctgaaggagcagcctttagtctgacttccaggaatgactctcagaacactatcacataactggctgtccagaagagatgctatctctgcttacagcctgggaagctggaaagtcatgaagatgctgcccattgctggctccagagncacattnttttagccacantccccaccaggcaaaatggatgctcctngtcctgccacaaccacaccctgg

SEQ ID NO: 1201 - DNA, 395 bp, Homo sapien
  misc_feature (1)...(395): n = A,T,C or G
agtttctaaggaatgaatccccgagtgtggcaggaaggacacagccggctcctgacgcacacctgatttgattcaacaccgagtcggcacagacacaaccagagatggcctgggtccaggcgggggtntttggctgcacgcgagcccactcgggacagacccaagaacacgaattctctccctttggatttaaggctggtgttttttgacatttacttcagtttttctctctgaaattaaaattacctgagtaaaagattttaagacattaaaaaagccaaaaacacagaatccctggcaggcagacggtgccaggggaggtggccggccagggcagggatgccagggggacggntggggntcggcttggagctncaggggntgggcttttccca

SEQ ID NO: 1202 - DNA, 239 bp, Homo sapien
  misc_feature (1)...(239): n = A,T,C or G
ngggagcagggacttccctttgcaaggggtaacagaccgctngaaaacactgtcactttcagagctcggtggctcacagcgtgtcctgccccggtttgcggacgagagaaatcgcggcccacaagcatccccccatcccttgcaggctgggggctgggcatgctgcatcttaaccttttgtatttattccctcaccttctgcagggctccgtgcgggctgaaattaaagatttcttaga

SEQ ID NO: 1203 - DNA, 428 bp, Homo sapien
  misc_feature (1)...(428): n = A,T,C or G
ttcggcacaggagcataggcagcctcccgtgtctggagcacgtgtctctgctgaacaaccctctgagcatcatccccgactaccggaccaaggtgctggctcagttcggagagagggcctcagaggtctgtctggatgacacagtgaccacagagaaggagctggacactgtggaagtgctgaaagaatttcagaaagccaaggaggtcaagtccaaactgagcaacccagagaagaagggttgtgaagactcccggctctcagctgccccctngcatcagacccagcagctcccctcccactgtggctcccgcatctgcctccctgtccccagcccattcctctctaaccaagggcattcttcggagatgagtgagtgaagcagggtcttcatgagcgtgtctgctggtccggnccccacggaagag

SEQ ID NO: 1204 - DNA, 125 bp, Homo sapien
  misc_feature (1)...(125): n = A,T,C or G
ggnntgnttntgggccncgatttntntcgtccnaaaaccggggcagganacgttntgagccaccgagntctgaaagtgacagtnttttccagcggtntnttaccccttgcaaagggaagtccctg

SEQ ID NO: 1205 - DNA, 219 bp, Homo sapien
  misc_feature (1)...(219): n = A,T,C or G
cagagcnagcnnaggnttnatttnggnccaaaaaaaaaaagcanttnanttnttttnaagctggnggcangggnaaggggggcccccngggngaaaacnccccagggggnccnagggcnagggctnagcccnaggggggnccccngnccccagtntnnccccgaaaagcggcctcctncccaggntntggggaagcnnaggaggggaaggctgggangg

SEQ ID NO: 1206 - DNA, 423 bp, Homo sapien
  misc_feature (1)...(423): n = A,T,C or G
gcagatttattcctgtaataatcctgcctgcttttgcctctcgtccactgaccagcaagtgtgagtcccggtgtcagtcggcacagtccagtgtccatctgcatttgctcatgcagagggggtgagttgggcactccctgttgttggttttccttttgcagcacactgggcagtctccctataaaacaaaaaccccaccttctgtgccttctgctttagagcagatgtcatccaggaacagccacacacggttctccaggccgccgtcagcagctcaaggtggggtatgagtnagaagctgaggatcttcgcagcttgttgctgagcaaggtgcaaccgggncttcatgctgttcattcagcacaagacgggatgggcaagggcttttcagacgcttttncaagagttccagcaagccagggg

SEQ ID NO: 1207 - DNA, 149 bp, Homo sapien
  misc_feature (1)...(149): n = A,T,C or G
tnctctccgaggncactgacagncagngcctggcctacgtgacgtgtcaggaccttcgtagcattngagaccctncagagcanatggttatggtgatcaaagcccctcctgagacccagctncaagccgtggactcttnngagaacttt

SEQ ID NO: 1208 - DNA, 449 bp, Homo sapien
  misc_feature (1)...(449): n = A,T,C or G
gccatcaatcctctaggaaggaattggtggtttttctgaagtgtgggggaaagggtggtttcttgctggatttcatggccagtaagtaaatttaaatgcttcatttttaatttggatgtttctgctagagacctttgatttggaaattagttattttgcatgtttgtcaactgtatatgtatgaaaatagaaaaaaaacatgctttttgtaaaaacccctaagatttgtatatgttcatctttaggcttctgaaagggagagaaatcatattggaaatcagtgttggtgttctgaaatctgcttgtaaaactctcatctcattttacatngatattaaaacattttaacagtgttgggctagctggattacttgattaattatnactcccatgggccccatagggaagcngttgtggggcccctgtttcaaaagcnccggaaatgtgtt

SEQ ID NO: 1209 - DNA, 325 bp, Homo sapien
  misc_feature (1)...(325): n = A,T,C or G
acgacgctacctggggccatcagttctgttctttcagcgactatgacatcgtcattctggaggtctgcccagaaaccaaccaggtcctcatcaacattggcctgctgctcctggccttcccgtcccccactgaggagggccagctccgaccaaagacctatcacaccagcctcaaggtggcatgggncctcaacacagggatcttcgagacagtcagtgtaggcgacctgactgaggtcaaagggcagaccagcggcagtgtctggagctcctaccgcaagagctgcgtgggacatggtcatgaagtgggctggtgccggagagc

SEQ ID NO: 1210 - DNA, 390 bp, Homo sapien
  misc_feature (1)...(390): n = A,T,C or G
ccagnagctggcctgccgggtctggcccctgtccaccttcaaaagttttccaactttcccggaaagcccccaggggtctgcttcctcatctcagagcagagatacctggagctaaactctaggttacttggagacccaggcgtccgggccctaacagctcctgcagaacctttgaccaaataagggcaaagttgcttctcttgcctcgcccgcccccctcccttcccctctccgcttctgcttttcctgaaggagagttctgagcatccaaaggctcctcacttacctcactgactccctttatttcctggggtttactttccccattaacactgacatcttaaatctcttagaggagtatggtcatccctttcctncctgggtttccat

SEQ ID NO: 1211 - DNA, 159 bp, Homo sapien
aagctttaaaaagtgcatattctttaatccaggaattactcaagaaatttatacattttttaaaaagatcaccaaatgcatcccacatagttcctttacaataaacaaaagataaacaacctagcgtcctgtcctatatgcgctctaccagatgactca

SEQ ID NO: 1212 - DNA, 366 bp, Homo sapien
  misc_feature (1)...(366): n = A,T,C or G
gagatggaatcttactctgtcaccgaggctagagtgcagtggccaatctgggctcactgcaacctctgcctccctggttcaagtgattctcctgcctcagcctcccgagaagctgggattacaggtgctcgccaccatgtccacctaatttttgtatttttagtagggacagggtttctccacgttggccaggctgatcacgaactctcctcaagcgatccgcccagctcggcctcctnccaaagtgntgggattacaggcatgagccaccatacccagcctgcatccttaatttatggatttcctattttgtgcctggtgaacagtccccatattttaacaanaatacctanacatgaaaacaat

SEQ ID NO: 1213 - DNA, 459 bp, Homo sapien
  misc_feature (1)...(459): n = A,T,C or G
ggcacagctttctccctctntgcctcctgcttcctttctctctcctgcctctcctctnctccccatcccactttctcatctgcctccttttctcacttctgtcagtctgtaagctttgataacctgcttaatactccaaagtgtgagttcctctgatctcttgattccttagttctaatctcacgttttgtttttaagagatggagtctctcactctgtggcccaggctggagtgcagtggcatgatcatagctcatttcatccttgaaatcctgggctcaggtgatcctcccgcctgagcctcctgagtatctgggactacagatgcgtgccaccaagcctgggctaaattttgtctcatgtctttctnaaaaattattttgtggaagccccttncacaaaaaaccttaagggaaattntgatggtgctcagggaatntaaacttttccctaaaccnt

SEQ ID NO: 1214 - DNA, 369 bp, Homo sapien
  misc_feature (1)...(369): n = A,T,C or G
cggcggggtccgtggccagagctgcagagagacaaggcggcggcggctgctgtgctgggtgcagtgaggaagaggccctcggtggtgcccatggctggccaggatcctgcgctgagcacgagtcacccgttctacgacgtggccagacatggcattctgcaggtggcaggggatgaccgctttggaagacgtgttgtcacgttcagctgctgccggatgccaccctcccacgagctggaccaccagcggtctgctggagtatttgaagtacacactggaccaatacgttgagaacgattataccatcgtctatttccactacgggctgaaacagccgngaacaagccttccctgggctggctccagagc

SEQ ID NO: 1215 - DNA, 380 bp, Homo sapien
  misc_feature (1)...(380): n = A,T,C or G
ganattcttccattagaaatttgtagtgttgtgtggccagcacagtatttntcagatttgaatttcagtacctctgtgtagcctcagtactctcaacaccagtcactctttattgtcttaaaatattccatactttttgttgacccaaaattgttgaaaatattttgctcagttttcacaatgaactaattgaaaagtgtagttactgtgttgtaaacatttgtgtagttctgttaatacactgatttganttttatttatctcaacttcctttagcgtctgcctccaaattttgtcctttgcctgtatacccactgagatcaattccctaggacccctntggctcttagtgtactataaatttggggtttattaaaatc

SEQ ID NO: 1216 - DNA, 158 bp, Homo sapien
  misc_feature (1)...(158): n = A,T,C or G
tgattgcacantgtggataggtggtcagttctaggagcagtggatgccttcgcttttacaaagtttcagttaagaaaaatgaataagtcctagagatctattgtacagtgtaggacctacaattaatacaactgtaatgtataattaaaattttgcta

SEQ ID NO: 1217 - DNA, 392 bp, Homo sapien
  misc_feature (1)...(392): n = A,T,C or G
cctatagtagccttggtgaagacttcctcaactcctgccacaaggtgatggagttcaagtctctgctgctgtctctgtgcttgttccatgggaacgccctgggagcgccgtaagtttgggcccctgggctttcaacatcccctatgagttcacggatggagatctgcgcatctgcatcagccagctcaagatgttcctggncgaatatgatgacatnccctacaaggtcctnaagtacacggcaggggagatcaattacgggggccgtgtcactgatgactnggaccggcgctgcatcatgaacatctttgaggacttctacaacccttgacgtggcttttcccctngaggcacagcttacagngttcttggggcattttaccaccagnttt

SEQ ID NO: 1218 - DNA, 415 bp, Homo sapien
  misc_feature (1)...(415): n = A,T,C or G
ccnacctgggagccttttggtatctgcgctggcgacanacncgaggccagcagccctgtccccaagaggccgggctcattagccctctgagtcctttgaaccctctgggcccaccgacgcccctgcctccacccccacccccacccccaggcctccccacctatgagcaggcgctggcagcctctggggtacacgacgcacctccacccccctacaccagcctcaggaggcctcactgaagagctgctttcgagacccggctctccgaaccgtgcccctgattcataccggattccggaaagccgctaggcttcatgaggacgccgaagctggaattnggagtgggggaatggtggggagtagggggtcattccgggcccgagggcttgnccctgggnaacaangcgtttttccg

SEQ ID NO: 1219 - DNA, 466 bp, Homo sapien
  misc_feature (1)...(466): n = A,T,C or G
gagcgacttccggaggatcacccgcacccaagtggcgctggaccccatagggcagaggtcgtggctttctcttttgtacagagatggggagcagttttaatagcgggactcagaggcccagaaagccggagggaagcccccgcagcttgcgagggaaataacagaaacaggaggagcccatttaggcaagagaagacattaaaacagggtagtgcaggttctccgtcacaactttctctcgccaccctctcgtcccctcgtctccactttcaggctcaggctccagcttggcagccttcctgtgaactgggaggaaccagtggaattctttcctgggcattttaaaacggcattcttgtnacagttccccatttcccccctattccggaattagggccctgggggntaacagttgctggttgcctntttttaattaaaagtgaggttnggggggattaaaaaaatt

SEQ ID NO: 1220 - DNA, 460 bp, Homo sapien
  misc_feature (1)...(460): n = A,T,C or G
cggcacgaggccatactccgcatgaaccatgtgaatatatcagtgaccacctctcagtcacagcagacactcacggctgcttgcattaaaccaaagtggacctccctgtaggaaacctgctcagatagcaccttacatcccaataaaggcttccactcccaggtccctccctctctctcgctattgctccccaaccatcagtcaagcacaggtcttcttgatggctctcccttccagttagccctgcaaagtgtgctgccctcttctctctggaattaataaaaaaactgcttcggttatttcatgtgttgtacttgtgctggccttctctgtgtttcacccaactggagtcacccaaaccnaactctttcccagttcagtggctttccagctaatttggggaggctgaggtggggagggattgtttggagcccagggaggttgaaggttgcagtttagc

SEQ ID NO: 1221 - DNA, 478 bp, Homo sapien
  misc_feature (1)...(478): n = A,T,C or G
aattcggcatgaggtttttttggtagagacagggtttcgccatgttgcccaggctggtcttgaattcgagctcaagcgattccgcttgccttagccttcctcaaagtgctgggattacagtcatgtgccaccgcaccaggctaatttagactaattgtaatctgaaaaacctatccgcgaagaaaatcaaacaatggaaacccatcggtgagttatacacaggaaatcaaagcaaatactccccaccatccaattaacccatgttaaagattagggatactcatagtctaacaaaatacatttttctggatttagaaacctgggcatccaccaccccaaccttccaaatgtttcattaaaaatattaaagtccgaaatgtacctctacattctcaacagggaacagtgtgtgggcagcagaaaatttcctaaccaaanacctgttcagntaattatttgaggaccttattcaacattt

SEQ ID NO: 1222 - DNA, 368 bp, Homo sapien
  misc_feature (1)...(368): n = A,T,C or G
acagttcctgcatgggcggcatgaaccggagcccatcctcaccatcatcacactggaagactccagtggtaatctactgggacggaacagctttgaggtgcgtgtttgtgcctgtcctgggagagaccggcgcacagaggaagagaatctccgcaagaaaggggagcctcaccacgagctgcccccagggagcactaagcgagcactgcccaacaacaccagctcctctcccnagccaaagaagaaaccactggatggagaatatttcacccttcagatccgtgggcgtgaggctntcgagatgttccgagagctgnaatgnaggccttggaactnaaggatgtccaggctgggaaggagccaggggg

SEQ ID NO: 1223 - DNA, 471 bp, Homo sapien
  misc_feature (1)...(471): n = A,T,C or G
gactctggttataagtgaattgagcattaatgtttcttttgtataaattcctgtcctgaaatattttattcatgaaaataaggtaagcaaaaaccaactccattttgccaggattttgttgtgctgagattgccaatcacggttaaacacaaagtgtttttatagaatgaagaaacagtctttaacagaaaaaaggtattgaaatattaaatggccaccaagtttactttgaagcccatttttggctgtttagtcagcatgaagtgggcatgataattttttaatatttctttttgtgaaatttcctgtacagccttttgtaggattactacaggttaatgtgagttgaggaagacagtctttctcaaacaatnactacataccttttattattattacaancctaagtgttttatattcctaggagtcagggacaattttccntagggttatagtattacnggccttana

SEQ ID NO: 1224 - DNA, 453 bp, Homo sapien
  misc_feature (1)...(453): n = A,T,C or G
aattgaagtaggagcggcttaaggcagagtacctggagaggcgggcatcccggcgcagagctgtgtccgagggctgtgcagcgaggacgaggtggagggggaagcctgacttggccacctcccctccccacagccttcctcacccttggctggcagacccactggaggtcaggcacggaccagtggcccagccctnggtgtcccatcaccatgtgaccttggacatgtcccttccnntntttngncctcantttccccatttgtacattgtgtgctgcaaagccattngttgggctacttcttcataggcacttacttacccagggatgccacccntttgttcacctnctttccacagagcacttttggcatgttaaacaaggcaagngcactgcctctattagggttaactttgaacattgtnttaggttatnatcaatatanaacaatgta

SEQ ID NO: 1225 - DNA, 350 bp, Homo sapien
  misc_feature (1)...(350): n = A,T,C or G
tggatgcagaagctttcngtatgggancaggcttccactttggaaacccagcaagacacctgtcttcacgtggctcagttccaggagttcctaaggaagatgtatgaagccttgaaagagatggattctaatacagtcattgaaagattccccacaattggtcaactgttggcaaaagcttgttggaatccttttattttagcatatgatgaaagccaaaaaattctaatatggtgcttatgttgtctaattaacaaagaaccacagaattctggacaatcaaaacttaactcctgggatacagggtgtattatcctnatatactttccaggcacttcaggatttngata

SEQ ID NO: 1226 - DNA, 360 bp, Homo sapien
aagaatacttcatactaactcctgatcatcttacagcagacataacaacagagtgttagagactggaataaatatgaatttggctgaaatgtgccctgaaagttgtatttcatttttttaaatgtttaacaattacactgtatcaatagtatatatacgtgtacatatatataattcttaataactgcagtgtatctagcatatatataatggtggctggtacatgtttaatagcagactctggaggaggaatcctgacatacagcatttgccagctcaatgtaaatgctcatgctccctcatggtcaatttcaatctaccactggtttagtaactagggtgcaaatttctaaaaatgtg

SEQ ID NO: 1227 - DNA, 501 bp, Homo sapien
  misc_feature (1)...(501): n = A,T,C or G
gaaaaacaaaaaatctaagcagcctctctacagcagcattgtcactgtggaggcttctaagccaaatggacagaggtatgatagtgtcaatgagaagctgtcagacagcccaagcatggggcgatacaggtccgttaatggtgggcccggcagtcctgacctggcaaggcattacaaatctagttccccattgcctactgttcagcttcatccccagtcaccaactgcaggaaaaaaacaccaggccgtacaagatctaccaccagccaacacatttgtgggagcaggagacaacatttcaattggatcagatcactgctctgagtacagctgttcaaaccaataacaagttacagcaaacagatggcgtctacatccataacatttactgtgttttgggctgaatttccactctaatnatggatggttcctttatngcaccttactgtggatgaccttttttattccgaaacctgctgggagcctgcctttggcnttgtt

SEQ ID NO: 1228 - DNA, 483 bp, Homo sapien
  misc_feature (1)...(483): n = A,T,C or G
agcttttttgtctgatgatataccagcataagttaattagatatttataaagatgaaacacaactaataagaaaatggatcgagcttgtattagaggggaaagcagcaaaccttctccctttggccccttaggattaaatgcgccccaggcatttagcacatgagcaaaatgtggttcatttttcgcaggtggaggttccttctgttctttcccagatttttttcccaaagatatctcttcctctagggatgatatgtcccagtcttcatcctccacatccgcacactaaaagaaaggcatggagaataattaatgttgcttagaaaaaaatggtgtccctcaatcattttattggttagacttgaggcatctaacactggaaccataagggaaagaagtgggggnactatttantacttgccaaatcntagttcatttctggcaggggcattggnaattagatttggaagttggtatttttg

SEQ ID NO: 1229 - DNA, 359 bp, Homo sapien
gcttaatgttgcctgtggagcagtgcccatcccagcccgtttctgcccaccagttgttctcaggaaccttacccatgctccagcgtccttcacctggcacaggacatgcaagataaatagggcaggcacgtgtttgggtgtcctctcttttctgataaaatccatcccgtgtttgccacacgccctccagtcctcagttcccactgcctaacgtctgcccccgtgtagatactgagaggtggtggcagtaattgtggccttatcagccgctcagttccaggcttttgcccaggtcactgttgccccatgttcggagaacctggcccacctgtcttggctttctcatccttcccaaccca

SEQ ID NO: 1230 - DNA, 417 bp, Homo sapien
  misc_feature (1)...(417): n = A,T,C or G
caccctctcagggatgccctgcccgagctgctggggctcgaggctggcagccgncgccaagccgcagcagggagagcaacaagccccggccctcagagctcagccggatgagcgcanccagagacagcagcttctcgaggaagaaaggacccggtttcaggagctgctggccagtccggcctacagagccagccccctggtggccatcgggcagacgctggcccggcagatgcagctggaagatggcggccagctctnaccagggcagcgggcatgccacaactnctcaggacacatgtgggccaagtagagagcgccggccccttaaggaccatngccttgagcctgggtggaacgccctttccttttggttcggttnttgggggttcattaaatgggttttgttgaatttnaaaa

SEQ ID NO: 1231 - DNA, 402 bp, Homo sapien
  misc_feature (1)...(402): n = A,T,C or G
acagcccgccgnnaaacggcttctngcccacggacatcaatgactcaccctttgggactctgcctggctctgctgagcccccgctcactgcagtgcggcccgagggctccgagccaccagggttccccacctcgggccctcgccggancagggctgttcacgcaagaaccgcacccgcagccactnccgtctgggccaggcaggcagcnggggtggcgggactggtgactcagaaggctcaggtgccctacccagcctcacctncagcctcaccccnctgggcctggcgctggtgctgtggacagtgcttgggccctgcttgacccccagcggacacaagagcgtgcttcagcagccaggtgtgtgtaacatacggggtctgttttcacgccgttcaagcca

SEQ ID NO: 1232 - DNA, 175 bp, Homo sapien
  misc_feature (1)...(175): n = A,T,C or G
tgagcccgaggncctcttctctgtggccttcccggacaatcagcgtncagctcncaaggcngagtttgaccggnctgtcagtgaggaggacacagnncctntgtcccacttggangaganccccgcctacctcccagagctggctggccncggccagccatttcagccccaaggg

SEQ ID NO: 1233 - DNA, 196 bp, Homo sapien
  misc_feature (1)...(196): n = A,T,C or G
tcacaggaagccggaggtcgctctgatcccgantctcccacaggcgtgaacctgctctgctgtgtatctttncggggtggcctgcgctgaggcctgccgcgcgcggtgagtccgnagtacctgaccctgcgtctcgcagctcggttgaggccgccgccgccttctcgggatgccgcggccggggtccggtagcctg

SEQ ID NO: 1234 - DNA, 296 bp, Homo sapien
ttttaagacagacttaataatgtggcatattttctagatatcacttttattaggttgaactgaaagggtttttgtaaattttttggccaaaattttttaaaacatacttactttggactaggggtacattcttacaaaataaataaacagtttttaaaattgtttagacacagatatttggaattagctatcttagtgccaactggcttttttatttttttacttcatcaaggtgatgtaagggactcacctttaaagtttttttagtgttattttttattcactactctggggaa

SEQ ID NO: 1235 - DNA, 417 bp, Homo sapien
  misc_feature (1)...(417): n = A,T,C or G
caagaagacaggctggctctcctaaacaaacggctccccacggctgggagaggcagcaggccttactctggcctgagtcttttgggaggggccctgctgntntnctcctgccacctaccttcctggaccatctgtgcccctgcccacgcagtaccacactccccagactgtggaacgcatctccagtgccatctgggggccagttactgtacctggtccccagncagagctcttggcctggcagcatccaggcaggtattaagtncccagtgatggtngcacatgggtggggacggagccacatccaagtctagccctctgattaggangatgacagtcttnggaatttcttgttctctttcttcctagggttctcgttcttcccagntccagcctttntagtttcgaggtattnag

SEQ ID NO: 1236 - DNA, 317 bp, Homo sapien
  misc_feature (1)...(317): n = A,T,C or G
agaaaatactccaaactttctattttagcaatcctaattaagatgagaaatggggtaactttcacatgacagtcacacataacctttctaagacaaacctaagtaacagaaagcaaacttgagtgtataaattctggatttgcttaaaagggcaaatanatgaaagccaatggtgacaccataaagagcgagcaagctacctgtgaaaaaaatgctggtgtaagagaagctgtagggagagatgggctcagtattcccngtgggcttgggatcactgctcgtgatcacagggtggggtgcccgttctanccctttgg

SEQ ID NO: 1237 - DNA, 354 bp, Homo sapien
gtaaagggctcatactagatgttcagttaaatatactttagcacaaagtcaaactagagaatgtgttaaggagggaatgtatatgtcttggtagaccaggaggcctttgccagcaatttaagcaacagatgtgaatacttcacaaagctgtaaagaccattgtcttaaatactacaacaacttaacacccttttgtgaagatcacaggcatttatctaagaaactgtgaggctttctggtttacatatatcttacaggtgtttttttgtattttttttttttttttagtttgaaatgtgtaagctttgatttaaaccaagtttacttcagtatgttaatgatgtaggtaaaaat

SEQ ID NO: 1238 - DNA, 389 bp, Homo sapien
  misc_feature (1)...(389): n = A,T,C or G
cagctttcctttagctcttcttctaatatggcttctgccacaaaagcctgctctgtcaggatctcatggttctccacttgccagaaccttcttcagcctcagttcctcggcctcaacttgtacgtttaacccattgaccaccaccccccaaattcaccttcatttctttgaccctgctcctcactccttttctgttgaggaatctgttgactaactccaggntcactcaggctcaccgtcctgctctctgcaccagcctttccagagcgtgccagttctcatggcttcatctgttaactgttgatcacttcagtcctgatttttagacctaaatggtttccttaacgccattctgaactgcctgtgtactcatttttcacttaacagtg

SEQ ID NO: 1239 - DNA, 383 bp, Homo sapien
  misc_feature (1)...(383): n = A,T,C or G
ttcggcacaggccacccagtcccttgccaggtcctggacccctgctccagtacctgagcctgcccttcttccgagagatgaatgtggatggggactggcccccgcttgaggagcccagccctgctgcacccccagattacatggatacccggcgctgtcccacctcatctttccttcgttctccagaaacccctcctgtatcccccagggaatcacttcctggggctgtggtaggggctggggcactgcagagcccccttacacagccctggctaactggacactgagggagcggctgctgncaggccttctccctgctgcccctcgaggcancttcaccagccagagcagtgggcgaggcagcgtttcgttcctgncggccc

SEQ ID NO: 1240 - DNA, 306 bp, Homo sapien
  misc_feature (1)...(306): n = A,T,C or G
cacacacacacagagagagagagagagagagagagagagaggcagacctaagatccctgttccaatccccagactcacctagggggtcagcacatacattccataccaaggtgacccaaacccactatcagggtctgtgcctgggcncaaaggggcaggcaggggcagtgctccgtttgaaactaggtctgtctggttgggggcctcctttgcaggtccatatgccttttcacagcctcacatcagggatgttcacagcagagtggcctgttcggggtgggggactggctgtcgatagggctgggt

SEQ ID NO: 1241 - DNA, 472 bp, Homo sapien
  misc_feature (1)...(472): n = A,T,C or G
aaaattggtgtggagcctttgaaagagagagacaatgccagagcctgagagtcaggagcacagaagaaggcaagccagctgcatcatgggattgcatttaccacaccaagacaccagagtccttgatcccatcctttttgcctagatgttcatttacagaggcaatatgaccttgtagggcccaaaatattcgtgtccactgttttctttcctttatttttttccagaataactggagaactgcattaataaataggtttcttggttgggcgtggtggctcacgctgttaatcccagcactttgggaggccaaggcaggtgggatcacaaggtcagggagtttcgaggccagcctgaccaacatggtgaaaacccctgttctctacttaaaaaaaaaaattaaaattanaatattaattagcttccttaggtttccaagcntttcctgtagtgtaaantcagtnggggacag

SEQ ID NO: 1242 - DNA, 414 bp, Homo sapien
  misc_feature (1)...(414): n = A,T,C or G
tttcatggaaagtaaaactgatacataaaatgattgatgcaaagtcatcaaaatacaattatattaatatagtagacatatattatagagatatacatattgtactgnncaccaaacatgtaccaggcaccattctaagtgctttacatgtattatctctctttcaatcctcaaagcacccccatgaagtaggtattctcatccttaatttaaagattagaaaaatgaaatgtggaaccattaagtaacctgactaaaggttctaaggnagttcacaaccaaagattgggctcatctgtcttcaaaggatggatattcttaaacactaaattaggactgcctatgtttacctgttcaaatgttttcacacacatcatcttatttgtcctaggggcggtncccgggggngttgtt

SEQ ID NO: 1243 - DNA, 411 bp, Homo sapien
  misc_feature (1)...(411): n = A,T,C or G
tacctgnagagngtagagggtataggagctccctgtcccttcccacatgccttgctctatccatttcttcatctctatcctttgtactgtcctttataataaaccagtgaacctaagtgtttccctgagttctgtgagctttactagcaaattaaactcaaggaggggtcatgggaaccctgatttataggtttggtcagaagcacaggtaaaaccacctggggtttgaacttggcactggaagtgggtcagcagtcttgtnggactgggccctcaatctgtgggatcaaatgccatctctaggggatagcatgggaaactggaggacacctagctggtatctgctgcaaaattgattgcttgcttgatggtngggaaaaaactccacacatttggtcagagaagtttttc

SEQ ID NO: 1244 - DNA, 299 bp, Homo sapien
  misc_feature (1)...(299): n = A,T,C or G
gtgactgcaatagatccacattttatgaataaactttgatgtttttactgtgcaatttctgtatgagtagataagggtagaaaataatataatgctatatataatgccacacaaagctacacacacgtatctaagaacttcaaaaaccacagaacttccctctcccctgttccttaaaacaaagtctgagcggaaaaaacaaacttttttcctctggctctcacaccacaataaagacagaaaacttctctgaccaaangtgtgggngtttttnccccacccatcaggcagggcattca

SEQ ID NO: 1245 - DNA, 258 bp, Homo sapien
  misc_feature (1)...(258): n = A,T,C or G
agntncacttnnttnatnnatncccccccaacatnngcatantnaannccangggggnggnggggggtgaggnaaaagangagctgggggccccnaatgggggnnggccccctnnggaaaaagggncagnggccaaaggttgggngggggncaggcnggacctgaggaccaggtgggggcacttcnccctcnancantcnccccttttnaagcnctttgtgncgggcgagcncagncccctaggggtnncttcgcagg

SEQ ID NO: 1246 - DNA, 396 bp, Homo sapien
  misc_feature (1)...(396): n = A,T,C or G
cgaggcaccaggcagtgactgggagccgcgaccggacagtgaaggagtgggacctcggccgtgctanttgctccaggaccatcaatgtcctttcctactgtaatgacgtggtgtgtggggaccatatcatcattagtggccacaatgaccagaagatccggttctgggacagcagggggccccactgcacccaggtcatccctntgcagggccgggtcacctccctgagcctcagccacgaccaactncacctgctcagctgttnccgagacaacanactcaaggtcatcgactgcgtgtcagcaacatccgccaggggtttcagggccgatggtttcaagtgtngtttttgactnggaccaaagntgtgttcagcccgggacagaagnttatgca

SEQ ID NO: 1247 - DNA, 387 bp, Homo sapien
  misc_feature (1)...(387): n = A,T,C or G
gggagaaaaagtgaggagatagagataaaaatacaaagaaaaactagcgtaatcccccaacccatacttcatttttaaacaaacaggccaggtcctgccaggccttcttccccattaaatcccaaggccagctccagtcccaaccccaacccctgaatggcgccgaagaagcttcaggcttcgggcaagagctccagcccaggcaggcaggtcgtggccctantgccagagcacaaccttcctgccctgggtccacgttcaccatgtgggctcccggagtagcaccagggccacggcgtttgacggcagcgnaatgggggtccctgtagtntgtttttccagtttcccggtnttccaaatcccagatntaaaaggggccctttaaaa

SEQ ID NO: 1248 - DNA, 467 bp, Homo sapien
  misc_feature (1)...(467): n = A,T,C or G
gcgacaccttcctcccaggaagctgagacctttgtggtctgagcataaggnagtcccagggaaggtttgaggtttgatgagtgaatattctggctggcganctcctacacatccttcaaaacccacctggtactgttccagcatcttccctggntggctggaggaactccanaaaatatccatcttctttttgtggctgctaatggcagaagtgcctgtgctagagttccaactgtggatgcntccgtcccgtttgagtcaaagtcttacttccctgctctcacctactcacagacgggatgctaagcagtgcacctgcagtggtttaatggcagataagctccgtctgcagttccagggccagccagnaaactcctgtgttccacattagagctgacgtgagaatantttttcagcnccagggagagaggggttctgatcttnaaccttttctggggttttagatt

SEQ ID NO: 1249 - DNA, 401 bp, Homo sapien
  misc_feature (1)...(401): n = A,T,C or G
agcacgcttccgtctccgcatgcacggctgcctctccagccacctctgatacttctctcttngggccatcagagcctcccttgggctgtcacctcccagctcacacacactcttcagtggtttcctctcttcattctcttatagggcgtggtccttcttatttatctaaagggctgaatttaggagactttttacccaggggcaaaaggctcttagggtaatgagatggatngtngcccaggtgcattttccagggcctgggttctccagatcccgtggcttctgttgagtggaggcaactttgctctgtgtgaacctcgcccctgtccctnttgccgggcaccctggcaggaagcaggactcccatcctnacctgaanttagactgtncctttgagtcaa

SEQ ID NO: 1250 - DNA, 377 bp, Homo sapien
  misc_feature (1)...(377): n = A,T,C or G
ggagagaccctcctgtccatgaactgggccatcgtggcgancattctgctgtacgtggtgatccctacccgacgctccaccgccgaggccttccagatcgtgctgtcccacctgctgggtgatgctgggagcccctacctcattggcctgatctctgaccgcctgcgccggaactggcccccctccttcttgtccgagttccgggctctgcagttctcgctcatgctctgcgcgtttgttggggcactgggcggcgcantttnctgggcaccgcattcttcattgaggccgaccgncggcggcacagctggcacgtgcagggcctgctgcagtaagcagggttccacagacgtaccggattgtggtgccccagnggg

SEQ ID NO: 1251 - DNA, 465 bp, Homo sapien
  misc_feature (1)...(465): n = A,T,C or G
gtttccggccacgagccccctaattcttcctccagcgatgtacgcactgtcagttacaccaatctgaagtttatggctacccaaattgcctctggatgnaagtacctttcctctcttaattttgttcaccgagatctggccacacgaaactgtttagtgggtaagaactacacaatcaagatagctgactttggaatgagcaggaacctgtacagtggtgactattaccggatccagggccgggcagtgctccctatccgctggatgtcttgggagagtatcttgctgggcaanttcactacagcaagtgatgtgtgggcctttggggttactttgtgggagactttcaccttttgtcaagaacagccctattcccagctgttcagatgaacaggttattggagaattactnggagagttnttccgagancaagggagggcagaatttacctccctnaaccagcc

SEQ ID NO: 1252 - DNA, 455 bp, Homo sapien
  misc_feature (1)...(455): n = A,T,C or G
ctttaatgtaaaaaaaaaaaagtatatatgagtcaggggtagggagtgggggtgaccaggaaaagagggcaaagcaaacaagcctctgtctctcagtttcattaaatgtccagatggagtggcataggcatgggtgagtggtaggtcttgtagggaggacctgagccgtagaacatggccaggcactgacagcatcactcgtcgccttgttgaaggagcagaaggtggatttcttggaatgagggacggttcttcgtatctcttctccagcagctgagcatcagnttatacacagagtcaggacaaatggctggttgagggaggtaagtctgcctcccttggtctcggaagaactctccagtattctcaataacctgttcatctganagctggggaatagggctgttctttnacaaaaggtgaaagttttcccacaaagtaacccccaaaggctt

SEQ ID NO: 1253 - DNA, 373 bp, Homo sapien
  misc_feature (1)...(373): n = A,T,C or G
ggtcttctctccgcatcaccatcctcctcaccctcccagtctccccccaggacccccctggattccccatggctcctcccaatttcttccttccttccccatctccacccgccttcctgccctttgctggggtcctccgaggccctggcgnccggntgcccccctccccagctccaggaggcagctgagggggatgggggggcagatcttggactcatgaggaggggcccccctgccctgtgggtncaacccttctggaaactgtgaagatctcactctgcccccccnccccatcttcgggaccagggatttgcacagaagcacatgcacctacccatnacaccccctnttctggaggcacagatgttccccc

SEQ ID NO: 1254 - DNA, 232 bp, Homo sapien
  misc_feature (1)...(232): n = A,T,C or G
cactcangncccnaaaanacggggttttnnangggacattnnaaaannggggaaanangctgngatntncagcatgngncagtttctgggnntacagggagggggngancnncaaggggggnccnttctgggggctnaaaanccctttcccngtacgaggacagcntccntaaatcccnccagctcatgtgcatctgngggnggggnnctntnttaatgttngaanccaaac

SEQ ID NO: 1255 - DNA, 407 bp, Homo sapien
  misc_feature (1)...(407): n = A,T,C or G
nacgatagggttttctagacatgggatcatattatctgcaaatagagacagcttgatttccttgagatgaattttcaaaacccgttttaatgtagcacctgcttggtacagaagatacttaagagggcctgcttggctaatggtagtatcagggtatgatgcctggggaaggttgggaagcagtttcccagaagaattcagtggatggatggtatggattcctttggtgaactgccgaggtccagggtctggcctttgggcttaggtcctcatatacctaattttatcatcatacaaaaaatagatttatctcttnggggtagactcttaataactaagcccgtgaaactccagtgatnaaaaacaggnttgagaattaattgagtnatgtaacctncacatggacc

SEQ ID NO: 1256 - DNA, 141 bp, Homo sapien
  misc_feature (1)...(141): n = A,T,C or G
gacttcccggggcctcggngcacacagctggggctgcccccacccgaaagaccctccacgctcgtcctctacagagtccggcttcgggaagtgccnggtgctcctgggccctgctggctccctacgacctttgggctcgag

SEQ ID NO: 1257 - DNA, 166 bp, Homo sapien
tgcaaaaatggggctaatacccacttcagaaggctgcaattcactcattcattcattcactcaagtactaattcaacaggtatttattgagcgcctactgtgtgccaggcattgttccaggctctggagatttagtagggaactaaacagatctcttctgatctgt

SEQ ID NO: 1258 - DNA, 295 bp, Homo sapien
  misc_feature (1)...(295): n = A,T,C or G
ncatgatctcggacatcagcagcgacattgaggcgctggngctgcagcatggaccaggactcagcatgatggacagtggatgggggggcaccacaccttccgcgcagtcgtcataggccttcccagaaggagctgcccagacctncgtgtcagcccttggtngtggccagggagaggcgcccggcaggatggccccnggcggcccaggtcctctactgtgaaggagcagggagctgccgagggacacgagcctcagtgcggggttggaaggctctttgccttgtccaccagggct

SEQ ID NO: 1259 - DNA, 403 bp, Homo sapien
ttgcctccgagctctggcttcaaggggagctcttctccaggttcactaggtgaattgatttattattatcatattgataatgtgagattctttagccactttggggagcctgtctctccagaagcctttcttagtggtgcccacagttggagcccaggggccatgtttgcaaactgattcatgtgcatggctgacaggagtactggttcactaccaatgcctgagcttttctcttacatagaaaaactgtccgctctcagtaatcacaagcagcatccgttttgttttctcttcttgggagacatctgtcaaaccaggaatattcttgaaaagaacgtgagcaggaaaaactgctgggtgatactttttttaaagttttgtttttatcttgcctgtttggctt

SEQ ID NO: 1260 - DNA, 272 bp, Homo sapien
  misc_feature (1)...(272): n = A,T,C or G
ggtgacagagaagacaccagggtttgggggatgcctgggactttcctccggccttttgtatttttatttttgttcatctgctgctgtttacattctggggggttagggggagtcccctccctccctttcccccccaagcacagaggggagaggggccagggaagtggatgtctcctcccctcccaccccaccctgttgtagcccctcctaccccctncccatccaggggctgtgtattattgtgagcgaataaacagagagacgttngtaac

SEQ ID NO: 1261 - DNA, 287 bp, Homo sapien
gaaactacttaatttctctgcatctcaatttcctcatatgtaaagcataataactacctctgaaaccgttttaggaaataaccttaaggtatgtgaagtgtccagcaacatagctagtaatggtaaaggatcaatacatagcaattcctttcctctcctaccccacccactgctcccctgcctcctgaattctctaccatctcttggagtcaattaaaaaaaaactgtactttaaaatattaccttggagtgtatcatcccttttcatatatgtgtggtaggcatat

SEQ ID NO: 1262 - DNA, 394 bp, Homo sapien
  misc_feature (1)...(394): n = A,T,C or G
gcatcctggacatgatgggcctcatggaggtccttccggagcgctgcgtgcagattcgccaagcgggactgcntcttcctggggcccgtggcttcactcatgtacctcgggggcgtcttcttcatcaaccggcagcgctctagcactgccatgacagtgatggccgacctgggcgagcgcatggtcagggagaacgtgcccatcgtccccgtggtgtactcttccttctcctccttctacaacaccaagaagaagttcttcacttcaggaacagtcacagtgcaggtnctggaagccatccccaccagcggcctcactgcggcggacgtncctgcgcttcgtggnacacctgccaccgggccatgaggaccacctttnctccacatctttcaag

SEQ ID NO: 1263 - DNA, 443 bp, Homo sapien
  misc_feature (1)...(443): n = A,T,C or G
tttatttatttagaacacagactgcagagtagtatgatggatctccagctccagttgtcaccatcttgctgttcttgtttcacctatcactgcctctaatcttttttgagtattttaaatcccatttttcagttttccaggtgattctaatgtgcagccaaaggttgaattactgaaatggatcctcaaaatcttatgacataaatttgttcatacctactcttcattccacaagagggaacgaaaggttactcattaaaaaatcttaaacattttaatatttaaatctgtccagggaatctcatgtcctgtaagattacatattgtctttcttgggctgttgactggttccgggaaattagggtcagagtctttgccgggatcagagcncctgttcccatggccgtgccctgcacacccttccacattgtcagcctgtttcc

SEQ ID NO: 1264 - DNA, 343 bp, Homo sapien
  misc_feature (1)...(343): n = A,T,C or G
gcagatttattcctgtaataatcctgcctgcttttgcctctcgtccactgaccagcaagtgtgagtcccggtgtcagtcggcacagtccagtgtccatctgcatttgctcatgcagagggggtgagttgggcactccctgttgttggttttccttttgcagcacactgggcagtctccctataaaacaaaaaccccaccttctgtgccttctgctttagagcagatgtcatccaggaacagccacacacggttctccaggncgccgtcagcagctcaaggtggggtatgagtgagaagctgaggatctcgcagcttgttgctgagcaaggtncaaccgnggct

SEQ ID NO: 1265 - DNA, 452 bp, Homo sapien
  misc_feature (1)...(452): n = A,T,C or G
ggcaggcagtttgggatgtgctcttgggggaaagttggctgtttccttgcgctctgctcctacccgaagtttttaagtccctctgaattgctcatctgagattagtagagtagcaggcctgaaggatgatggttttgtcctctttggttctcacctgcttgagaagtaaaacagtaactttgttcttctgggcccttaagcttttttggttaattcttccttttcagaagtagatgtcattatatgccaaaagtctagctctttgctttaccatacagggacctgtcccaaagaaaaaggctctttttttagccagcatatttccccttctacccttttactttgttgttctgattttagggactctgggctggnccatgtggcttgtgggttgcctcttcctggcattttgccactnggaattttgcaatgcatncgttttggagganaca

SEQ ID NO: 1266 - DNA, 255 bp, Homo sapien
  misc_feature (1)...(255): n = A,T,C or G
ttcggcacaggcctcgcggtancttgcggcacangagaaatgctttgatgagacccgctacgagtacctngaggggggcgaccgctggtcccgcgtncgccagggccacgtggaacagtgcgagtgcttnggggnccggacctngtgcgaaggcccggagcatacagcttgtctgagcagcccttgcctgaacgggggcacctgccacctgatcgtggccaccgggaccaccgtntntgcctgcccaccaggctt

SEQ ID NO: 1267 - DNA, 273 bp, Homo sapien
  misc_feature (1)...(273): n = A,T,C or G
gttaggaaatagaggttccaagaacctttcccaaagcccaggagctgtgccccaagctctggttgcctggcgggccctgggaccaaactcctcagctcctcaaatgagctggttactcgtcatctccctccagcacccctctttcctcatgaaactcccccaactcagagtcaacagacccagcctccggtngcaccacaggctccctcctccatcctgctgccagcagccnccatccccatccttagcccctgcagtccccctagcccccag

SEQ ID NO: 1268 - DNA, 358 bp, Homo sapien
tgtggccaggccttgagtccttggctcagtgggaccttctgaaacagcctccaagctgcacccctgcttcctttgcttttggatgaccccctccagcagctttggtgctgatgggaataagtcgacctgcagcggaagttcagcccaagtctcagcccagcagcctccccaaacctggccagggtctggtcatgctgccgtctctgcggtactctgtggagttgtggtttctgtaccttgaagagaacttccccttctgggacccagaaacccagtgaaccctcaggaaaaaagggaatgaaattactgaagacaactctgtgggcagggagaggggaaaagaggctctttgtttttg

SEQ ID NO: 1269 - DNA, 298 bp, Homo sapien
  misc_feature (1)...(298): n = A,T,C or G
gttacatttgacatagaaaaagacattttaaaaatgttcttaaaaggtttaaaaaggcatttgttctggccaggcatggtggctcccgcctgtaatcccagcactctgggaggccgaggcggatggatcacctgaggtcaggagttcgagaccagcctggccaacatggtgaaactccgtccctaccaaaaacacaaaaatttgctgggcatggtggtgtaatcccagctactcgggaggctgaggtaggagantcacctgaacccgggaggcaaagtttncagcgagccgagntcgc

SEQ ID NO: 1270 - DNA, 218 bp, Homo sapien
  misc_feature (1)...(218): n = A,T,C or G
attaaaaccaaagcaggagggaacagagctgttaggaagcaaatcaaagtgcagattggagggtggggcagagcagtggggaggcaggcgcttcagacactgcaggagggaccncagggtctnggctnggggaggccttcancanccctcctgcccacatcagtgaaggtcccccactcanctttnccatctcatatccatcctggggggcanctggg

SEQ ID NO: 1271 - DNA, 290 bp, Homo sapien
  misc_feature (1)...(290): n = A,T,C or G
gtaacgtgagactgcagagtttgtttttctatatgtgaaggattacaacacaaaaagttatcctgccattcgagtgctcagaactgaatgtttctgcagatcttgtgggcatttgtctctagtgtgatatataaaggngtaattaaggacagagttctgttaatctaatcaagtttgctgttagttgtgcattagcaggtataaaagctaatatatactatatggggcttggcaacaggttttaaaggcctctggcataattggataataaaaatggcatggnccattcc

SEQ ID NO: 1272 - DNA, 247 bp, Homo sapien
cgggtaggagctccagacactgccgctggtctgccctttgacctcagtcaggtcgcctacactgactgtctcgaagatccctgtgttgaggtcccatgccaccttgaggctggtgtgataggtctttggtcggagctggccctcctcagtgggggacgggaaggccaggagcagcaggccaatgttgatgaggacctggttggtttctgggcagacctccagaatgacgatgtcatagtcgctgaaa

SEQ ID NO: 1273 - DNA, 81 bp, Homo sapien
aaaggaactatgtgggatgcatttggtgatctttttaaaaaatgtataaatttcttgagtaattcctggattaaagaatat

SEQ ID NO: 1274 - DNA, 90 bp, Homo sapien
aattgtaggtcctacactgtacaatagatctctaggacttattcatttttcttaactgaaactttgtaaaagcgaaggcatccactgctc

SEQ ID NO: 1275 - DNA, 532 bp, Homo sapien
  misc_feature (1)...(532): n = A,T,C or G
ttggactgtaatattttatagaaattttaggattactttcataaaaatttcttaatacttcagagctaattcaagaaacctgtgtgcattaacgtcaggaagttaactgtcccacataattgccttggagttgttctgaattgttgattatggtctcaaataattatctgacaggtttttggttaggaatttttctgctgccacacactgttcctgttgagaatgtagaggtacatttcggactttatatttttatgaaacatttggaaggttggggtggtggatgccagggtttctaaatccagaaaaatgtattttgttagactatgagtatccctaatctttaacatggggttaattgggatgggnggggagtatttgccttgatttccccgtgtataacncaccgatggggttcccatngtttggatttcntcgcgggtagggttttcagatacattaggcnaaataggccgggnccggtggccatggctgtaatcccgcactttgaggnaggcnaaggcaagcggtt

SEQ ID NO: 1276 - DNA, 403 bp, Homo sapien
  misc_feature (1)...(403): n = A,T,C or G
ttattgtaaaataagagatcgatataaaaatgggatataaaaagggagaaggaggggaagggtggggtgaaaatgcagatgtgcttgcagaatntaaaagatgttgacccttccagctggacgtggtggctcacaattntaatcccagcactctgggaggctgagacaggtggatcgcctgagcccaggngtttgagaccagcctgggcaacactntgagaccccatctctacaaaacatgcaaaagttggctggccatggtggcatgaacctntggtcccagctactccggaggctgaggcaggactgctcgagccggggaggcaaaggctgcagtaagccaagntcacgccactccattccagcctgggcaacaaagcgagacccanttttcaaagaaaaa

SEQ ID NO: 1277 - DNA, 365 bp, Homo sapien
  misc_feature (1)...(365): n = A,T,C or G
atttatgacagtgaaaacattgaaaacacaaatacaacaaaacattaggaacaagaaatgtgtaaatccaatgtgtgaaaaatatatacaacactcccttcagatcacaaaagcttaacaaatggtaaaacgtatgtgttcttgaacaggcggacagacagccttaacatcatgaaaacgccagctctctcgataatctatatacttacaggngtcttcccccaacaacactgggtgtcttccctgcaaagcaaaatgggcctcgtttacagcctcaaagaactctggctggaggntttcctgagggttcacggtccatgacagatgagggagagcctccaccgggggggtcaacatctntcagg

SEQ ID NO: 1278 - DNA, 435 bp, Homo sapien
  misc_feature (1)...(435): n = A,T,C or G
ttaganccagggggtacatgtgcaggtttgttacataaatataataggcgatgctggggtttgggcttctagtgaacctatcacccaaatagtgaacattgtacccaatagatagtttttcagtccttgtattccttccttctaccccttctggagtccccagtgtctactgtttccatcttcatgtccatgtgtacccattgtttagctcccacttagaagtgaggaacatgccgtaattgattttctgtttctgaaaatgccaacttaaatttttttaagttttcttttttagaacttttgattctgtaggggaaaccaactttatattcaataaacagaaggacatttaaagttgtgggtttaggtctcatattatcgaggatgatgaggaaaagaggggaagggatgggattgaaataaaaatattgttaa

SEQ ID NO: 1279 - DNA, 382 bp, Homo sapien
  misc_feature (1)...(382): n = A,T,C or G
tcaaaatcagtatttaatgtattaaagacaaagacataagaggctgaatttccctttgttcacacaaagtctcaaacttattgttgcaatatgcttttggattttttaaaagacatcactgttacgtctaataggtgctaaccgcctctttaagaatggaatttctggtgactcagacatccattagtagcacatttctgcattaatactgtttcatacatttattttattttcatactattttnctgtatatgagaaagaaaaagactcaaaaataaaatgtacaacaagtgggaacaaggcagtgattgggctgacaccccacgggccaagggcagggctccagcagggtttcgggagtaggaaagggtcatcacagtat

SEQ ID NO: 1280 - DNA, 213 bp, Homo sapien
  misc_feature (1)...(213): n = A,T,C or G
acanaagtaaaataaaatgcatatctctatataccgcgatctgggngggaggcggcgttctggaacaaacgntgccgccgaaccctgtaaacatgatggggtggagatgggggtggcgggcggcaggcgtccatcagggaggacctggcctggcctgccccacgggtcggccgcccggctggcttggcggcntggagagagaccccgtatnta

SEQ ID NO: 1281 - DNA, 337 bp, Homo sapien
  misc_feature (1)...(337): n = A,T,C or G
tctattggccagactggacttcagtggtgccatctcagctcactgcaaatcattcattaaaaaataagtaaatgattccatttacaaccaattgcgtgcaatttatgttacagttatagttctaagaacacagattaagagaaaacacagcatggggtgacatggctcatgcctgtaattctagcaccctgggaggccaaggcaggcagatctcttgagctcaggagtttgagaccagcctaggcaacacggcgagatcccatctctaaaatacatacatacataaagaggaaaaaaaaaaaaacccgaaaaccagctacattccccaantccctat

SEQ ID NO: 1282 - DNA, 456 bp, Homo sapien
  misc_feature (1)...(456): n = A,T,C or G
caagtccatgaccattaactggagccttttcagccctccttctaacatcaggtctagtaatatgatttcactataattcaattacactattaacccttggcctactcaccaatatcctcacaatatatcaattgatgacgagacgtaattcgtgaaggaacctaccaaggccaccacactcctattgtacaaaaaggactacgatatggtataattctattcatcgtctcggaagtatttttctttgcaggattcttctgagcgttctatcattctagcctcgtaccaacacatgatctaggaggctgctgacctccaacaggaatttcaccactttaaccctcctagaagtcccactacttaatacttcagtacttctagcatcaggtggttcaattacatgagctcatcatagncttatagaagggtaaacgaaaccacataaatcnagcccta

SEQ ID NO: 1283 - DNA, 112 bp, Homo sapien
  misc_feature (1)...(112): n = A,T,C or G
aaagtcgagatcagaggagatcattgatggcacttcagaaatgaatnaaggaaagangtcccagaagacgcctantacaccacgaagggtcacacaaggggcagcctcacct

SEQ ID NO: 1284 - DNA, 464 bp, Homo sapien
  misc_feature (1)...(464): n = A,T,C or G
ttttttttactacatttatatgtctgatacatatacggctttggagacaatcaagtaacaactgaaaatgtgaaagtaaccatatctgacaaaattcccttgaatttttatcctttgcttgcaacatttaagactcaaagtcactggtatattggattaagttttttcctgttaatgcaattatacgaaatacatcggagacacaacaaatgtggccattacaggtttcataaaattacactgacttggctgttacttgatcttaggaaacagcacagtttaagatattgtgaattctgacttatactttattaaaatgctgtaaatctaaatagatcctgttggatgtgatgggtctagtccagtttatttaagttccatgtttccctgtttgcactttgcaantgaacaatgggggttattcgcngatggtaacgggttcgngttgaagaattaatggcngg

SEQ ID NO: 1285 - DNA, 284 bp, Homo sapien
ccagcaatagaaattaactctggatgattcaagtggaaaagaagtttgttgaaaggatattgagtagttcacagagtcatttggaacactagagaaaaggcttaaaaaatgggcaggcaggataaaacaaagtgcatagctttgaagctaaaattatgctgcagaacttgactagtgaggatattttttctgatgccagcaaatgctagatgaatggtttgtacctctcatttctctagcattggcattggcattgtttgctgctgacattggctactggatga

SEQ ID NO: 1286 - DNA, 521 bp, Homo sapien
  misc_feature (1)...(521): n = A,T,C or G
tggaatatatcgggttctttcaacaaacactgatgataacatcggtggtgcacatttcacagaaaccttagcacagtatctagcttctgagttccaaagatccttcaaacatgatgtgagaggaaatgcgcgancatgatgaaattaacgaacagtgctgaagtagcgaaacattctttgtcaaccttgggaagtgccaactgttttcttgactcattatatgaaggtcaagattttgattgcaatgtgtccagagcaagatttgaacttctttgttctccactttttaataagtgtatagaagcaatcagaggactcttagatcaaaatggatttacagcagatgatatcaacaaggttgtcctttgtggagggtcttctcgaatcccaaagctacagcaactggatttaaagatcctttccccagctggttgagcctcctcaattctatcccctcctggatggagttgattccctatnggtggcagcctataggagccggaattcctatttggggaagg

SEQ ID NO: 1287 - DNA, 347 bp, Homo sapien
  misc_feature (1)...(347): n = A,T,C or G
tttaacaaatgtagaaatgagccaaactatttaaattttaaaacagtaaaacaaaatgaaacttaatagctcacaaaattccagtccatgtttcatgacttattttagtcaatgaattttctatttatactaaacatatggacattttaaatgtgtttctaatatttttgattatctataatgtgcctgtcttcaattcacaagattgggttataacanttatttgccagattaacactagggaagttnttttgataaccagccttatccttagcagtagtgttattgctgatcaggccanaaaataagtttttccaaagttnattttttnaataaaagtntgtacc

SEQ ID NO: 1288 - DNA, 551 bp, Homo sapien
  misc_feature (1)...(551): n = A,T,C or G
gaagttctagtattctggatcaccgtgaaggaagtggacctatagcctttgcccacaagagaatgacaccatcttccatgcttaccacagggaggcaagctcaatgtacatcttatttcattgaacctgtacagtggatggaatctgctttgttgggagtgatggatggacagcttctttgcccaaaatgcagtgccaagttgggttccttcaactggtatggtgaacagtgctcttgtggtaggtggataacacctgcttttcaaatacataagaatagagtggatgaaatgaaaatattgcctgttttgggatcacaaacaggaaaaatatgaacatgatattttatagcttgggaagaaacttgcagatgatatgtgctgcctttgcttcttatcattcatggcagattgtttgtgctttcaacatttcatttgaaatgggagaagataaaatccncttgatgtaacctggaaactatgccttacatggcaatccaagccctttgatcatggacattttaattgatattaaatcctttatancccgnt

SEQ ID NO: 1289 - DNA, 457 bp, Homo sapien
aaaccccatcaagtagatggtgttcagtttatgtgggattgctgctgtgagtctgtgaaaaaaacaaagaaatctccaggttcaggatgcattcttgcccactgtatgggccttggtaagactttacaggtggtaagttttcttcatacagttcttttgtgtgacaaactggatttcagcacggcgttagtggtttgtcctcttaatactgctttgaattggatgaatgaatttgagaagtggcaagagggattaaaagatgatgagaagcttgaggtttctgaattagcaactgtgaaaccgtcctcaggagagaagctacatgctgcagaggtggcaagaagatggtggtgttatgatcataggctatgagatgtatagaaatcttgctcaaggaaggaatgtgaagagtcggaaacttaaagaaatatttaacaagccttggttgatccaggcc

SEQ ID NO: 1290 - DNA, 404 bp, Homo sapien
  misc_feature (1)...(404): n = A,T,C or G
ttttttttttttttttttttttttttttttttttttttaagatccncatcaataaatggagacgtataggaaaagtcagactacgtctacaaaatgtcagtatcatgcngcggcttcaaatccgaagtgatgttttgatgtgaagtgaaattttagttgtcgtagtaggcaaacaataaggaatgttgatccaataattacatggagtccatggaatccagtagccatgaagaatgtagaaccatagataccatctgaaatggagaatgatgtttcaaagtattcngaagcntggaggatggtgaagtaaagtccnagtataatgggtaattagtagggcttgatttatgtggtttcgntttaccctccataaggcctatngatgagccccctgtaattgnaaa

SEQ ID NO: 1291 - DNA, 363 bp, Homo sapien
  misc_feature (1)...(363): n = A,T,C or G
atnactctatgagaaccactttgctcataaagcaacggaaaaccacatcaaactagttaaggtgttggctctccaggataatccagagctggagctggctacccagagcttaaatggtgccatcccggtatcctccctgcatgcattttaacctcctcaaatgacagtcttccagtccagggccaggggtacaccaanggccaccatgcacctatgtggagacagtaaacgtactgtgaggagccatggatttaactctctgaattnaaaatgcataaatacagaccaaacctntatcataatatctgctcctggnccaantcatcaacgtaggttcnggacaggggaagggtcanggggcca

SEQ ID NO: 1292 - DNA, 176 bp, Homo sapien
  misc_feature (1)...(176): n = A,T,C or G
ttttttttntcaaagatccaaagatacatggacaaagaaanatgttcaanttcncaatgcctaatgtgtgcacataaaaacaggcacaaangnaatcantgtgtanccncattntncctattntcacaaaggngngcaggnagcagcaatctagtacagtnnngntgcagtcatgg

SEQ ID NO: 1293 - DNA, 103 bp, Homo sapien
  misc_feature (1)...(103): n = A,T,C or G
gtagatataggnttantaggagggtgaatangtaggnttgaattaatgnnantgcnaattttagaantgtgagtagaagtacaataatanatgnaatggtagc

SEQ ID NO: 1294 - DNA, 420 bp, Homo sapien
  misc_feature (1)...(420): n = A,T,C or G
caacttcagtattattttagtagtaatgtgtataaaatccaaccactgcttgggtgaccttaggagacagcaagcctaagagatgaaaacatttacaccttttaattaaattacactgtcaccacataaaagtgtgaggttcaacatttgttttcttaaaaacagagcactaaacagtttaacacaggacctaacttacggctaagatgtttctaaaatgtatgcagaacccttaagactatactgcatcaagtagttcttttgaattatgtatactcaaatgatggtgttataatttacattgaaatgccacaacaaaatcttgataaaacaagatataggagaaataaaaattaatttctgaaccaaatggtggtactaccttacccctagagtaaatcnctggggaaatacngggcn

SEQ ID NO: 1295 - DNA, 412 bp, Homo sapien
  misc_feature (1)...(412): n = A,T,C or G
tttttttttttttttttttttttttttttaagtgctgaagaatgagtcttttatttgttttcagagtggtatgatatctttttgttatcttcaagaagttctcaattgctacagagaagtggcaagtctgtagatggcagcagctgagcagtgtcccacccataggcttttcaggagacatcctcacatactagtattcatccaaaaatggccaattagggtggcccttgaaaatggcagcaggtatgtatcgcatatttctgttcaggccatcaagaactttcanatccnctgaactcagctggaattcaaaaacctgcatgttctctttgatccgctcctctttgagactgggtgttgaggaccacaatcccacgctgtaactggtagcgaaggggcaatcaaggctggn

SEQ ID NO: 1296 - DNA, 398 bp, Homo sapien
cttgtcacccaggctggagtgcagtggcatgatcatagctcactgtaacctcgaactccttggttcaagcaatcctcccacctcagcctctagagtagctaggactacaggtgtgtgccaccccacccagctaagttttttagttttttgtagagatgagggtcttgctacgttttttgtacagtatgctagtctcaaactactggcctcaagtggtcttcctgccttgacctcccaaagtactgggattacaggcatgagccactgtactggcctactttttacttctatgagatcaacttttttttaagcttctgcatatgagtgagaacatgcagtgtttaaattaccattcctgggttatttcacttaacatggaatgctttctgtggagaaaa

SEQ ID NO: 1297 - DNA, 400 bp, Homo sapien
tttcgagacagggtttctctgtgtagccctggtgtcctggaactcactctgtagaccaggctggccaggaactcagaaatccacctgcctctgcctcccgagtgctgggagcagtgacttcttaacctggacacttcacatctgctaagacttctgggttagccagcaaatgtgtggacaagatacgtaaggaaggcacatatcagtaccagcctgaaaatgatttggtgttcatgaagagcacaccatggtacagctcatggctaaatggcttggaaaagtcaccaagagaaaagagagcctctttctattggtgtgaaaacacactccagagggaatcctcagaactggctgtctctgagtggccctggcctttgggatccagcaacaacagcatggc

SEQ ID NO: 1298 - DNA, 501 bp, Homo sapien
  misc_feature (1)...(501): n = A,T,C or G
gccaggctggagtgcaatggtgcgatctcagctcactgcaacctctgcctcctgggttcaagtgattctcctgcctcagcctcccaagtagctgggactacaggcatgtgccaacacgcctggctaatttttgtatttatagtagagacagggtttcaccatgttgaccaggctggtctcgaactcctgacctcaggtgatccgcctgccttgnctcccaaagcgctgggattacaggcgtaacancttgcacccggtgtacaactactctcaaaataacatatattataaccaaaatacatggtagcataggttgcaaaaatgtttgaaaactgaaaccttaatgttattccctaagaaattaataaaacttcttcaaaacctttggtgctttatttcccnggttgagtaattttcaaaggcagaagggggtaatgttagccaataaatctgctgtacacctaaagctgttgtatatgtggggtctctagatcccnggga

SEQ ID NO: 1299 - DNA, 341 bp, Homo sapien
  misc_feature (1)...(341): n = A,T,C or G
taacttggttttgggtttttatccttagggactctagggctcggcaccttatactgtagcagctgacaaatcaacgcgtaatgaattccggagttcatggagaagaatcttgatgcctatgattacaacaaggctcgggtgagctggaaaaggagctacagagcggagggcatcagagatcctcataggttctttctgcttccttgtagttttataatatctttgtgaaatcttccaggtgccagggccattgactcaagaaatggaggcccggcangctacaaggaaaaaagagcagaaggcagctcgacggcaacgggagcaacagcagcggaacagaa

SEQ ID NO: 1300 - DNA, 537 bp, Homo sapien
  misc_feature (1)...(537): n = A,T,C or G
ggacatacattcccaggaacaatggaatgctttagaaggaggagcatagattttgatgggcagttaactgcatctgctatgtgctctttctgcccaaggattctcatacaagctgtatcacctgcttgaaatgctggtctcccactccttatctggctagctcctatttatcattcaggtcttatcttaaaacttattttttctaggtaggtttagaccccatagaaacttgcaaatctctttggtagctttgcattgtgtgtggaagtgatggtgtcacttcctgggtcaaagtgtggctcccccatctctctgctgctggctggatgacgctctccaaagttctaagggatggcagagcatanagagagggggaagcctgggatcctgaaatcccccccaagaaaagaaagaataccccatggaccaggtgcattttatanggataattaaattttaatgtggtnaacttgactggggttaaaaggataccccggatagctagttaaaaacattaattcttgggnatgtgggtga

SEQ ID NO: 1301 - DNA, 437 bp, Homo sapien
aaactttagaaactctagaccttgacatcttgctacactttctctctcattctttttgccccttggttccacaaatggtgtttggattagtcgggacaagaccagctgctgcaacaaataagcctgtaagtttcagtgtcttaacacattagtttctttttcttgttcaggtgaatgtaggttgtattaatcaagattcttcagagaaacagaactgatagtgtatatatagatatataagaggggatttattatgggaactggtttatgtgattctggaggccaagaagttccatgatatgctgtctgtgacatgggagaaccagggaagccgggttgaagactgaagagctgagaacctggagttctgatgtttaagggcaggagaagataaatgtcccagctccagaagagagcgaatttgtcttttttctttc

SEQ ID NO: 1302 - DNA, 144 bp, Homo sapien
  misc_feature (1)...(144): n = A,T,C or G
tatggttttggagatcagagtaatttgagaaaactaagaaatgtatcaaatctgaaacctgtcccgctcattggtccaaaattgaagagaaggtggccaatttcttattgtcgggaactcaaaggttattccattccntttaag

SEQ ID NO: 1303 - DNA, 555 bp, Homo sapien
  misc_feature (1)...(555): n = A,T,C or G
ctttatttttctacatcagggtcatgctgatacatattttccccatcctcactttttaaaaatgtagtatctgaaaattttgattacatttttgtaccataccagtcctcagaaaatactacattctttaaatttttaaaaaaatggacagtaatttttaaacaatagaaatggtaagtatgttggtttttaaggtataaaataactaactgtaccataaacaaataaataactgctttccttttccatagcagtacatatagcaatacattctcctaagtcatatagttatcatttacaatagacaacttaattttactaatggatggcaaaaaataatagaatacaaggcacaatcattaaatgggagtttttctttagggtgtatattgacataccagcatgataaggataccgtaaaaagtgcagaaaaaaccacaatgtgcaatgagaccactggtataaaaccatgattgcataaaaagtgatttgggccnattttaacctttaanaatggaaaataacccatttccccccttaaaattaacctataag

SEQ ID NO: 1304 - DNA, 193 bp, Homo sapien
  misc_feature (1)...(193): n = A,T,C or G
gatgcttttganggtactggtgntaacngtnttctgtggtctgantgtggctttggnactgtnngaattagtttcantnantaangaactagaganttnactnattganctactaaactgngtctttgaanaactgggntnataangngggacaaaagntactctagaggnttataaagatgntgctttaacg

SEQ ID NO: 1305 - DNA, 588 bp, Homo sapien
  misc_feature (1)...(588): n = A,T,C or G
gcaattcaaatgaacgtttatttcttaaacccacacagagtaagggcaganttagagatgcctggcacagcatttctcatccaggatcacttcctcgttctttcttctttgctgggagcatcttagatttatatcattttctacaaagacaatatcctgaatggcagtcgcaggtttatttcaaaagttggaagtcttctcaggaaagtaggggagactggattcccagctaatggaattttcacctgtgatgtctgtgttctcagtgaattcttccagaaagccggagagactgtctcaacatcagtagagaactcagaattctgtttgtttgcggctgggcgtgaagtccatgatctgctcagagtcagtgcttaaatcatcatctgtataatcctctagaggagcttttggtccctctgtatgatcccagttggtcaaagactgagtttagtaggtcaatgattgaattctgtagttccttaattggatggaaactaattctgacaggggggaaagccacagtccgaccacagaagacagtgatcaccaggaccctgnaaaagcatcctggctttagtaggggtn

SEQ ID NO: 1306 - DNA, 579 bp, Homo sapien
  misc_feature (1)...(579): n = A,T,C or G
tttttttttttttttttttttttttttttttttaagagacagggtcttactctgttgcccaggctggagttcagaggtgcaatcatagctcactgcggcctcaagctcctgggctgaagcgatcttcccacctcagcctctggagtagctgggactacaggtgtgcaccaccacacccagctaattaaaaaattttttttgtagagatggggtttcactatgttgcccaggctgttggcctcaaatgatcctcctgtcttggcctcgcaaagggctgtgactacaggcatgacccaccatgcccagccacttactttttaattggggtcctagctgagagccattttttgaaaatgggctccttccagaaataagntaattttttccttctgaaaatctcaaacttacaaatacagnacaaatacttttttccnaaaccataaatacccagtgtaatggctaactcctgggaagacatcagtgagtatttccaatggtctcctacaatcaatatcaggngattaacactgaccaatttttaccttcnaagtcctcagatnccatttaagtttttgccaa

SEQ ID NO: 1307 - DNA, 424 bp, Homo sapien
  misc_feature (1)...(424): n = A,T,C or G
gcatatcacatagttaatccaagtccatgaccattaactggagccttttcagccctccttctaacatcaggtctagtaatatgatttcactataattcaattacactattaacccttggcctactcaccaatatcctcacaatatatcaatgatgacgagacgtaattcgtgaaggaacctaccaaggccaccacactcctattgtacaaaaaggactacgatatggtataattctattcatcgtctcggaagtatttttctttgcaggattcttctgagcgttctatcattctagcctcggtaccaacacatgatctaggaggctgctgacctccaacaggaatttcaccactttaancctctagaagtcccactactttaatactttcagtacttctaagcatcagggtgtttcaattacat

SEQ ID NO: 1308 - DNA, 411 bp, Homo sapien
  misc_feature (1)...(411): n = A,T,C or G
ccctgcctcaccctgaagtgtcttgtccatccagctgcaggctcctgcaatctcaagctgctgctaaacggcctagacagcgtgatgcaatctgtttttcagcccagacccgcataggngngcatctgggcagtgattaggtggtgtaatccgaaagagatggggagctagatgggtgtgagaacagtaggggtaaagaccttttatcctccctactccaaggtgcaagaaagaaggaggaagcactgtgtacccttggggntgctccggccatgcctccaganactgggcgtaccccacagccttatctacttctggtcttcaggcctcatcttgacttncgttccctttctgtggcttttgatgttaggcccagctcagggnttatgagagactgtaggtgaaatgttg

SEQ ID NO: 1309 - DNA, 428 bp, Homo sapien
  misc_feature (1)...(428): n = A,T,C or G
ttggagaggnatcattgatatgctgagagtggaacaggtaaaaattcatgcaggccccaaatttgcctcctatctgaccttcagcccctctgaagtgaagtcactccgaactgagtatggggacctggaattatgcattgaagtagtggacaacgttcaggatgccattgaccacatccacaagtatggcagctcccacacggatgtcatcgtcacagaggacgaaaacacagcggagttcttcctgcagcacgtagacagtgcctgtgtgttctggaatgccagcactcggttttcttgatggttacccgcttttggactgggagcttgaagtggggaatcagtacatcgangaatccacgcccggggaccagtagggacttgagggactgcttactactaagtgggctgctgcgaaggggaaggac

SEQ ID NO: 1310 - DNA, 388 bp, Homo sapien
  misc_feature (1)...(388): n = A,T,C or G
actaaaagtctcatcacaaacattcccactggcaccttcaccaaaatcactaacaaccataaaagtaaaaaccccttgagaattaaaatgaacgaaaatctatttgcctcattcattaccccaacaataataggattcccaatcgttgtagccatcattatatttccttcaatcctattcccatcctcaaaacgcctaatcaacaaccgtctccattctttccaacactgactagttaaacttattatcaaacaaataatgctaatccacacaccaaaaggacngaacatgaacnctaataattgttttccctaattcatatttattgggatcaacaaatctcctagggcctttttacnacatanatttacacctactacncaactat

SEQ ID NO: 1311 - DNA, 425 bp, Homo sapien
  misc_feature (1)...(425): n = A,T,C or G
aatgaacaataattatatgagttgttgagaattcagggacaaatacaggatcttcataaactgtgtcataccaaatatcaaatattctttggactctggctcagtgtaactgtataaataatttttgctactatcacaacttaagtagtgggaatgtttgcagtttcagcacattgtccatatggtccatatgtaacggagtcaaatttgtctcatttttcaagattcaaaataagactcngtaaagttctgctgagcatcctcaattttttttaaattgggaaaccactggggcctagaaggggggaaaatgttcccatttcatgccattgtggaagtnaagagtcnccctgttcanttgccngtggtatcnctatcanaatccctattttccnaaatcccaatttggttaaacccttacagaa

SEQ ID NO: 1312 - DNA, 357 bp, Homo sapien
  misc_feature (1)...(357): n = A,T,C or G
aagctgcattatgtaggcacaactgattaaaccactggccattgganatcagtcagcctctctgccctccttggaggttgggagatgggacagaaagtcctaaccttctaatcctcccttggtttttcagtgaccagcccctaccctgaagctacctaagtgcgccagcaccaatcattagcatacaanatgacaccactttggaaaggccaaagattttaggagttgtatgccaggaagggagttgaagaccaactatatatttcacaatatcacagctgcccagagtgagatcggcagcctttaaggtattcatccagctgaatgttcccacatgccctcaagtacttaccaccc

SEQ ID NO: 1313 - DNA, 419 bp, Homo sapien
  misc_feature (1)...(419): n = A,T,C or G
tagaatctcatcttctgagaaatgctgcctgtttgtcttcacttgtgagggagactgctcgctccctctgcccttccattttgtttctcagacaggctctttagctttaagggctaggggcattaaggatgccaggatctgtgtttcagagctgagtgttctcacccagccttattgaagcctagcccggaaagctttgagaagcaaagcccctgacagccgagatcccttggcagtactcagtgcggcagtgttggccttctaggataatggggattttctcatatcctcctttggaccgttgaaacctccacaagggaatcatttttcaaaacatcttgttctgggaaggattggaccaagtaagtntatttactggtggaaagaagcgtgcacttataccaaagcagtcttctagt

SEQ ID NO: 1314 - DNA, 310 bp, Homo sapien
  misc_feature (1)...(310): n = A,T,C or G
tcctcacagacaaaggaactgctgtgttacagttcctcacaagcctctttaagccttttgtggaatcatatcagttactttgcagataccttttgcatgaagaggactacttcggtgagaaggaatacttggttgcagccaggaagttcacccgtcagcttctggatcaaggctcctctcagtgttacgatgcgctgtcttctgaactgcagaaaaatgccttaagcagctttccgtgagacntgggggtggtggaaaagaagaaggtagaatagtaantatgtgtattatgtgaacnggccttgccaca

SEQ ID NO: 1315 - DNA, 576 bp, Homo sapien
  misc_feature (1)...(576): n = A,T,C or G
acattaggaaacttttattgacttaagctggcattctagttttgtccaagtcttaataggtgcctttcttatcaatctgcgtgtgtttttaccaccacagaatcatgacgacttgcacttatcattgtcctgtaataattaaaatgatgttcaaataatcagcaagttacttctctaaaatacttaaaagatgttctgaggagtgcttccaagttctatgtataaataatgattgatacatttaagagccatttgatgctgaagataaatatttcttatataaaacattgttatgacataccattgtcctaatggaggctgttattagatatatttttatactaaagaataaagctttatctttggtagtaattttatttatagganctcttatcaatgaagaactctggtatccaacaccagaaaagcaggcatactgcaagtgacatcccgtagaggaagcnaaaaaagatggctgccagaaaagagaccnccgtaaggtttatatcngaccattccttantataaccggtcccttctccngcagccggatccggtgccgggcaaatgcctttn

SEQ ID NO: 1316 - DNA, 564 bp, Homo sapien
  misc_feature (1)...(564): n = A,T,C or G
aatatttggggatgttttatttaaatgtcttgtgttcccttttaaccaacaccaaaaagagaaattaaaaattttttttctttctttctttcttctcccccaccccaccccgctattccaaacaggagagccacttcagtgaagggttggcgagtctctgcaattgggtggggagtgtgtgtgtgtgtcctgtccggctggagtgttcttcccagcttggcaaccctgggtagacagccaaccccggaaggtggcttcctgggagtctcatcctgagcagacctggtcttccccccagggagggttgggcttgaggactggccgtgactatggggcccagtgttccagagggaagggaagggatggaggagagaaggtcagatctggaatgttccatggaggttgcagggtctggagaatatatttggtagaaaaataaggtgctttgggaatctgtgcagtctgtgtcttgcctgcccaagagagaaacctgctggccaaagggcaataactagggaataaaggcagancagggaatctggcccatggaaggattccagatac

SEQ ID NO: 1317 - DNA, 424 bp, Homo sapien
  misc_feature (1)...(424): n = A,T,C or G
ttttttttttttttttttttttttttttttttttttttaagatccncatcaataaatggagacgtataggaaaagtcagactacgtctacaaaatgtcagtatcatgctgcggcttcaaatccgaagtgatgttttgatgtgaagtgaaattttagttggtcgtagtaggcaaacaataaggaatgttgatccaataattacatggngtccatggaatccagtagccatgaagaatgtagaaccatagataccatctgaaatggagaatgatgtttcaaagtattcngaagcttggaggatggtgaagtaaagtcccagtataatgggnaattaggtagggcttgatttatgtggttttcgttttaccttcccataaggctatgattgagcncatggnaattgaaacnccctgatgctagaagt

SEQ ID NO: 1318 - DNA, 412 bp, Homo sapien
  misc_feature (1)...(412): n = A,T,C or G
gagacagggtctcactgttccccaagttagagtgtagggtggcaagatcaagtctcattgcagccacgacctcctgggctcaagcaactctgcccacctcagcctgagtagctgggactacaggcctgtgccaccacactcggttaattattattatttttttgtagacaaggtctcactatgttgcccaggctggtcacaaactcttggactcaagcaatatgctcactttgtcctgtcctcccaaagtgctgggattatagccacgagccaccgtgaccagctgatttaaaacattttgacatttggtatgtttatatatttataatacttcaaaagtatctaaaaacacaaatctaattatattacnctctccataccccaatttactgaactaaaatatctatttgac

SEQ ID NO: 1319 - DNA, 288 bp, Homo sapien
ctccaatgttctattatgtatttacttcatatacatttcaaatgctatcccaaaagtcccttatatccccccccccattggttcagtttaagagccatgcagtgagagagagccatgtctgacactaccttgaaggccagcaaccagaggctgaataccttaaaaacctagatgccccacaactgaggaatgcataaaaatgtagtatatttataaaatgatatatgacacaagttgttaaaaaaaaaggtgatcatgaaattttgcaggcaaattgatggaactaga

SEQ ID NO: 1320 - DNA, 215 bp, Homo sapien
  misc_feature (1)...(215): n = A,T,C or G
acatgattatattaacactaggaaaactttttaaaaaagaactagtaaatataaaataattactgactataaacaaacatattcatctagagagactttcagtagcgagtgagcagacccactggtgaagaccattttgaatatgcactttctattagagacaggaatgatgctgaaaagnagaccaacactggacccacatggcaggaacactc

SEQ ID NO: 1321 - DNA, 406 bp, Homo sapien
  misc_feature (1)...(406): n = A,T,C or G
ggtgagtcaaataagaccattttgattgtaaaccataaaatagttcagcaagtagcccacagttctggcctaacagcagacttgctgttttcacttggtatcctggagttgggttgctaaccttaatttctatgatgttttctaaaatgaaacttgataaagtagaccaccagctgcaccgtgttttctgtaaaagtattgttagtaagtggccaagagacttgaggaaaatacagattttttgtttaccttggtcttgttttaaagtcttaaaaaattaaagataacattataatgtagaatacagatgggacatagtccttgtaancttcccnttgaaaatgttttaaatatttaggaagcnttttaaaagacactaaattgtactctaaaagacactaaaatt

SEQ ID NO: 1322 - DNA, 402 bp, Homo sapien
  misc_feature (1)...(402): n = A,T,C or G
tggtgggggaggggtgggaatccagagacctgtttattcctcttcccaaagtgactacattcaaggaatctttttgtgcttttcaaaggatattacactattactgagcgctgatggctagcatatggtgatgatggttagaaaactccttgctgttctgtgtcatagaacctgtgatgatcattagccagaaatcaactttccaaccttcccaatggcaataagatgtgggtctaggaactctttaagaactaagccctaaacggtttcctgattcctttactttggtaatgcacatgncctggaattaatttttaataataagtggtaattttttaatttaaacctggatttttggaggtggaactggaataaaaatcnccttaatacnggtctcgtgnc

SEQ ID NO: 1323 - DNA, 257 bp, Homo sapien
catttttcagagatttttattgtttcagactgagtcatgcatactaaaattattacatattttcaccactttgacttagaaaatgcactagaaaaataaactttggtcaaaacaaacactgaagtacatgaatccaccatgtatccctatactcaaagccaaactgaatttcagtttgaagcaaggaatgtgaccagtggctgaaacagtgccctaagctggtcagagaattagctcacctcccactccatcagagg

SEQ ID NO: 1324 - DNA, 571 bp, Homo sapien
gtctcagttgccatctcacctctggtgctccaggctagctacccgtgagcttctcctgcctctgccttccacctcactacaggagtgctgagactgtggaaactgccactactacatctggctttatatatgtcggtgcatctgaactcagatctgtacagttgtgtgacaagtgctttgcccacccagccatttccagacctgaactaaaaatagtctcaataaaatgcaccattgtcattctgaggatataccattttgttttaaaactaaagctttgaaattcatgctctaaaatctttggcttggaatgggccctcttttccctaaggaatttaccacagcatgcacagctggcaggaaaaggggaaccggaagttgttatcccataaataatatcaagtgatcaccactttaaggacagtgttgctttgtgtcagacagaagcgttgagagcatcttgtgagtacctttctggttcatttctctggatacgaacttctggggtcccagcagttctggttggatcactctgaagagcctccgtgccgaattcggcccaagtgggaga

SEQ ID NO: 1325 - DNA, 547 bp, Homo sapien
  misc_feature (1)...(547): n = A,T,C or G
tctatacggaatattaaacacattactgatatcccatataattctgaaggacaagccatagtggaaagaatgaatctctccctgaaacagcagttgcagaagcaaaagggggaaaacaggtactacaggacaccccataagcaattgaatcgcattattaactttaaattttttgagcctgcctaaaggccggatcttatcagcagctgaacagcatctacagaaaccagctgcaaagacagaagcagaacaactggtttggtggagagacctgataacagaaagttgggaaataggtaaaataataacttggggtagaggttatgcttatgtttctccaggactgaaccatcaagacacctggaaaccttatcatggagcgaatgctggaggaagagattccgggaggatcccgaggacccccccagttggtagccatgtccagactgatgctggaggaggacccccactggtcacgagcaacacccgtcaaacacagccatccacctgaggtcagttccagaagctngtcccgattggcagaaga

SEQ ID NO: 1326 - DNA, 403 bp, Homo sapien
  misc_feature (1)...(403): n = A,T,C or G
agtaactcaagggatcccactgcacataggacttattcttcttacatgacaaaaaattgctcccctatcaattttaattcaaatttacccgctactcaactctactatcattttaatactagcaattacttctattttcataggggcatgaggaggacttaaccaaacacaaatacgaaaaattatagcctattcatcaattgcccacataggatgaatattagcaattcttccttacaacccatccctcactctactcaacctcataatctatattattcttacagcccctatattcatagcactttatactaaataactcctataacccatcaactcaatctcacttctatggaaatnaaactccagcaatactaactatnatctcactggatattactat

SEQ ID NO: 1327 - DNA, 305 bp, Homo sapien
  misc_feature (1)...(305): n = A,T,C or G
ttcttttaggtattagttggggggctaggggtagggttattgtgcttatgatagctagggtggaaaatattaggttgggtttagtttttgtttggtgagttattatttttgagttattgttggttggaaatattgttagtgaagtggaataaattaggcgagtataaaagaataggtttagtagagcnattattgctatgagtgttgctataattagacagttgttttttataagttcngtgatgataattcattttggtaagaatccngttaagtggtggaaggccnccnagggatagtaatat

SEQ ID NO: 1328 - DNA, 288 bp, Homo sapien
aaaatcagaaagaactcaaatgttcatcaacatttcttcaatggatggatcaattaagtcaactcagataatgaaatactgtacaacagtgaaaaggaatgaaacacagcatatacagtaacacatatgaatctcaaaaacatgctgaatgaaaaaggcaagttagccgggcatagtggcccatgcatgtaatcccagcactttgcaagtgcaaggcaggaggatcgtttcagcccagaagttggagaccagcctgggcaacataatgagacccctgtcttttactta

SEQ ID NO: 1329 - DNA, 287 bp, Homo sapien
  misc_feature (1)...(287): n = A,T,C or G
ttttttttttttttttttagtaaagacagggtctcattatgttgcccaggctggtctccaacttctgggctgaaacgatcctcctgccttgcacttgcaaagtnttgggattacatgcatgggccactatgcccggctaacttgcctttttcattcagcatgtttttgagattcatatgtgttactgtatatgctgtgtttcattccttttcactgttgtacagtatttcattatctgagttgacttaattgatccatccattgaagaaatgttgatgaacatttga

SEQ ID NO: 1330 - DNA, 561 bp, Homo sapien
  misc_feature (1)...(561): n = A,T,C or G
agaattcaatcattgacctactaaactcagtctttgaccaactgggatcatacagagggacaaaagctcctctagaggattatacagatgatgatttaagcactgactctgagcagatcatggacttcacgccagccgcaaacaaacagaattctgagttctctactgatgttgagacagtctcctccggctttctggaagaattcactgagaacacagacatcacagtgaaaattccattagctgggaatccagtctcccctacttcctgagaagactccaactttgaaataaacctgcgactgccattcaggatattgtctttggtagaaaatgatataaatctaagatgctcccagcaaagaagaaagaacgaggaagtgatcctggatgagaaatgctgtgccaggcatctctaagctctgcccttactctgtgtggggttaagaaataaacgttcatttgaattgcaaaaaaaaacggcacgagaccggccgcagactacgctgcgagccgccgnccaggntctgggaaattctggctttgtttaacaagcatgga

SEQ ID NO: 1331 - DNA, 391 bp, Homo sapien
  misc_feature (1)...(391): n = A,T,C or G
caggtcccacaagcccgcaatggacagccagctcccctccttttgtggcccaccaccgggcagcccacactcaagggagaggtccaggcaacttncagcaggaacagaagttcgctatctgccttgcctgtatctggaatcctccatgggccagattcctggctctgctttattccctagttattgccctttggccagcaggtttctctcttgggcaggcaagacacagactgcacagattcccaaagcaccttatttttctaccaaatatattctccagaccctgcaacctccatgggaacattccagatctngaccttctctcctccatcccttcccttccctctgggaacactgggccccatagtcacggncagtcctcaagcccaac

SEQ ID NO: 1332 - DNA, 568 bp, Homo sapien
  misc_feature (1)...(568): n = A,T,C or G
aaaatgcaaaattctgatgatgaaaggccacagctcnaggatgaagaacacaggcattcagatgatgaagaggaacaggatcataaatcagaatctgcaagaggcagtgatagtgaagatgaagttttacgaatgaaacgcaagaatgcgattgcatctgattcagaagcggatagtgacactgaggtgccaaaagataatagtggaaccatggatttatttggaggtgcagatgatatctcttcagggagtgatggagaagacaaaccacctactccaggacagcctgttgatgaaaatgggattgcctcaggattcaacaggaagaggagccaattcctgagaccagaatagaagttagaaatacccaaagtaaacactgatttaggaaacgacttatattttgttaaactgccccactttctccagtgtagagcccagaccttttgatcctccagtattatgnagatggattttgaagatggagaatgctgggatgaagaaggttagacccaggttaaatttaagggtagaaaatcntattagatgggggatcncccgggattgn

SEQ ID NO: 1333 - DNA, 268 bp, Homo sapien
  misc_feature (1)...(268): n = A,T,C or G
tttaccctcctaaaagccncanngtacntngngtcncccttcacaanttccgacggcatctanngctcaacatanattntagccacaggttcnncgganntcacgnnatnatnggctnanctttccnnacnatcngctnnanacgccaaatantatntcaatttacctncaaacataacttngnntncgcagncgcngcatgntactggcattttgtcgctgtggtttgantctttctgtctgtctccctctcttgntgcgggtctta

SEQ ID NO: 1334 - DNA, 196 bp, Homo sapien
  misc_feature (1)...(196): n = A,T,C or G
tgcntntnntcancnacttgcaaaaaantgtttcnaactctctaacntgtttaannctcaaacagnngaagncgttggntgggataacgagnttaaggatgntgtgcttgnagantgtactaaaantggagganttattnatatttatgtngaaaaaaattnngctccgggcaatgtgnctgtgncgtgcccatca

SEQ ID NO: 1335 - DNA, 567 bp, Homo sapien
  misc_feature (1)...(567): n = A,T,C or G
gcatatcacatagttaatccaagtccatgaccattaactggagccttttcagccctccttctaacatcaggtctagtaatatgatttcactataattcaattacactattaacccttggcctactcaccaatatcctcacaatatatcaatgatgacgagacgtaattcgtgaaggaacctaccaaggccaccacactcctattgtacaaaaaggactacgatatggtataattctattcatcgtctcggaagtatttttctttgcaggattcttctgagcgttctatcattctagcctcgtaccaacacatgatctaggaggctgctgacctccaacaggaatttcaccacttaaccctctagaagtcccactacttaatacttcagtacttctagcatcaggtgtttcaattacatgnggctcatcatagccttatagaaggtaaacgganaccacataaatcaagccctactaattaccattatactaggnctttacttcaccatcctccaagcttcagaatactttgaaacatcattctccatttcagatgggatccatgggg

SEQ ID NO: 1336 - DNA, 554 bp, Homo sapien
  misc_feature (1)...(554): n = A,T,C or G
atgaacccaatttcaggaaatctgaactgtgaccctattgctatgtcccagtgttcctcagatcatggatgtgaaactgatttagattcagatgatgacaaaatagaaaaaccaaacaattttatgaaagattctgcatcacaagacaatggactaagcagaaaaatttccaggaaaagggtctgttccagtgactcagacagtagtttacaggtggttaagaaatcatcaaaagccagaacaggtctcctgaggattactcgaagatgtgcagctacggctncaaataagatcaagctcatgagtgatgtagaagatgtcagtttagaaaatgtgcacactagaagcaaaaatggaaggaaaaaacctctccatcttgcttgtactacagctaagaagaaattgagtgattgtgaaggaagtgtacattgtgaagtaccaagtgaacagtatgcctgtgaaggaagccacctgatnctgactccgaggtagtaccaaagtgcttagtcaggctctaaatggagactcagactctgaagatatgttgaattcng

SEQ ID NO: 1337 - DNA, 434 bp, Homo sapien
  misc_feature (1)...(434): n = A,T,C or G
aaaatgttagagggctggtcaaatagatattttagttcagtaaattggggtatggagaggtaatataattagatttgtgtttttagatacttttgaagtattataaatatatanacataccaaatgtcaaaatgttttaaatcagctggtcacggtggctcgnggctataatcccagcactttgggangacaggacaaagtgagcatattgcttgagtccaaagagtttgtgaccagcctgggcaaccatagtgagaccttgtctacaaanaaataataataattaaccgagttgtggtggcacaggcctgtagtcccagctactcaggctgaggtgggcagagttgcntgagcccaggangtcgtggctgcaatgagacttgatcttgncaccctacactctaacttggggaancagtgagancctgtctccn

SEQ ID NO: 1338 - DNA, 516 bp, Homo sapien
  misc_feature (1)...(516): n = A,T,C or G
ccggcccagtgtgacttccaaaaagagactatggtagaatcaagtttctaattctgaattattttgagtgttttgaacttaatttttaataacatgcatgtgctcctccagcagtagaaaggaaaatgaggactgtgtgtacacttgttccatgtgaaagtgcaggggaacagctcatctccagtgggtatggacccactcttaacccacccagtctccaaactgggataatagtcaggaatgacatgttcaaaattactaatgtatgctttagaaaacatttttagaagacttacgcttaacaataaaacccaagcaaatggtgtaatttgattttcttaaaaagtctacatttcacatattaataaagcaatcccaacaaaacagtcttgcatctccagaaagaaggaatgaatattgatgacatcttaattttattcagtcccattacttcttaaaatttgattggaaaaattaagtcnatgtaaccccatgctggttttagggatatggaac

SEQ ID NO: 1339 - DNA, 277 bp, Homo sapien
aaacctctctgaccaagagcctctgatggagtgggaggtgagctaattctctgaccagcttagggcactgtttcagccactggtcacattccttgcttcaaactgaaattcagtttggctttgagtatagggatacatggtggattcatgtacttcagtgtttgttttgaccaaagtttatttttctagtgcattttctaagtcaaagtggtgaaaatatgtaataattttagtatgcatgactcagtctgaaacaataaaaatctctgaaaaatga

SEQ ID NO: 1340 - DNA, 547 bp, Homo sapien
  misc_feature (1)...(547): n = A,T,C or G
aaacaagacaaataaaattctcgttcagtactaagattcccagaaaagttttagttttataatgggagaatatgaatataaactttttactcttttgtgcaaaacaaagcaaatataatcaaaattataaaattaacagttcagcacagaaatgctgctatgtcacagtctgaccgtgtccaatctaccacaaattttcagtgtttatgttagaatcatgagttcttccttgacaagccgcctttcctgtcaccttgaatgaacattaaaagtccagggtgtttttccattttaagtgatcaaagagcaaactaacacaattccggggctaaggaccaatcattgtccaaaagccaaacctatctagaaagggtcaccatagagctgaagacaggttcctccgccatgggaatccgctgcacagatccanactcgtctttgatctcatttccttgggaagacagtaagccttttcccctgaagcagcacagtgccttggngcttagttacncgagggtgatgccaccgtccattngtaattcctgtt

SEQ ID NO: 1341 - DNA, 555 bp, Homo sapien
  misc_feature (1)...(555): n = A,T,C or G
aagtccagtgaggctgaagtaaaggggcaagatagggcagttaactaaagagcactttatttctttgaagcctttctaagaaagaaatgngggtgcgagtggcttgaatctcccatgatgttggagggcacttagtggggttgaagtatgacataatatttcccattggggaaaggagaatttctcttagagggtggcaaaatgcctttgcccagtgtccctattttaggcatcttttccttccttattccttccagtcagggtgtgtcctatacaaaacttcccatcagttctcctcaatattccccatttgtaaatgatcacttctcttttctaaacccttttcctgttcagatccatacaggatttgcaagggtaggatcatacatgcaaatgccccttgttcatctgtgtcttctgcaaactagtctcatgaagaattctggcgtgcagcaagggtagctgaagtttgggtctgggactggagattggccattaggtccctgagattccagctcccttccaccaagcccagtcttgctacgtggcacaggg

SEQ ID NO: 1342 - DNA, 396 bp, Homo sapien
  misc_feature (1)...(396): n = A,T,C or G
aaagttcacttgctataaatagagccttaacataaagtgattttcggttctttagcacaatttttaaaacaatttctccaacagaattaagtgaaatctcatttatcttaaagcaaattagaggacttataaaaaatctttccatttctatagagatgaaggaaattttaatacagtggttctcaaactggggtccctggaccangaaacatctgcatcacctgggaagtgattagaaatgcaagtgatcaggccagaccctctgaatgagaaattctggtggtcgagcccagcagtctgtttcaccaagcccccgccagatcgttttgctgctgctgaagttgaagaaccactgccgtaatgattgcctggtctaaggcccttgacaatgagact

SEQ ID NO: 1343 - DNA, 341 bp, Homo sapien
gaccgtgccattgcactccagcctgggtgacaagagtgaaactccatctcaaaaaaaaaaaaagaaaaagaaaaagaaagaaagaaatgagtcctatggcagaaaccactagtaatcaccaacatctgtgctcctcacttcttcctgggcacactgctagactgcattttccagtctcctttgaggttaggtgtggacaagggactaaattctacccattggaaacattacgtccagacctggcctattaaaacattctacatgggatgctccttttcttttcccatctgctggctggaaggagaagatccaagaacctaaaggagggtggagccacaagg

SEQ ID NO: 1344 - DNA, 422 bp, Homo sapien
  misc_feature (1)...(422): n = A,T,C or G
tttttcattggcagttgcttatacaaggattcattgaaaaccagggggatgaggctacacatgctcctcaacttggaacagggagtggggtgttagagaagctggggaagagaggaagttaaggatctgaggcaggaggggatgaccatgaaggggttcccaggatgcctggcacttccttcagcccatgctgactgtgctggggtctgtggtgcgcactgngggaaggtggtcatcgctggtgcccatgcacccngtgggcactgccggctcttctgtcacagttcatcttcattgacctgcctatgtttcttaccgcccccacagcggaaccttttgctgagaatgatgaggaggcccacgacgaaggccaggcccgcgaagatcaggcctcctttgcggacggtttcatagtcgtactc

SEQ ID NO: 1345 - DNA, 427 bp, Homo sapien
  misc_feature (1)...(427): n = A,T,C or G
cttttgttaccagttaaatataagaacaccttttacctctataacaggaaggaagctgctgtgaccagatacctttgagaagctttctgagcatgtgaaagagaaaacagaaagtattttctgcaattggtaaacttgctgttttcagaatgtcaacaggcaaacaaacacgtgacacgtgtaccttgtgaaaaccatgccaccctggccccaaactcctacagcagtggttgtcctggggccgactgcctgcagnactgcagangtgtctgtggtattctaatccccatcccaccactctgagaagcttgtctgactaagtctgaggaaaagaatggctatgatgtggatcacattttcaatgatttttaaattgtacttaaaaaaaaggttttctagtaattgagtatataaaaagtccccngag

SEQ ID NO: 1346 - DNA, 391 bp, Homo sapien
attttatgctactgtgtgtgtgtgtgtgtgtgtgtattactgtatacatatattttcttttttaatttaaaaaaaataaaaacgaaagaaagaaaaaacttcattcgcctatgtccaatataggcatctaggtatatagttacaaattaaaggccacaaatacttcccaagaaaaagcatttaaaaaaaaaaaaaaaacaaaatcagctcctcctttcacatagcacagctagccatcacagcatgccagctaagagaaaggtgtcgtccatggagacaggaaggctgagcttttcctctttggatgatagctgagtttttattgggcagtcctagtaaaatatgtaacttctcattcattctaagcaaggcttcccccacacacacaccg

SEQ ID NO: 1347 - DNA, 433 bp, Homo sapien
  misc_feature (1)...(433): n = A,T,C or G
attgccaagagccgacactgcccaggattcagggaaaataagttatagcaaccgtggcatctgaaaggtattgccacgctggggagaggaccaaactgcagagggcacagatcccgggagagcgatggtgatgttcacagagaacatctcttttctgcctttgncacagaaatgtctagtccctccttgtgccctaagaggcaaagtgaagtcagggtcttagttacctagggccaagtgaaggggctaaaaggtagagggattcctaagcgtaaccacaaggaaaaggtttaaaccccaagaaccaagcttccaagaatcatttcttagtcacaggattgacacagggaggccggctgttggtgatcttttctaccaggttctccatttgctggctcttcggatgggcttccatgaggtcctttctcataag

SEQ ID NO: 1348 - DNA, 441 bp, Homo sapien
  misc_feature (1)...(441): n = A,T,C or G
tttaaaatgagtagtactttaatcgtttccaaagaagatggtacaagaatttagattagaaaatatgacattaaaggtgtattttcctagaaatgaaaaacagaacagaaacttaatacaattttttttgatcttcctcatacatcaaaagctgtatctgttcccaggctcgagctccaagctcccaggctgctctttatctccctctagctgagcaggacaatccctcctcctccacctctctcctctcagtcacgcgntgtgggtgctaaagggccctaagctgaccaatgggacagangtgtccttttaangccangcagcccanaggcagttgggcactccggggggcgggtcaacaggaactgggcaattngtttcccactggtcttcagcaggaaaagcagcgggaaaagttggancccttcaggcanaaaattc

SEQ ID NO: 1349 - DNA, 427 bp, Homo sapien
  misc_feature (1)...(427): n = A,T,C or G
ttgtctgcagggggcatgttcccgtttactgagcgcgagttctcttggggtggaacggggatcacccgtgcctgctcctggccaggcggggatccccagcagggctggcacagcaagggagtggggccctcagcagggtggaggctaggagcagtgccaggacggtgagaacaggtccaggtcctaggaggcagggcgtccccgagaggcctcttgcacgctgaggtctaggaccaaggtagccgttggggatgccgccctgtagccccagccccagcgtgtccaaggtcgtcctgccgctgccgtaggatccagtcccgcaccgggcggtnccgctcctccgcctttcaggcccttccacgtggggtcccagaantttctgcacctcagccacagtnaacggcagcaccgcatccgtccgcaagcg

SEQ ID NO: 1350 - DNA, 423 bp, Homo sapien
cctttaatcccagcacttgggaggcagaggcaggtggatctctgagttcgaggccagcctggtctacaaagtgagttccaggacagccagagctacacagagaaaccctgtcttggggaaaaaaaaaagaaagaaagatgaacagaacatcatagggccctaaccttgcagttaccaagtgcctcagtttatccctctgcttccagggcccctcccagtgggtgtcactcgagtttccccagtgtgttcagatcacacagctgcaggtgcagttccagggtggcttctccagtcgccacagctgcctggaaggtacaagaaagctgagaggtggggtgtccacagggttccctggattcttagcccatttctccattgcaggttcacggggtggggaagcactcagcaagattgtagatttct

SEQ ID NO: 1351 - DNA, 431 bp, Homo sapien
  misc_feature (1)...(431): n = A,T,C or G
agaagcttatcttagtagctttagaataaacttagaagtcagccaatgtgatgcctccagctttctttagtagctttagagcttactttaatagctttagaataaacttggaagtcagccaatgtgatgcctccagctttcttttttgttgttgttgttatttaggatttctttaactatttgggctcttctttggttccaaataaattttaaaatagattttttctaattctgtgaaaaatggcattggtattttgacagcgatagntntaagtttatagattgctttggaaagtatgattattttataataactgtattgattcttctaatcgatgagcatggaatattttntcatttgccctggtattggtatatggatttcnttccagccagttttggtgggttccctccatggtaagaaaaccctt

SEQ ID NO: 1352 - DNA, 105 bp, Homo sapien
agcatagcatagaccctggaaagaaaagaaaagagaaagaaaaaagagaagagaaaagaaaagaaaagaaaaagacggaaagaaagagagagaaagaaagaaaga

SEQ ID NO: 1353 - DNA, 510 bp, Homo sapien
  misc_feature (1)...(510): n = A,T,C or G
acagttcctggcagttgccagatgcctgaaactggcacgatctagtactcttgagtgatcatccttcaacgagaaatacagagctacttacatactgtacctcataccgtataaatgtaatctctctgatgccatttaatgcagtggacctcttttcagaatctaattgtcagatgcagaattaacacttggaatctggagaagcattttgtacaaattgaaagattgggttttttctttagttttccacatgtattgtctcatctctgttcttgaaacatccacaatcacataaactccagttataaccatggagttatgtgactcattaaaatttaggaaaagtgntgctgagctgtggaatcaggcgtttctcccctcagttccaacaactaatacatagactgctgattccagaataaggggacccaataaagtcatgcacgttctgtttgacagaggggactccgtnggctggttggattttacnggtactaggtnactctggcc

SEQ ID NO: 1354 - DNA, 478 bp, Homo sapien
  misc_feature (1)...(478): n = A,T,C or G
ttttttgtccaagtagaaagactaaagccttctcttttattaaagtgtaaactgggaatgcaaagtgattggctccttctgtcaatcagaaaagcagggctggtatggtttttacacacagctctaattgcttcttcttcctcttcaattagctaataacttttaaatgcttcggctgggtttctctcgcactccccaggctgcaagaggctttggactgctggatcccttaagcttgtcctcatatccttggagtagtccactgcggcagatctgggctactaagacctctaataaaccctccaacacacaaagtatcagagtcctgggctttgcagaaatgaaaggccaaagcttggcgatgtaaacctctcttgcaaacttgcaaggtgaacttgggccataagagttccggtacataggggccgtntttgccaatgccaggncctcctaaccaacaacaaacccccagggaagt

SEQ ID NO: 1355 - DNA, 574 bp, Homo sapien
  misc_feature (1)...(574): n = A,T,C or G
ttaaccctactaaagcatgatgcttttcaaggtcctggtgatcactgtcttctgtggtctgactgtggctttccccctgtcagaattagtttcaatcaataaagaactacagaattcaatcattgacctactaaactcagtctttgaccaactgggatcatacagagggacaaaagctcctctagaggattatacagatgatgatttaagcactgactctgagcagatcatggacttcacgccagccgcaaacaaacagaattctgagttctctactgatgttgagacagtctcctccggctttctggaagaattcactgagaacacagacatcacagtgaaaattccattagctgggaatccagtctcccctactttcctgagaagactccaacttttgaaattaaaccctgcgactgccattcaggatattgtccttggtaggaaattgattattaaatcttaggatngctcccaggcaaagaagaaaggaccgaggggagttnttcctgggatttggaaatgctggttnccaggcatctctnagggcttggcctttactcngtggtggggt

SEQ ID NO: 1356 - DNA, 379 bp, Homo sapien
  misc_feature (1)...(379): n = A,T,C or G
tgcaattcaaattgaacgtttatttcttaaacccacacagagtaagggcagagcttagagatgcctggcacagcatttctcatccaggatcacttcctcgttctttcttctttgctgggagcatcttagatttatatcattttctacaaagacaatatcctgaatggcagtcgcaggtttatttcaaagttggagtcttctcaggaagtaggggagactggattccccagctnaatgggattttcactgtgaatggcntgtgggtnctcagtgaattccttccagaaaangccggaggagacctggttncaaanattcaggtnggaggaactccagaattcngggtttggttttgncgggnttggcgtgnaaatcccat

SEQ ID NO: 1357 - DNA, 275 bp, Homo sapien
  misc_feature (1)...(275): n = A,T,C or G
tcactgcaacctctactccacgtcactncactccagcctgggtaacagagcgaggctctgtctcaaaaacaacaactacaacaaaaaagataggacagtagattttattagaccctgaagcatactggaggctttttcatttctgcattccctgacagtgctccatagagtaggtcttcaaaggtagatagtaatctcattaccctggactgttctcataatgtaacagatcactaacactgaatcttaaaaataaagttcttttagtaatttta

SEQ ID NO: 1358 - DNA, 278 bp, Homo sapien
aaaattactaaaagaactttatttttaagattcagtgttagtgatctgttacattatgagaacagtccagggtaatgagattactatctacctttgaagacctactctatggagcactgtcagggaatgcagaaatgaaaaagcctccagtatgcttcagggtctaataaaatctactgtcctatcttttttgttgtagttgttgtttttgagacagagcctcgctctgttacccaggctggagtgcagtgacgtgggagtagaaggttcagtgagct

SEQ ID NO: 1359 - DNA, 525 bp, Homo sapien
  misc_feature (1)...(525): n = A,T,C or G
gggatgaaagtgctgaggagaatggtaatgttcaagctctcctagaaatgttgaagaagctgcacagggtaaaccaggtgaaatgtcaactacctgaaagtattttccaagtagacgaactcttgcaccngtctcaatttttttgtagaagtatgcagaaggtacttgtggaaaatgactgtggacgcttcagaaaatgtacaatgctgcgtcatattcagtcactttccatttatctttaataatcntgtcgaaaattaaactactacatacagacacacttttaaaaataagagagtaaaaaacataaagcttatcttaggtcggcagcaatttgaggaagaaagagagtctgaattcgctttgaggcccacgtttgatctaacagtcagaaggaatcacttgattgaaggatgttttgaatccgctaagtccatttgagaatgaagacctgagggaaagagttttggggttccattagtggagaaattgggtatgaccncgggggggnccagaaagagttct

SEQ ID NO: 1360 - DNA, 467 bp, Homo sapien
  misc_feature (1)...(467): n = A,T,C or G
gaaatggaaacttctcttgattcttctgagatggcaaaagatctctcttcaaaaactgctttatcttccaccgagtcgtgtaccatgaaaggtgaagagaagtctcccaaaactaagaaggataagcgcccaccaatcctagaatgtcttgaaaagttagagaagtccaaaaagacttttcttgataaggacgcacaaagattgagtccaataccagaagaagttccaaagagtactctagagtcagaaaagcctggctctcctgaggcagctggaaacttctccaccatctaatatcattgaccacttgtgagaaactagcctcagaaaaaagaagtgggtagaatgccagagtacaagtactgttggtggccagtctgtgaaaaaagtngacttggaaaccctaaaagagggttctgagnttcccaaaggtttggaattgggtnatcttgggaccattgcccagg

SEQ ID NO: 1361 - DNA, 179 bp, Homo sapien
  misc_feature (1)...(179): n = A,T,C or G
tgttatagcacaacttatatatttcaaatggacaaaaaattagtatcatttacagtatcttaagataaatttcctttgaatgggagcttcctttccggtactttgaggtctacaagacgtatctagaaaatttactactgtggaaaatgaagactgattaaatcgaatctnggggcccc

SEQ ID NO: 1362 - DNA, 307 bp, Homo sapien
  misc_feature (1)...(307): n = A,T,C or G
tcgtncntntcagaggctgcatttgccttcttctgccacctaaatattacttcccttcaaatctgcctttgaatcatcatttttaaaaaaaaattaacatgtttttgttgtagttatcttctggggtttcaattcctcagaaacaacttttttcacaacggaaaggaaagaacactagtgttctttcagtaaagtacaaagtgtttattttacaaaagagtaaggtactcttgagagcaattcaaatcatgctgacaaggatactgatagaaaaagtgatttcttcttattataaagtacatttaaa

SEQ ID NO: 1363 - DNA, 347 bp, Homo sapien
ggaggtgtaagtgaatttttattgggaaggaagttgtcaacttaaacagcagcaaatgaagaatgcataaggaaactccctgttgtcacagaaagatgtaacctccagaatatgtgacacaggagacatttcgatctgtgaccccaagcccggatgcattaagcgctttcccattcaatctaacacttctggattcctactaaaaaggaatttgtagtaagagcatggaaaagttgcttctgaaaggaaacctccaaggaaggttcagaaaaggaatgtagaaatcaagacgttattattacaattactttaaattggaatggcactacattttccataatcttcgc

SEQ ID NO: 1364 - DNA, 545 bp, Homo sapien
  misc_feature (1)...(545): n = A,T,C or G
gatggagtggtgctaccaaaggaccccaaagagatcctggctgagaagaacttcaacactgtgccttacattgtgggaatcaacaagcaagaatgtggctggcttctgccaacaatgacgggatttctaccagctgatgtaaaattggacaagaagaaagccattgcactcctggagcaatttgcttccatgactggcataccagaggatattattccagttgctgttgagaagtacacaaaaggtagtgatgaccctgatcagatcagagagggagttctcgacgcaatgggggatgtggcatttggtgttccatcggtgattgtgtcccgtggccacagagacactggagctcccacctacatgtatgagtatcaatactacccaagcttctcatcaccccaaagacccaagaatgtagtaggagaccatgcagatgatgtctactctgtcttcggtgctccaatttttaagagagggtgctccgaagaggagttcaatctcgcnagatggtgatgaattctnggcnactttgctcggnatgg

SEQ ID NO: 1365 - DNA, 426 bp, Homo sapien
  misc_feature (1)...(426): n = A,T,C or G
gaaaatattgttgttgtcataatgagtacagcatgaaaggcttcctctacaagacactagtcaaagagttgagagctgcggtttctaatctttgtccattactcccttactccctatgagactgtggacctgtcacttggcctctctggtcttcagttttctcaccagtaaaacaaggaacttgaaccaaatgacctctagtgttccccttggtttaaatgtctataaatgttcaatgactagaatgtattgcgtttttctttattctttttgctttgagaaaagagaatgtgatttaagagtaataatttgaataccaattatccacattaaaattgtgtccnctatgtgtaaggcatagcacatttaggacacatacataagcgactaagcaccttaccaatatccncatttattccttacata

SEQ ID NO: 1366 - DNA, 362 bp, Homo sapien
  misc_feature (1)...(362): n = A,T,C or G
tcacttaaaatatttggttatgagaagactgtggcttctgcataggcatgtgctctcttgaatcacttgtccttncccnanaccagttgccttatcgtgaggacacggcctgtggagagttccatgtagtaannnacnncacccaatncccacagccagcaacaaactttggccttctagcaaccatgtgagtnagcttagaacgtggatcctttcttgcctgagncttcaaataggnctgcagccacagccaactacttgcctgtaacctcatgtgagaccgctgagccagaaagacctagctaaancactcacttctggcttcttaaaccccangaaactctggggttaagtacgtgttt

SEQ ID NO: 1367 - DNA, 357 bp, Homo sapien
  misc_feature (1)...(357): n = A,T,C or G
atgcagggatccaactctaccttgtggctccaccctcctttaggttcttggatcttctccttccagccagcagatgggaaaagaaaaggagcatcccatgtagaatgttttaataggccaggtctggacgtaatgtttccaatgggtagaatttagtcccttgtccacacctaacctcaaaggagactggaaaatgcagtctagcagtgtgcccaggaagaagtgaggagcacagatgttggtgattactangtggtttctgccataggactcatttctttctttctttntctttttctttttntttttttgagatggagtttcactcttgtcacccaggctggagtgcaatggcac

SEQ ID NO: 1368 - DNA, 455 bp, Homo sapien
  misc_feature (1)...(455): n = A,T,C or G
tgacttcatgtggcccgcccaagcagcagtacactacagtgaagctctgtctttaggtagagcccatgcctgaagnctgtgttatttaaaagcagagatgatgaacgagaagcaggaagtcagtggtaggcatgggtggcgtgctcttagaggcaggcagtgtctgaagagcatgaagcagacagggtactgagagttccaggcccctgcangctgaggctnaaaaaggctgggactgtcccctcagctaccaagcctaggactgcccaaccaccccanagcctncagagaaacttcagcaagggcagtttgtcccaggacagtgaaaagagcttgttgagaagtngggagtaggctacaaggggccgttccaggggggagcctgaatgtaatccccagcttncaagnaaggcggggaaacttggggaaagtttaaaacggaatcgtcacctaac

SEQ ID NO: 1369 - DNA, 435 bp, Homo sapien
  misc_feature (1)...(435): n = A,T,C or G
tcatctccagtaaactgtaaacaggactactgcatgtactctgttgggaatggaaggccagaactccataccgtggatggatgggtacttaggaaacaactcagcatttgtagtcagaccacttgtaacttagtggtttgttgagtaaccattttgcaggaaatacttccatttaaaaacataaaagattaatgttccaattatttgtatcaatcaggaccatttttgtggggcacttgggaactatttgtttttcaaacagacatttgcaagactgaacataatagataaatcagttacctctgaaaatgtgaaagaaaggaaaannaaaagaaccaggtggtcaaacttaaattgacatcatcttgttaaagcatatttaatttcactaagagaaatttaatatcngagacttttatatactcnattacctag

SEQ ID NO: 1370 - DNA, 291 bp, Homo sapien
  misc_feature (1)...(291): n = A,T,C or G
caacagccggcctccctgtgtcatcctgtgactaagaaatgattcttggaagcttggttctggggtttaaacctttccttgtggttacgctaggaatccctctacctttagcccctcacttggccctaggtaactaagaccctgacttcacttttgcctcttagggcacaaggagggactagacatttctgtggccaaagnagaaaagagatgttctctgtgaacatcaccatcgctctcccgggatctgtgccctctgcagtttggtcctctccccagcgtggcaatacc

SEQ ID NO: 1371 - DNA, 360 bp, Homo sapien
  misc_feature (1)...(360): n = A,T,C or G
nganactcaagatggctgcgttcttgctgaggtgactttagcctgggntaggagtccacgcccgcgaccgttgggggaacctgaattagtccctgagggggtgacagcgacatgtcagccgtcactgcctccgagcccacctgaatgctcagctttgtatcagaaatgctgctcctttgggaaccacagctaaggaggagatggagcggttctggaagaagaacacgaagttcaaaccgtcctctgtctccccatttgactatctacaaatggtctcttcctatggcactgtccgtttgccaccgaggctcttggaatagccttgagttggaggggtctctctttttggcctgtcggcac

SEQ ID NO: 1372 - DNA, 425 bp, Homo sapien
  misc_feature (1)...(425): n = A,T,C or G
atgaagctgcggacggatgcggtgctgccgttgactgtggctgaggtgcagaaacttctggnaccccacgtggagggcctgaagnggaggagcggcaccnccggtggggactgggatcctacggcagcggcaggacgacctggacacgctggggctggggctacagggcggcatccccaacggctacctggtcctagacctcagcgtgcaagaggccctctcggggacgccctgcctcctaggacctggacctgttctcaccgtcctggcactgctcctagcctccaccctggcctgagggccccactcccttgctggccccagccctgctggaatancccgcctggccaggagcaggcacgggtnatccccgttccaccccaagagaactcgcgctcagtaaacgggaacatgccccctgcaga

SEQ ID NO: 1373 - DNA, 416 bp, Homo sapien
  misc_feature (1)...(416): n = A,T,C or G
tgggcataaagttttatagttttgtattgagaaaaataatttaattaattagatgtatgccaccctataaggctattttccaaaatgactgactccaggttcatctgaagagctcagagtccttccactcaatgctgccaaagactgggacttcctgtctaagactttgctgttttagcctcactaaagtttcctcaagatgaaaagtccagtagactgctgcataaaaatttatttttctacgtgtgaagacactgaggatgctctactggttgtttccacttttatttcactgtgtgagttattgttgtagcagtagactccaacccctcangcttctggaacccctggtttgggtttgatatggtttctatggctaaaaatattggtgactattaaaaccngaaatgaaaaaa

SEQ ID NO: 1374 - DNA, 246 bp, Homo sapien
  misc_feature (1)...(246): n = A,T,C or G
taaatatgggggtctcaggtaaccaggctggcctcaaactgtagttgaggctgaccttgaactcctgatcttcctgctgcccctccagggacttaaagcacagagaagcaagttcctactcctgcggagaggtcaaagcttttgatccttttgagacagggtctggccaaantgggcctggcattcctgaatcctctggcccaagccttccccagttgccattaccaacaacaacccaaagaacct

SEQ ID NO: 1375 - DNA, 444 bp, Homo sapien
  misc_feature (1)...(444): n = A,T,C or G
caacttgaaaaaaattttgaggatctaatttagaaaaatttgcccaattttgttagacaggtcaacatgcagataaaagaaattcagagaactcctgtgatatactatataagaagaccatccccaagacacatagtcattatactatccagggtcaatgccaaagnaaaaaattgaagtcaaactattgctctttgctgatggtataattctatccatagaaaaccctaacaactccacccaaagactgctggaactgaaaaacaaattcagtaaagtttcagaatataaaatttgatatatnacaattggtaacatttctatacatcagtagtgttctagctgagaacaaaatcaagaatacaatctcaagaaaataaaatnccctagggaattcataccaacaaaggagatganagattttctncatggaggaaccccant

SEQ ID NO: 1376 - DNA, 519 bp, Homo sapien
  misc_feature (1)...(519): n = A,T,C or G
tttgagttcaagctccatttatttacagccactgaacacagccactgtcctcagccagtgaatacccaaaaacagcaaatcaagagtcaaacccaacaggtccaggagcacgcagtagggatacacacagtagggccggatcctcactcagtgcacgcagacaaagcttctagtcaaatgacctgggccaaccaagctcaagtcactggaaacgctcctcgggaggaaggagcttgtgcgtgcttccgtctagtcgttgggggatgtggttcatttcctgggtggggaaataaaaagacaatttaatacaattctgtgtaagcggacgaacccgtgcggcgcctgcaacacagaagcagccagtgccccgccgatggcnccgggcctagggctttcctacaactccagcccatcccgcgatcgntggccggcccggggtcagcctcctcccatgggagtcccgggagaggtttctgaatcccacgatcgccttcgggaggctccacggcgcccccgagc

SEQ ID NO: 1377 - DNA, 274 bp, Homo sapien
gggttttctgcagttttattatgaaaggcaacaaggggtgggagtggttgtccctggaccgactaggttgggttgacctgcactcacacagcactgttactgatgctgagctctgtgaagatcacagaagaccaacaacctccagattggtaatgctgactgcaataacatctactcatatagccaatgtccggcgctgtcctcccagcacagaagctcggcctcacggaaccaaagagcgatttctctgtgagcactttccaccgagtcgctg

SEQ ID NO: 1378 - DNA, 379 bp, Homo sapien
tttttttaaagacagggtctcactctgtcacccaggctggggtgtagtggcgcaatcatagctcaatgcagcctagaactcctgggctgaagcaatcctcccacctcggcctcccgagtaactgagactacaagtgcacatcaccacaccgggctaattttttatttttctgtagagatgcagtttttgcgtgttgtccaggctgatctcagattcctagactcaaaccttcttcctgtgatggcctcccaaagtgctgggattacaggtgtgagccatcacacacagcccattgattttagataaaaccaatacgacatttattcccaaaagcccattcctaagcttcccaatttccattagtataaaacttgccttc

SEQ ID NO: 1379 - DNA, 516 bp, Homo sapien
  misc_feature (1)...(516): n = A,T,C or G
ttatgtattatcatgtagatataggcttactaggagggtgaatacgtaggcttgaattaatgctactgcaaattctagaattgtgagtagaagtaaaataataaatgtaatggtagctgttggtgggctaatatttattaatactagagtagctcctccgattaggtgtattaataagtgtcctgcagtaatgttagctgtaagccggactgctaatgccattggttgaataaataggctaattgtttcaataataataagtattggaattagtgaaattggagttccttgtggaaggaagtgggcaagtgagctttttagtttgtgtcggaagcctgtaattacggctccagctcatagtggaatggctatacttagatttatggatagttgggtagtaggtgtaaatgtatgtggtaaaaggcctaggagatttgttgatccnataaatatgattagggaaacaattattaggggtcatggtcgtccctttggtgtgtggattagcattatttg

SEQ ID NO: 1380 - DNA, 520 bp, Homo sapien
cattgcattgtttattccataaccagttactttggggatggatacccaaggcatatagactgaaagcaaaaaaaaaaaaaaaatcataatttatagtagtggttctcaaccttcctatgctgtgaccctttaatagtttcttctgttctggtgacccccccaacaattataaaattattctgttgctacttcataactgtagtattgctactgttatgaattataatgtaaatatctgatatgtgacccctttgtggggacacagcccacaagttgagaaccactggtttacaataacatatccagttacactcctagacagactcacaggaagaccaagacatgaggcatgtgggactgtgatagagctgacagtactaagggtcaaggcagtcacacactgagcaaaattcaggggcttcatcaaacccctttatctcctgggtggactctatctagtatgtgtcacatgattttgtgaatttcaccatcgggcagctatttctgtgtgtggacatac

SEQ ID NO: 1381 - DNA, 517 bp, Homo sapien
tttttttttgggagaacaaagggtttattggactcaacagggggacattcaggatacatgtgggaacattgcaggaccccagatacttatgtgtggatggtgatagcataataccttggaattctgcctcttcactgtgctggctgtgtgcctccagggtcatgagcagcaatccacaacaaaatgacattctaggaagtacagacttgaaagccctagagaggattagagcacctacctacccagcaggggctataaaggcaaaacatggtatttcacacactactcccaccttggagcttctataactcataattcatcactagagggctccaggaagaattgttgcacatgaggataaaaggacaagggtggaggtcattgggaggaccatcagagcaaggtctgcaggaggactgagctcaggctgaacagaagcacccctgccatggtccaggtgctgcctccattgggaactgctacattgcagaggtctttcctggcaacaggaagtctt

SEQ ID NO: 1382 - DNA, 488 bp, Homo sapien
atttctaggacaatgggcataaagctatggttagatccacaaatttcagagcattggccatagaataaccctggtcggtttgatgttactgttgcttgatttagtcggcctgggatggcatcagttttaagtcctagggaggggactgctcatgagtggaggacgtcttcagatgaaattaatatacggattggaagttctattggcagaacgactcggttatcaacttctagcagtcgtagttcaccaggttttaggtcgtttgttgggattatatatgaatcaaagcataggtcttcatagtcagtatattcgtagcttcagtatcattggtgccctatggttttaacggttaatacggggttgttgatttcgtctattatatatagaatgcgtagagaggggagagcaattatggataaggattacagctgggtagaatagttccaatgggttcaacttcctggtgcatccaatggtgcctggta

SEQ ID NO: 1383 - DNA, 485 bp, Homo sapien
  misc_feature (1)...(485): n = A,T,C or G
gaccacagcgagcccgatttcattggcagttgcttatacaaggattcattgaaaaccagggggatgaggctacacatgctcctcaacttggaacagggagtggggtgttagagaagctggggaagagaggaagttaaggatctgaggcaggaggggatgaccatgaaggggttcccaggatgcctggcacttccttcagcccatgctgactgtgctggggtctgtggtgcgcactgngggaaggtggtcatcgctggtgcccatgcaccccgtgggcacttgccggctcttctgtcacagttcatcttcatttgacctgcctatgtttcttaccgcccccacagcggaaccttttgctgagaatgatgaggaggcccacgacgaaggccaggcccgcgaagattaggcctcctttgcggacggttttcataagtcgtactcgaaagggatttctctgtncccctgggcactgcaancccagggta

SEQ ID NO: 1384 - DNA, 501 bp, Homo sapien
  misc_feature (1)...(501): n = A,T,C or G
tttttcccatttttcagaggctataaatttatcagtcaatacaattatttaacatttgaaaattatttaattctataatgtcttagtccacttatttcctaatattaaagatgacattagctctgctcaattcttactttagcaggaagatataacagaacaaagcagagcacattaagctatgtttaagtgcagaagtagaaagaaggggtatagtacttccaaatccatttaacatgagatccatttttgatatgtaagatatttgtattcaaaaggcatctcatgagctaatgatataatagaaagagcctgttcagtctcgaactcctggtctcaaagctcaacgttttcagaggcaagcttcagagactataccagcaacatatcaagggntttttaaatttatttttaagttaattttttattttttggatttattttttgagacaggggtctccctaataatagccctggctggtcctgggaaaggcaggctgg

SEQ ID NO: 1385 - DNA, 524 bp, Homo sapien
  misc_feature (1)...(524): n = A,T,C or G
tggagaacttttgaaaaatatttaaagttcagtattcagttactatgtgctatgtataatccttctagaactaaactttgcctggggcatttgctcccaacactgtccatttaattacaggcaactgtgtgtgtttaaacccaggatattaggctcagccagggatttgagattctatccctcagagattatgctgagaacatgagtttccacaaggctctagatgaggctaatgcaacatggaatactcaacagttcaaaacaactggcttaaaattttaagacaacaataatcagtcatccaaattaacagcacaacccacttttatttccttctataaccacatagtctgtgggattctaagcgtgttataaatgacaaacatcttcaattttgctgatggactgggcataaagcaggaatgcatatgggcaatttcnttatatcacaccatactgatatttaggtttgggggnagtttgcatttaaaatggccaggcacttanttaaagatggtggaaaa

SEQ ID NO: 1386 - DNA, 506 bp, Homo sapien
  misc_feature (1)...(506): n = A,T,C or G
tgaccacagcgagcccgatttcattggcagttgcttatacaaggattcattgaaaaccagggggatgaggctacacatgctcctcaacttggaacagggagtggggtgttagagaagctggggaagagaggaagttaaggatctgaggcaggaggggatgaccatgaaggggttcccaggatgcctggcacttccttcagcccatgctgactgtgctggggtctgtggtgcgcactgngggaaggtggtcatcgctggtgcccatgcacccngtgggcacttgccggctcttctgtcacagttcatcttcattgacctgcctatgtttcttaccgcccccacagcggaaccttttgctgagaatgatgaggaggcccacgacgaaggccaggcccgcgaagaatcaggcctcctttgcggacggtttcataagtcgtactcgaaaggattctcntggtccccctttggcanttgcaancccaggtancacctgttccaatgggtaa

SEQ ID NO: 1387 - DNA, 493 bp, Homo sapien
  misc_feature (1)...(493): n = A,T,C or G
gattggcttgaaaccaattttagggggttcgattccttcctttcttattttacttttacataggttggttcctcgaatgtgtgatatggtggagggcagccatgaagtcattctaaatttgttgaagcatacgatactgatattacttctcgttttgaagcaaaggcctctcaaattataaagatcatgatgagaacagctgttagtgaaataaatgatcctatagaagagacagtgtttcatgtggtgtaagcatctgggtagtctgagtagcgtcgtggtattcctgaaaggcccaggaaatgttgagggaagaatgttatgtttactcctacgaatatgatggcgaagtgggcttttgctcatgtgtcatctagggtgaagcctgaaaataatgggaatcagtgaacaaatcctgctatgatagcaaacactgctcccattgntaagaacatagtggaaatgggctactacatagtatgtatccgtgaag

SEQ ID NO: 1388 - DNA, 460 bp, Homo sapien
  misc_feature (1)...(460): n = A,T,C or G
tttttttttttttttttttctttttttttttttttttttttttgcgtaacttgacaagctgattctaaaatctatacggaaaatcaatgtacacagaagagtcaaaacaattttgaaaaaaaagaacaacattggagtactcacaccctaagatttacggtcttactacaaagctacaataatagagaaagccaacattgcactgtagttcctatagaggggtgaagggagggagtgggacatggtgtgaggatagtcatatagatcaactgaacagaattcagagtctagaaataacctttatatttaggtcaattgattttcaacaagagtacaaagaaaatacaatggaataatagtcttttcaacaaatggtggtgggacaactgggtatctgcctgcaaaaggaaggtggacccctacatcacaccntatgtaaaanggtaactccaaatggatc

SEQ ID NO: 1389 - DNA, 482 bp, Homo sapien
  misc_feature (1)...(482): n = A,T,C or G
gcctcattcattaccccaacaataataggattcccaatcgttgtagccatcattatatttccttcaatcctattcccatcctcaaaacgcctaatcaacaaccgtctccattctttccaacactgactagttaaacttattatcaaacaaataatgctaatccacacaccaaaaggacgaacatgaaccctaataattgtttccctaatcatatttattggatcaacaaatctcctaggccttttaccacatacatttacacctactacccaactatccataaatctaagtatagccattccactatgagctggagccgtaattacaggcttccgacacaaactaaaaagctcattgcccattccttccacaaggaactccaatttcactaattccaatacttattattantggaaacaattagcctatttattccacccatgggcattagcaggtccgggcttacaggctaacattactgg

SEQ ID NO: 1390 - DNA, 327 bp, Homo sapien
  misc_feature (1)...(327): n = A,T,C or G
gaggtgggacttattagatctaaacaatgtctattttcaagaaatgggtatgggaggggtacaaggaaagagtctaatgaaggtgcagcaatgggcacacacctggtcagaacattggcagacacacaggttcaaggagtggccaaagcattgtgcacctctatttttttaaatcagtgaagctagttctgctaacactgacgtctatcttgccaattttcagggcttccggtggnccgttgctggttccccctttatcntgagtaccatctggntccttggncccttagcccgggggccccaggtgtttgacctgaccacaagata

SEQ ID NO: 1391 - DNA, 487 bp, Homo sapien
  misc_feature (1)...(487): n = A,T,C or G
caacctttatataaaacaaatattccagactcagaattaagcactaagttttcaatattataaagctgtttataacaggagttttaagtagtggtaacatttaacccatgtaaaaatggcaacagaattcaaatcatgacttggatcctcaatgattcaagtaccatggtttgactcaataagggtttggtcagttttaagctgaattcctttggacatagtgtccataagtcctcattaccgctacccatcaattcacgacaggatagctggccgcggtggnaagtccacagtggttgtcccggtctttggctattttgatggtagccttccatacccccattcacttcccccagctggttcttggacaagcccatatttaatcctaattggaatcnggttccttcataggcnatagnccaccaacaggnacccccatgggtcgaaggttccttgcnggctacaagttnggggtcnataggtagaa

SEQ ID NO: 1392 - DNA, 233 bp, Homo sapien
  misc_feature (1)...(233): n = A,T,C or G
ggcacgagaaaagggctactgtgctgcactttatgaaggcttgcggtgctntccacatgaacgacacatacatgtttgctgtgaaacanacttcattgcacatcttttgggtcgtgctgaacccaganttccgcaggagggtatgagcgaagagaaaggcatgcaaagacaatagatatagctcaagaagaagttctgacctgcttgggaattcatcnttatgaaaagacttc

SEQ ID NO: 1393 - DNA, 511 bp, Homo sapien
  misc_feature (1)...(511): n = A,T,C or G
aaatagtaaagctaaaacattttgagaaatttcaggatacagcagaagcattagcagcattcacagctctgatggagggtaaaatcaataagcagctgaaaaaagttctgaagaaaatagtaaaagaagcccatgaaccgctggcagtagctgatgctaaactaggaggggtcataaaggaaaagctgaatctcagttgtatccatagtcctgttgttaatgaacttatgagnaggaattccgttcacaaatggatggattaatccctggggtagaaccaccgtgaaatggcagctatgtgtcttggattggctcacagcctgtctcgatatagattgaagtttagcgctgataaagtagacacaatgattgttcaggccaatttccttggttaagatgacttgggataaagaactaaaccactacattatgcgatgtagagaatggtatggctggcatttccctggaattagggaaaattatttccagataattttaccatactgccagn

SEQ ID NO: 1394 - DNA, 218 bp, Homo sapien
gtcagttcgcctttcagaggaataaccgcccgttgcaaatagctgctgagattcttccattctgcggtttggccactactacgactccatgttgaattgttgcgcaatctccatgggcctaaattaacgccactgtttaaattcagaaaatagctgtcgccagaatcactgtctgcgctgctatgaatactgttagccccgctaaacgaatatcccag

SEQ ID NO: 1395 - DNA, 188 bp, Homo sapien
  misc_feature (1)...(188): n = A,T,C or G
agcggggctaacagtattcatagcagcnagacagtgattctggcgacagtattttctgaatttaaacagtggcgttaatttaggcccatggagattgcgcaacaattcaacatggagtcgtagtagtggccaaaccgcagaatggaagaatctcagcagctatttgcaacgggcggttattcctctga

SEQ ID NO: 1396 - DNA, 402 bp, Homo sapien
  misc_feature (1)...(402): n = A,T,C or G
cctgtctcctcttacaacgaatgggaccctttagaggaagtgatagtgggcagactgaaaatgcctgtgtgccaccattcacagtggaggtgaaggccaatacatatgaaaagtactggccattttaccaaaaaaatggaggtctttattttcccaaagatcatctgaagaaggctgttgctgaggtcngaagagatgtgcaatattttatcaatggaaggagtgaccngtgatgcnggcctgaccccatccgacttggtcactcaagtataagactccctgattttgagtctacaggtttgtacagcncaatgcctcgagaccatcctgatggttgtggggaaaccgagattatngaagcacccctggcattgcgctccacgnttcttttgagttaccgag

SEQ ID NO: 1397 - DNA, 444 bp, Homo sapien
  misc_feature (1)...(444): n = A,T,C or G
caagatcagcctgagcaacatagtaagaccctgtctctccaaaaaaaaaaaaaaaaaaaaaaaaattagctgggcatagtggtgtgcagctataatcccagctactcaggaggctaagccaggaggattgctgagtccaggagtttgaggttgcagtgagctatgataccaccacagtactctagcctgggcgacagagcaagaccctgtctcagataaataaaaaccattcattctgttctaggcactgtgttaaagcaatactttacattcattgccttaatttaatcctcccaacttcccaataaaacctccatcttgtacattgaggaaacagagactggaagagtttgctctagagctagctagtaagtggtgggacctggcatccctccccagaaatgagtgaatctactngcctccatgaaccttttccttccctta

SEQ ID NO: 1398 - DNA, 318 bp, Homo sapien
  misc_feature (1)...(318): n = A,T,C or G
gattcactcatttctggggagggatgcaggtcccaccacttactagctagctctagagcaaactcttcagtctctgtttcctcatgtacaagatggaggttttattgggaagttgggaggattaaattaaggcaatgaatgtaaagtattgctttaacacagtgcctagaacagaatgaatggtttttatttatctgagacagggtcttgctctgtcgcccaggctagagtactgtggtggtatcatagctcactgcaacctcaaactcctggactcagcaatcctcctggcttagccncctggattacctgggatta

SEQ ID NO: 1399 - DNA, 498 bp, Homo sapien
  misc_feature (1)...(498): n = A,T,C or G
ggcacgaggaactactgatatactcaatgtactcggatgaaatctccagagaattatactgagtgaaaagtgccaatcccaaaaaattacataccgtttgatcccattcatataatattcttgaagtgacaaaattatagaaaaggaaaacagataagtagttggcaggggtaagcaggcagggtaatggggacaacagagggaagtggctgtaaatgcgtgtgtctataaaaggccaacatgagggatcccgtagtgaaggaattgtcctgtatcttcattgtatcgctgtcccataccctggtggtgatactgtattttaagtactgccaagatgctacccatttgagggaaanccaagtaaaaggtaccatggggattctctcctaatggtcttaataanccccaattaatcctccaaaattccaaaaaattttaaattaaaaagggtttagccangggggttgggaagncaatgttggaaatggtcangctttc

SEQ ID NO: 1400 - DNA, 299 bp, Homo sapien
  misc_feature (1)...(299): n = A,T,C or G
aatcattgagataataaactataacttaagtaaaaatgtacactgtcctgtttattaagtttgtgtaaatgtgttatgtgttgttatgtagctttagaataccttcactgacttttcagcaattacctttaacagaatagtttttatttatttttacatttattatacatttagaaagaagatgagagcaatagttttttattagtataaggcaaacttaactgattaaaccttcttaggaaaagcaatagttcctgaaagatatgcaagnaaaaaaatgacaaaagtgaaaganctct

SEQ ID NO: 1401 - DNA, 446 bp, Homo sapien
  misc_feature (1)...(446): n = A,T,C or G
agtgctccagatggctaggcacatgtttcaattatgctaagttacaatttttttctcttgttttcttattctgttacatatagaatgttacatttatagctactaattgtatcttgattggtgcaggtaaaaatattcttatttgtaaatgtaaatgatttttagataaggaagaacacacatgaattaaaagacattgcacaatacagtcagaactttaaaaagatgttcagcatatgatgaatcctaaaagttaaaaaataaaaaattctatttttcattaatcatttttattacaaatggacattactatacccctcatcatttcactactaagaagacttcagaaataagaaacacttgaggtctctatactaatagtaattctacagttaatagaagtataatgtaaaaactaacaaatctcnaaccatttggtntgaatt

SEQ ID NO: 1402 - DNA, 502 bp, Homo sapien
  misc_feature (1)...(502): n = A,T,C or G
tcctgcgcacgtnggctcgggggcgccgtggagctcccgaagcgatcgtgggattcagaaacctctcccgggactcccatgggaggaggctgaacccnggccggcacgcgatcgcgggatgggctggagttgtaggaaggccctaggccggggccgccatcggggccactggctgcttctgtgttgcaggcgccgcacgggttcgtccgcttacacagaattgtattaaattgtctttttatttccccacccaggaaatgaaccacatcccccaacgactagacggaagcacgcacaagctccttcctcccgaggagcgtttccagttgactttgagctttgggtttggcccaaggttcattttgactaagaagcttttgtctgcgttgcactgaagtgaggaatccnggccctactgtgtggtaatcccnactgcngtgctcctggaactgtttgggtttgactctngaatttgctgttttttgggtattcaattggctta

SEQ ID NO: 1403 - DNA, 284 bp, Homo sapien
  misc_feature (1)...(284): n = A,T,C or G
tcaanccccccntnaatgcattagcttctcttcttgcgctgccttctttttagcgatatctaaatagaaactacatgacaagtagttatcatagcaaaagctagctttgtaatgcacatgacaaaaacatagtataaatgtgacccgtgaagcagtgaaaactttgggtgctgtcatttactgtggtaccatcttgtctcttactgtgtactgtgacctctagtggtttctgtttcttccatgggatcatactcttctgaatagttgttnacgaaaactgactt

SEQ ID NO: 1404 - DNA, 315 bp, Homo sapien
  misc_feature (1)...(315): n = A,T,C or G
aagaatgtaattcatggcagcgactcggtggaaagtgctcacagagaaatcgctctttggttccgtgagccgagcttctgtgctgggaggacagcgccggacattggctatatgagtagatgttattgcagtcagcattaccaatctggaggttgttggtcttctgtgatcttcacagagctcagcatcagtaacagtgctgtgtgagtgcaggtcaacccaacctagtcggtccagggacaaccactcccaccccttgttgcctttcataataaaactgcagaaaaccctttgtgcgctggtgaantttcaaga

SEQ ID NO: 1405 - DNA, 405 bp, Homo sapien
agaggccatgctctctatagaaggcaagttttatactaatggaaattgggaagcttaggaatgggcttttgggaataaatgtcgtattggttttatctaaaatcaatgggctgtgtgtgatggctcacacctgtaatcccagcactttgggaggccatcacaggaagaaggtttgagtctaggaatctgagatcagcctggacaacacgcaaaaactgcatctctacagaaaaataaaaaattagcccggtgtggtgatgtgcacttgtagtctcagttactcgggaggccgagtttgggaggattgcttcagcccaggagttctaggctgcattgagctatgattgcgccactacaccccagcctgggtgacagagtgagaccctgtctttaaaaaagaagggg

SEQ ID NO: 1406 - DNA, 545 bp, Homo sapien
  misc_feature (1)...(545): n = A,T,C or G
tctgagaggaacccttctctgaggatggacacttctcacactacaaagtcctgtttgctgattcttcttgtggccctactgtgtgcagaaanagctcagggactggagtgttaccagtgctatggagtcccatttgagacttcttgcccatcaattacctgcccctaccctgatggagtctgtgttactcanggaggcaagcagttattgtggattctcaaacaaggaaagtaaagaacaatctttgcttacccatctgccctcctaatattgaaagtatggaaatcctgggtnctaaggtcaacgtgaagacttcccngttgccaggaangacctctgcaatngtagcaagttcccaantgggaggcaaggaccttggaaccatggcaggggtgcttctggttcagcctgaagctcagtcctcctgcagacccttgctctggntgggtcctcccnaattgagctccaaccctttgtcctttttaatcctccatggtggcaacaaattctttccctggaggcccctctaagttgaatgaaattat

SEQ ID NO: 1407 - DNA, 543 bp, Homo sapien
  misc_feature (1)...(543): n = A,T,C or G
ggaaatcagcaagagaaagaaaggtctgtggatttaaactttcttccatcggttgatcctgaaacagttcttcagacagggcatgaattgttgtccgaattacagcagcgtcgatttaatggctcagacggaggggtttcatggtctcctatggatgatgaacttcttgcacagccacaggttatgaaattattagattcactccgagagcaatatacccgctaccaggaaagtttgtaggcaacgtagcaagcgcacacagttagaagagattcaacagaaggtaatgcaggtggttgaactggctagaagggcctggatcagaacaacttaagagccccagtggggcatttggagactccattagggcctcccaggccttacagcagaaacacgaagagatttgagagccagcacagtgaatggtttgcagtgtaatgttggacctttatccagcnatttgcagcactccttgnatgcctngcgaattaaggaanatctttgttggacctaaagttcncttgcggcaacactttggggntg

SEQ ID NO: 1408 - DNA, 548 bp, Homo sapien
  misc_feature (1)...(548): n = A,T,C or G
aacttggtctacaagacgccacatcccctattatagaagagctaataaatttccatgatcacacactaataattgttttcctaattagctccttagtcctctatatcatctcgctaatattaacaacaaaactaacacatacaagcacaatagatgcacaagaagttgaaaccatttgaactattctaccagctgtaatccttatcataattgctctcccctctctacgcattctatatataatagacgaaatcaacaaccccgtattaaccgttaaaaccatagggcaccaatgatactgaagctacgaatatactgactatgaagaccttatgctttggattcatatatantcccaacnaacgacctaaaanctgggtgaactacgactggctagaagttggataaccgagtcgttctggccaataggaactttccaatccggtatattnatttcatctggaggacggtcctccactcatggaggcagtcccctccctagggactttaaaactggatggncatcccaggccgggttaaattcaggc

SEQ ID NO: 1409 - DNA, 537 bp, Homo sapien
  misc_feature (1)...(537): n = A,T,C or G
agtcacttgttcccatccaagccccaggcaagggcaggcactccctggctcctgcgtacctcagacacctccagcagctcctaccatggacaggtggtacctgggtggcagtgcaaggggacagagaatcccttcgagtacgactatgaaaccgtccgcaaaggaggcctgatcttcgcgggcctggccttcgtcgtgggcctcctcatcattctcagcaaaaggttccgctgtgggggcggtaagaaacataggcaggtcaatgaagatgaactgtgacagaagagccggcagtgcccacgggtgcatgggcaccaagcgatgaccaccttccccagctgcgcaccacagaccccagcacagtcagcatgggctgaaggaagtgccagggcatcctgggaaccccttcatggtcatccccttctgcttcagatccttaactttcctctctttccccagctttttcttaacaccccanttccttgtttcaagtttnaggaagatgttttagcttaattccccttggtttttcaatga

SEQ ID NO: 1410 - DNA, 447 bp, Homo sapien
tgctttctctcaaattattgctagaagtgaatcaattctaaaatcttagctatttttatcttaacagaggtcccttctcaatttctacagaaatatctttgattttttaaaaaatatcacaaaatggtaaggttgagttttataaaataacatctgctttgtcctaatttttagtttttttttctcttctcacatcttaaactggcaatctattaaatgagcaatagctttggggcttgcctgatttatttacatttataatgatatgaaactattgatttgaaaatttttcttgccatatgtgtaagaattatgctttgacattttggattggacactgtggtaatggtgccagccttttagtgtagattgctggtaattggagtggtggtttggtcacctaaagtcccggtggtgctggtgctggccagcacgggcttggtcccc

SEQ ID NO: 1411 - DNA, 316 bp, Homo sapien
aagaatgtaattcatggcagcgactcggtggaaagtgctcacagagaaatcgctctttggttccgtgagccgagcttctgtgctgggaggacagcgccggacattggctatatgagtagatgttattgcagtcagcattaccaatctggaggttgttggtcttctgtgatcttcacagagctcagcatcagtaacagtgctgtgtgagtgcaggtcaacccaacctagtcggtccaagggacaaccactcccaccccttgttgcctttcataataaaactgcagaaaaccctttgtgcgctggtgaagtttcaaga

SEQ ID NO: 1412 - DNA, 554 bp, Homo sapien
  misc_feature (1)...(554): n = A,T,C or G
agtnacttgttcccatccaagccccaggcaagggcaggcactccctggctcctgcgtacctcagacacctccagcagctcctaccatggacaggtggtacctgggtggcagtgcaaggggacagagaatcccttcgagtacgactatgaaaccgtccgcaaaggaggcctgatcttcgcgggcctggcttcgtcgtgggcctcctcatcattctcagcaaaaggttccgctgtgggggcggtaagaaacataggcaggtcaatgaagatgaactgtgacagaagagccggcagtgcccacgggtgcatgggcaccaagcgatgaccaccttccccagctgcgcaccacagaccccagcacagtcagcatgggctgaaggaagtgccaggcatcctgggaancccttcatggtcatcccctccttgccttagatcctttaactttcctctctttcccagcttctcttaacaacccanttccctgttccaagtttgaggagcatgtttangcttcatccccctggttttcaatggaatccttggtataagcaatgg

SEQ ID NO: 1413 - DNA, 505 bp, Homo sapien
  misc_feature (1)...(505): n = A,T,C or G
ggtactgcactaagtattttaattcgagcagaattaggtcaaccaggtgcacttttaggagatgaccaaatttacaatgttatcgtaactgcccatgcttttgttataattttcttcatagtaataccaataataattggaggctttggaaactgacttgtcccactaataatcggagccccagatatagcattcccacgaataaataatataagtttttgactcctaccaccatcatttctccttctcctagcatcatcaatagtagaagcaggagcaggaacaggatgaacagtctacccacctctagccggaaatctagcccatgcaggagcatcagttagacctaacaattttctcccttcatttagctgggagtggtcatcctattttaggtgcaattaatttntattancactattatcaacatgaaancccccagccataacacaggtattcaaactccactaattggtctgatccggaccttagttacnggccggga

SEQ ID NO: 1414 - DNA, 539 bp, Homo sapien
  misc_feature (1)...(539): n = A,T,C or G
tgtagatataggcttactaggagggtgaatacgtaggcttgaattaatgctactgcaaattctagaattgtgagtagaagtaaaataataaatgtaatggtagctgttggtgggctaatatttattaatactagagtagctcctccgattaggtgtattaataagtgtcctgcagtaatgttagctgtaagccnggactgctaatgccattggttgaataaataggctaattgtttcaataataataagtattggaattagtgaaattggagttccttgtggaaggaagtgggcaagtgagctttttagtttgtgtcggaagcctgtaattacgggctccagctcatagtngaatgggctatacctagatttatgggatagttgggtagtaggtgtaaatggtatgtggtaaaaggccnagggagatttgttgatcccaataaaatatgatttaggggaaccaattattaggggtccaagttccgtcccctttnggggttgtgggattagncattanttggtttgataatangtttaac

SEQ ID NO: 1415 - DNA, 227 bp, Homo sapien
  misc_feature (1)...(227): n = A,T,C or G
tctcaaaagttacaaggaagttcagttaaagattaacagttaaagatcaaggctgaataacactggggacaggggccaaacagaatatctgtggtcagtcaaacacctgggccccggctccagggccaagaacagatggttctcagataaagccggacccaggcacagacacagnagcccctgnatttgggcaaggttngcgtcgtngttttagcaganctagcttn

SEQ ID NO: 1416 - DNA, 558 bp, Homo sapien
  misc_feature (1)...(558): n = A,T,C or G
gtgacatgaccaatgaggaattcaggcaggtggtgaatggctaccgcaccagaagcacaagaaggggaggctttttcaggaaccgctgatgcttaagatccccaagtctgtggactggagagaaaagggttgtgtgactcctgtgaagaaccagggccagtgcgggtcttgttgggcgtttagcgcatcgggttgcctagaaggacagatgttccttaagaccggcaaactgatctcactgagtgaacagaaccttgtggactgttctcacgctcaaggcaatcagggctgtaacggaggcctgatggatttttgctttccagtacatttaaggaaaatggaggtctgggactccggaggagtcttacccctatgaagcgaaggaccggatcttgtaaaatacagagccgagttcgctgtggctaatgacacanggttcgttggatatccctcagcaagagaaaaccctcatgaaggctgttggcgactngtgggggcctattccggttgntaatggacgcaanccatccgtctctccagttctaatagttcaggcan

SEQ ID NO: 1417 - DNA, 430 bp, Homo sapien
ttttttttttttaagatcctcatcaataaatggagacgtataggaaaagtcagactacgtctacaaaatgtcagtatcatgctgcggcttcaaatccgaagtgatgttttgatgtgaagtgaaattttagttgtcgtagtaggcaaacaataaggaatgttgatccaataattacatggagtccatggaatccagtagccatgaagaatgtagaaccatagataccatctgaaatggagaatgatgtttcaaagtattctgaagcttggaggatggtgaagtaaagtcctagtataatggtaattagtagggcttgatttatgtggtttcgtttaccttctataaggctatgatgagctcatgtaattgaaacacctgatgctagaagtactgaagtattaagtagtgggacttctagagggttaagtgg

SEQ ID NO: 1418 - DNA, 294 bp, Homo sapien
gatctggtcacagttatagcaggggggtcatccagtagccaatgtcagcagcaaacaatgccaatgccaatgctagagaaatgagaggtacaaaccattcatctagcatttgctggcatcagaaaaaatatcctcactagtcaagttctgcagcataattttagcttcaaagctatgcactttgttttatcctgcctgcccattttttaagccttttctctagtgttccaaatgactctgtgaactactcaatatcctttcaacaaacttcttttccacttgaatcatccagag

SEQ ID NO: 1419 - DNA, 442 bp, Homo sapien
tactcgatatattgtagtttaataaaacatagtttatacagttcattgaaaaagtattttaatacaaacaccacttatacacaaaaccaaatgttgatattcttgtttttaaaaattcttgatttctctaaaacactaagatgctatctcaatagagattgcttcacattttccagtttcttgatctgtgcatgtcacatgtaaagatccatcccttttcatagtaagaacagctaatatatcacgtaatccattttcttttttatctaaatcctggagtacaacctgtgcaaacttggtttcctctttgggcagagttcttcccatcagactcatagagttcaaggcacactgaagatatgcttccaggggcttgcaatgtgtgttggtcttcgagctggcaaaggagtccctgatgggaaacagcactggggaatccact

SEQ ID NO: 1420 - DNA, 328 bp, Homo sapien
  misc_feature (1)...(328): n = A,T,C or G
tttttttttttgtttaaaatcatttattattatcaggagtgccttttaggtggaccgctctgtatgactctcatgcttcaaaactattttttattcaagtgacttacaatggccctaggaaacaagttctgttattatcccccattttaaaatgatgaaaatggacaaagcaaaagcaagcaacttaaccaataccccatggcctcacagcctttagaatagtcatattatataaatatggcaataacaatgcnctgaaaatgtctccaaaacaaactctacattttaaaaaatgtataacaggaatctaaggaaggggtcttacttc

SEQ ID NO: 1421 - DNA, 443 bp, Homo sapien
ttctcggttataaaagattttaatatcaaataaaatgtacatgatcaaaaggctttgattgccatgtaaagcatagtttccaggttacatcaagtgattttatcttctcccatttcaaatgaaatgttgaaagcacaaacaatctgccatgaatgataagaagcaaaggcagcacatatcatctgcaagtttcttcccaagctataaaatatcatgttcatatttttcctgtttgtgatcccaaaacaggcaatattttcatttcatccactctattcttatgtatttgaaaagcaggtgttatccacctaccacaagagcactgttcaccataccagttgaaggaacccaacttgggcactggcatttttggggcaaagaagctgtccatccatcactcccaacaaagcagattccatccactggtacaggttcaatgaaat

SEQ ID NO: 1422 - DNA, 439 bp, Homo sapien
ttttttttttttttgtataatcatcggagcttaaactcatggaggtttcatcagaatctgaggctataaattcatccatactgtcttcatcaaaataacccttattttctttgctaatgtagtctagctgcaaacaccaaggatgagtccatattctacttaacatctgaaaatcttggaaaagctttgcacctgcctttcctcttccaccttcactattattgcccacacctgttaagtgatctaagtagtactgatagagcttgcactgaatagaagtcattctcacagctaacacatattcgtgttttggaggcaagaattttgttaatgctgtataatctttcctctgaacacatccagctaacatctcatagagaatgtgagcacgttttttcatcactctggacatctaccatggtagaatctgcacactgac

SEQ ID NO: 1423 - DNA, 435 bp, Homo sapien
ttttttttcttgatttcctggttccgaaatgccaaatttaaatccatcagcagacacagcgatggaaaatccttctttggttgacttaaattctgtattagaagaaccctttgtgggagtaacattagctgctggtctgagaagatactcgggaattatatgctggtgactgactataatatactgaagggccagtagttgcaactgttagtggagccccatgaaatgtctgtgacccctgatatccatcaggcaccgagtctggtccataattctctgtgggccaacgatgacgggatgctgacttactgctatttagtttcgtaatggcctttacttcttggcaaatcattttccgtaaagaattctgatcttctgcccatcgaggtggtgttttgggagaatacttgtaacttttacctggtggatagtgaa

SEQ ID NO: 1424 - DNA, 428 bp, Homo sapien
  misc_feature (1)...(428): n = A,T,C or G
atttttttcggaaaaggtagacttttaataactgcttttatcaccaagttaatcatgcagttacaaagtagttagaaatttctgaaagggtactgttaaaaaaaagcgttcatccttatataaataatgtctggtacttctgtgggacattcctgttcaaaagccctggccaataaccccccaaacaaaagtcaagcccaggcaggcagtctctagcctgctgctggtgaagcggtgancagaatgcaaagccttggaaggggacacacaggttgagcctggccactggctccgtgctcgaagcctgccagactccaaacagggagcccaagtctttttttctgggacactcgatttgaattatggttcaatttactcaacagaatagaccttcaaatgggaagaacaagtagttttcatggtaaagt

SEQ ID NO: 1425 - DNA, 548 bp, Homo sapien
  misc_feature (1)...(548): n = A,T,C or G
aagacgccacatcccctattatagaagagctaataaatttccatgatcacacactaataattgttttcctaattagctccttagtcctctatatcatctcgctaatattaacaacaaaactaacacatacaagcacaatagatgcacaagaagttgaaaccatttgaactattctaccagctgtaatccttatcataattgctctcccctctctacgcattctatatataatagaccgaaatcaacaacccccgtattaaccgttaaaaccatagggcaccaatgatactcgaagctaccgaatatactgactatgaagacctatgctttgattcatatataatcccaacanacgacctaaaacctggtgaactacgactgctagaagttgataaccgagtcgttctgccaatngaacttccaatccgtatattaatttcatctgaagacgtcctccactcatgagcagtccccctcctnggacttaaaaactgatggnatccaggccgactaatcaggcacaggtaacatcaacgncaggggttang

SEQ ID NO: 1426 - DNA, 536 bp, Homo sapien
gtgctcgggaaccttttcagactgattaagagactggacctgagttataacagaattgggcttctggattctgagtggattccagtatcgtttgcaaagctgaacaccctaattcttcgtcataacaacatcaccagcatttccacgggcagtttttccacaactccaaatttgaagtgtcttgacttatcgtccaataagctgaagaccggtgaaaaatgctgtattccaagagttgaaggttctggaagtgcttctgctttacaacaatcacatatcctatctcgatccttcagcgtttggagggctctcccagttgcagaaactctacttaagtggaaattttctcacacagtttccgatggatttgtatgttggaaggttcaagctggcagaactgatgtttttagatgtttcttataaccgaattccttccatgccaatgcaccacataaatttagtgccaggaaaacagctgagaggcatctaccttcatggaacccatttgtctgtgactggttccctggtctccttgc

SEQ ID NO: 1427 - DNA, 548 bp, Homo sapien
  misc_feature (1)...(548): n = A,T,C or G
tgattcagccttctgcattttgccatgtatggtggcatctaatttcagtgtgattcattcctaaaatccaaacagatttctctgaagtacaaatgatgattgctgctgttgctgctgctgctggtggtggtggtgctaaatggtcagcaaaagcccctctctgtatcttcctacctcataattctaatggccagatttcaggaatgtgttttctatacctctgacggtacttctatcagaaaaattcagcaaatatgtatttactactgcaagcgttcttctcttttgactgtttgcttggtatagccataacttatacaaaatgttgctaagagaataattcataactccagttgacaacccagatataccttttagcaaatcaacaaaagtggcatggacatacaagtcacacatttcagctgtgtgacggaacatgatgcaccatggtcgtggtgttgcagcattgctctgactaagaggaggcagccaaagaaggccacatggtcataatgggatgtgggatataaattccagaatatacagan

SEQ ID NO: 1428 - DNA, 560 bp, Homo sapien
  misc_feature (1)...(560): n = A,T,C or G
aattttagaaaagtttatcaaactccaaagatactctgtattaatcagcagtaattttaacttaaaacaattatagccttggntactcatctacattgttctcagatctgtatattctggaattttatatccacatccatatgacatgtggccttctttcggctgcctcctcttagtcagagcaatgctgcaacacagcaccatggtnatcatgttccgtcacacagctgaaatgtgtgacttgtatgtccatgccacttttgttgatttgctaaaaggtatatctgggttgtcaactggagttatgaattattctcttagcaacattttgtataagttatggctataccaagcaaacagtcaaaagagaagaacgcttgcagtagtaaatacatatttgcngaatttttctgatagaagtaccgtcagaggtatagaaaacacattcctgaaatctggccattagaattatgaggtaggaagatacagagaggggcctttgctgaccatttagcaccaccaccaccagcagcagcagcaacagcagcaatcatcatttt

SEQ ID NO: 1429 - DNA, 535 bp, Homo sapien
  misc_feature (1)...(535): n = A,T,C or G
ttaactggagccttttcagccctccttctaacatcaggtctagtaatatgatttcactataattcaattacactattaacccttggcctactcaccaatatcctcacaatatatcaatgatgacgagacgtaattcgtgaaggaacctaccaaggccaccacactcctattgtacaaaaaggactacgatatggtataattctattcatcgtctcggaagtatttttctttgcaggattcttctgagcgttctatcattctagcctcgtaccaacacatgatctanggaggctgctgacctccaacaggaatttcaccacttaaccctctagaagtcccactacttaatacttcagtacttctagcatcaggtgtttcaattacatgagctcatcatagccttatagaaggtaaacgaaaccacataaatcaagccctactaattaccattatactaggactttacttcaccatcctccaagcttcagaatactttgaaacatcattctccatttcagatggnatctatgggtct

SEQ ID NO: 1430 - DNA, 539 bp, Homo sapien
  misc_feature (1)...(539): n = A,T,C or G
taggaaaagtcagactacgtctacaaaatgtcagtatcatgctgcggcttcaaatccgaagtgatgttttgatgtgaagtgaaattttagttgtcgtagtaggcaaacaataaggaatgttgatccaataattacatggagtccatggaatccagtagccatgaagaatgtagaaccatagataccatctgaaatggagaatgatgtttcaaagtattctgaagcttggaggatggtgaagtaaagtcctagtataatggtaattagtagggcttgatttatgtcggtttcgtttaccttctataaggctatgatgagctcatgtaattgaaacacctgatgctagaagtactgaagtattaagtagtgggacttctagagggttaagtggtgaaattccngttggaggtcagcagcctcctagatcatgtgttggtacgaggctagaatgatagaacgccagaagatccctgcaaagaaaaatacttccngagacgatggatagaatataccatatcgtngtcccttttgtaccatan

SEQ ID NO: 1431 - DNA, 147 bp, Homo sapien
  misc_feature (1)...(147): n = A,T,C or G
tctttctttttttnntttttttgaagcagaatcttnnctctngtcacccangctgnagtgcnntgggcaccaatctcagctcactncaatctccacctcccnnggttcaagagattctcctgcctcannctcctnggntcgctggga

SEQ ID NO: 1432 - DNA, 538 bp, Homo sapien
  misc_feature (1)...(538): n = A,T,C or G
agggtattattatgtacccctggctgcttgtaacttgctatgttgactaaatgacctcagactcagagatctacctgcctctgcctcttgagtgttgccattaaaggtgggtaccatcatacctagcttctcggcaggtctctctctttcttaaaggtttgttttgtattttttttacaattttatgtaagtgtatgtgcctatgtgtgggtatgtgcacttgagtgtagataggaactacctgatgtgggtggtgggacctgaatttgggtcttctgtcatctctctagaccttaggctangctataaaatactctcagacacagagcagaacttcaaagagtatcagtcattgggtccttgccaggtgtggtggcacacacctataatctcaggatttgggaaactganggcaggagaacaattgagtttggggcagcacagactatactgggagaccatgtctcaaacacacaaggctggcagaacagctgagagaaggtgcttgcctcaagcacatagtggaaagagaaatagn

SEQ ID NO: 1433 - DNA, 539 bp, Homo sapien
  misc_feature (1)...(539): n = A,T,C or G
agcacagaactgccaaagncctgcaaggacaaggtgagttccaactgtttatagtcaagcatgagaggtcaaggagcaacagttgtggagacacatgtttgatatcaatgtgtagtatgtttttggttctaggatttggacttccaacataatgtcttttgtacaatttctataaactgttttgaataatgaggctcttagtgtgcctagtagaagtgttgtatttcaaaaatcatatacttaatgaacataatgagacaggagcangagagaagctatgtgacattccctgggcaaacagtgcatttcatatgcagtgggcataacaagtttcagaataatcttgtgccttccctataaggtgactcagagaactaaataccttgtcggatagtcacaatggcctgaaaaaaaatcctgggccagtattgtaagagctgtggcaaattgcattaagatggtatcccaaagacttgaaacttttagtccatatcttacactccagagctggtgggnaccctcctaaatnggatangatt

SEQ ID NO: 1434 - DNA, 507 bp, Homo sapien
  misc_feature (1)...(507): n = A,T,C or G
tttgagacagagttttgctcttgtggcccaggctggagcacaatggagccatcctggcttactccaacctctgcctcctgggttcaagcgattcccctgccacaacctcccaagtagctgagattacaggtgtccgccaccacaccctgctcattttttgtatttttagtagagatggggttttaccatgttggctaggctggtctcgaactcctcacctcaggtgatccgcccacctcggcctcccaaagtgctgggattacaggcgtgacaacaaccttgcctggcctaaaataatgcatttataggtttgaattatttgttgcaaaagatttgaagaaaatcatattccatttaaggagggtgcccacagctcttgagtgtaagatatggactaaaagtttcaagtctttggaataccatcttaatgcaatttgccacagctcttacaatactgggcccaggatttttttcaggncattgtgactatccgacnaggtatttagt

SEQ ID NO: 1435 - DNA, 506 bp, Homo sapien
  misc_feature (1)...(506): n = A,T,C or G
tgcctagatcctagccctaagggattgcataatcacaggtgtatcaattaggacccacactcttttgagatagggcagccaacccacagtggccctgagctctatgtagcagaggggggcgttaaacttttgatgttcttcttacctcatgagcacagaagttcatgaccacacctggtttatgtggtgctgggcattcaagtcaaggccctacgcatgctgggcaaacactttgccaactgaggtacatctgcagtccctttttgctttttatttgaagacaagtaattngcccagactggccttaaacctgccttagctttccaagtagctgggattattcggcctataacacaaggctatttgttttttgctttaaattttttttttaacttcttcagatggatgtctccctttcatcacctacaatgtttgcttcaaagctcttaaagtgtggatgctagagaatgatatctatttaagagaatcatgacatncaaatttga

SEQ ID NO: 1436 - DNA, 530 bp, Homo sapien
  misc_feature (1)...(530): n = A,T,C or G
acccgtcttctccttttacctcaacagggattctgaagggtctgatgggggagagctggtcctagggggctcagaccccgcctcactacgtacctcccctcaccttcataccagtcaccatccctgcctactcgnagtnccacatggagagtgtgaaggtcggcacagggctgagctctgtgccagggctgcagtgccatcctagacacaggcacatccctcatcacaggacctagtgaggagatccgggccttgaataaagccattgggggatatcccttcctgaatcgggcagtacttcattcagtgttccaagacgccaacgcttccccctgtctccttccaccttggtgaagtctggtttaacctcacaggccaggactatgtcatcaagattcttcagagcgatgttggcctctgcctgttgggcttccaagctttggatatccccaagcctgcggaaccctctggatccttggggacgtcttttttggggcctatgtgggtgtcttttgacgtggggacaaaaa

SEQ ID NO: 1437 - DNA, 526 bp, Homo sapien
  misc_feature (1)...(526): n = A,T,C or G
agcatagctgctgtggcccggtgagcttgtaccctaaccagggcgtcttttgaagaactgcgcctgcgtagtccttctttctgcccggtctgttgaacgagactgagcacgcgccagtcccacgcgcgggcccgacgtttttgtccccacggtcaaagacagccacatagggccccaaaaagacgtccccaaggatccagaggggtcccgcangcttggggatatccaaggcttggaagcccaacaggcagaggccaacatcgctctgaagaatcttgatgacatagtcctggcctgtgaggttaaaccagactccaccaaggtggaaggagacagggggaagcgttggcgtcttggaacactgaatgaagtactgcccattcaggaagggatatcccccaatggctttattcaaggcccggatctcctcactaggtcctgtgatgagggatgtgnctgtgtctaggatggcactgcagccctgggcacagaggctcagccctntgcngaccttcacactctccat

SEQ ID NO: 1438 - DNA, 402 bp, Homo sapien
  misc_feature (1)...(402): n = A,T,C or G
taaaggaggagtgggtgggtaggcaagatgaagtcaagccaggagaacagagttaaatgagttaagcacagaattaaagctaggatgaagttaggtccatatatctgtcaccctgcacaaaaaaataattccaatagaccaaaagccttaatgacatagctaaaaacttcaagacactgctacatgtgagggctttctgaaaagatctccaatagcacagaaaggaagccaaagagttgtcaaatgcagttacaagtcaaaaaaaaaaaaaattctgcaaagcaaagcaatcngctctgcagtatgaagaaagtctttgccagctacccattggacagggatctaatatctagaatatataaagaactgtaacaattaaatactaaaaattccagattttcc

SEQ ID NO: 1439 - DNA, 388 bp, Homo sapien
  misc_feature (1)...(388): n = A,T,C or G
cagtgggctacattagaggactgcttagacgcatgcttattctagaaaaggctgaaggaagaaagaaccacccctttccctcctcttctcagctcccttctgctgggagcacctggctgccagttcccaagttcctctccatggggaattgcagctccaaggtggcctcctggagctgcctaactccgccttcactgaaantaaggtgattgaactgtaaagctgaaatcctctgcagtcatgtctcctccagagtcttcaagggtcactcccactttttttctagacacaaatggggtcntttttgtnattctnattaacantgtctccagacntaaatanaattttaaatttctcattngctatcngctgtttccactatgttttt

SEQ ID NO: 1440 - DNA, 505 bp, Homo sapien
  misc_feature (1)...(505): n = A,T,C or G
gaaagactacttgttgagagcagttttatgttcacagcaaaattgagagaaagatacagagattttctatatacccctgcctccacacatgcacagcctccctcatgatgaatattgctcaccacagtggtacagttgctttgatggatgatcctacattgacatttaatcactcaaagtccatagtttacattagggttcactcttgttgttgtacattgcatggctttacacaaaggtataatgacatgtgtttatcattacagtaacatgtaaggtattttcacttccataaaaaccctctgctctgccaatngtattcttttcttctcttgccaatcctttggacaaccactgatctttttaccatattcataattttgctttttccagaatgttgcgtagttggaacaatgcagtaagaagccttttcagattgacttcttttacttcgtaatatgcagttaagttcctccatgtcgtttcatagcctgatagttcattt

SEQ ID NO: 1441 - DNA, 461 bp, Homo sapien
  misc_feature (1)...(461): n = A,T,C or G
ttcggttttgtatgtacatctttattatatgtttactaaaataatagattgccaattctaagaaaataatctatagtttattaaaaaaaacttaagcttgtgtcttagaataaattatagatgctaaaataattttaaaaacacctgaaaagatttccaagtattggttttaatgtgtagatttatatttcattctgcaagttcatcaaaataccatttaattgcctagtctatacttaaatgacacatgcccctagtaatgattaagagcattatcataaacacagctaaaggtatttatggtttaagtacttcatatctgncttcaaatatgnatttccnaggtatcntttccattgtaattttcagtaaatatactggaagcntggatttcacattcctttcnaaacctgaacnggttttaattttnaaaaataggcacctatacngaggaacctata

SEQ ID NO: 1442 - DNA, 458 bp, Homo sapien
  misc_feature (1)...(458): n = A,T,C or G
gatcaacagtgaagccacggtgcgganaccacgtggttcactatgactcccagtcctacagcagcttgagtgaggcagctcagaagccacagggcctggctgtcctaggcatcctcattgaggtgggcgagactgagaatccagcttatgatcacattctgagtcgtctacatgaaataagatacaaagatcagaagacctctgtgcctcccttcagcgtgagagagctgttcccccaacagctggagcaattcttccgctacaacggctcactcacaactcccccctgctaccagagtgtgctctggacagtcttcaacagaagggcccagatttcaatgggacagtttagagaagctccaggagacattgtcctcttacagaagaggacncctcttgagccccttgtacaggactacngagtcncccanccttttcaagcagaaggancatctttg

SEQ ID NO: 1443 - DNA, 616 bp, Homo sapien
  misc_feature (1)...(616): n = A,T,C or G
aaatagtttgaaatttaaaaaaaatatgagatttttgaaaatggatcagtatccacagatttacatgtcttcttacacagtaaaaatttccaaagaagatctgccttgattaaaaaaaaatcaaatcagtatttagaaggtggttcataaattagaatgagggtgaaagttcattcatgnagtccattgtcaatgagctctactcattcttaattttcttttctttctttacaaagaatcggtaaatgaacaagaggcactttacagtaagaactatagtgactgcaacacaagagagtaggaagccgatcacatctagaaagtggtactggtgccaggtaaggttatgtccaagtgatctcaggtgcttagcccttttgtggcgcatgacaaactcaacccagaagacagccctgtccaggggcttcgtaggctggtcgtggtgaatgggttgacaaccatatagcattcctttttatagaaaggattgtcnatgcctcctccagtgcattgagtacactgatcctggacatggtcngatattcatggtacagctgctcccttggccaccatatgggcaatattatccaggtggtcncccaccaaggatgcccat

SEQ ID NO: 1444 - DNA, 543 bp, Homo sapien
  misc_feature (1)...(543): n = A,T,C or G
ggatctttcctttaggcattccggtgttgggttaacagagaagttataggtggattatttatagtgtgattattgcctatagtctgattaactaacaatggttatccgagttgttatacgcgtatnctggagaattggaattcttgttactcacncccaanagtgttgcatctataaagttatagattaacccaattttaagtttaggaagttggtgtaaattatggaattaattgaaattttatgttgagcttgaacgctttctttattggtggctgcttttaggcctacaatggttaaaagctgttttgttaattattcactattaaaggttttttccgttccagaagagctgtccctcttttggctataatctaaacttactttttgattttgttgtttttttagcaagtttaaaattgaacctaaattcattttttgggtaaccagctatcaccaagctcgttaggcctttcacctctacctaaaaatcctcncactaatttgccacatagacgagttgaatcntaaaatggttttagg

SEQ ID NO: 1445 - DNA, 650 bp, Homo sapien
  misc_feature (1)...(650): n = A,T,C or G
attttattgttcagagcttcccagcatggctgttacaaagaaccatgctaaggaggcggaagaactgatgatgctaagtaggaaagagcatgcaggcctgcgcctgtcnacatccaaatggaaacaatgtctctgaggtgtggctgaccaggtccagcctggccaggtttccacagccccacccacatgctgcgactcgagtgatgctgaaacccaaaaggcatggcaacagaacctgtagaaaatccaaactatcataaccagccatcctacttgaagttaatctcttagaacagctaaacttttatttaaaaagcaaatcaagcatatttgtcatcttaaaaaaaaaacatgtaaacattgcaaaatttggagggttatttataatctgaagacacttataaaaatttttgggacttgttaggactataaatactaaccctctactcccctccccccatgaaaaaaagccaattgttaccaaaatataaaagaatattctagcttctagttaacctttcatggaagaatctcagaactctggagcatatctggattatatgcctagcgagcaccntggtaccttttcagcttttaaggaaagctgtagaccatcacatcctgttatggatgcggntacttccttcaca

SEQ ID NO: 1446 - DNA, 486 bp, Homo sapien
  misc_feature (1)...(486): n = A,T,C or G
tttttttttttttttttggtgaaataaggtaggggtatgttgaacatgattagggccaaattcttcattcctcagtggagagacagatccagcagtacatatggagggcacagctcatctgaaaagcagaatgcagattctgaagagaatgggtgggacatggcctctgcgatggtcagaaacaggaaggtcactgacattcagggtacttcagaatctaaaggtacgtccatgcatgccactgtgacacacttactgtgctgacaaaatgactgtgtcgatcttggaaagctgtgtcatctttaccatgacagattccctggaacaggcccttgagaagccagtgcctatacttggggcatgtcctgtacatctctctttgaaccaaactttggtgcttaaggtctatgtcaaaactgtcctcaaaactgggaaattcaccctaaaatagacagttttcaaagagcatgatttatgtttaaatgn

SEQ ID NO: 1447 - DNA, 582 bp, Homo sapien
  misc_feature (1)...(582): n = A,T,C or G
ttttagctgattccagacatagtcaagttgaaaaccaacataaggatcacagactataaaagattataaaggtcttttgaagttgggctaaatgcattttgggttatgatttggccatgcaactgtaggagccagggaagggaatgtggtgattaaagtgagaaatgtccctcctagtcttgaattggagcagtcagtgtccagtgtggtgctgtgtgggcgcacattgctagaagtgtgtacttggatttgggctgtgagagctcaaggcctcggctaccttttggtttgtcctctctctccgtgcttgtggttgaggagtgagctgaagtttttttctctggctgcttgcatgttagccttctaacgcgctttcccacctcagggaccattaaccccaataaatgcttccctctcnaagttgccctggtccagggatttatccnggcaatagaaagattataataccccagttttcaggggatatgcctagaagtgatgtagcncgggttatttggtggtgcccggttttagcctcctgaggaaccncccattnatttccncaggtggcnataccagtta

SEQ ID NO: 1448 - DNA, 545 bp, Homo sapien
  misc_feature (1)...(545): n = A,T,C or G
ttttctttcttttttttttttttttaacaaagcctgtcagagtcaatgcttactttaaaatatccacgtgtgtattcatcagcctctgcaatcaagttcctgagccctggtcatttcacctatttagtgttctgtctgctttgctgtgtaaggaagtgccttttattaaaggctgaacatttttaatttcagggaaagccagagtccaggctgaaacccacaaataccatggcaacctatttagcactcttgacacattactaccctaatgaagacatccttgctaatgccagagccaaacagctatttattaactcagcctaacctagtctacaatctctaacaggagtaattgcccttaattatatcacaaattgaagtcatggtttaagtagtgaaagtgttacatcttcattacaaatttggcataaagctcagtttttaaaggagtttggagaggactactagggacagtatgccttcctgccatgccacaatcttaggnggggtatttcctttgggaaataagtccatanatatttggg

SEQ ID NO: 1449 - DNA, 510 bp, Homo sapien
  misc_feature (1)...(510): n = A,T,C or G
catattactcagtgataaaaataaatgaactatcaagctatgaaacgacatggaggaacttaactgcatattaccgaagaaaagaagtcaatctgaaaaggcttcttactgcattgttccaactacgcaacattctggaaaaagcaaaattatgaatatggtaaaaagatcagtggttgtcaaaggattggcaagagaagaaaagaatacattggcagagcagagggtttttatggaagtgaaaataccttacatgttactgtaatgataaacacatgtcattatacctttgtgtaaagccatgcaatgtacaacaacaagagtgaaccctaatgtaaactatggactttgagtgattaaatgtcaatgtaggatcatccatcaaagcaactgtaccactgtggtgagcaatattcatcatgagggaggctgtgcatgtgtggaggcaggggtatatagaaaatctctgtatccttctctcaattttgctgtgaacnttaaactgctctc

SEQ ID NO: 1450 - DNA, 578 bp, Homo sapien
  misc_feature (1)...(578): n = A,T,C or G
tgcactctcttctctgagcttcccggaccccaacatccctctccagggacagcctgttgagaaatcttcgtggagtggtggaccagaggcgaggagtttaaaagttggggcttgaaagacaggaagatacgatggcttcctcgtctggcaacgacgatgatctcactatccccagagctgctataaataagatgatcaaaagagactcttcctaatgtccgggtggccaacgattgcccgagagctggtagtgaactgctgcacggaattcattcaccttatatcttctgaagccaacgagatttgtaacaagtcagaaaagaagacaatttcaccagagcatgttatacaagcactggaaagtttgggctttggctcttacatcagtgaagtaaaagaagtcttacaagaatgcaagacagtagcattaaaaagaagaaaggccagttctcgtttggaaaacctcggcattcctgaagagggattattgagacagcacagggattatttgccaaagctagcagccaccagcagattggncccacaggaatggcttccaatgcagcagcagctccaac

SEQ ID NO: 1451 - DNA, 480 bp, Homo sapien
  misc_feature (1)...(480): n = A,T,C or G
ttttatgtgccctgggactctttatctaccagtcactggatgccattgatgggaaacaagccagaaggacaaactcttgctctcccttaggggaactatttgatcatggttgtgactctctttccacagtatttatggccatcgngcttccattgctgttcgcctaggaacacatcctgactggttgtttttctgctctttcgttgggatgttcatgttttactgtgctcattggcagacttaccgtctcaggagtgttaagatttggaagggtggatgtcactgagatccaggtagctttaagtgatcgtcttcatgttgtcaacattttggaggagcaacaatgtgggactatacgatacctattctagaaataaaactgaagattgttccggttcctggagttgtaggtggattaataatttccngttccaaataattccatgtgatcctccatgggtggtgttngcaagaatgggg

SEQ ID NO: 1452 - DNA, 490 bp, Homo sapien
  misc_feature (1)...(490): n = A,T,C or G
taagatcaaaaacttttaatttccaaacatatattgagcaaaaaataattaaaatcccagcagcagcccttttttcctagaggaaaaaaaaaaactacaacgtatatctaagggagagaacatggcggtgtgaggtgaaagatggcagtttatcctcagcttcttccaaccaagcatgaggacagggaatctcctcatccacagctttgaaggccaaagntcagcccttcctgaagagctggggtccctggtgtatagagagggttacctagcaggacaccgtgcctgcctacaactggtcgtccagtgcctgcagccctcagagaggctccctgggcaggaggagagggaggcatctgcagcatctttgagacagagttcacgcctctgtggtagcccgagcagaggtgaaaacacactttttnctgtttccagccgcttcttcctggaaaagggggagcaatggttcatgggagtgacttagcntcct

SEQ ID NO: 1453 - DNA, 582 bp, Homo sapien
aaaaccccagcaactttaggacacaatacgagagtgtacaagtggctcccccagaatgacctccttggtcatccaaaaacaaaagcctttgtaactcatggtggggccaatggtgtctatgaggtgatctatcatggaatccctatgattggcattcctttgtttggagaacaacatgataatattgcccatatggtggccaaaggagcagctgttacattgaatatcagaacaatgtcaagatcagatgtactcaatgcactggaggaagtcatagacaatcctttctataaaaagaatgctatatggttgtcaaccattcaccacgaccagccttaccgaagcccctggacagggcttgtcttctggggttgagtttgtcatgcgccacaaaagggctaagcacctgagatcacttgggacataaccttacctggcaccagtaccactttcctagatgtgatcggcttcctactctcttggtgttgcagtcactatagttcctactgtaagtgcccttggtcattaccgattcctttggtaaagaaagaaaagaaattaagatgagtagagctctttgcc

SEQ ID NO: 1454 - DNA, 574 bp, Homo sapien
  misc_feature (1)...(574): n = A,T,C or G
ctgggtacccacgcagcgagtcaagggagttttcggagccagagagagaaagatgtgaaggctgtggagtaaggctgaaaccagcctcctgccctatagtcccacactgcagggggtgcgactttaaaacagaacttcaagttgttaacactcacaagcattgcattactgtgaaggaagtagccgcatccataacaggatgtgatggtctacagcttttcctttaaaagctgaaaaggtaccatgtgtgctcgctaggcatataatccagatatgctccagagttctgagattcttccatgaaaggttaactagaagctagaatatttttttatatttttgtaacaattggcttttttcatgggggggaggggagtagagggttagtatttatagtcctaacaagtccaaaaatttttataagtgtcttcagattataaataaccctccaaattttgcaatgtttacatgttttttttttaagatgncaatatgcttgatttgctttttaaataaagtttagcngttctaagagattacttccagtaggatggctggttatgatagttggatt

SEQ ID NO: 1455 - DNA, 579 bp, Homo sapien
  misc_feature (1)...(579): n = A,T,C or G
gtgctgaagaatgagtcttttatttgttttcagagtggtatgatatctttttgttatcttcaagaagttctcaattgctacagagaagtggcaagtctgtagatggcagcagctgagcagtgtcccacccataggcttttcaggagacatcctcacatactagtattcatccaaaaatggccaattagggtggccttgaaaatggcagcaggtatgtatcgcatatttctgttcaggccatcaagaactttcatatcctctgaactcagctggaattcaaaaacctgcatgttctctttgatccgctcctctttgagactggtgttgaggaccacaatcccacgctgtaactggtagcgaagggcaatcaaggctggagttcgattatatttttttgccatggaaccaagaactggttcatccaagagaacaggggaattctggtctacccatcctccatatcgttgtgttcctagaacaccataggcaaccaatacaatatcttttgatttgcagaaatccagaaagtttcatttgggttgagataaggatggcatctacctggttgcatccngcttg

SEQ ID NO: 1456 - DNA, 485 bp, Homo sapien
aaaaattggaaatatcttgtcatttaaacataaatcatgctctttgaaaactgtctattttagggtgaatttccagtttgaggacagttttgacatagaccttaagcacaaagtttggttcaaagagagatgtacaggacatgcccaagtataggcactggcttctcaagggcctgttccagggaatctgtcatggtaaagatgacacagctttccaagatcgacacagtcattttgtcagcacagtaagtgtgtcacagtggcatgcatggacgtacctttagattctgaagtaccctgaatgtcagtgaccttcctgtttctgaccatcgcagaggccatgtcccacccattctcttcagaatctgcattctgcttttcagatgaggctgtgcctccatatgtactgctggatctgtctctccactgaggaatgaagaatttggccctaatcatgttcaacatacccctaccttatttcacca

SEQ ID NO: 1457 - DNA, 617 bp, Homo sapien
  misc_feature (1)...(617): n = A,T,C or G
gagccgatcgcnganaattnctgcttttaggagtacccgccaacaagcggaccgagcaggaatccgtatctgggaacagaatgaacggagaccagaattcagatgtttatgcccaagaaaagcaggatttcgttcagcacttctcccagatcgttagggtgctgactgaggatgagatggggcacccagagataggagatgctattgcccggctcaaggaggtcctggagtacaatgccattggaggcaagtataaccggggtttgacggtggtaagtagcattccgggagctnggtggagccaaggaaacaggatgcttgatagtctccagcgggccttggactgtgggctggtgtgtggaactgcttgcaactttcttcctggtggcagatgacatcatggattcatcccttacccgccggggacagatctgctggtatcagaagccgggcgtgggtttggatgccatcaatgatgctaacctcctngaagcatgtatctaccgcctgctgaactctattgccgggagcagcctattacctgaacntgattcgagctcttcctgcagagttcnattcagacttagatttgggcanacctggacctcctcaaaggg

SEQ ID NO: 1458 - DNA, 629 bp, Homo sapien
  misc_feature (1)...(629): n = A,T,C or G
ttatagaagagntaataaatttccatgatcacacactaataattgttttcctaattagctccttagtcctctatatcatctcgctaatattaacaacaaaactaacacatacaagcacaatagatgcacaagaagttgaaaccatttgaactattctaccagctgtaatccttatcataattgctctcccctctctacgcattctatatataatagacgaaatcaacaaccccgtattaacccgttaaaaccatagggcaccaatgatactgaagctacgaatatactgactatgaagacctatgctttgattcatatataatcccaacaaacgaccttaaaacctgggtgaacttaccgacttgctaagaagttgataaccgagtcgttctgccaatagaacttccaatccgtatattnatttcatctggaagacgtcctccactccatgagcagtccccttcccttaggacttnaaaactggatgccatnccaggccgncttaatccagcacagttacattcnaccggccagggtattctatggccatgctctgaatttgtggtcttaccatagctttatgcnccttggtcctagaatgggtccccaaatatttcggnactggtctg

SEQ ID NO: 1459 - DNA, 588 bp, Homo sapien
  misc_feature (1)...(588): n = A,T,C or G
tttttttttttttttttttttttttttttaaattaaattattgaagcagatcagttttcgaaatattttagtggaaccatttctaggacaatgggcataaagctatggttagatccacaaatttcagagcattggccatagaataaccctggtcggtttgatgttactgttgcttgatttagtcggcctgggatggcatcagttttaagtcctagggaggggactgcncatgagtggaggacgtcttcagatgaaattaatatacggattggaagttcnattggcagaacgactcggttatcaacttctagcagtcgtagttcaccaggttttaggtcgtttgttgggattatatatgaatcaaagcataggtcttcatagtcagnatattcgnagcttcagnatcantggtgccccatggttttaacggntaatanggggttgttgaattcggcnattatatatagaatgcgtanaagaggggagagccattntgataaggattacagcnggtagaatagttccaangggttccacctcctgggcacccatgngcctgnaaggggtaagtttgggggtaaaaattag

SEQ ID NO: 1460 - DNA, 383 bp, Homo sapien
  misc_feature (1)...(383): n = A,T,C or G
ccgtgtggggtagtgagagcagagagatagtgggagatgctgtggtcagctgggctgggctcatgtgctgaagaggctaagagttcttagtctttccccagctgctcagatagctatgtgatgtctcgatattcccccaccccatgcnggctccacggtgtgatacaccaggagggttgtcaccagagcttcaccgattggtagtgccttgccattggatctcagaattatgagctaattaaaccccatacctcttcataaaattaacctgccttcaagattttgttatagtaataaaagccggattaattcaaaaaaaaccggcaccaactccttcncgcccgaaaccaaaccaactacctaaaaanaattttggggnatca

SEQ ID NO: 1461 - DNA, 478 bp, Homo sapien
aaaatgctgttagtattttgtggtctaataaggagttcgggatagcctgttgtatttgcctcatgccagcccctgagctgccttgggagaagatgctgattgtccttgtccagagtactgcttttgcagagtgacaggctgctgggacagatgtcctcctgttgcatctttgtggatgtttagtaccaatgatgacacgggaactcacatcactgacaccgctcttcatcttctgttagtctcttgaagagcatttttttgtacttctttgctgatgacctacctcttcataagccaagtgaaacaagttgaccgaactgcctaggacttccacgtgtttgctcacatacatgatggatttctgtcacgctcttgtgttcagacacactgacattaccatgtatgtcagacctccttatgatcgcatgtcctgacagttaagctgattgcaaacagactattaaatatgaatggagca

SEQ ID NO: 1462 - DNA, 465 bp, Homo sapien
tttttttttgctccattcatatttaatagtctgtttgcaatcagcttaactgtcaggacatgcgatcataaggaggtctgacatacatggtaatgtcagtgtgtctgaacacaagagcgtgacagaaatcatcatgtatgtgagcaacacgtggaagtcctaggcagttcgtcaacttgtttcacttggcttatgaagaggtaggtcatcagcaaagaagtacaaaaaaatgctcttcaagagactaacagaagatgaagagcggtgtcagtgatgtgagttcccgtgtcatcattggtactaaacatccacaaagatgcaacaggaggacatctgtcccagcagcctgtcactcttgcaaaagcagtactctggacaaggacaatcagcatcttctcccaaggcagctcaggggctggcatgaggcaaatacaacaggctatcccgaactccttattagacccc

SEQ ID NO: 1463 - DNA, 459 bp, Homo sapien
  misc_feature (1)...(459): n = A,T,C or G
ggctttactgcgaacatcctctcccttcaaaaagggaaatgctcagagactcagtactcctctgcctccaatgtacctgtgtcagtcttgcgtttcttttttctatgtgaattacacttgtatatccaactgggagcactttaggcatcgtgtgcgccatgggatggtcattctgtggaggccttgcttgtgaatttgctgctattttagtttcctcttgctgtaaaactagcattaaacaatcattgttgttaataggctttctttcagaacaattatgtgaaatatatagctgctcttcntgaaaagcagcttcgcatctttttctttggactttgaagctactgcattgaaaaagtgcacctacccctccctgtttgaatgctgtattaatgtagtataattattactggttttgtaaatttttcttataatgtcccctgtctttaaaacatggtt

SEQ ID NO: 1464 - DNA, 528 bp, Homo sapien
  misc_feature (1)...(528): n = A,T,C or G
taagcacggaatgacttttaatacaccagacaatgttaataagacacaagtcaaacagacaagtgcaaatgtgtttcagaccaaagttaataggaaaacaagtgagacatttccctccttttggagggcagcatctactagccaaatattgttagtcaaatggctattcacaggtaaaatgtattttgtggaaaacttggaatagtcagaagtcattctggtatttttaaacagctatgtacagtattaccaagatcagtttatatacacaaatattgaagagaaactgggcaaaacatttaaaaataggctaaccatacaaccaagtacaagacttgacaggaggaaggaaacatgttttaaagacaggggacattataagaaaaatttacaaaaccagtaataattatnctacattaatacagcattcnaacaggggagggggtaggtgcnctttttccatgcagtagcttcanagtcccaaggaaaagatgcgacgggctttttcctgnagagcngctatatatt

SEQ ID NO: 1465 - DNA, 616 bp, Homo sapien
  misc_feature (1)...(616): n = A,T,C or G
aaatctccgcaattgagagcagtgcaagtgctgagaggatgtagactgggctggggcgagaacatgtcacactagatcccagtccacgatgatgagtcagggagactcgataactgctccttggccattcattttcctccagcccatagctctgcccactccagtgtcaaacaccgcccaggctttccagctgacctctgttatcttgagagctgaggctaggtcctcccagctactgttaggcattgaggtactaaaactgcaggtgggtatgtccatctcatccattgtggcttgagaccggccttcaggaagtccgctctccatttaaacatcctttcttattcataagcgcaccacccaaagtctgtgtgtttgtgacagtctgtggggactgtcccagtgcctttgtgatgacctaaactgcactgagtctcttgccaagaagcaatgctttttttgtgaaggccactcagagcatcttgcagtcacagctgttcctgagcctgaggccagaagattccctaaccaggactttgaagccaaacctaggcaaatgatgggganctccccattcttcatnaaaatcccctcagatcctcaagttgaatgtttg

SEQ ID NO: 1466 - DNA, 617 bp, Homo sapien
  misc_feature (1)...(617): n = A,T,C or G
gagtaagtattttggcctagctagaagctgtgatttataatttactataacaacagtaagtgcaagttcaacattgaaattttgtgcaaaatattttatgattagtctatgacaactgctacttaagcaactatttgctataacgggccaatgatttgttcttgatacttccttcatacaatacacttcagatagcctcaacggtgggacaggttactcagcaaacacggctatacattcaataagcatgttacgttctcattgagtaggccgagttaattaggaccccaggaaggcagtgaggcttggagctttgggcccagccaggccccagcagcaggaagccagatccacacagatctctctgccacatccctgcttagccacactaggatctaagggagaatgatgccccgcttgctcgggagcgcctctgaccatcccatcccttaaagtgtgctccacagctcgcagtgttctccagnaatcccggtcctgtgagtctgaagccctggggtataataccccccttcaatacaggatggctccatgctttatagatntgtaggaatcctccaagattaaaaggtaaattccctgcattgtgctnggggatt

SEQ ID NO: 1467 - DNA, 208 bp, Homo sapien
  misc_feature (1)...(208): n = A,T,C or G
tccaaaagaaggtgtgaaagttaacaaggtgatggttgctgaagccttggatatttccagagaaacctacctggcaattctgatggaccggtcctgcaatggccccgtgctggtgggcagcccccaggggcgttcagacattgaagaggtggctgcttcaaacccggagctcatttttaaggagcaaattgacatttttgaangnata

SEQ ID NO: 1468 - DNA, 564 bp, Homo sapien
  misc_feature (1)...(564): n = A,T,C or G
ttttttttactttttctataaaagtttattttgtaatttttttcccaagaagtggtccggataccaatttcaattatgtaaagaaaggtaaggaagggcggtgtataaaaataatttaaacatacatactagcaacaaagcaacatgactctctagttacagctacaaatttgcccaagatttttccccaaaggttttaaatatactgtggacaatgggacagacaggcatgtacacacacacacacacacacacacacacacacacacacacacatgctcacacagagacacgttcacacacatatatacagctcaagtatgttttctgtgcattttagctaactgctacagctaacgtgaagaactggattcctgagtgaccttgaagtggaaccaaaacccccattggtgtcaaatgcaaacttcagagactatgcggtgatttccctcccaatcttatttgcccctagcctggtcnctgtgctactcactgactattaaagggggctttctgatctactcagcattgtgccgctatctcaagctggctcgtggcgaatcc

SEQ ID NO: 1469 - DNA, 444 bp, Homo sapien
  misc_feature (1)...(444): n = A,T,C or G
ggagggtgaatacgtaggcttgaattaatgctactgcaaattctagaattgtgagtagaagtaaaataataaatgtaatggtagctgttggtgggctaatatttattaatactagagtagctcctccgattaggtgtattaataagtgtcctgcagtaatgttagctgtaaccggactgctaatgccattggttgaataaataggctaattgtttcaataataataagtattggaattagtgaaattggagttccttgtggaaggaagtgggcaagtgagctttttagtttgtgtcggaagcctgtaattacggctccagctcatagtggaatggctatacntagatttatggatagttgggtagtaggtgtaaatgtatgtggtaaaaggcccaggagatttgttgatcccataaatatgattagggaaccattattagggtc

SEQ ID NO: 1470 - DNA, 422 bp, Homo sapien
  misc_feature (1)...(422): n = A,T,C or G
ttactttgtgtgttgtgttttattaacaccaaaatgtgccacatcatggtttagaagaggtggagggtgcaggcaggaggctccgaagcccaggcaggcgcncagcctctgncatctccatggactccagctggagagcctgtccgctcagcaacaccccaggcagcaccaagaataacatgcccacaagaacatcatggccaagagacgcacaggcgcatcccgcttccaggcacctttcccacctggccagaagtccctgctgtcatcccgacttgcacggtggttttggtaaccaagtgggctgtncaaggagtgaaanttggggtcantttccttcctttcccagctgctggagtnggaacttctgcctttgtttggcggccttgtttcttaaatcagttcccncttaggatttatta

SEQ ID NO: 1471 - DNA, 235 bp, Homo sapien
ctggttaaaatggccgctgtatttctgcttaagtgcccataacacaggtaaggcagagagctgggggcagtgcaaggtggaagagtagacgtgcaaagtgacaacccatcagagaaggttacagagaagagtagcagcccctgccctccctctccgcttaggtaaggccttggccaatgtccactcagaagagttccttcaggagagagagaaggtgaaaggtcagagttaggat

SEQ ID NO: 1472 - DNA, 376 bp, Homo sapien
  misc_feature (1)...(376): n = A,T,C or G
ttttttttttttttttttttgtttttttttttttttttttttttttttttaagatccncatcaataaatggagacgtataggaaaagtcagactacgtctacaaaatgtcagtatcatgctgcggcttcaaatccgaagtgatgttttgatgtgaagtggaaattttagttgtcgtagtaggcaaacaataaggaatgttgatccaataattacatggagtccatggaatccagtagccatgaagaatgtagaaccatagataccatctgaaatggagaatgatgtttcaaagtattcngaagcntggaggattggtgaagtaaagtcccagtataatggtaattagtagggcctgatttatgnggtttcgtttac

SEQ ID NO: 1473 - DNA, 562 bp, Homo sapien
  misc_feature (1)...(562): n = A,T,C or G
gatgaatagttatttctaggtggtgtgaacaagctgtcattaactccctngggggatgaaggcacccgaacacagaaatgacacggtgatgtgtgtgtgtttttttcctttacgttggccacacctgtgtcaaaggagggaacttgcctagtgtgctaggctgtgaatataaagaacccctgacacttgaaagccaagaggcatgcagatcttacaggtatcaaaagcctcgtgccacagacaccacaggactccgagtccagtgtgactttgggctgttttgacaatggcaggctctgtgctgtgatctggacccatcagtctgaaggggacaataggacaggggcaaatatggccaagggagggcaagcaggctgccctccttgcaagcaggctaggcaggctcgagagggaaggccgatggaagctaggggtttgcaataaaataactctttcccaggcaggcaccatttacctcagtgagcctggttanttcatgaaaataaggctcgtcattttaacgactgagttcctcctgtcaccttggacaatgacgtaatga

SEQ ID NO: 1474 - DNA, 455 bp, Homo sapien
  misc_feature (1)...(455): n = A,T,C or G
cctcatcaataaatggagacgtataggaaaagtcagactacgtctacaaaatgtcagtatcatgctgcggcttcaaatccgaagtgatgttttgatgtgaagtgaaattttagttgtcgtagtaggcaaacaataaggaatgttgatccaataattacatggagtccatggaatccagtagccatgaagaatgtagaaccatagataccatctgaaatggagaatgatgtttcaaagtattctgaagcttggaggatggtgaagtaaagtcctagtataatggtaattagtagggcttgatttatgtggtttcgtttaccttctataaggctatgatgagctcatgtaattgaaacacctgatgctagaagtactgaagtattaagtagtgggacctcnagagggttaagtggtgaaattccngttggaggtcagcagcccccnagatcatgtgt

SEQ ID NO: 1475 - DNA, 579 bp, Homo sapien
  misc_feature (1)...(579): n = A,T,C or G
ccgctctctctctctctctctctctctctntntnatatgtgtgnnnntntctctctctcctcnnnnngaattcgnnancnanaccctcttaagtcgttttcataagattctctagctttgctaatggccagggagctttccatcttcactttttctctgctcaatntccnnatgtctctttttttttttttttttttttttgagacagggtctttttctgtcacccaggctggagtgcagtggcagantcatagctcactgtaacctcaaactcctgggctcaagcaatcctcccacctcagcctgccacactcggctcatttttaaaattttttgatagagacagagtcttgctttgttgccatgctggtctcaaacttctggatccaggcaatcctcccgccttggctcccaaagtgctgggactacaagcatgagccaccanacccaatcttctcagtgtcataaagcaaagaaggcttgtgtcntcttattcatatccctganagaatagctgagtcntctcnaagtttttntcattcaaggaccaagtctcaaggctccataaaagctaaaggn

SEQ ID NO: 1476 - DNA, 498 bp, Homo sapien
  misc_feature (1)...(498): n = A,T,C or G
ggatctttcctttaggcattccggtgttgggttaacagagaagttataggtggattatttatagtgtgattattgcctatagtctgattaactaacaatggttatccgagttgttatacgcgtatgcctggagaattggaattcttgttactcatactaacagtgttgcatctataaagttatagattaacccaattttaagtttaggaagttggtgtaaattatgggaattaattgaaattttatgttgagcttgaacgctttctttattggtggctgcttttaggcctacaatggttaaaagctgttttgttaattattcactattaaaggttttttccgttccagaagagctgtccctcttttgggctataatctaaacttactttttgattttgttggtttttttagcaagtttaaaattgaacttaaattcattttttgggtaaccagctatcaccaagcncgttaggcttttcacctctacctaaaaacctc

SEQ ID NO: 1477 - DNA, 433 bp, Homo sapien
tccaatttgaaacatctcaggctttagtcagtggcaaaattgaagttaattgtttgctctctcttcttgttaatgtattttgtactcaggagagggtctggggacatagaaatgtttcaaaagatgtcaggtgtggtcaaacttgcttttcaacctcattgagagacaatatagcaaaaggctgagagcacaaactggagccagactgcttgggggtgtggggatctggctgtgctctgtgatcgctgtgtgaccttgggcaggtcacttaacctttctggtactgcgtttcttcatctgcaaaatgggagtaatatcatagggatgctgtgaggatctaaatgagttaatactgatgaactaactgcttagaacaaggtttgccccgtactaaatactgtgcacggtggtaataagtaataataattgattt

SEQ ID NO: 1478 - DNA, 492 bp, Homo sapien
tgacttggcagtagctgaggttcttcacattcgtgaagagcaaaggaggcagtgtggagtgatgcaatccaggtataacacaaagaagtgatcttagcaaaggcttgtgaacaataccaataaccttcttgtttgtcttgccaatgagaatgtcttctaactggcccttgagtagcagtaatactctagaggaccagggatccactgcctgtcattttcggtcagttgactatgaaactaggtttttgtttggaaggatagaattgggtatgcattgggtgaatgcagcaaattagaaggcaggaggaaaagagctgggtttggacctcaaaggaattccctaaaccagattttatttcactattaccctctcttggaaaacatggtgccgtttaggtattcaacctggattcttaacttaaagattttaaagttaattgtattgaaggaaacccaggggaccagtgaaaaccctactggttggtgctgtcc

SEQ ID NO: 1479 - DNA, 187 bp, Homo sapien
  misc_feature (1)...(187): n = A,T,C or G
cattaanaacatcctccctgccctgnagatgatgnacccctatgagcagaatctggtccangcccacaatgtgattttatgccanacctgtcantttgtgatgaataagttttctgagctgattgtcaataatgccactgagganctcctagttaaaggtttgancaacgcatgcgcactgctcccc

SEQ ID NO: 1480 - DNA, 205 bp, Homo sapien
tttttgagtttcgaatctgtatagtgctttatatgttttcaaagaattttcacgtatatgatcttcattagcccatgcaacagccttgtggtttacaatggagaaagcagacaccagaaggaacttgctcaagatcatacacccagatagtgggacaagtggacgagcacccagactgcaccgtcagcccagcatttccagccgg

SEQ ID NO: 1481 - DNA, 516 bp, Homo sapien
attttgtaatttaatgtagcttgtggttcggtgtagagagctcagggtgaccacacacactctaccactgagctatgaccctggggccccaaaagcaattatttacagcacaaactacaaagacacatccttcagtgtgtgcagagacacacatccttcagcctgttgcagagtggagggacagatgtggaaggcagtgtgtggcttctggcctctgataccactcaaggtcctagcgtcatcggatggtgatgggcagctttgaacaagacacaaaacaccaactttctccagctcttggataagcaggtccttctatatacagtactcctggctcaaggctgctctgctccttccagactcttgggccttctccagaactggcctgagtgcagctgagactcctgcgagaggcccagagatctgtcttctgagacagagtaagtatgcccaggaaagaggtaggaagagtctggtcccaagtttttccaggttctagcttctgtcttggcaagc

SEQ ID NO: 1482 - DNA, 486 bp, Homo sapien
  misc_feature (1)...(486): n = A,T,C or G
taggaaatgtatatttaatcattctcttgaacgatcagaactctaaaatcagttttctataacaacatgtaatacagtcaccgtggctccaaggtccaggaaggcagtggttaacacatgaagagtgtgggaagggggctggaaacaaagtattcttttccttcaaagcttcattcctcaaggcctcaattcaagcagtcattgtccttgctttcaaaagtctgtgtgtgcttcatggaaggtatatgtttgttgccttaatttgaattgtggccaggaagggtctggagatctaaattcagagtaagaaaacctgagctagaactcaggcatttctcttacagaacttggcttgcagggtagaatgaagggaaagaaacttagaagctccacaagctgaagataatcccatcaggcatttcccataggncctggtcaactctggtcactgagagatgttatccnggtgcccgatagagttcnggc

SEQ ID NO: 1483 - DNA, 625 bp, Homo sapien
  misc_feature (1)...(625): n = A,T,C or G
cagctttgagatagcggcacaatgctgagtagatcagaaaagcaccttttaatagtcagttgagtagcacagagaacaggctaggggcaaataagattgggaggggaaatcaccgcatagtctctgaagtttgcatttgacaccaatgggggttttggttccacttcaaggtcactcaggaatccagttcttcacgttagctgtaacagttagctaaaatgcacagaaaacatacttgaagctgtatatatgtgtgtgaaccgtgtctctgtgtgagcatgtgtgtgtgtgtgtgtgtgtgtgtgtgtgtgtgtgtgtgtgtacatgcctgtctgtcccattgtccacagtatatttaaaacctttggggaaaaatcttgggcaaatttgtagctgtaactagagagtcatgttgctttgttgcnagtatgtatgtttaaattatttttatacaccgcccttccctacctntctttacataattgaaattggtatccggaccacttcttggggaaaaaaattaccaaataaccttttatagaaaagtaaaaaanaaaaaanaaaaaaaaacncgggggggncccgtncccattcncccatagngggcggntaaaatccctggccg

SEQ ID NO: 1484 - DNA, 569 bp, Homo sapien
  misc_feature (1)...(569): n = A,T,C or G
ggcacgagggcaccttcaccaaaatcactaacaaccataaaagtaaaaaccccttgagaattaaaatgaacgaaaatctatttgcctcattcattaccccaacaataataggattcccaatccgttgtagccatcattatatttccttcaatcctattcccatcctcaaaacgcctaatcaacaaccgtctccattctttccaacactgactagttaaacttattatcaaacaaataatgctaatccacacaccaaaaggacgaacatgaaccctaataattgtttccctaatcatatttattggatcaacaaatctcctaggccttttaccacatacatttacaccttacttaccccaacttatcccataaatcttaagtatagcnattccactatgagctgggagccgtaattacaggcttccgacacaaactaaaaagctcacttggcccacttccttccacaagggactcccatttcactaattcccatacttattattattggaacaattagcctatttattcaaccatgggattagcagtccggnttacagnttacattctgg

SEQ ID NO: 1485 - DNA, 439 bp, Homo sapien
  misc_feature (1)...(439): n = A,T,C or G
tcgagttttttttttagtgtaataaatcctaagagggaactgatttaagaaacaaggccgccaaacaaaggcagcagttccgactccagcagctgggaaaggaaggaaagtgaccccactttcactcctgcacagcccactggttaccaaaaccaccgtgcaagtcgggatgacagcagggacttctggccaggtgggaaaggtgcctggaagcgggatgcgccntgtgcgtctcttggccatgatgttcttgtgggcatgttattcttggtgctgcctggggtgttgctgagcggacaggctctccagctggagtccatggagaggccagaggtggcggccctgcctgggcctttcggagcctcctgcctgcaccctccacctcttctaaaccatgatgtggcacattttggtgttaataaaacaccacacacaagta

SEQ ID NO: 1486 - DNA, 253 bp, Homo sapien
  misc_feature (1)...(253): n = A,T,C or G
tcctccctgcaccagatcctaactctgacctttcaccttctctctctcctgaaggaactcttctgagtggacatgggcccaagncttacctaagcngagagggagggcaggggctgctactcttctctgtaaccttctctgatgggttgtcactttgcacgtctactcttccacttgggcactgccccaagctctctgccttacctgtgttatgggcacttaagcagaaatacagcggccattttaaccagca

SEQ ID NO: 1487 - DNA, 455 bp, Homo sapien
ttaatccaagtccatgaccattaactggagccttttcagccctccttctaacatcaggtctagtaatatgatttcactataattcaattacactattaacccttggcctactcaccaatatcctcacaatatatcaatgatgacgagacgtaattcgtgaaggaacctaccaaggccaccacactcctattgtacaaaaaggactacgatatggtataattctattcatcgtctcggaagtatttttctttgcaggattcttctgagcgttctatcattctagcctcgtaccaacacatgatctaggaggctgctgacctccaacaggaatttcaccactttaaccctctaagaagtcccacttactttaatacttccagtacttctaggcatcaggtggtttcaattacatgagctcatcatagccttatagaaggtaaacgaaaccacataat

SEQ ID NO: 1488 - DNA, 583 bp, Homo sapien
  misc_feature (1)...(583): n = A,T,C or G
gtctattcctggacagctagccatcgcgtagattatgacttagttgtgtatgcctagagtgaatccactgctctacaatggagagtcatggatgcagttttcagccttgctctcagcctttctttaagcaacaaagcacatacacgcatcgtccctttgcgttccagggactgatgatgtgtcactcagggaacctgtgaccacaggttaggcaagtctctgtcctgctgcttcctctgacctatgtacatagtcaggggagggccctgtcaacgtgcccacaaggttcctttatcctttgtcattacgtcattgtccaaggtgacaggaggaactcagtcgttaaaatgacgagccttattttcatgaaataaccaggctcactgaggtaaatggtgctgcctggggaaagagttatttattggnaacccctagcttccatcggccttccctctcgagcctgcctagcctgctttcgggaagggcagcctgcttgcctcccntggccatattgcccnggtccaatgtcccttcagntgatgggtcagttaaagcanaagctgccattgttaaaagccnagtt

SEQ ID NO: 1489 - DNA, 572 bp, Homo sapien
  misc_feature (1)...(572): n = A,T,C or G
caccacactcctattgtacaaaaaggactacgatatggtataattctattcatcgtctcggaagtatttttctttgcaggattcttctgagcgttctatcattctagcctcgtaccaacacatgatctaggaggctgctgacctccaacaggaatttcaccacttaaccctctagaagtcccactacttaatacttcagtacttctagcatcaggtgtttcaattacatgagctcatcatagccttatagaaggtaaacgaaaccacataaatcaagccctactaattaccattacactaggactttacttcaccatcctccaagcttcagaatactttgaaacatcattctccatttcagatgggtatctatggttctacattcttcatggctactggattccatggactccatggtaattattggatcaacattccttattggttgcctactacgacaactaaatttcacttcacatcaaacatcacttcggatttgaagccgcagcatgatctgacatttgtagacgagtttggacttttccnaacggctccatttattgatgggntct

SEQ ID NO: 1490 - DNA, 606 bp, Homo sapien
  misc_feature (1)...(606): n = A,T,C or G
ggcagatagacgtggacctactcaataaaatgaagaaggcaaatgaagatgagttgaagcgtttggatgaggagctggaagatgcagagaagaatctaggagagagcgaaattcgcnttgcaatgatggcaaaggccgagtacctctgccggataggtgacaaagagggagctctgacagcctttcgcaagacatatgacaaaactgtggccctgggtcaccgattggatattgtattctatctccttaggattggcttattttatatggataatgatctcatcacacgaaacacagaaaaggccaaaagcttaatagaagaaggaggagactgggacaggagaaacccgccttaaaagtgtatccagggtctttattgtgtggctattcgtgatttcaaacaggcagctgaactcttccttgacactgtttcaacatttacatcctatgactccatggattataaacattttgtgacttatactgtctatgtccagtatgattgccttagaaagaccagatctccagggaaaaggtcntttaaaggagcngagattcttggaagtgttgcncagtcttccagcagttcggcagtatcnggttttc

SEQ ID NO: 1491 - DNA, 442 bp, Homo sapien
taaaaatgaaatatgataacagatggagggattaattctacctaaggaaaaggcttcatagaagaaatgacctttaagaagaaacctggaaaattagtaaggacaaaggttgttcccggtggagggaacagtgtaaacaaacacctggaggctagagagggcacagcatggcagggaatttgagtagtcaaagtgctggagcattagtggcagaaatgaagcagaaaatagagattgggatctctatataaagcctggaatgccatgctgaggagtgtatactttaatctgcaagcaaggcatgtgtattacagattgaaacattaggatgatcatggtagttattaagagctattcactggaatattgctagttcttccacacttcctaagcctatattaggactacatacttctctgtatacctttggaggtgagtccaa

SEQ ID NO: 1492 - DNA, 577 bp, Homo sapien
  misc_feature (1)...(577): n = A,T,C or G
ggcacgagaagaaaatgaagagctctctgggttccaaaatgctgatgttgaatacatgatatatatgcacacatataggcacttgcatgttagcatgttcatgtctgtgactgtcttttgagttatataggagtggcagagattgtgtcactttaacttgttgtcgacttagcctgaaaaccttactagttcagaatcatactcctgactgtcttctggagcaacagggaactgcatggccaacttaaagtacttgttataaatgaaccagaaatctgattttaaaatacatttttcattttaattgtttttgcattttgttttgttaatccttaaaggatggattgtgcttttaagaatgtaagtgttatgtatttgtcatgaatcaacaaaacagcttttaaaaaagactaattggaacaagtgggtggcactggcttaatgctgttaatgtttctaaacgattttacatttagattatatatccggattcntattgagatacctcccaagcactggttttatagaagatcnggcctcccataaanaatttgtantttacatggggccggttatg

SEQ ID NO: 1493 - DNA, 539 bp, Homo sapien
  misc_feature (1)...(539): n = A,T,C or G
cgcacgattgagagagagcacgagtgagcatgcagtcagggaagacaaaaacacagcaggaccataccataaaacataagggtaacattgcgacaaaggatctgaagagcataaagtgatatgtgagagagaacacaggtaaagaaaacagcaagagcagagacttggagacagaaaaaggcttgacttgtatgaaggagagaaaagagtccagtgtgtctgaagggtagtgatatagactagaggaagaaaagtaggagaaatcaattattattacttattaccacccgtgcacagtatttagtaccggggcaaaccttgttctaagcagttagttcatccagtattaactcattttagatcctccaccagcatcccctatgatattactccccatttttgcagatgaagaaacgcngtaccagaaaggtttaagtgacctgccccaggtcccacagcgatcacagagcacagccagttccccacaccccccnagcagtctggctccagtttgtgctctcagccttttgcnatattgt

SEQ ID NO: 1494 - DNA, 577 bp, Homo sapien
  misc_feature (1)...(577): n = A,T,C or G
atatatccatagcaaagggtccagtcagctcacccttcatacctctttattgaccttttttgtagacatacatacggtaccaaagtcgaccacaaaggatgcttggtttcatttttccaccttaaacatccactcacctgaagcaatgaaagaataaggccagaagagtaaagacatggatgttgtgccatattttctttttacagatagtataagtggggaagactaggtaatagcctcaaagtagagaagacatcaagcaaaggcaactgagaaaatgtctgtgtggcattgtggctatggttgaccatctcattcagggtgcttctaaaacagccctcccatctgtctaccaggagttagcctatccttgttgatgaacatagggtgctcatcagtatagtaactaggaatggggaacagttctcccaacagtttgtaaggtgatgttctgtcgctctgaaggctttgatcatgctcccaacaggtttgggtcagtcttgttttgaaatgnatgactaatgggtgacgcccctctgtcgtgngccttgcnacggnggccctggatgtacnccgg

SEQ ID NO: 1495 - DNA, 224 bp, Homo sapien
  misc_feature (1)...(224): n = A,T,C or G
tagagagctatttaatggccggctggaaatgctgggctgacggtgcagtctgggtgctcgtccacttgtcccactatctgggtgtatgatcttgagcaagttccttctggtgtctgctttctccattgtaaaccacaaggctgttgcatgggctaatgaagatcatatacgtgaaaattctttgaaaacatataaagcactatacagattcgaaactcaaaana

SEQ ID NO: 1496 - DNA, 623 bp, Homo sapien
  misc_feature (1)...(623): n = A,T,C or G
tggatttcccacaatgtcttatctagtcaactcaagtatctggactacaattttcttgaaagcaaagcccatatattaataatctttacttgtatataaatattcaataaatcattaagtaaatgtgtagaagaattttatgctcaataagatccacccgatcatgcatttgaaaatttatgggtaaaaatggtagttacgggcagaaaacaaggaaaaccatagctcaatttagttcttcattctgccaaaatttgntgtctgtaattcatccttaatacataacccatttattgccttctggaagaaactggcgcttgctggcactgtgagagcagtgaatccagtaagcttctgccacaggncaaaatgggactccctgacctgaagaacacctctccaatgaataatttaaatctttaacagcctttctgagaaattcattctacttccctcttcnaggatcnacctagaactcctcttgctccacttcctcacttcngttggcaatgatgtcaggcttcctctactagaactttggtttcctcctagaatacctctctgaacagacttgngtcggggttgggatcncagaggggcaattgcagctctgccggctggga

SEQ ID NO: 1497 - DNA, 538 bp, Homo sapien
  misc_feature (1)...(538): n = A,T,C or G
ggcacgagaccaggtcctgcttgccaagacagaagctagaacctggaaaaacttggggaccagactcttcctacctctttcctgggcatacttactctgtctcagaagacagatctctgggcctctcgcaggagtctcagctgcactcaggccagttctggagaaggcccaagagtctggaaggagcagancagccttgagccaggagtactgtatatagaaggacctgcttatccaagagctggagaaagttggtgttttgtgtcttgttcaaagctgcccatcaccatccgattgacgctaggaccttgagtggtatcagaggccagaagccacacacttgccttccacatctgtccctccactctgcaacaggctgaaggatgtgtgtctctgcacacactgaaggatgtgtctttgtagtttgtgctgtaaataattgcttttggggcccagggtcatagctcagttggtaaagtgtgtgttggtaacctgagctctctacaccgaaccacaagctacatttaattacnaatta

SEQ ID NO: 1498 - DNA, 598 bp, Homo sapien
  misc_feature (1)...(598): n = A,T,C or G
caattttggttacctcaatgagggagtggaggaggatacagtgctactaccaactagtggataaaggccagggatgctgctcaacctcctaccatgtacaggacgtctccccattacaactacccaatcccgaagtgtcaactgtgtcaggactaagaaaccctggttttgagtagaaaagggcctggaaagaggggagccaacaaatctgtctgcttcctcacattagtcattggcaaataagcattctgtctctttggctgctgctcagcacagagagccagaactctatcgggcaccaggataacatctctcagtgaacagagttgacaaggcctatgggaaatgcctgatgggattatcttcagcttgtttgagcttctaaagtttctttcccttcattctaccctgcaagccaagttctgtaagagaaaatgcctgagttctagctcaggttttcttactctgaatttagatctccagacncttcctgggcacnattcaatttaggcacaacatataccttccatgaagcacacacagactttttaaagcnaggacaatgactgcttgaatttangcctttnggaatnaagct

SEQ ID NO: 1499 - DNA, 489 bp, Homo sapien
  misc_feature (1)...(489): n = A,T,C or G
gtacatcaacaaagacagtaagcatgaagagctaatgctaggagatccttgccttaaagatctgaaaaaaggagacatcatacaactgcagaggagagggttcttcatatgcgaccagccatacgaacctgtcagcccatatagttgcagagaagctccatgcatcctgatatacatacctgatgggcacacaaaggaaatgccaacatccggatcaaaggaaaagaccaaagtggaaatctcaaaaaaggagacaagctctgctcctaaagaaagaccagcacctgctgtgagttctacttgtgctacagctgaggattcctccgtcctctacagcagagtggcggtgcagggggatgtggttcgtgaattganagccaagaaagcgccaaaggaagatatagacgcagctgtgaagcagcttttgactttgaagctgnatatagagagaaactgggcaggagtataaacctgggaanccntctgctg

SEQ ID NO: 1500 - DNA, 540 bp, Homo sapien
  misc_feature (1)...(540): n = A,T,C or G
gcttcaagacccaatctggtctgtttcttaggcccctgcccttctcctgctccacctgatgacaggccactgccttggcttttggaagagtctttcccttggccatcattttgtttctgaggcttgttctgcttttcagatttattttctttttctttctnctttttatctttgtcttctgccccagtagcagacacaggcttatactcgattcctgtcagcgacttgtactgtgccttcagctgaagaagttcttgtaccgccgaatccactttgatccttaanaggcctttttcagctttanngtttttcgaactacttcnccttgacaagccactctgtcaaatagcacttttggcttctgggttttctccgctccagcaggctngagcattactngacagggttttgaatgtgagttctgcgatgctgggggcttggccaggtacataagtcttcccagtctttttctttanactcagcnttcaggggacagcaaacattccacagcttcagttacttaggccttaaggagccttt

SEQ ID NO: 1501 - DNA, 582 bp, Homo sapien
  misc_feature (1)...(582): n = A,T,C or G
tcctgcatctctttgactctctgaagcccccatcccaggttgagttgatcttctacatcttgtctttctgcaagagcgcaacagttccctttgcatctgtcagtcttatcccatactgcctagcccaggatcctgggacagacacacaagaagtctttgtaaggcatgcagagtctttggtatttaaagtcaaccgccatgcaaaggactaggaacaactaaagcctctgaaacccattgtgaggccagaggtgttgacatcggccctggtaagcctgtctttctttgctatcttaaccaaaaggtgaatttttacaaagcttacagggctgtttgaggaaagtgtgaatgctggaaactgagtcattctggatggttccctgaagattcgcttaccagcctcctgtcggatacagaagagcaagcccaggctagagatccaactgagaatgctcttgcggtgcagaatcttccggctgggaaaaaggaaagagcaccatgcatttgccaggaagagaagaagatnaggagaagganagtgtttatgtatcgagcaaaccagatgcaatctatgtctaccgg

SEQ ID NO: 1502 - DNA, 495 bp, Homo sapien
  misc_feature (1)...(495): n = A,T,C or G
ttttttttttttttttttttttttttttttaaataaaatgttgctttaataaaatactgcacatgtagttttcttatcaaagatattagaaacaaagtgcttggtgtgggtgaaaatatatgcatcatttgtagcaaaaaacaaagaatttttaataaatagctttaccatttttttctttttgaagaagtactctgcaaatcagccgaggcaggaggacagtcaccaaggggctgccttttcttctaagaatgagagcncttggatggcttgggctagggaaaggagtcatatttctgccccaggaatcaaaaataacatcggagtgacctttggagagaagaatcctgggtctccttgccattttgcccaagatctcagngtttaacttaaccctacaaaagcaccaacaaacagttgcctaccagacacagcagggtccagcagcagggccagggaacaagtggagaantccggggaatgcngacataggct

SEQ ID NO: 1503 - DNA, 336 bp, Homo sapien
tcatcccaacactccagagacccggagacgaagatcgggcgtttagaccaggctgggctaaatgagacgctgtataaaaactaaaatgtaaagaaaaagtaaagaaggcagcagacacactgtggacaagcttattgttgccagtgcctccaaccgcctgatgcagcagttcagactcattgaagagaaacgttgtgggctactgagcaggtgcaggctcttgccaccaatcctgaggggcctgagttcgatctcggagacaagtaggaccaccacagacaaagatgagtaaagcaaagtaattgaaaaataaaagctgtgcaaatgctgaagcca

SEQ ID NO: 1504 - DNA, 316 bp, Homo sapien
ggcttcagcatttgcacagcttttatttttcattactttgctttactcatctttgtctgtggtggtcctacttgtctccgagatcgaactcaggcccctcaggattggtggcaagagcctgcacctgctcagtagcccacaacgtttctcttcaatgagtctgaactgctgcatcaggcggttggaggcactggcaacaataagcttgtccacagtgtgtctgctgccttctttactttttctttacattttagtttttatacagcgtctcatttagcccagcctggtctaaacgcccgatcttcgtctccgggtc

SEQ ID NO: 1505 - DNA, 392 bp, Homo sapien
  misc_feature (1)...(392): n = A,T,C or G
ttttttttttttttcgttacaagatttattcacaccaacaaaaaaaataatcacaacaaaatatatgctaattataaaactaaaagggtatagtgatatagactgttacagtttctcttttaattctgcttgtttcagtaaatttgcttgtttctacatacattttattcataaaagaataacaatcattaaaatgcagtggccgtttgcatttcttgtacaggaagaacagaagcaaagtgcagaagcttttggttacaacggtgtttgcatgaaacaacagactaagctaagagcccaaaatattacctctctttctctgacatacatatatccactgaactgagaaatgagcagttagnattcctgcttaaccctcactaacacttttt

SEQ ID NO: 1506 - DNA, 612 bp, Homo sapien
  misc_feature (1)...(612): n = A,T,C or G
aattccctattccctctatacaagancctttgctgaaacactttccacaaaggcagcagtgaattttcagaacattttacatttttccccctcagcaaaaaagataaatcacagtgtaaattatgttgttctgctgtcatctttggctggggttagacctagaagttggcgactagcaaaccatcatagagaaaaggtgccagtgcttctcaggcctttaagctacaaactcagcaaggaatgtttgcatttaatctctttaaggtaccaccgggggtngggtnggggtgggggttatgacagcattaacttccataaacttttatagaccanatgggaaanaatctaccaaattagctagtaatattacacagcaatacacactttttatactctacacaaaccaaaattcctgggtcttaatggcgagtagtaatttttgtttgagatctgtttagaggaatagagtgggacctaaagtcgagaaattccagtatttgcagtaggaagatgttggnctctggtgggcctantgtgatcgaggcntaggctggaaacctcttcactggctggcatgatggctagttgnccgaagtaacnagtcccgcngtc

SEQ ID NO: 1507 - DNA, 664 bp, Homo sapien
  misc_feature (1)...(664): n = A,T,C or G
tcttatgctgccaatctaaaaaatgtaatgaacatgcaaaaccggcagaagaaagaaggggaagaacagagcctgctggccgaagaagctgacagttcaaagccaggtccatccgctcctgatgttgctgcccagttgaaaagcagtttactagcagagataggactcacggaaagtgaagggcccccccttacatctttcaggcctcagtgcagtttcatgggcatggttatctcccatgacatgctgctgggacgctggcgcctgtctttagaactgttcggcagagtattcatggaagatgttggtgcaganctggatcgattttaactgaattgggtggttttgaggtaaaagaatcaaagttccgtagagagatggaaaaactgagaaaccagcaatcaagagatttatcactagaggtcgatcgcgatcgggatcttctcattcagcagactatgagacagcttaacaaccattttggccgaagatgtgctaccacgccaatggctgtgcacagagtcaaagtcacctttaaggatgaaccaggagaaggcagtggtgtagcagaagtttctatacagccattgcacagcgtttttatcaatgaaattgccaatctagatgntccaaatgccaacaangtctcatcaagttaatgcaa

SEQ ID NO: 1508 - DNA, 321 bp, Homo sapien
ttctaaaaaaaaccctttaatttcttccagttttaatttcttctgttgcacactgtttatcttaacaccacaccctccgcccgacaaaaaaactttttgcaatgatttccagttagcattggtccatgcctatcaacggaaaattgtgcagtctctgggataaacagctcgactttgtcaagggaaccgtgtatttttactagaagtcagattcacgtccggcctccaggcagaatgcaggaaatgccagacactggcgtctcaaaagcagctttcaaagttatccactcacacagccggcctctaagcaagtgctctcaa

SEQ ID NO: 1509 - DNA, 423 bp, Homo sapien
tttttttgcagagaaacactgctttaaagagtatgtagagagttacagagtttagggatgcagtagcgtgaacacttctgagtttacaagatttaacctcatggccccatcttaaatcttgcgggctgcaaacctggagtaaaatctgttcagggaagctcatatgctttcttacaagttcattgggtgatatgtctggagttttccctttttgcaactgacttggatttgtcggaatttcttcccagcacctacaggctgaactaaaccagtatccagtacatttctgggctgataaatggacatcattttgggaaggcatttgttgcttttttgcttgtttttgccttgcttttgttttggatatgcgtgcaactccttgtatgacgttgtctagacctgttgtaggaggaaaaaaagttc

SEQ ID NO: 1510 - DNA, 325 bp, Homo sapien
gttacccctgttcctaatcactacaaaatcccatcctgctgcctttccttccttgtttttacacacccacacccacacccacacacatgggggcagtacatgagatcattcacatgtgaaacacttaggatactcatatttgaggtttttatttaacttggccaatcaggaccagaaaaatgggctggaacttgggtctcattccaaatcagtgtttatcctgttatacaatggaactctgcaagtttctcttgattgttcttgctaagagagattctccactaaattcctattgcaaatattgctaatttctgtttgaaattaa

SEQ ID NO: 1511 - DNA, 140 bp, Homo sapien
agggaagagatgggaaaatggctgtccaggagttttcttctccaccctggcttatcaagaccccatccctatcacgtccccccttctaccacgtgaaaatggagctaacagagggagcaaaataaattaacattctgatg

SEQ ID NO: 1512 - DNA, 436 bp, Homo sapien
  misc_feature (1)...(436): n = A,T,C or G
tatgtaggtagtttttattagattgctataggagtaatagggaatttttagaggactagtttcaaaattacacacctgcagaagttttcattcttctacctactgtgaggtatggtattacaaactaagaagcattaatggagaataactaaagggtctcataactgagttgtatataatattgctatcttgctattgttaaagatagccctgattttaggatgtagctattttagagagtcaaaatggaaataacacattgtccacatagctactgtgaaagctgtaatacagagttatcctttattttgacacatttttaaaaaactgtgaatataactttgtaactaataagggatgttcacatgaagcagttcntaagccttctaacttcntaagggatctcttaaccagcataaatgggaactggtttcaa

SEQ ID NO: 1513 - DNA, 344 bp, Homo sapien
  misc_feature (1)...(344): n = A,T,C or G
taaagatttatttatttattatatgtaagtacactgtagctgtcttcagacactccagaagagggcatcagatctcattacgggtggttgtgagccaccatgtggttgctgggatttgaacttcggacctttggaagagcagtcgggtgttcttacccactgactgttcttccagaggtcctgagttcaattcccagcaactacatggtagctcacaaccatccataatgagatctgatgccttcttttggtgtgtctgaagaagaagggacagtgtactcacatatatnaaaataaaagtttaacaaaaaaaatctttaaaaaacccnaattttnaaaaaatt

SEQ ID NO: 1514 - DNA, 367 bp, Homo sapien
  misc_feature (1)...(367): n = A,T,C or G
ttgtgtattatcatgtagatataggcttactaggagggtgaatacgtaggcttgaattaatgctactgcaaattctagaattgtgagtagaagtaaaataataaatgtaatggtagctgttggtgggctaatatttattaatactagagtagctcctccgattaggtgtattaataagtgtcctgcagtaatgttagctgtaanccggactgctaatgccattggttgaataaataggctaattgtttcaataataataagtattggaattagtgaaattggagttccntgtggaaggaagtgggcaagtgagctttttagtttgtgtcggaagcctgtaattacggctccagcncatangtgggaa

SEQ ID NO: 1515 - DNA, 567 bp, Homo sapien
  misc_feature (1)...(567): n = A,T,C or G
tttaaatgttcaacatctttaatcatcagggaaatgcaaatcaaaacaaccctgagattctacctcacaccagtcagaatggctaagatgaaaaattcaggtgacagcagatgttggcaaggatgtggagaaagaggagcactcctccattgttggtgggattgcaagcttgtacaaccactctggaaatcagtctggcggttcctcagaaaattagacatagtactaccggatgatccagcaatacctctcctgggcatatatccagaagatgtcccaaccggtaagaaggacacatactccactatgttcatagcagccttatttataatagccagaatctggaaaggacccagatgcccctcaacagaggaatggatacagaaaatgtggtacatttacacaatgggagtactactcagctattaaaaaagnatgaatttatgaaattcctaggcaaatggatggacctggaggggcatcatcctgagtgagataaccccatcncaagggactctcccatatgtacccnctggtaagtggggtattagccngatacnttggggt

SEQ ID NO: 1516 - DNA, 373 bp, Homo sapien
acactgtctaaagcatttaatggtctttctttaacacagccaactcccccgggtttgaaacagtgttaaattctctcttgcttgtggcaaaagaagctgtcaagtccaacactgaaaaattggtaccatttcctggccagtaagcacagaacagaggggctaaatattttatggttttattcatttactgtgttctcatgctgtgtttttcttttctctgtctctccctcctgctcgtgtctgcccagggctgattgttgtgacattggccgtatgctggatgcccaaccagattcggaggatcatggctgcggcaaacccaagcacgactggacgaggtcctacttccgggcgtacatgatcctcctcccct

SEQ ID NO: 1517 - DNA, 182 bp, Homo sapien
tttgctctttagtttgaaaactttatttatttctttattttgatggaggagtagagtgggtcaagctaagagttgccttataaacctgttgttctcagcaaatgagtcagctgagataaaaacattagtttccttggcgtgtcagcatctctcccaaaggagggtattagttcatgggttgg

SEQ ID NO: 1518 - DNA, 561 bp, Homo sapien
  misc_feature (1)...(561): n = A,T,C or G
tttttttttttttaagggtcaaagtataatgtggcccaatgcaaacaaatttcttttaacacacaagactaatgtttagaagtcaagacactcagatgtttgctaaaaatgaaagcagcgatgagtaggaggctctgaaacctttccattcccactcatgccctagtgcaaggcttggaagcccacatgcggggcttcagaaccggcaggatggctacgtcgtcactggccactcctgcgtcaagttctagcagtctgagcaagccttggtggtgagtaacttagctgaaagttacttcattcacggaagtaataccaggcccaaccaggaccaccaaccagccccaaaatttctacaaagaaggtcttcatacttgggattcttctctccagggaggggttggttgagaacggtgggcttggatggtggcgctgaaggggnctcctgggaagagttgaagcctgcgctgggctcagtaatctggntggtcctcctcccaagaccaattttgcttattgtcatgggccttgttctttgggctgcagttccgggcancctca

SEQ ID NO: 1519 - DNA, 630 bp, Homo sapien
  misc_feature (1)...(630): n = A,T,C or G
ggaaatagctttacttttcaccacctccttgctgcacaatgactccttggaagactgtgtaccttctcaagtacttttataaagatagctacattttgaacattgcaattaggaagtaggtaacctctctttctctattcctaatgggtcttccactccttatactttcattcccctatctcttgggactgaagaaaaataagcaagattcattttttacttaattggtgcttctgataattctctcttggctaactctggctgcccgttgtgacaggcattgaaatccaggctctttaatgaagcaggtttataggttccctgaagccactttcccaggtgccacacacaacaccacacagttttctgatgtaggcaatatatgctcctgctgactaggactaatggacattttgaaagctacaatttttcaaatgggagcagtaatttattaaattagaatgaagatcttgtagaaatatgggaaaggnccagaggatcttacatacanttaatgcagaatggatcataataatagcaattgcaaggatggaatattgggttatataagcanccggttttaancccccttccnaaggggtggtanacataagccncgtctgactcagg

SEQ ID NO: 1520 - DNA, 199 bp, Homo sapien
  misc_feature (1)...(199): n = A,T,C or G
ttttttttctctctttctctctttaattttggtttctctcaagcttccaaatggtgctcagtgctccaaggaaaggaaggaaggaaggaaaaggnggggagaggnggggaaggggaggcagaggaggaacatctggaaaaaaagcagcctgacagtccagctgtttgcaaactcatagcacatcctccagttacatggc

SEQ ID NO: 1521 - DNA, 623 bp, Homo sapien
  misc_feature (1)...(623): n = A,T,C or G
tatgtattatcatgtagatataggcttactaggagggtgaatacgtaggcttgaattaatgctactgcaaattctagaattgtgagtagaagtaaaataataaatgtaatggtagctgttggtgggctaatatttattaatactagagtagctcctccgattaggtgtattaataagtgtcctgcagtaatgttagctgtaaccggactgctaatgccattggttgaataaataggctaattgtttcaataataataagtattggaattagtgaaattggagttccttgtggaaggaagtgggcaagtgagcnttttagtttgtgtcggaagccngtaattacggctccagctcatagtggaatggctatacttagatttaggatagttgggtagtaggtgtaaatgtatgtggtaaaaggccnaggagatttgttgatccnataaatatgattagggaaaccattattaggggtcnagttcntccctttggtgtgtggattagcnttatttgtttgataataagtttaacnagtcngtgttggaaagaatggagaccgttgnttgantaagcnttttgaggatgggaanagggnttaaggaaatntaatggatngccccncc

SEQ ID NO: 1522 - DNA, 560 bp, Homo sapien
  misc_feature (1)...(560): n = A,T,C or G
ggggttctggagtttcaaagtccaaggtcaaggtgctagccaggttgatttctcctgaggcctctctcctggacttgtagatggctgcctcctccctgtgtcttcacatggtctttcccctatactagtctgtgttctaatctcctcttataaggatactagtcatattggattaagacctacccaaatggcctcattttaacttagttacctctataaaggccttatctctaaatatggtgctgtcaattctgaggtgtacgcggggttaggacttcaaccctaggaattttgggaggatgctgttcaaccccctaacagcctcagtaaaagcttgtttcaatcatgggtacaggatgtgaggagcaaaaagaccatggcagtgcttgaacctctgcaaggttctaaacggaatgggttccggtccttttggttttttccacccaaggggactaatgccgacgtgaataacggcctgtccaagggtaaaaggatgccccnnntgagaaatgcccnaatgagctcatggaatntgnaaagtgctggaaaaaaagccgaag

SEQ ID NO: 1523 - DNA, 340 bp, Homo sapien
  misc_feature (1)...(340): n = A,T,C or G
ggcacgaggcaaatactcttgagagcacttgcttagaggccggctgtgtgagtggataactttgaaagctgcttttgagacgccagtgtctggaatttcctgcattctggcctggagncggaccgtgaatctgacttctagtaaaaatacacggttcccttgacaaagtcgagctgtttatcccagagactgcacaattttcccgttgataggcatggaccaatgctaactggaaatcattgcaaaaagtttttttgtcgggcggagggtgtggtgttaagataaacagtgtgcaacagaagaaattaaaactggaagaaattaaagggttttttttaga

SEQ ID NO: 1524 - DNA, 407 bp, Homo sapien
  misc_feature (1)...(407): n = A,T,C or G
tcctcctacaacaggtctagacaacgtcatacaaggagttgcacgcatatccaaaacaaaagcaaggcaaaaacaagcaaaaaagcaacaaatgccttccaaaatgatgtccatttatcagcccagaaatgtactggatactggtttagttcagcctgtaggtgctgggaagaaattccgacaaatccaagtcagttgcaaaaagggaaaactccagacatatcacccaatgaacttgtaagaaaagcatattgagcttcccctgaacagattttactccaggtttgcagccccgcaagattttaagatggggncatgangttaaatcctggtaaactcagaagtgttcacgctactgcatccctaaactctgtactccctacatactccttnaagcagtgtttctc

SEQ ID NO: 1525 - DNA, 334 bp, Homo sapien
ggcacgaggcagcatatatttaatttcaaacagaaattagcaatatttgcaataggaatttagtggagaatctctcttagcaagaacaatcaagagaaacttgcagagttccattgtataacaggataaacactgatttggaatgagacccaagttccagcccatttttctggtcctgattggccaagttaaataaaaacctcaaatatgagtatcctaagtgtttcacatgtgaatgatctcatgtactgcccccatgtgtgtgggtgtgggtgtgggtgtgtaaaaacaaggaaggaaaggcagcaggatgggattttgtagtgattaggaa

SEQ ID NO: 1526 - DNA, 595 bp, Homo sapien
  misc_feature (1)...(595): n = A,T,C or G
atttataaaggaaagatgtgtttatttctccttcacctactcaaaatatatattacctgatacagtggcattatagcatgaggatgaagtgaccttgggcattgcaaagcattaagctgtgaaactatccaccgctgttaggtttgtttctaggaatgtacaacatgcagaatggagtagcgtcacttgagctctgctctgngggcaggggcaaggctggccttcacttggctttgtgcttcctgtagatctccaggaactcctgcacatcttcagaggaccccatgacgactggtgccttctggtggatctcggtgggaacgatgtctaatatatctttgtcccccgtggtggcgagcccaccggccttctccatgacataagctatggggttgcactcatacagcagccgcagctttccacttgggcttttcctgttggcggggtataaaaagatcctccatataccagagtgcggtgaatatcagcaccatggacccacataccgggcancatangggctgaccatccggagggaactttttcctctggagatactcattgatggcanggtcaantccttgcataacctcat

SEQ ID NO: 1527 - DNA, 596 bp, Homo sapien
  misc_feature (1)...(596): n = A,T,C or G
aatgttatgtgcccttaccaccctgtcccagcaactggagaatgaaaatgctgtggatgttttccaggttgcaaaaatgatcaatcttatgaggcctggagtattcacagacattgaacaataccagttcatctataaagcaatgcttagcttggtcagcactaaagaaaatggaaatggtcccatgacagtagacaaaaatggtgctgttcttattgcagatgaatcagaccctgctgagagcatggagtccctagtgtgactggaatcctgaaagggcacttaatttgtaaacttctgaagactgagaacttttttgaggccttttttgccagactctaggttatacaataacccagttacttttttacactgataaaagttttgatatttattttttgccattttatgtcctaatggtatcctactgagcatttgcacctctggttcatttcacacagtgnaacgcaattttacctagtttgcactatatgatcagtggtactgcctatatcctatacaacagcaacctgatgtgacattccatgacgacatacatgcactttttttaggtcaatacagtgaaggcctggtat

SEQ ID NO: 1528 - DNA, 594 bp, Homo sapien
  misc_feature (1)...(594): n = A,T,C or G
aaacttattatgctctccaaaaggagctgtccattcagggaaaatcggtagcaggaggctgctcaacacaaggccaaccgcccttctagcgacgtgctgcctcttgctgccacagcaccacaccaacgcttcangctttggagtgcaagaagcaggcagattgcttttagaaattagggaaaagagtatttgagagctactcacctgtttttaaagcctccccatgaagcttccacatctctgtctttctcctgcactgtaaggccctggtcctggcccagaaagtcagagtcacagcctagacacactgaggatggcatccagagtgtcctggcctgtcatcctgtccatggcagaatgagtagttagtacatagggcctgtgtgccaccaggctaggatgtgatttgatggcgcactctccaatatggcagccagtaaccacagtggctgcttggatttaaattaattcaaattaaataaatttaaattccattcctcagtcacactagccacatttcaaatgctcaatagtaccgtggctaaggntacttactggacagatagacatcttcatcatacagaagttttnttg

SEQ ID NO: 1529 - DNA, 596 bp, Homo sapien
  misc_feature (1)...(596): n = A,T,C or G
cggtccgggtgctcatgtgcatcccctttctttgtcttcagtgtaggcccaggatgcagtgctctcatctcaacgaacctaatttagacttgcctcccagatgagcctagaggtaacctagtggtggtttgcctaagtatggcccacagaggctcctgtatgtcctaatacttgatccctagttggtggaattgtttaggacagattgggaggtgtgccttgttggaggaggtgtgtcactgggaatgggtttaaggtttcaaaagtccattccaggcccaatctcccccagccccccactctctgacgaaactttggaatcagatgtggactgtcaggtattgctccagagctgtacctgtcttcctgtcttcctgtctgccgtgcntcctgctgtgacgaccatggactcaccctctgaacttgttaagcacatttcctttataaatncctaagtcatggtgtctcctcgcagcaatagaaacataataagacactagctagtccgtctgtaattaatgccagaagtccttttcngggtaatccaagcctgtcaagntgacaatantaatcccacagtatggaaactattatag

SEQ ID NO: 1530 - DNA, 381 bp, Homo sapien
  misc_feature (1)...(381): n = A,T,C or G
actaaaagtctcatcacaaacattcccactggcaccttcaccaaaatcactaacaaccataaaagtaaaaaccccttgagaattaaaatgaacgaaaatctatttgcctcattcattaccccaacaataataggattcccaatcgttgtagccatcattatatttccttcaatcctattcccatcctcaaaacgcctaatcaacaacccgtctccattctttccaacactgactagttaaacttattatcaaacaaataatgctaatccacacaccaaaaggacgaacatggaaccctaataattgtttccctaatcatatttattggatcaacaaatctcctaggncttttancacatacatttacanctactacccaac

SEQ ID NO: 1531 - DNA, 414 bp, Homo sapien
  misc_feature (1)...(414): n = A,T,C or G
ggtattggcaatcactagatggtccatcctttcgtcacacttccaaattttgtctctgtaactccttccatgggtgttttgtttcctattctaagaaggggcaaagtgtccacactttggtcttcattcgcttgagtttaatgtgtttagcaaattgtatcttatatcttgggtatcctaagtatctgggctaatatccacttatcagtgagtacatattgtgagagttcctttgtgattgggttatctcactcaggatgatgccctccaggtccatccatttgcctaggaatttcataaattcattctttttaatagctgagtagtactccattgtgtaaaatgtaccacattttcnggaancaatnccccggttgaaggggaatcgggggncctttccagaatccnggccaa

SEQ ID NO: 1532 - DNA, 390 bp, Homo sapien
  misc_feature (1)...(390): n = A,T,C or G
aaaaacgtctccgaganggggaggaggatcatgtacgcccggaagtaggacctcgtccagtcgtgcttgggtttggccgcagcatgatcctccgaatctggttgggcatccagcatacggccaatgtcacaacaatcagccctggnagacacgagcaggagggagagacagagaaaagaaaaacacagcatgagaacacagtaaatgaataaaaccataaaatatttagcccctctgttctgtgcttactggccaggaaatggtaccaatttttcagtgttggacttgacagcttctttttgccacaagcaagagagaatttaacactgtttcaaacccgggggagttggctgtgttaaagaaagaccattaaatgctttagacagtgta

SEQ ID NO: 1533 - DNA, 178 bp, Homo sapien
  misc_feature (1)...(178): n = A,T,C or G
atacaaggattnagnaccngatnnttcaatnactgctnacantncnactaggaatgcaganncatngatnnatttngatgtgtataatcctgatntnnaggctggtgnnatnncnnnggntaacctgnntcagattcancgncatgatgatnacctngnaatgcntaaggcnatncgg

SEQ ID NO: 1534 - DNA, 198 bp, Homo sapien
ttctttgtgatagcaatgccaacccatgaactaataccctcctttgggagagatgctgacacgccaaggaaactaatgtttttatctcagctgactcatttgctgagaacaacaggtttataaggcaactcttagcttgacccactctactcctccatcaaaataaagaaataaataaagttttcaaactaaagagca

SEQ ID NO: 1535 - DNA, 479 bp, Homo sapien
  misc_feature (1)...(479): n = A,T,C or G
aactgaagatgtctccatgagcaggcccaagggtggcatatattctttccatcctccttacacatggtatgagatactttagaaatgtgttctagctgtgaacccaaggaaagaaacatttttttctgactttcagatcctctatacttaagatcagctaacacagtgccatattcaagttagtttcttttaataatatttaataaatgtatgttgcagcctcatagaaattataatatgtgatgtttcttttgaatcatattagtggattttgatatatcgcaaggatataattattgacttgggggttantatgaatttggtggcatggttggttggncaatataataaataatggttccaatttccncccatttgacaagtggaagttctcccagacctcantttcccggcctggcctcacagagtctcatgggttggggtccnaaagtggcccctccnaatcctnccatggttcc

SEQ ID NO: 1536 - DNA, 595 bp, Homo sapien
  misc_feature (1)...(595): n = A,T,C or G
ttagactgttcctttgatatggaggctgagctcacaccactggaatcagctatcaatgtgctggagatgattaaaacggaatttacactgacagaagcagtggtcgaatccagtagaaaactggtcaaggaagctgctgtcattatttgtatcaaaaacaaagaatttgaaaaggcttcaaaaattttgaaaaaacatatgtccaaggaccccacaactcagaagctgagaaatgatctcctgaatattattcgagaaaacgaacttggcccatcctgttatccagaacttttcatatgagaccttccagcagaagatgctgcgcttcctgggagagccacctggatgacgccgagccctacctcctcacgatggccaaaaaggctttgaaatctgagtccgctgcctcaagtacagggaaggaagataaacagccagcaccagggcctgtggaaaagccacccagagaacccgcaaggcagctacggaatcctccaaccaccattggnatgatgactctgaagcagctttcaagactctgtctnggtgcacaggattctgangcagcnttgcaaactngaccagangatctggt

SEQ ID NO: 1537 - DNA, 571 bp, Homo sapien
  misc_feature (1)...(571): n = A,T,C or G
aaaaggaagtctcggggctggaagaagacggagctgaaggctgccccacaaattaaactctacctttacacttctaccacagactattaagactgatgatcagtataagtatatactggtggacaccaccggtcctccctcttgtgttttggaaacggactttacctgtgtttcaagctaccttaatgtcactgctcttgaggtttctgcgctttgaaagggatttctgtgtttttaaagagaatagtttgtagtatccgcatagaagcagtccttgagctgtcctatagaagggtaatttgatacggaccttgtggctatatttttataatggtaatttttaaccgtctgagctgggtggtttgcctcaacaacataaacttcctaatgatcagcgctagatgattgaatagtaaatgccttaataatccaacnagtgcacttgaacatttnaaaccttaaggggagtnaattaaagaagttattaataatgttttnaaaatagccgcagatattacctaatnattgaataatgnataattaaanttccctccgctttgtaagatgggca

SEQ ID NO: 1538 - DNA, 591 bp, Homo sapien
  misc_feature (1)...(591): n = A,T,C or G
tttctttgtcttggctaactcaaagttgatttgatttagaagaatgaaacattttttctttttttctttttttgttctgtttctcttctgtaacacaaagagtactctgcctccctaggccataaataactccagggaccttggaatatgacatacgattatgaattgagtttcataactatcttaaatgactcattgtgactatcaggtttaatgaaatgctgcttctccattttttttcagaagtatacagtaggaaagatgccacaaaattactgagaggaatgtaatgataaactaacttgccaaaatattcttgtgaacaagaggccaaataaaaatggtgaaatgagttttcaaaaaagaatcaaacaacagaaggcaggcatatgtagtgatatagtatgatgatagaagaaggaggacaaaaagttccaagacctgtcaagtgaatataaacagagtccaagtgaaaaacaaaaaatttaacgcnagatatgcnatggtctgaaagaantcctaggactattgtgatctgggcccttgataagccccataaccatgggtactggagcngtgttgcctanggtt

SEQ ID NO: 1539 - DNA, 463 bp, Homo sapien
  misc_feature (1)...(463): n = A,T,C or G
gttccaatatacctcctccctctgcccccagtgtttcttctgatttttttttcccctttccctccctccctctccgcattcttcccttggttcagcacaggtaaaacggttcccctccctccctgccttcatggatcaccagctcacgtcatgttgccttctcttttctttgtgtgtgtgtttatttaagttatttttcttcctcctctcccttttctttttggccctccctccctccctcttctgccaatgtaactggaggatgtgctatgagtttgcaaacagctggactgtcaggctgctttttttccagatgttcctcctctgnctccccttnccctcctctcccctccttttccttccttccttcctttccttggagcactgagcancatttggaagcttgagagaaaccaaaattaaagagagaaagagagaaaaaaaaaaagaaaaaaaaaaaaaa

SEQ ID NO: 1540 - DNA, 505 bp, Homo sapien
  misc_feature (1)...(505): n = A,T,C or G
ttatttcaactaaaagtctcatcacaaacattcccactggcaccttcaccaaaatcactaacaaccataaaagtaaaaaccccttgagaattaaaatgaacgaaaatctatttgcctcattcattaccccaacaataataggattcccaatccgttgtagccatcattatatttccttcaatcctattcccatcctcaaaacgcctaatcaacaaccgtctccatnntttccaacactgactagttaaacttattatcaaacaaataatgctaatccacacaccaaaaggacgaacatgaaccctaataattgtttccctaatcatatttattggatcaacaaatctcctagggcttttaccacatacatttacacctactacccaactatcctaaatctaagtatagccattccactatgagctggagccgtaattacaggcttccgacacanactaaaaagctcacttggccacttccttccacanggactccaatttnacta

SEQ ID NO: 1541 - DNA, 156 bp, Homo sapien
ttttaatagcaagattgaatacttgtgtattttgaatagctacattttccctttggtcaaatgtcagtgtccttttccttgtgatatcttttggagttgctttgtttttcatatcaagttagaggatctctttatataataaaattacttaactga

SEQ ID NO: 1542 - DNA, 436 bp, Homo sapien
  misc_feature (1)...(436): n = A,T,C or G
tgtgaaggagccagaaaccttgagattatccccagtagcctcggcttgctctgtgacttgggagagaacaggtgaggaggacaggtgttaagttgtagtagcctcatctgcaccctagagttttctcagatggtgcagcctagggncagggatggaggagctgagacttcgattattctctgggttttttgccagatgatttgaggaggcgggtggaggatctgcatgtgtccttttcctaggttttgaattcctgatgctgtaaccacattattttatcttctattttgatgagtatgcagctttgcatttgcagtggctgtgtaaacactgaattttgttttgcttcttgaccatttatttttcctaccaggatagtaatgatgacactgaagatgtttcactgtttgatgccgaagangagacgactaataga

SEQ ID NO: 1543 - DNA, 425 bp, Homo sapien
  misc_feature (1)...(425): n = A,T,C or G
tccgcgcccaggctggagtttggtggcacaatctcggctcactgcaaacttcacctcctgggttcacgccattgtcctgcctcagcctcccaagtagctgggactacaggcgcctgccaccacgcccggctaattttttgtatttttagtagagatggggtttcaccatgttagccaggatgatctcaatctcctgacctcgtgatccacctgcctcggcctcccaaagtgctgggattacaggcatgagcatcgtgcccagcctgtttcttgttttttaatagcttttttgagatataattcacatatcatacaatttacttatttaaggtaaacaatctaatggtttttagtacattcacagatttgtacaaccatcactccaattttacaacttttcnttaccccagacagaatccttggta

SEQ ID NO: 1544 - DNA, 445 bp, Homo sapien
  misc_feature (1)...(445): n = A,T,C or G
aaaaagtcaagattcttacaattcttacaacagttcgaatgcaaccatctcagatgagaccatgcaaagcaactcttgtacacatacccttttctctccttcacctttgctgcttcatacggtgtgactgacaactggatggcttgtccttggtgggaaaatgccatttctttacaccaccacccaacagtttctacttttttgcaagtcaatttttaacaagttactttgcttttttcttttaaacattaggaggcacatggaactggagaatttagctgccccggttttattcagcgcctgcacagataagcacaaacagcagtctccccgctgcaggggcttggggctggtagacatgagctctactaagattcaatttcctttagatctttcaagttctggggttccagaagaataatgaggagccccaggtgaaatttng

SEQ ID NO: 1545 - DNA, 451 bp, Homo sapien
  misc_feature (1)...(451): n = A,T,C or G
tacagaggtcatgtactctgggtgttttaaaagaaacattttaaagaaacccacagattgtcattctctatcttgttttctcacgattctctgcaattcttccctgtactaaacacaacagagaaactggactgttttgtatagaatactgcttccagcaaataaaccatcacaagtgcttgggggtttgtatgtacacgatactctcagaggtaataatgcatgaacctattttatatgtaaaatatgtacagtattcatgtcaaccatctctttaaaagttagcctataaatattgttgtataatttctttggtcagaaacatttggactaagtcatgtcacctgggtcaggatttctttcagtgccatttagcaaactngtctttagtctatgcaaatagcaaagatttacagaatgcaactgaatgcagcttcactggtaaatttca

SEQ ID NO: 1546 - DNA, 259 bp, Homo sapien
  misc_feature (1)...(259): n = A,T,C or G
agaggtccctcaggtccaggtccgccttgggtccggcgatggccccgaggtcacgtaggcgccgccgnggcanagngcctcgangagggcggggaacagggaaccccccaccacgtcggccacggcgtccacgtggggcctccccgtggcggcctccagggcttttgggaggtttccggggctcctgggaangcagacgtccgcccccaaagccctcagggcctcgtgcttttncgggctcgcaagggcatcaaccggg

SEQ ID NO: 1547 - DNA, 362 bp, Homo sapien
  misc_feature (1)...(362): n = A,T,C or G
gttcttcctgctccctctgcttccgctgctgttgctcccgttgccgtcgagctgccttctgctcttttttccttgtagcctgccggncctccatttcttgagtcaatggccctgncacctggaagatttcacaaagatattataaaactacaaggaagcagaaagaacctatgaggatctctgatgccctccgctctgtagctccttttccagctcacccgagccttgttgtaatcataggcatcaagattcttctccaatgaacctccggaattcattaccgccgttgatttgtcagctgctacagtataaggtggccgaagcctaagagtccctaaggataaaaacccaaaaccaagtta

SEQ ID NO: 1548 - DNA, 320 bp, Homo sapien
taacttggttttgggtttttatccttagggactctagggctcggcacctttatactgtagcagctgacaaatcaacgcgtaatgaattccggagttcatggagaagaatcttgatgcctatgattacaacaaggctcgggtgagctggaaaaggagctacagagcggagggcatcagagatcctcataggttctttctgcttccttgtagttttataatatctttgtgaaatcttccaggtgccagggccattgactcaagaaatggaggcccggcaagctacaaggaaaaaagagcagaaggcagctcgacggcaacgg

SEQ ID NO: 1549 - DNA, 114 bp, Homo sapien
  misc_feature (1)...(114): n = A,T,C or G
ttgatatgtgtaagaagagcttgagcccagaacaggacattaagttcagtggccatgttagctgggtcgggaagacatnccatggaaatnaagatgcaaatgttccagttacat

SEQ ID NO: 1550 - DNA, 462 bp, Homo sapien
  misc_feature (1)...(462): n = A,T,C or G
tttttgtcttgaaagtatttattgtttaataattctttctcccctcagccccatccggccactctctctttctgcttttctgatcatcctaaaggctgaatacatcctcctcctgtgtggaggacacgaagcaatactaaaatcaatacactcgatcaggtcttcatcagataccacgtcactgtgggtagagtgctagttttcaacaaatgtggtgttcttagggctccacaaggtagtcctttctcaaggtcgctgggccactcatggagttgaaatgccgctgcccatctaagtacaacatggactctccatatgtttttgggaaaaccagtggcacttctttttccgacatgaacgtgaaatgaaagacattggtggttgtatgntgcttctcctgcagggagggccacttcactggtgtactctgacttgaatataattattctgagtaaagcatag

SEQ ID NO: 1551 - DNA, 337 bp, Homo sapien
  misc_feature (1)...(337): n = A,T,C or G
tgtagccatggttacaacataccaaatggcagttcttcttgcctttaacaacagtgaaactgtcagttataaagagcttcaggacagcactcagatgaatganaaggaactgncaaanacaatcaaatcattacttgatgtgaaaatgattaaccatgattcagaaaaggaagatattgatgcagaatcttcgttttcattaaatatgaactttagcagtannagancannatttnaaattactncatcaatgcagagagacacaccacaagaaatggngcagactagangtncagttgatgnggaccggnnaatgtatctccaagctgctntngtt

SEQ ID NO: 1552 - DNA, 441 bp, Homo sapien
  misc_feature (1)...(441): n = A,T,C or G
tcacaagttagatttaaggaaaagtggagtcaacaggaaaagattattggaaacaacatttacagtctaagaaaggagaaatagaaacttctgggcccttttaaggactagtctgccctgctgtacccaggatagcaatctatattcccagagctcctaggtttccctgcactgagcaactatatccatttcatatgaacattgtaaacattatacaacttctgtccaaaaaagttatacaaaattgagatatcatcacaatagccaatgccagcacaaatgaaacaactagcaaactattgtaaagcagtttttagatagtacataatactaggatataaactgtataagtaatacttgccaagcagagggcaataactaataagtgtgtgatacngggtaagggaaggttgaagaagtcngtggccaaattaaagattc

SEQ ID NO: 1553 - DNA, 323 bp, Homo sapien
cgcctcagcctcccaatgtttaaaagtttttagcacctcctccttctctttcttcctcctggctccagcacgtaagatgcgtctgcttccacttcaccttctgccacgattgaaagtttcctgaagcttcctcagccgtgcttcccatacagcctgtggaactgtgagccaattaaacctcttttcttataaattacccagtttcaggtatttatttatagcaatgcgagaatggactaatacagttgcttacatcagatcagagtagcaagataagtacagggacaactcataagccccagagcctgacatactcaagctgt

SEQ ID NO: 1554 - DNA, 354 bp, Homo sapien
  misc_feature (1)...(354): n = A,T,C or G
tactggaagtggaacttgagatagggcctaatttgttatacatattagccaacatgttgntttagtaagtctaatgaagcttccataggagtattgaaaggcagttttaccaggcctcaagctagacagatttggcaacctctgtatttgggttacagtcaacctatttggatacttggcaaaagattcttgctgtcagcatataaaatgtgcttgtcatttgtatcaattgacctttccccaaatcatgcagtattgagttatgacttgttaaatctattcccatgccagaatcttatcaatacataagaaatttaggaagattaggtgccaaaatacccagcacaatacttg

SEQ ID NO: 1555 - DNA, 425 bp, Homo sapien
  misc_feature (1)...(425): n = A,T,C or G
ttttaaacattctctgttagcaatcacttttaaaagactagaaaatcatttttggttttccaaaccacctccacccagtgagtcagttagtaaaagggctgggtctcaccgtttctcattgatggcatgaagcccaggaacccaagaggcagctgttgcaaatttatgggggaaaaaatacacgaaacaggaagggtgactgaagatacgcgcaacagnaattacaattttgcaaaaccggcttctaggtatggtaggatcatttaaatcccgtcagtgatgtggagaaagaacatggaggcatggctagtcctctgcacggacaggtaggtagccaaccaccagtgaggactgaaagacagtcctcactgaaaaaggactgaaagtttgcagtggccaaaattatctcttttacctattcagtg

SEQ ID NO: 1556 - DNA, 428 bp, Homo sapien
  misc_feature (1)...(428): n = A,T,C or G
gataattttggccactgcaaactttcagtccttttcagtgaggactgtctttcagtcctcactggtggttggctacctacctgtccgtgcagaggactagccatgcctccatgttctttctccacatcactgacggatttaaatgatcctaccatacctagaagccggttttgcaaaattgtattcgctgttgcgcgtatcttcagtcacccttcctgtttcgtgtattttttcccccataaatttgcaacagctgcctcttgggttcctgggcttcatgccatcaatgagaaacggtgagacccagcccttttactaactgactcactgggtggaggtggtttggaaaaccaaaaatgattttctagtcttttaaaagtgattgctaacagagaatgtttaaaaanaaaaaaaaaaaaaacctcgtg

SEQ ID NO: 1557 - DNA, 442 bp, Homo sapien
  misc_feature (1)...(442): n = A,T,C or G
ggcacgaggatagaagaagtcagagatgccatggaaaatgaaatgagaacccagcttcgccgacagagcntgcccacactgatcacttgcgagatgtccttagggtacaagaacaggaattgaagtctgaatttgagcagaacctgtctgagaaactctctgaacaagaattacaatttcgtcgtctcagtcaagagcaagttgacaactttactctggatataaatactgcctatgccagactcagaggaatcgaacaggctgttcagagccatgcagttgctgaagaggaagccanaaaaagccaccaactctggctttcagtggangcattaaaagtacagcatgaagacctcatctgcaagaaacacctacttatccccgctgggtagtgccgttgaaggccatcaagccactgntctgataatggattcccccagct

SEQ ID NO: 1558 - DNA, 448 bp, Homo sapien
  misc_feature (1)...(448): n = A,T,C or G
ccaagtccatgaccattaactggagccttttcagccctccttctaacatcaggtctagtaatatgatttcactataattcaattacactattaacccttggcctactcaccaatatcctcacaatatatcaatgatgacgagacgtaattcngtgaaggaacctaccaaggccaccacactcctattgtacaaaaaggactacgatatggtataattctattcatcgtctcggaagtatttttctttgcaggattcttctgagcgttctatcattctagcctcggtaccaacacatgatctaggaggctgctgacctccaacaggaatttcaccacttaaccctctagaagtcccactacttaatacttcagtacttctagcatcaggtgtttcaattacatgagctcatcatagccttatagaaggtaaacgaaaccacataaaatc

SEQ ID NO: 1559 - DNA, 348 bp, Homo sapien
  misc_feature (1)...(348): n = A,T,C or G
ttttttttttttttttttttttaagatcctcatcaataaatggagacgtataggaaaagtcagactacgtctacaaaatgtcagtatcatgctgcggcttcaaatccgaagtgatgttttgatgtgaagtgaaattttagttgtcgtagtaggcaaacaataaggaatgttgatccaataattacatggagtccatggaatccngtagccatgaagaatgtagaaccatagataccatctgaaatggagaatgatgtttcaaaagtattctgaagcttggaggatggtgaaagtaaagtccnagtataatgggaattagtagggcntgatttatgtggnttcgnttac

SEQ ID NO: 1560 - DNA, 359 bp, Homo sapien
  misc_feature (1)...(359): n = A,T,C or G
ccgcgcccaccgagaacnccggcacgccgtntgngcgaactngaangtnggtcgctgcggaagtagccgccagccaggtcaggcttggctgncgacggtcaaacccatcgcctgggngttggctgccgcatcacgcccagttcggtgcgctcgctgcccggcacgctgacgtccttcaccaggcccacccagttcaggctgtccaggttcaggttggcggcggtcttcgcgatcggccacagcggcttggcgacgtaggggcgctngcccaagcaggccttgctcttcggcggccacccacaggaacatctggctgcgtttcncgggtgcttgacggcttgctccgccattgccagcaa

SEQ ID NO: 1561 - DNA, 440 bp, Homo sapien
  misc_feature (1)...(440): n = A,T,C or G
ttttttttttttttttttttttttttttaagactcagcagaattcaaaatatgaaaatttattttgcataggaaacaataatcnctggtaaacatcattactgcatctaacaaaacaatgccttcaattaaagggggaaagtgagtttttaaacattagggttaatttagaagaaaatacagtatataataatctcaacatcatgtttagggnaaaaatgcnataatgngaaaaaagtcccnaagaactggacagaacctacctaacaacaccatttaccgngtatgttttcaatagacaaaacatattttgtaccaaattccaacagtgggtaattccatagttgtggccctttaaaaaatggcagcattgtacttgaatcagnaagcttactgggatttccncatcgaaagtngagattgcagctaatcccagtaccn

SEQ ID NO: 1562 - DNA, 367 bp, Homo sapien
gcatttctcatccaggatcacttcctcgttctttcttctttgctgggagcatcttagatttatatcattttctacaaagacaatatcctgaatggcagtcgcaggtttatttcaaagttggagtcttctcaggaagtaggggagactggattcccagctaatggaattttcactgtgatgtctgtgttctcagtgaattcttccagaaagccggagagactgtctcaacatcagtagagaactcagaattctgtttgtttgcggctggcgtgaagtccatgatctgctcagagtcagtgcttaaatcatcatctgtataatcctctagaggagcttttgtccctctgtatgatcccagttggtcaaa

SEQ ID NO: 1563 - DNA, 448 bp, Homo sapien
  misc_feature (1)...(448): n = A,T,C or G
agacacaccatttattttggaaagtcttctagaatttacatttgctatattctaaaaccaaaagttgtgtgtttctttgccaaaccttcaaccatataagaacaaacaaccaaaattttcccaggatcccagagccagaggtacaagaacaactttttgttgttgttgttgttttggtttctttgttttgtttttgagacaaggtctcactatgtagctctggctatccaggaattcactatgtaaaccaggctggccctgagctcacaaagatctgtttgcctctgcctcccaaattctgggattaaaagtgtgcgctaccatgcctggtcaaaggaaactcttgaatccaagggacaagagtttagtatcaactgggctcagagttcccctatgcaganccaactgctcttccaagaactggctcctgatgctgcctggatctcct

SEQ ID NO: 1564 - DNA, 398 bp, Homo sapien
  misc_feature (1)...(398): n = A,T,C or G
aactgtacatttgtaaataaatagggcttttgtccagttcataatgtatattaccggtagaaataccntaaacngaaaattgaccatggctaacacatcacacaaaactttttagtgaccagagtgatacaaaaactttgatgaaatctagatctgcaaaatttaacacaggagaattagctatggtagaagtaatagcaaccaaaggcaattcagaaggcagagctataattaataaaatatgacatgattaaatctatttaaattgaatattttcnttaaaatttcggtgaaaacnaaattganagganaattgggggccnctcccaatggngtaataaaggttgnttccangggattaaaactggccccaatgggggttttccggtccccgaccc

SEQ ID NO: 1565 - DNA, 123 bp, Homo sapien
gtgaaattccagttttgaccggccagggttttggagacagtattaaatcttaagaacagagactatggatagtgccaggctgtgcacttacccttttgctttccacctgcatgttttacgctg

SEQ ID NO: 1566 - DNA, 146 bp, Homo sapien
caatatgacagtgaaaattttacatagcccatattgaacttacatactcaaataaggcttcaccaataataaaggagattaatacattgctagagttcggcggcatttgactttatgtcaaaagagttaatttagccccaaggatt

SEQ ID NO: 1567 - DNA, 439 bp, Homo sapien
  misc_feature (1)...(439): n = A,T,C or G
tttttttcacatttaattgaacaaatatttattaagcacctactttgtgccagacattgtgctaggcacctcactgtgtgctgttcccacagcacaatcatctgctcagaaattaaaaccaagaaaaggaacactgttgcaaccgtacaaactgggggggcggggggcagggggcagtagcgtggatgcaggcaactccgggccagaaaatgcacccaccagaagcttgttttccatctctcagaanggtttccactaaacagttgttttaaagcctctcgatgttgacagagaggaatgttgttctctctgtgccccccgggtnggttgtctggtggacattcaaatactctgaatgctatttgataaaaggagcctgatggtttggtgtaaagaatatcaatatttggattacaaaatgcgtgttttttcagttcaa

SEQ ID NO: 1568 - DNA, 430 bp, Homo sapien
tgtggtctgactgtggctttccccctgtcagaattagtttcaatcaataaagaactacagaattcaatcattgacctactaaactcagtctttgaccaactgggatcatacagagggacaaaagctcctctagaggattatacagatgatgatttaagcactgactctgagcagatcatggacttcacgccagccgcaaacaaacagaattctgagttctctactgatgttgagacagtctcctccggctttctggaagaattcactgagaacacagacatcacagtgaaaattccattagctgggaatccagtctcccctacttcctgagaagactccaactttgaaataaacctgcgactgccattcaggatattgtctttgtagaaaatgatataaatctaagatgctcccagcaaagaagaaagac

SEQ ID NO: 1569 - DNA, 387 bp, Homo sapien
  misc_feature (1)...(387): n = A,T,C or G
gggcaaggcnanccacaagctggacgcggacctggtcttcgtcggctacggcaccgtggcgccggaagaaggcggctggaacgacttcaagggcatgaacctgaagggcaaggtgctggtgatgatggtgaacgacccgctgccgaccgcgacggagccgaaccgcttcaacggcgagggcctgacctactacggccgctggacctataaattcgaggaaagcggcgcnccaagggcgccggctgccaatcccttgantccacaccgacaaagtcggcctcgtacggctggagcgttgtncagaacagctgggccaactccnagcgcttccagctcaccgaagcaaagtgggcacnggcctgcagggttggatgaccgatgacaccn

SEQ ID NO: 1570 - DNA, 385 bp, Homo sapien
  misc_feature (1)...(385): n = A,T,C or G
tggattttgagtnactgaaccaaaggaaaaagaagctctttgctaaattaaggtcttttataaatttagtaaatcagtttataatctttaaagccaaaggtttttttagacttgaaagaaagagccacttaaattcttgtttaaaaataccaatttgcctcctccttcctcacttcgttaggttatggtagtgctcagacatctgcagtgttgagaaggccagtcactgttggaagtcatccaagaagcccattttgagccttactcttaagttctctatgaagaactacattgatttgttggctttcagaatcttttaggaaataaatcctctccaggacaaaaatgaacatgaatggagtggcattttgttccaagtcagagg

SEQ ID NO: 1571 - DNA, 385 bp, Homo sapien
tggtgatcactgtcttctgtggtctgactgtggctttccccctgtcagaattagtttcaatcaataaagaactacagaattcaatcattgacctactaaactcagtctttgaccaactgggatcatacagagggacaaaagctcctctagaggattatacagatgatgatttaagcactgactctgagcagatcatggacttcacgccagccgcaaacaaacagaattctgagttctctactgatgttgagacagtctcctccggctttctggaagaattcactgagaacacagacatcacagtgaaaattccatttagctgggaatccagtctcccctacttcctgagaagactccaactttgaaataaacctggcgactgcca

SEQ ID NO: 1572 - DNA, 374 bp, Homo sapien
aagtgtagaaccctagggatacgccgacgggtgggtcatgaaagaagaaacttgagaaaggaggaaggagcagtcaaaacaaaatgtgaagagcatatattgagtattgacaaggagatctttgataattggggaaagcagtttctttgaagtggtggaagatggagcacagatacattcctagttcccaggcattccttttttattcatgacatttctgtatgttgacgcttctttcagtattataactccttttgagggacagtcctgtattgatttttgcatttaagaagaatttcaaacctaagatccagtgtggtggctcacgcctgtaaattaccagcacttttgggaggctgaggcgggtggatcac

SEQ ID NO: 1573 - DNA, 389 bp, Homo sapien
  misc_feature (1)...(389): n = A,T,C or G
agcactggctgaatggtaccttaacatggggaatcttcttaaagttttgacatgcacagaccttgagcaggggccaaattttttccttgattttgaaaatgcccagcctacagagtctgagaaggaaatttataatcaggtgaatgtagtattaaaagatgcagaaggcatcttggaggacttgcagtcatacagaggagctggccacgaaatacgagaggcaatccagcatccagcagatgagaaagttgcaaagaagaaggcatggggtgcagttgttccactaagtaggcaaattaaagaaattttacgaattttctcagaggttagaagcagcattaagaggtcttctgggagccttaacaagtaccccatattctcccaccccn

SEQ ID NO: 1574 - DNA, 364 bp, Homo sapien
gctggtgaccactagcgccatgggtaggggctagtgcagaactccctaggaggcaggcactcctgtgaggctttctctgggttcccctctgccaggagatccaggcagcatcaggagccagttcttggaagagcagttggctctgcataggggaactctgagccagttgatactaaactcttgtcccttggattcaagagtttcctttgaccaggcatggtagcgcacacttttaatcccagaatttgggaggcagaggcaaacagatctttgtgagctcagggccagcctggtttacataagtgaattcctggatagccagagctacatagttgagaccttgtctcaaaaacaaaacaaagaa

SEQ ID NO: 1575 - DNA, 382 bp, Homo sapien
atgaaactgcagtctgtttttgaaaatgagaatgtcctaagtgattcagaagagaggagggaagttgtgcactctgaaaatgcatgaaaaacaaaggcaaaaactagtgggaaatgtgtagaactagttaactgagacggcttcgagtcttccttctggaatctgttaaatttcacaaagtcatgagggtaaatggagaaaatatttctgggattacaatgaatgtaagcccaaattgtggaattgccaagtaacctggatggggaaaagcatttcccataagcactccatgtaatatgagtgctctgtgagatgttcatcagtgttttatagaaatggtgttgctgggaaaccaagtttgcacctggaaacttacaatgca

SEQ ID NO: 1576 - DNA, 172 bp, Homo sapien
  misc_feature (1)...(172): n = A,T,C or G
cntctttaaaccccgcntnggcaatccctgacncacctccgtgntgcccagngaanacagggcgacctngaagtccaacntactttntcaanatcatccaacnttnnggatnnattatccaaaatgctntcntttgttntgannagacaacntgggcgccnancngatncag

SEQ ID NO: 1577 - DNA, 390 bp, Homo sapien
  misc_feature (1)...(390): n = A,T,C or G
tatgaactccatggcccccatgagcccaatgaatgaactgccttccaggtcctacccactccggggcagccacagccttgatgacctcttggaccggccaaggcaatcccacagcgtcttcggaatactgggatagtcagtcccgctcgcgaccccgagccgtgtccccagccgtgcccccagccccgcacccccgcccttacccaggcagcatggcgcanangtggtgggcatgcattggggggcagccaccgacgtcaagaaacttatgtcctgggaacagaaccccccagagctctttccacggggtacaaatccctttgccaccgtgaangcttcgtcccacagtcaccaacgaccggtcagcacccctcatccgctgagggnaaa

SEQ ID NO: 1578 - DNA, 366 bp, Homo sapien
ctattcactaatcccctccaatccctctgccccttgcattattttgaagcaaatttaagacattatattgtttcatctgtaaatactaatgtctagggataaatttttaaagttgcataatatatgccacagggctaactggtgatggaattatttaagcaaaagtgactcttatataagtttccagagccagcaaaacataattacctcaaatataccatggccaaagtactaattgtatgaaaagatgtcactaagtcaataccctaaaacttaaagggagagacactcttttatacatttgtacatttatatataattctacccatctcgattatggcttctcagctccagtaatgaaaaggc

SEQ ID NO: 1579 - DNA, 368 bp, Homo sapien
attggagctaataacaactaaccacttaagtgccaactgatccacaacgtatcagacattgaattttataattctgatttaattctcacatcaacctggcaatatgggcagtgttatctttacagatgatgaaattgaggctcaatgaaattacaaaacttgtccaagcacaccactagaaagggaccataacagaaaatgtcagaattaggaattcaaaccactatggtccaactccaaaccccacgctccttctactctaccattccttcacacaaacatttctttatgtctagctgacagctaattaggtctcaaactggtagtttttcaaaagacactaaggctaatcaaactaccatttttag

SEQ ID NO: 1580 - DNA, 409 bp, Homo sapien
  misc_feature (1)...(409): n = A,T,C or G
ttttttgtctcatcagtctgcaactttattctttgtacagtttgggtgaagtaagagcaaaggctttcactcactcccaccctcattccaggaattttnngnaaaganctcccaagatttgcaaggattcccatggcacttgagcacaagctgcactacgtttgttttccaaaatgaagttagagacccggtaaaggatgaccttagaagtgactgggggtgaaaggcacctgncctggggantggggaaaggaaaggttcccccaccttgcccacaaggaaagcaagccganaagcttgaaaacttgaactggtttccatggcatgttctggtctggacatcagancttcctctgacttngctctgccccccaaactaagtttggctggtgactcataaagggctggn

SEQ ID NO: 1581 - DNA, 367 bp, Homo sapien
  misc_feature (1)...(367): n = A,T,C or G
tgctctactacggctgccggcgctcggatgaggactatctgtaccgcgagagctggcgcgcttccacaaggacggcgccctcacgcagcttaatgtggccttttcccgtgagcaggcccacaaggtctatgttcagcacctgctcaagagggacaaagagcacctgtggaagctgatccacgaaggtggtngcccacatctatgtctgcggggatgctcgaaatatggccaaagatgtgcagaacacattctatgacatcgtggccgaagtttgggcccatggagcacacctcttggtggttcctgccctgcctggacacagggaggcccagggactgactcctggcctgagtgatgccctcctggg

SEQ ID NO: 1582 - DNA, 394 bp, Homo sapien
  misc_feature (1)...(394): n = A,T,C or G
actaaacatttaaaatatatttctgaacaaaacgggcccctcgcnnantcatccgagcagagcagcccatgaagatgcagcactgatttccgtcccatagtcagggtgaaaaatgtacagcttgttcctgaaccacagacacaccttctctctgcagcctaacaggtcactgctagtatggtggctctagccgaaattatgtagttccttaaaataaaaaaaataaaataaaataaaaataaaaggaaagaaaagaaaaaaaatgtcctaagactcctaatcaatctgggaatgtagactctggagcacaaagtagcccagctcatctaaaaaactgaagagacccttccttccccaccccctcagtaggggcctgaaaggagaagaagtagtn

SEQ ID NO: 1583 - DNA, 374 bp, Homo sapien
agagttactataaagaaaccctaagtgtcccaacagtggagcacattattcaggaacttaaagatatattctcagaacagcacctcaaagctcttaaatgcttatctctggtaccctcagtcatgggacaactcaaattcaatacgtcggaggaacaccatgctgacatgtatagaagtgacttacccaatcctgacacgctgtcagctgagcttcattgttggagaatcaaatggaaacacagggggaaagatatagagcttccgtccaccatctatgaagccctccacctgcctgacatcaagttttttcctaatgtgtatgcattgctgaaggtcctgtgtattcttcctgtgatgaaggttgagaatgag

SEQ ID NO: 1584 - DNA, 286 bp, Homo sapien
  misc_feature (1)...(286): n = A,T,C or G
ccgataactagggctggccgaggccaggcccgcccgtgagtcccaagcgtgtgtgcgagaccagatagctctaggacgttcttctgtgtgcattgcttctgtaaatgcaggcgcagtttgtcgtgtttccaaaccaagttgtgccgtccactcactccttttcagaatagaaatctcctctcgcttctcttggccttgtgaggttgtggacaactggaagattctgactcaggaatccagaactaggtctancttcaacatttatgcagtcagggcagggatgttt

SEQ ID NO: 1585 - DNA, 365 bp, Homo sapien
taaaaggatttaggaagttcaacattttgggcacgcacacaaaagtgatgaacatggaggagtccaccaatggcagtctggcggctgaatttcggcacctgcaattgaaagaacagaaaaatgctggcaccagaacgaatgagggtcctctcatcgttactgaagagcttcactcccttagttttgaaacccaattgtgccagcctggtttggtaattgacctcgagacgacctctctgcccgttgtggtgatctccaacgtcagccagctcccgagcggtttgggcctccatcctttggtacaacatgctggtggcggaacccaggaatctgtccttcttcctgactccaccatgtgcacgatg

SEQ ID NO: 1586 - DNA, 383 bp, Homo sapien
  misc_feature (1)...(383): n = A,T,C or G
ttaaacccacacagagtaagggcagagctttagagatgcctggcacagcatttctcatccaggatcacttcctcgttctttcttctttgctgggagcatcttagatttatatcattttctacaaagacaatatcctgaatggcagtcgcaggtttatttcaaagttggagtcttctcaggaagtaggggagactggattcccagctaatggaattttcactgtgatgtctgtgttctcagtgaattcttccagaaagccggangagacctgtctcaacatcagtagagaactcagaattctgtttgtttgcggctggcgtgaagtccatgatctgctcagagtcagtgcttaaatcatcatctgtataatcctctagaggagc

SEQ ID NO: 1587 - DNA, 386 bp, Homo sapien
  misc_feature (1)...(386): n = A,T,C or G
caagttggagaattgttaccttgcaagatttgtggaagaacattctttccagtagcattaaaaaaacatggacccatttgccagaagactgcaactaaaaaacggaagacttttgattcaagcagacagagagctgaaggaactgatattccaacagtaaaacctctcaaaccgaggccagaaccaccaaagaaaccatctaattggagaaggaaacatgaagaattcattgctaccataagagcagctaaaggccttgatcaggccctcaaagagggttggcaaactttcctcctcntcctccaaccttctttatgatcctggatttataattcaatggtcccatattggtcagaggaagattccaatggaaaatgcagctggat

SEQ ID NO: 1588 - DNA, 385 bp, Homo sapien
  misc_feature (1)...(385): n = A,T,C or G
ccactttcaccagcagggaaaccgaagcctagccaggcttccggtccgtgcttccacctctctgccggttagaagacacctgtgcccagcatcatcagctggttcgttcggtccttcaagtacgtgtatnggccttcgctttgaggtcagcggacagaagaaactggaggtggatggtccctgtgtcatcatctctaatcaccagagcatcctggacatgatgggtctcatggaaatactccctaagcgctgtgtgcagatcgccaagcgtgantaantgttcacagggcctgtgggctccatcatgtaccttgggggtgtctacttcatcaaccgccagcaagccagaactgccatgtctgtgatggccgacctgggcgacctc

SEQ ID NO: 1589 - DNA, 403 bp, Homo sapien
  misc_feature (1)...(403): n = A,T,C or G
catttatagaaaaagaaccaaacacagcagtgatttgtgactgaggccgtcggacggtgcgggcggcaggctctgcctctggtgctgtgtgagccaggcttccttgagactgggagaccaagtttctcctcttcatgatggcctgatacaggcactgcttggtttctgaacatttgtcctgcacgatggggtgggccttgggtaatgtgttgtgcactcctaggtgccttgtggtcttgtgggccagcccaccttgctggatggccacatctggatgctggaggcacaggcttgaggtgggaagttacatagggtcctggatctaaaggcctgtgctagaaagggcttcctgtttccaggccccaangagagancaagccaacaagggaacnagatnaagtta

SEQ ID NO: 1590 - DNA, 228 bp, Homo sapien
  misc_feature (1)...(228): n = A,T,C or G
ttaccctatttntcttatttcaactaaaagtctcatcacaaacattcccactggcaccttcaccaaaatcactaacaaccataaaagtaaaaaccccttgagaattaaaatgaacgaaaatctatttgcctcattcattaccccaacaataataggattcccaatcgttgtagccatcattatatttccttcaatcctattcccatcctcaaaacgcctaatcaacaa

SEQ ID NO: 1591 - DNA, 411 bp, Homo sapien
ttatgtattatcatgtagatataggcttactaggagggtgaatacgtaggcttgaattaatgctactgcaaattctagaattgtgagtagaagtaaaataataaatgtaatggtagctgttggtgggctaatatttattaatactagagtagctcctccgattaggtgtattaataagtgtcctgcagtaatgttagctgtaaccggactgctaatgccattggttgaataaataggctaattgtttcaataataataagtattggaattagtgaaattggagttccttgtggaaggaagtgggcaagtgagctttttagtttgtgtcggaagcctgtaattacggctccagctcataagtggaatggctatacttagatttatggatagttgggtagtaggtgtaaatgt

SEQ ID NO: 1592 - DNA, 374 bp, Homo sapien
  misc_feature (1)...(374): n = A,T,C or G
tctctctccnnnnnntccgccccgtacattctgtgcaagagctgtgccaccaagccacccccagcccacaagccagtgtgaagtcacaggnantngaagcctgtggtgaccatcagacaatgaagaagaggctcttctcttaggattccagccctggtggcaacacttgattaggtaatggtgattttggagatcagtcttattattctcagtgagataactgattctcaccacagattgggcatcgggaaatagagtggatgggtactnncccactaatttatgtcctacttggttccccaagctcagtcgtgttgctcaggaccctcacatcccctgtacagcagctgcccttcccttgtttttataaaccn

SEQ ID NO: 1593 - DNA, 390 bp, Homo sapien
tttagttcaggccttattaataggaatacaaaaataattattttaagccttactgaagagaaatatactgacttatctagttagctgcattgtattttagagagtgaagatcttgatagccatatattttaggacagccatcacctaatgaagtagaaagtataaaagatactctcactgggaaaccagcatcagtttacaagatttctatttactgtgagaagctcagtcctagagtgtacaaagcttgaaccagaactgttgaggtagaaatggacagaatacttgaggaattattcactcactctttaaacttttgtctttaattggagattaaataaagaatgaataaaaacaggaaataagctactcagattttcttttttattg

SEQ ID NO: 1594 - DNA, 426 bp, Homo sapien
  misc_feature (1)...(426): n = A,T,C or G
aaacatatgataagaaggacttaacctgtctgttctctgaatctagaagcaatttgaacagaagagattatccccatttcgaatgaagaaactgttatttcgattacattaaatgtatctttcatgtccactaatttcattgaggtaattatttactaggcaaccattaataacccctcctgtatgaacaaatgcttatcctttagcttctgaaatctcttatatctagaccttgattgcaatttttaacaaacctccttctcttgagctttgagttgaggggagctgacatcataaagcatgaaataaaaatgtgggagaactaaaatgttttggaaacattnaactncacaaaaacgctttcttgggtgagtangcaggcanggaaggtctagtncggaaaaaaggttccaggaaaggangggt

SEQ ID NO: 1595 - DNA, 384 bp, Homo sapien
ataaccagaattgtctgttggctagcagctgtcacagataggcagggcacttgggatatgacctttctgtccaggtgattcacagactagacctttcttatcctcctcctagagttttgacttgggactctagtgttaagatgatgagcccgtgcatcaggtccttctgcactttggtggaagtctcccagggtaggtttcctatttgaaacagtggaatcatgtttccagtgataaagtttaatgacctcatcctttctttttttttttctcatctgccatttgtggtgtcttagatgggttttaattgcatgaatgtggctaatgtggttctcagaaattggtcagtatggcccaacatagcttctgctctgtcttactgac

SEQ ID NO: 1596 - DNA, 373 bp, Homo sapien
  misc_feature (1)...(373): n = A,T,C or G
gccagtgncttaaggaagaacttatacctgaaaaattagaaagggtagaaaatccattagaggaagccgttaagttccttatacctcttaagaaccttgttgctgataacattgacactcatctgttagcatttgaaatatattttagaaaaggaaagtttctgttaatgctgcagtctgtcaaacgagcttttgccattaacagtaataacccatggttacatgaatgtttaattagattttctaaatctgacattgtgagcaaagttctatctcaagaaatgcagaaaatatttgtcaaaaaggatttggaaagttttaatgaggattttctgaaacgtaacgctacctctcttcagcatctactttcagg

SEQ ID NO: 1597 - DNA, 415 bp, Homo sapien
  misc_feature (1)...(415): n = A,T,C or G
tttttttttttttttttttttttgtgtacaaaataatttattatagcattatctaggttggcattattttacagcgagtttttcccgtctcaataagtatgaatctaaatagattagggtgaaaagaaaatgtgtgtctaaataaaatctccctttttgaatgtatatttgtgttaataaagggaagcattaatattacagacatatttacaaggttctgaacatgagtgattccattactgttttctgtacaagatagaacaaaaagctatccacccgcccccaaaaaatacntgtttaacaacactatggttttaagagttaaactaatgagtttcaaatctcattttgccgagatattaaaatgcatttaatgggtcaatgcatggctataacaacaacatttcattttaat

SEQ ID NO: 1598 - DNA, 418 bp, Homo sapien
  misc_feature (1)...(418): n = A,T,C or G
tttttttttttttctccatagaactctttctatttatttaactgtgtatgagcatttagttaatgctccaaattgaaaatggtgcaataaaagcaactttcaatatataaacagacaggaagctgcgatgccagtgncacttggcgctgcaagtagggaaaataaagcagtttgcatgagtgaagcatggattggggagaggagaaaagggaggcacaggaggcagatttcagacagacagtgacacaaaactgttgtactgctggatgtttcgtttgaggatgtctgagcatgggccaagaacacgttcaaatctaggtcgggcccagcttaacgcactttcaaggggccacgaagcaacaacttgtggcagcacgaggacgattcntcagtagtggcaatttcaccaaaataattc

SEQ ID NO: 1599 - DNA, 470 bp, Homo sapien
tttaatttaaaaatactttattactaaaaaaaaaaaaagctactgctcatctgacccttcagagtcttaatctttttgttgctagaaggtcttccctcaaggttgatggctgctgctgaatgatcaggtggtggttactgaaggttgagttagttgtggttatttcttaaaataaaacaggaaagtttggtgcatccattgactcttccttttaccaaccatttctctgtagcatgtgatgctgtttgatagcatcttacccacagcagaacctttcaaaactagagtcgaacctttcaaattctgatgctgtctcatcaactaagtttagaaaatattctatttttgtgtgttgtcatttcaaaaatgttcacagcatcttcaccaggagtggattctatctcaagaaacctctttcttgggcctatccataagaagcaactcctcatttggtccaattttatcctgag

SEQ ID NO: 1600 - DNA, 374 bp, Homo sapien
gagaggtctgctactttattttgataatgcagggatattatttatctttgcagaatcaggtgactcccaacgttcccggaatcttctagtggtctgtgtcaggggtctgggctggctggggttcagtgatgtctactggaggcagcttccatgccttctggggtcctgagtctccatggcttgtggggtctgggtcccccctggattagtggatggccagagtggcatagacactgggctcagctggagaggccccttcctgggatggaggaggctcagttgccttctgtctgaagggtaaaagctgtgcagctgggcgtaggtcacatcctggggggcttcagatgcagcagcctcagtgtccatctgtctgt

SEQ ID NO: 1601 - DNA, 472 bp, Homo sapien
cttcttctttttttcctctttcagtttttcttgatgcagctccatgagggtttgaggttttttcacagattcttccccagttatctcatttataatacactcctcagagttaacaatctccttcccagcttctccagtacaataggaatacttgaaaaaagagtgacagcatttgtatccccatcggccttctttccagtacgatccccagatatgtgtgtgattgtggatcttcacatcctcctcatacttagagcaggcaacagccgctcctgtcctttgatgactgtcccatgtcttgagtactccacatagtcttcagtctggggctaaaagcaattcagctggaggggcatccaaatgttcttggccaccatacttttccaggatgctttctttctgctgttctttgaaatcttcttttttgactttgaaggacttatacaacagctctagctttgtaggatctggg

SEQ ID NO: 1602 - DNA, 470 bp, Homo sapien
  misc_feature (1)...(470): n = A,T,C or G
aatgtataaagaaaagagtttaattggctcatatttctgaaggcttaaatgaaaacatggtgctggcatctgatcaccctctagggaagcctcaggaaggttaaaatcatggtggaaggcaaagcgggtgtcggtatttcacatggtgagaatgagggcaagcgacagggaagtgctatgccttctnaaacagccagacctcaagagaagtcactattgccaggacagcaccaaggggatgacgctacatctttctcagtttgagaaatccacttccatgattcaatcacctcccaatgggccccacctccaatactggagattacaattccacagggatttcaagagaaggggtaaatatacaaggtatatcagtaagtaggaattattccggtggattccagaaactaggacaacgtctaaggccttggtcacattgagtttagttgtaaggctctctcccagtatgt

SEQ ID NO: 1603 - DNA, 407 bp, Homo sapien
  misc_feature (1)...(407): n = A,T,C or G
gcaagttaccaagacctgagcaggcaagcagtcatcccaagaagatggtacccactgtccagttgacagtcaatttggttttgaagggacagcaacaccctggcctgctggtaaacacactgctcaggccaagaggagcaccccaatacaggtgggcacctcaaggccccaaacatatgagcagccaagggacacctgagatacaagggcagagagaagctctggaagtaaggggtgggcaagggagccccagcccagggacacggggggtgggggacttgcaaggtcatgagtatccttgaacctagcagtcaaccaagggaaaggagagcaatgcttccctttctagaccaagggaagcccagttgtcctnccggcaagacaaggttggaaggttggcttatttc

SEQ ID NO: 1604 - DNA, 433 bp, Homo sapien
  misc_feature (1)...(433): n = A,T,C or G
aacctgggaggcggaagttgcaatgagccaagatcgtgccactgcactctagcctgggcaacagagtgagactccatctcaaaaaaaaaagaaaaggaaaaagaaaaagaaaagaaaagaaagaaagaaaaaacaattttacagatcccccttaagttcatccatgaaagtcaggttaagaactcgcacttgacagccccgtcatttggataaccagaacagcacatctagggggcaggaacattcttctttgggcttaagcagttgatgatcaaatatcaccgaaaacttcagaaggagtcctacactgagatttgctcagaaagttcctcaccactttcctgcacaccctttccagttcctggtctggaacaccaaattttaatccattaagcccgtattggatgccgggtacatataagatgtttgnttt

SEQ ID NO: 1605 - DNA, 455 bp, Homo sapien
  misc_feature (1)...(455): n = A,T,C or G
aaaccaatgaccaacagtagcttcactgggacaaagtactggcagcagggtagggcaattcttcacactgtgacactcttaacagtgacaatttctagccgggtacgtgtacatgtactatttcgaatttcaaaccacaactgaggttttaaaagaatgtgagttcttaaaaatggcatcctcatagaaatgttcttttagcgacntccaacctatgaacagcagaaacagatgtgaacagcagcacatcatgagagtaccatacaaaagcacaagtttaggcacttcatcaaaggaaacccgcttagaaatactgtaagatgaggtccactcctatgcaagactctgctggtccctcctcgccaactttatagttgttgggctatgcagaacgtgggccctcagtggaagcatccttctttcctcacacgatgaacaagcgcattncctcttct

SEQ ID NO: 1606 - DNA, 472 bp, Homo sapien
  misc_feature (1)...(472): n = A,T,C or G
gggatacagaaatagttttattttcttaatgcagcatggtagacatacaatcaattatttcctagagtgtgcaatataaattattcacattaaaaaattaacgacaaagcctgatatgcgggaaatattaaaaacatatacctaatttttacgtgttttgaccacggacattgctagctttataaatctgaataaatatgacatggcgcacagtggcttgagatggtctgagcatagcaggcttcttctatggctaaccctgttactaagtcgacctccatcccttggttaattgctagtttggccactctcattgcaacaggcccctganggtaagaaactctctcgccaggtcccagcggccttcctgtaggctngcatccccttcctggttctggttctaacacatgggctggatcaagcccacagcttttggcttcttgaccgtcaagaactccgggcagagaagatg

SEQ ID NO: 1607 - DNA, 319 bp, Homo sapien
  misc_feature (1)...(319): n = A,T,C or G
nttgacttaagccncngacctggtgacttccaanntgcactcctggntaactnctgntggnagtnntctgnttaaaaatctcagccggactgtgnacgtgcntgagtngcntgtganttctaatatcggaacagntcaaacgtcttagaccntnaanannaggngtntttnttgtagtgnttctnagcgtnttggtcggacttagaactggtacnttcaatttgagcttntnatantttgcgcctnntntaaagtacgcaaaaactnttaacaaggattttacgttcgcggcttgttagggtgattacgaattcggtga

SEQ ID NO: 1608 - DNA, 220 bp, Homo sapien
  misc_feature (1)...(220): n = A,T,C or G
gttgggctgatatatattttngggggggggtcaccttcccacctcacccatacaccaccagggtgaacaggaagaagtgaaggaaaggcagggccacagcaaagtttcataatcttgaatgcaaagagannnngnnnnnnnnnggggaggagaagannatncaaatcctataatacatacaacagggtgggatggtatagggatgggacagacatgaagc

SEQ ID NO: 1609 - DNA, 483 bp, Homo sapien
  misc_feature (1)...(483): n = A,T,C or G
tttttacttgacatttcttctgtaatttctttatttaaaaaagtaaatgtaacaagatacttaaaaaaggctagatacaaaagtagttaagctgctcacgaacatttaaaattttccaaaatgtatcttcaataatcatgatcttataaaacattttacagttatcagaaagtgcccaggctgagtttacataactgaaataccttagtacaaatgtctagttagaactgaagtgcagtaacctcttgagactgactgctcattgaaatagggatacaaagaaaaagttgattgtgataaaagtattgtgcattggccccatcatatgtacaaaaaaagtgccctcactcaaatgagcaaattacctggcaaaatnatttagntggtatccttttaatatcctagagctccatggcagtcaaaccgcaataaaagtgggtttttataggtaaaagtgatttcatcnccttaagatctgaatgg

SEQ ID NO: 1610 - DNA, 439 bp, Homo sapien
  misc_feature (1)...(439): n = A,T,C or G
acaaaaaaaataatcacaacaaaatatatgctaattataaaactaaaagggtatagtgatatagactgttacagtttctcttttaattctgcttgtttcagtaaatttgcttgtttctacatacattttattcataaaagaataacaatcattaaaatgcagtggccgtttgcatttcttgtacaggaagaacagaagcaaagtgcagaagcttttggttacaaccggtgtttgcatgaaacaacagactaagctaagagcccaaaatattacctctctttctctacatacatatatccacctgaacctgagaaatggagcagttagtattcctgcttaaccctcactaacacttttttcctggttttactaaatggccaaggttaagggacnggggtttttggccncctcctttaggttgnccctcngaagntgaact

SEQ ID NO: 1611 - DNA, 476 bp, Homo sapien
  misc_feature (1)...(476): n = A,T,C or G
cctcatcaataaatggagacgtataggaaaagtcagactacgtctacaaaatgtcagtatcatgctgcggcttcaaatccgaagtgatgttttgatgtgaagtgaaattttagttgtcgtagtaggcaaacaataaggaatgttgatccaataattacatggagtccatggaatccagtagccatgaagaatgtagaaccatagataccatctgaaatggagaatgatgtttcaaagtattctgaagcttggaggatggtgaagtaaagtcctagtataatggtaattagtagggcttgatttatgtggtttcgtttaccttctataaggctatgattgagctcatgtaattgaaacacctgatgctagaagtacctgaagtattaagtaagtggggacttctaagagggttaagtgggtggaaattccnggttgggagggtcagcagcctcctagatccatgtgttggtacgagg

SEQ ID NO: 1612 - DNA, 479 bp, Homo sapien
agtgttaatatagtttattatgtctttaaaaaaataaggccctctctccaagaagcttagtttgcaaggacaaatggcaggtgcacattgaaaaataattgtctctaaatctttttacttgcaaaggttcaggtgtaattaaaaaaaaaaaaaaaactatccttttaatgaataatttcctaaaaataaaatcgcaccttatagtcttcaatcaagttaaagttggattctacgtatgaagtggctctgcgaggtctatcgagtttctttctggaaatgtcatgagctaaaccaccagggaatattcagagcttcagagttttatcaattatgggcattataaatgttctcagtcatgggcacaaatgttttctctgcatcatccatgaaatacaaggtatccttggatgaccgtggggattgaagcccctcttccatcagggtcactttgcggtgtttaaaagtcccgtgatcccaag

SEQ ID NO: 1613 - DNA, 477 bp, Homo sapien
tattcccaaataattgagatagagacctatagatttattcaacaagctttaagcacaacaattgaacaaatagtcttaaccctctatgctatcttagccatttctcagcaacacatcctgggttgcttgcatttagtgtctcctcggcttgctatgttgtagctgtctgtgctcagagaactccaatggtgactcgttcccatgcccgacttcaaggtgatctccttctcctcctcctccttctttttgttccacacctgccttgtggccttcttctggacactcatctgccttgtggtgaacgtgttcccctgggtgggatcagaagtccagcattcctgttttctctgcatatacactggccattctgccttttattaaccattcagagataattgggggaacattccttacactggcataagtacagaatttcttcaaaatttcatgacaatgcacatgtccagactggaacta

SEQ ID NO: 1614 - DNA, 377 bp, Homo sapien
  misc_feature (1)...(377): n = A,T,C or G
gnttntngggggcggacgtctgccttccccggagccccggaaacctcccaaaggccctggaggcgccacggggaggcccacgtggacgccgtgncgacgtggtggggggttccctgttccccgccctcctcgaggccctgcgccccggggcnctaacgtgacctcgggggccatcgccggacccaaggcggacctggacctgagggacctctacctccgcaacctcacccttaggggctccggcttcgtccctcccgagatcctccgccgcctggtgcgctccgtggaagagggaaggctctcccccgttggttggccaggggtcttggccctttgggaaacggcttcccggaagcccnaggccgccttttttggaa

SEQ ID NO: 1615 - DNA, 412 bp, Homo sapien
  misc_feature (1)...(412): n = A,T,C or G
tcgtncancaaggcaccatcttggaaagagggaatgggaccctcaccagatacaaatgccagtgccctgatcttggacttcccagcctccagaactgtctccctattccttgggacacaactgtattgaaattagaccaactaatacttctacaaagacttctgagtgttgaagtgaaaggaagagttgcacgtctcttattttaaatcaaaagctagacatgatgaagcttagtgagaaaggtctgtagaaagataagatgggccaaaagctaggcctcttgcatcagctaactgtggtgtgaatgcaaaggaaaagcttttgaggaaaatgaaaattctactccagtgaacacacaaatgaccagaaagcataacagccttattgnctgaaaagaagaaagtttgagtgn

SEQ ID NO: 1616 - DNA, 394 bp, Homo sapien
  misc_feature (1)...(394): n = A,T,C or G
gacagacaggcagaagaggacagacagatggacactgaggctgctgcatctgaagccccccaggatgtgacctacgcccagctgcacagctttacatctcagacagaaggcaactgagcctcctccatcccaggaaggggcctctccagctgagccagtgtctatgccactctggccatccactaatccaggggggacccagaccccacaagccatggagactcaggaccccagaaggcatggaagctgcctccagtagacatcactgaaccccagccagcccagaccccttgacacagaccactagaagattcngggaacgttgggagtcacctgattcttgcaaagataaataatatccctgcattatcaaaataaagtagcagacctctca

SEQ ID NO: 1617 - DNA, 413 bp, Homo sapien
tcagtgccatggtatattgatccttcaaaaagacctactttaaaacaccagagaccacaaccagaaaaacaaaagcagttcagctcatctggagaatggtacaagaggggtgtaaaagagaattccataattactaagtaccgcaaaggagcatgtgaaaattgtggggccatgacacacaaaaagaaagactgctttgagagacctaggcgagttggagccaaatttacaggtactaatatagctccagatgaacatgtccagcctcaactgatgtttgactatgatgggaagagggatcggtggaatggctacaatccagaagaacacatgaaaattgttgaagagtatgccaaagttgatttggcaaaaccgaacattgaaagcccagaaactccaagaggaattagcct

SEQ ID NO: 1618 - DNA, 412 bp, Homo sapien
ttcagtcaacattcacgtcttgcagtgcatcggagaattcatactggagagaaaccttacaaatgcaaagaatgtggcaaggtcttcagtgaccgttcagcttttgcaaggcatcggagaattcatactggagagaagccttacaaatgcaaagaatgtggcaaggtcttcagtcaatgttcacgtcttacagtgcatcggagaattcatagtggagagaaaccttacaaatgcaatgaatgcggcaaggtctacagtcagtattcacatcttgtagggcatcgaagagttcatacctggagagaaaccatacaaatgtcatgaatgtggcaaagcttttaatcagggctccacactcaatagacatcagagaattcataccggagagaaaccttacaaatgcaatcaatgg

SEQ ID NO: 1619 - DNA, 427 bp, Homo sapien
  misc_feature (1)...(427): n = A,T,C or G
cagttggttgagaaatagccaccctccaacctgtctgccggagacactgggcttcccttgtctagaagggagcattgctctccttcccttggttgactgctaggttcaaggatactcatgaccttgcaagtcccccaccccccgtgtccctgggctggggctcccttgcccaccccttacttccagagcttctctctgcccttgtatctcaggtgtcccttggctgctcataatgtttggggccttgaaggtgcccaccctgtattggggtgctcctcnttgggccctgaagcagtgtgtttaccaagcaggccaagggtgtttgctggtcccttcaaaaccaaaattgactggtcaactggacaagtggggtaacaatctttcttggggatgactgcttgcctgctcaggtcttggtaacttgctn

SEQ ID NO: 1620 - DNA, 333 bp, Homo sapien
tgacacgtgtacgccaaaatatgttaccttcaattcaaagaccgtgtatgctttacccaccattgcatttgcatttgtttgccacccgtcagtcctgccaatttacagtgagcttaaagaccgatcacagaaaaaaatgcagatggtttcaaacatctcctttttcgccatgtttgttatgtacttcttgactgccatttttggctacttgacattctatgacaacggtgcagtccgacctccttcacaaatatcagagtaaagatgacattctcatcctgacagtgcggctggctgtcattgttgctgtgatcctcacagtgccggtgttat

SEQ ID NO: 1621 - DNA, 416 bp, Homo sapien
  misc_feature (1)...(416): n = A,T,C or G
tcaagtcagacaagccttgagaagcttcaacttgactgaagcgcgggtattgattgttcagtgagtgaagataactgtgccgtatgggcagtgctgtgttcagtgagtgaagataactgtgccgtatgagcagtgctgtgttcagtgagtgaagataactgtgtcgtatgagcagtgctgtgttcagtgagtgaagataactgtgccgtatgagcagtgctgtgcgcccaggatctggacagcaaactcgttattgcagagtgggcagattcacgacagtccggtccagaacttctcatcggttcctggggaatctttgtctccccgtctcctggagttgaagagggaatgcgcttgttcatccgtgtgaggaaagaaggatgcttccactgagggcccacgtttctgcatagccn

SEQ ID NO: 1622 - DNA, 237 bp, Homo sapien
  misc_feature (1)...(237): n = A,T,C or G
cggcccatcccacacctcagcttcatgtctgtcccatccctataccatcccaccctgttgtatgtattataggatttgtattttcttctcctccnctcctcttcctcctttctctttgcattcaagattatgaaactttgctgtgggccctgcctttccttcacttcttcctgttcaccctggtggtgtatgggtgaggtgggaaggtgaccccccccccaaatatatatcagccca

SEQ ID NO: 1623 - DNA, 427 bp, Homo sapien
  misc_feature (1)...(427): n = A,T,C or G
agacattccttgcngagtttatagcttaaaggcctaaggagcactagcaacatttggctatattggtttgctagtcaccaacttctgggtctaaccccagccaaagatgacagcagaacaacataatttacactgtgatttatctttttgctgagggggaaaaaatgtaaatgttctgaaaattcactgctgcctttgtggaaactgtttcagcaaaaggttcttgtatagagggaatagggaatttcaaaatanaaaaaattaaggtaatgttctgtgttttcattttaaccttttttttatggtgtttaattttgtggttggctgcaactgtgtatcatgtatatgggaacttgtaaaaaagttctcgacattcagatcttaaagagatggaatcgcttttacctataaaaaccaccttttattg

SEQ ID NO: 1624 - DNA, 148 bp, Homo sapien
  misc_feature (1)...(148): n = A,T,C or G
tctgttctgtggancaggaggcagttgttttccgtccggcttctcccacaccgaagtgcgcgcctccacctcatggaagactccgatggatatggacatgagtcctcttaggcctcagnactaccttttcggntgtnnacnnaaggcn

SEQ ID NO: 1625 - DNA, 412 bp, Homo sapien
  misc_feature (1)...(412): n = A,T,C or G
gtttatggagctgagtgttagtgactttggcatttctgtagctgagcacagcaggggaggggttaatgcagatggcaagtgcaccaaggagaaggcaggaatgctggagcctggaataanggaagagaggggactggagagtgtggggaataggaagaagaaatttccctttagactaaccgaatatattgnnggggaggaatagaggggaggtgtgcaggaaccagcaatgagaaggccagggaaaagaaagagctgaaaattgcaggaaagccggaagagttagaacctttttggatacagcagaagaaaccagccggctccacttaccgaccctgcccccccggttccgatgtccttccaagaattgaagtctttccctggtgatggtcccctgccctgtctttccggc

SEQ ID NO: 1626 - DNA, 428 bp, Homo sapien
  misc_feature (1)...(428): n = A,T,C or G
aacatcagagccacaagtttcacagccacaaggacaagctagtcctagaccctaagagtaaggaagatgataggtatctgaaattcccgaatttctcatgaattagagagttcatcttctgaggtcaactaaagaagaggcaaaaacacagttccttactttgcatttagtaaaaacaagaaaaagtgttagtgagggttaagcaggaatactaactgctcatttctcagttcagtggatatatgtatgtagagaaagagaggtaatattttgggctcttagcttagtcctgttgtttcatgcaaacaccgttgtaaccaaaaagctttctgcactttggcttctgttccttcctgttacaaggaaattgcaaacggccactgcatttttaatgattggttattcttttatgaattaaaatgtatgnt

SEQ ID NO: 1627 - DNA, 390 bp, Homo sapien
gggaaatagatttcaggtcttttattagactaacattttttgagaagtaaaattgacttcatatacaaagcctgtaattttaggcgaaatggaagcagaaatctaggaagttgtgcttgcttgtatgttgagtttggtctcagactaagtaatgcatcagaattcatctgtttgaagcctgaaataatttaggactctgattcactgaccaaaagtcagtgttgcagagatttctctaccccgtatggtattttgttagattgttcaacaggaagcacatgattgagaacatcttgggacagaccaaaaccactggacagatggcaaggctccggcgattcctgatttcccttctcaaatctgctcaactccaagagtcttgagaaactg

SEQ ID NO: 1628 - DNA, 351 bp, Homo sapien
caccacactcctattgtacaaaaaggactacgatatggtataattctattcatcgtctcggaagtatttttctttgcaggattcttctgagcgttctatcattctagcctcgtaccaacacatgatctaggaggctgctgacctccaacaggaatttcaccacttaaccctctagaagtcccactacttaatacttcagtacttctagcatcaggtgtttcaattacatgagctcatcatagccttatagaaggtaaaccgaaaccacataaatcaagccctactaattaccattatactaaggactttacttcaccatcctccaagctttcagaatactttgaaacatca

SEQ ID NO: 1629 - DNA, 396 bp, Homo sapien
tatttgacaagcagcaacatcatgtttgtcattttaatgtagatacaattattaggttatctgtcatattacaatatttaagtttttattttttgtcctttaagatacattaaaaaaaaaacacatcaactgcaaacgtgaggggagaaagcatggtacccaaccaaattccacatttcagcaatacttcactcattcttttaataaagttttaagaaacgtcataatgacatgagcttgaaatatctctaggcattttctctgacgctcatgacgtggcactggtgatgttgtaaacagcagaaaaacaggggctgccagacgaccaaagtatggaggcacaggcctgctttctcccacaggagctcaccaaatggggatggcaatgacctccca

SEQ ID NO: 1630 - DNA, 183 bp, Homo sapien
ttaaactcctgactgtgaaaaagagttaatcacagactcttttgcctgctcttggtactcttctcctcctactgaactgtatccaacttccatattaaatttttgctttatcttattatgttttattttgtattatttggttgttatctcttagaagccttttttttctaatagagacagaaa

SEQ ID NO: 1631 - DNA, 418 bp, Homo sapien
  misc_feature (1)...(418): n = A,T,C or G
ggcacgagcgnncnctacggganganananggcctcgtgcaggtcgtaggccacctccaggtccaggccgagctccgccgccaagggaaaggcggcatcgtagtccagctctgcgtntgaagggggtaaagccgaggcgcatccttcccatcctaccccttatagggctccaaggcctcggggaggtggtagaccacgagcttgcccacgtgccgcttctccaaaaatggcggcctgggntccaggagccgttccaagggcnagaccccggccaccacgggggagagccttccctcctccacggagcgcaccaggcggcggaggatctcgggagggaagaggccggagncccttaaggttgaaggttgcggaggtagaggtccctcaggtccaggtccgccttgggtccggcgatggg

SEQ ID NO: 1632 - DNA, 116 bp, Homo sapien
tcaatagcattaagagcgtgtttggggggctggtcaattacttcaaatccaaaccagtagagaccccacctgaacagaatggcaccctcacctcccagcccaacaacagattgaaa

SEQ ID NO: 1633 - DNA, 413 bp, Homo sapien
  misc_feature (1)...(413): n = A,T,C or G
ggcacgagaaaanattaaaaaaacaagggacctaacaaaactcagcagtgttactgtattttttaaaaatatttttatagactcattttcaggttattaaatgtaagagaaacagatacccctcttttttaaagtaggtaaatcattgatgatttatattaccaatttttagaagtaattttctagtaagcttgtggcatcagaaaatacctagaagatttttttagttaaattagttagaacatttatgaatgaatataataaatattttttcagaataaaatatggnccccttgnggtttacnaatagntaaangccagatataatttttttggttttaaggccnccaaatatgggccttggttaaaggacccnaaagttngaaatccaaggttgngccacctttttaagg

SEQ ID NO: 1634 - DNA, 361 bp, Homo sapien
aagtatagccattccactatgagctggagccgtaattacaggcttccgacacaaactaaaaagctcacttgcccacttccttccacaaggaactccaatttcactaattccaatacttattattattgaaacaattagcctatttattcaaccaatggcattagcagtccggcttacagctaacattactgcaggacacttattaatacacctaatcggaggagctactctagtattaataaatattagcccaccaacagctaccattacatttattattttacttctactcacaattctagaatttgcagtagcattaattcaagcctacgtattcaccctcctagtaagcctatatcta

SEQ ID NO: 1635 - DNA, 354 bp, Homo sapien
tatgtattatcatgtagatataggcttactaggagggtgaatacgtaggcttgaattaatgctactgcaaattctagaattgtgagtagaagtaaaataataaatgtaatggtagctgttggtgggctaatatttattaatactagagtagctcctccgattaggtgtattaataagtgtcctgcagtaatgttagctgtaaccggactgctaatgccattggttgaataaataggctaattgtttcaataataataagtattggaattagtgaaattggagttccttgtggaaggaagtgggcaagtgagctttttagtttgtgtcggaagcctgtaattacggctccagctc

SEQ ID NO: 1636 - DNA, 355 bp, Homo sapien
tactattcacgctgaactctgccatccagatgcagaaaatgcctttaaagtaagacttagcatcagagcagctcttggagataaagcatatgtctgggacacggatcaagaatacctcttcagagcaatgggtggcattctccatgagaaaagttcccaacagagaagcaacagaaatttcccatgtcctgctttgcaacataacccagaggtgtccgttctggtttgtggtcacggacccttccaacaattatactcttccctgcagctgaagtacagtcggccataagaaagaataggaaccggatcaacaagtgcattttttctggatgaccatactcctggaatttttaaa

SEQ ID NO: 1637 - DNA, 435 bp, Homo sapien
  misc_feature (1)...(435): n = A,T,C or G
ggtaggatgtgtacaaattgcaggcaacaacaaatagatctgcttgccctactaaagactaatatgcagaaactatacaagcaactgttggtgtgataacagaataaaattcccttgccatttttatccatctcttgtttaattttactcgatgcatcatatacagagtaatataaacagtattcaaaaagatccatttttaatgatttctatgccatgttatagccattctccagtgaaaatttttttcttaggtcttcaaaatntgaaatatagttacagccctgactttgatttctagaaattgctcaaatcagtaactacaaacacacactatacctacataatccagttatcaaaaagaaaattctagnatattttgagaagctancaccttatgatttcattgggtctttgggggatataattttgntg

SEQ ID NO: 1638 - DNA, 247 bp, Homo sapien
cagatgttgaaaataaaggtcagactttgactcacggaaaaagaaaaataacatgcacagatcggacagagagcatataaatatacaaaatatgtgtaagaaaaccaaggtccagagaggcgggccagcaacaaaggaaagactgatttcagaggctcaggccaggcctagtgcagctcgacgacgtttagtgcaatgttccgcggtctcttgcatacctggacgctactgtttctccaactcagtc

SEQ ID NO: 1639 - DNA, 223 bp, Homo sapien
gttggagaaacagtagcgtccaggtatgcaagagaccgcggaacattgcactaaacgtcgtcgagctgcactaggcctggcctgagcctctgaaatcagtctttcctttgttgctggcccgcctctctggaccttggttttcttacacatattttgtatatttatatgctctctgtccgatctgtgcatgttatttttctttttccgtgagtcaaagtctgac

SEQ ID NO: 1640 - DNA, 431 bp, Homo sapien
  misc_feature (1)...(431): n = A,T,C or G
ggtngcatttgtcgccggtgaagtgggtgccttgcgcgtgggttcgcttgcccatgacggcggcgcagtccgtgtcgggggctttgtcgatgttgaccagtggcagcagggcggccagcggggtgacgatggtggccagggcaggcggcgngcatttcagggccagcggcctttttgcgggcccacgtccggattcttgaacgtgcctttcgcgtacagggcgtgcgcagggtgatgatgcgggcncccttggtacgggggcnacgtcgaggtccagggtttcncttgccaggttgacgttgcccgtgacattcacgacggccgtgtccgtgttcgagcacgaagccggcgcacgtcggcctggccgtttcngtcacggaaaaatcgctggccaggcagttcanatggacttgcttgtcgccgaaaatttn

SEQ ID NO: 1641 - DNA, 388 bp, Homo sapien
gtaatacttccttgtcatgtcatactcccgaaagccacttacaggcaacatgcttctaatacactgggcagacataaaacacaagcactaaaagtaataaccacagcaaacaggctatcagaaactgcaaaacctgccagggcagctaccttacctttttaggtaaagcaggagtactatgattgcacctgcgacgatgactggaacaatgagtaacatggttatgtagagtgtggaattgcgcttcttacctggagaatgaaaagcaaacagaaagacttgagaaataaaacccttttagtaataaaccaagcagcaattctgttagctagtaagatcacaaatatttctgctccctcccccaacctattttcccaagctcttcaat

SEQ ID NO: 1642 - DNA, 383 bp, Homo sapien
agaagataagataattgaagagcttgggaaaataggttgggggagggagcagaaatatttgtgatcttactagctaacagaattgctgcttggtttattactaaaagggttttatttctcaagtctttctgtttgcttttcattctccaggtaagaagcgcaattccacactctacataaccatgttactcattgttccagtcatcgtcgcaggtgcaatcatagtactcctgctttacctaaaaaggtaaggtagctgccctggcaggtttttgcagtttctgatagcctgtttgctgtggttattacttttagtgcttgtgttttatgtctgcccagtgtattagaagcatgttgcctgtaagtggctttcgggagtatga

SEQ ID NO: 1643 - DNA, 434 bp, Homo sapien
  misc_feature (1)...(434): n = A,T,C or G
tttatccagtgctcacactttactgaacctgagancattgacactggagagaaaccttacaagtgtcaagaatgtaacaacgtcattaaaacttgctcagtccttactaaaaatagaatttatgccggagggaacattacagatgtgaagaatttggcaaagtatttaaccagtgctcccaccttactgaacatgagcatggtactgaggaaaaaccctgcaaatatgaagagtgcagcagtgtctttatctcttgctcaagcctttctaatcaacagatgattcttgctggagagaagctctccaaatgtgaaacatggtacaaaggttttaaccacagcccaaatccttccaaacaccagagaaatgagattggagggaaacctttcaaatgtgaggaatgtgacagcatcttcaagtggttctcagacctt

SEQ ID NO: 1644 - DNA, 453 bp, Homo sapien
  misc_feature (1)...(453): n = A,T,C or G
gggtccaagtccagctgccttcccaaggtctgctggtccattaggcccaggtcaagttgctttccccaggtcagctgcggggcacctgggctcttctccagcaggccctgtgggtatcaacccagctccttttgcaagancaaaggggaaccntgggcnttaacccagcttcctttccaaggatgaatggccctntaggtaagactttggtcccatttcctagggtaaggcagccctccctggctcaaatccaagcntgctttccccaggccaagggggtccaattggcttgcaatgtacccaaatggaatgttacccccttnaaataccatttttcttccaagggccaattttgttaatttaagcactgnggggttntgaactgggggctgtctcttagataaaaggagtagattntggaaagtaaagttttaaagaacatagctggggctc

SEQ ID NO: 1645 - DNA, 441 bp, Homo sapien
gaaggcaaaccatcccgcaaacggctacaccggattgagacggatgaggaggagagttgtgacaatgctcatggagatgcaaatcagcctgcccgtgacagccagcctagggtcctgccctcagaacaagagagcaccaagaagccctaccggatagaaagtgatgaggaagaggactttgaaaatgtaggcaaagtggggagcccattggactatagcttagtggacttaccttcaaccaatggacagagccctggcaaagccatttgagaacttgattggcaagcctacttgagaagtctcagacccccaaggacaaccagcacagccagtgcaagccttagcctccaatgggacaagttggtggggcaggaagcaggagcaccagaagaggaggaagatgagcttttgagagtgactgacctttgttgattatgtctt

SEQ ID NO: 1646 - DNA, 465 bp, Homo sapien
  misc_feature (1)...(465): n = A,T,C or G
tattggtgcatcctatttttaggttgctttcattattttattttttatacagatacatacacattgctagaatcaaagcaaaaatattaatgggcaggtactacagaactaaagtgaaacaaaacaaaacaacgaacaactgaaaaacaatagctataaactttcaaggccaaaagataagatttaagggcaatacctgttgaagaaggaaaaggagtataaagttcctagagaggtatttataatgcaaatctaatgccagctttttagtaataaaaaagagaagtgctttactatacactgacctagcacataatacttaatttggaaagaaaaattaatgacgttccttgggccagcagcagatatggtgtgtccattgccggcaacagacacaacaccgggaaccngaaaaacccaaatcccagggcctaaaggtattcncagaagtaatgggttgaaggg

SEQ ID NO: 1647 - DNA, 442 bp, Homo sapien
  misc_feature (1)...(442): n = A,T,C or G
acgccacatcccctattatagaagagctaataaatttccatgatcacacactantaattgttttcctaattagctccttagtcctctatatcatctcgctaatattaacaacaaaactaacacatacaagcacaatagatgcacaagaagttgaaaccatttgaactattctaccagctgtaatccttatcataattgctctcccctctctacgcattctatatataatagacgaaatcaacaaccccggtattaaccggttaaaaccataggggcaccaatggatactggaagctacggattatactggacttatggaggacctatggctttggattcatatattaatcccaaccaaacngaccttaaaaccttggtngaacttcngactggctagnagttgggttanccggggtcggttctggccaatagaactttcaat

SEQ ID NO: 1648 - DNA, 473 bp, Homo sapien
  misc_feature (1)...(473): n = A,T,C or G
ttctaagatcccttctttatccacatcacttcagccaacaatctgattggtatttccaagacaacagagcagtatttcaaactcatgaatgggattttaatgtgctgtatggaatttgaagcctcaaacttaaggaactttccacctggaaagcattcttaagtaacatcaatgaactgtcctccctaaaacctagacacagtatcactgtggaaacagagtaatagttctggaatcgattgaggattaggttagaagcgcccacaccaggaaaagcttccgggaaacggttttaggacagaatcaaggcacacctgtggaacctctttctgcatctgtcaaatgggggacgctgtgtctcctctcttccttaggagaggattaaatgagccagantgggctaagcacagtgcctggcatgagactacagtttcactgggtgctataccccctaacnggggtgacaggttcnt

SEQ ID NO: 1649 - DNA, 155 bp, Homo sapien
  misc_feature (1)...(155): n = A,T,C or G
gcatttaatattttctataaatatataatctatagctaaaagaaaataccatcttctaaaagcaaaacaagacagaacttcactgatctgtaactaaaggacggctttccatttcntgacaggagttgttgtgtagaatatcctcccatccttcc

SEQ ID NO: 1650 - DNA, 468 bp, Homo sapien
  misc_feature (1)...(468): n = A,T,C or G
ttttttttttttttttttatttgcaggacaagtacaactgaaccaacaaatttatttagttagtgctgataaagacagcagccttgagagacaagcagtaattacctggtctacttaatgatgccctttgttatattttacaggcaaaaagaatgattcctcagcagtcattgtgaaattttgtgggccacaagtattgtgcacacatngatccttgatttagagtcaacctgatgtccattatagctgtggaaaggcagcaggcagttgtgtcgctcttcacaataaggaacacatcttgctttcagcatgtgagaggaacaaaagcattgatgtaaatgtgcctcaaagtgagaactgaaaacctttaacataaaataanaaagtccaataagactaagttccttacaactaccnataaaaantggaatttttaccacctaaagccgccaatcnaaacatctgctg

SEQ ID NO: 1651 - DNA, 381 bp, Homo sapien
tgccacaataacaaaaaaagaattttcttatttacaactgtgaatagactcatttggtctatacgttactaacttgataagtttctttagggcctcacctttgaaaacgcatagtaaatacctggtgagaagggagggataaggaaaggacataaatctgaatagaaagtcattacataccagggactggctctgggacatactggagagctagtttcatttcacctctgttttctgcttcaagggcaactggtgctgtctgaaaagtgaagaaatgtcagcaggtgggagacaaacttttcatcctgtttgttggtataggtcccattacagaaccatatcctgtcccatttctgggaccatgtggtcactccatgagtg

SEQ ID NO: 1652 - DNA, 317 bp, Homo sapien
  misc_feature (1)...(317): n = A,T,C or G
agggaagaaaaggggtccccctagtcatagttcccctaagtcccttagcgtagaagtctcttaagcctggtgcctcgctcaggtggggggtcaggaaggaggtagtgagcacaagcccaactccagcaaggacagcagaaggtggtatgcttccccacccccacaccccggggacaggccccagaggcaggcttcttctccagcccgtgccttttataagctcagacatcaataaggttcacgacctcggttctgcctcttcactacaaacancctctgtcctgacacnagtcaccagcaagggttgtggttaccca

SEQ ID NO: 1653 - DNA, 396 bp, Homo sapien
  misc_feature (1)...(396): n = A,T,C or G
tttccacagcttcacgagccttccgatcagcaatgtagagggcttctgccaatttggcgaaattttcatttatgtgtactgtctgtagtcctcttccatcagcagccagacgtttgtctaatggaattgtataaccctttgcatttttccagttagaaatacaaggaggaatcttccactcttgttgttcctttacagtcatctttcggctaggagaatgcatgacaggcgcaggaggagaaggtggtccccggggaattttcttattaatcttgaaccttggaggctccattggatctttcctgcatttctaaccatccggaataaaccctctggttaagccccagagttgaatgccaatcccttggctgaaaatgggngggtatcgggaattac

SEQ ID NO: 1654 - DNA, 401 bp, Homo sapien
  misc_feature (1)...(401): n = A,T,C or G
tctaagatcccttctttatccacatcacttcagccaacaatctgattggtatttccaagacaacagagcagtatttcaaactcatgaatgggattttaatgtgctgtatggaatttgaagcctcaaacttaaggaactttccacctggaaagcattcttaagtaacatcaatgaactgtcctccctaaaacctagacacagtatcactgtggaaacagagtaatagttctggaatcgattgaggattaggttagaagcgcccacaccagggaaaagcttccgggaaacggttttaaggacagaatcaagggcacacctgtggaaccttctttcctgcatctgtccaaatgggggacgctgtgtctcctctcttcttanggagagggnttaaatggagccag

SEQ ID NO: 1655 - DNA, 289 bp, Homo sapien
  misc_feature (1)...(289): n = A,T,C or G
tttttttttttttttttttttttttttactgaagagtaaaaatcaattttatttaatacaactcccctcagggccctggagccgggtggtgaggcaaacggagaaggcgaggagggttaggtatagtacacaaaatgtcggcagctcctgcccacccactctagcccaccctgggaaacagctcagaccttaggaaaccgtttctttagtggggaataaataaagaaaaattaagtgagaaaaagtacatatttccctttaccattaaaaaaattaatnacaagttggt

SEQ ID NO: 1656 - DNA, 394 bp, Homo sapien
  misc_feature (1)...(394): n = A,T,C or G
agttgtgcatttaatattttctataaatatataatctatagctaaaagaaaataccatcttctaaaagcaaaacaagacagaacttcactgatctgtaactaaaggacggctttccatttcttgacaggagttgttgtgtagaatatcttcccatctttctctagttttctcaaatgaagcaagagattatgctctgccatcttatgtaaattctctggaacatccttgtaaatcattgtcctaagttccgttacggtaaatgatttctcaaangttatcaccggaataatgaaataatcctggtccttcccnggtaattcctatgnggaaatatattnccagaanttttaggctccagcattatgggatggacctgggnccatggcccngggt

SEQ ID NO: 1657 - DNA, 291 bp, Homo sapien
  misc_feature (1)...(291): n = A,T,C or G
aggtgaaaggagcagtagatgatgatgtagcagaagatataatttctacagtagaatttaatcattctggagaattactagcaacaggagataaaggtggtagagttgtcatctttcaacaggagcaggagaacaaaatccagtctcatagcagaggagaatataatgtttacagcacttccagagcccatgaaccagagttttgactacttgaaaaagtttaggaattggaggaaaaggttcaccaaanttanggtggntaccccagnaaaaatgnctgccncagntttt

SEQ ID NO: 1658 - DNA, 378 bp, Homo sapien
  misc_feature (1)...(378): n = A,T,C or G
ctggtcttcagggaggaaatagagacgcatcttcataaacaggcatacaggacaaacagtgaagctgttggttgaaatcataattaatgcgttactgtatgaaccacaaaacagcactatttatttagccttacttctacttccagatgcagtgcctcttttggagaagacatgtttatttttcatgtctttctgacattactttagcaattcaacttgatgtgagaagaaaaaacaaatgtttcaacacaaaatcccctgttttgtgagaatactgcacctatggaataattggccaaatttgaaatcccatnatttggtccccaaaaggtggttttggagttagttcctacctnggtgncccatggtcncgaatgg

SEQ ID NO: 1659 - DNA, 369 bp, Homo sapien
  misc_feature (1)...(369): n = A,T,C or G
tcacccgccacaagcgcaaggagaagaagaagaaagccaaaggccctctgccaggcaaaggagggagctgcggctctttgacattaaaccagagcagcagagatacagccttttcctccctctccatgaactctggaaacagtacatcagggacctgtgcagtgggctcaagcagacacgcagccacagatgattcaggccaagctcttaaagggcagatcttcacggggctattatttcagtgacaaaatccaaatgcccctccttatgtggggtattacaggaaatcctttctaccaggaaaccaaagcacatttttcaaaanttatcacccaagggaaganccgcctggaaaagtttatnccccaa

SEQ ID NO: 1660 - DNA, 345 bp, Homo sapien
  misc_feature (1)...(345): n = A,T,C or G
tttcatacgggtggcttttacaaggcaacttccgtcatttaatgttttcaactgtaattgtcttaatggaaatgttaaaattcatatctgattaacatttttaataacttagaggagattttaactttatttaaaaataggtaaaattattgtacctaattatgtctaaagtttattcaggggtaatttccctgatgtctgtataaaatcaagatcttattttactgatgcataagtcctagtgggtcaagactaggcatatgctttcagataaataaggaattactcccaatccagttttcccccaatcaaaggaagccatggtccatttnaccttttaggaaa

SEQ ID NO: 1661 - DNA, 399 bp, Homo sapien
aaagaatgagggaaggagttggcatttgttgaaagtatagtctttttctcttttttttttttaattgcaacttttactttagatttaggaggtcgtgcgcaggtttgttacatgggtatattgtgtgatgctgagcttgggatgcgaatgatcctgtcacccaggtagtgagtatagcacccagtgaaactgtagtctcatgccaggcactgtgctagcccactctggctcatttaatcctctcctaagaagagaggagacacagcgtccccatttgacagatgcagaaagaggttccacaggtgtgcctttgattctggtcctaaaaccgtttccccggaagcttttcctgggtgtgggcgcttctaacctaatcctcaatcgattccagaactatta

SEQ ID NO: 1662 - DNA, 314 bp, Homo sapien
  misc_feature (1)...(314): n = A,T,C or G
tttaagaaacataagtttaattcaggaaataatgacaacaccatattgttagatttataacacatagatcccatatatatgtacataaatacatatgacaaagcaggtngggaggaagcggantatnatggagcaatgtggttacgttccactggaattcagtcggtgttcacctcagtgagtgttcactgtggtgagttcaagatgcatgttgtaatctctagaggaatcacctgaaataataaagcacacagataaagtatccaacaggagaacctaaaacgttgtatttagtctgctttgggcctcctgta

SEQ ID NO: 1663 - DNA, 238 bp, Homo sapien
  misc_feature (1)...(238): n = A,T,C or G
gaacacggctctcaccctggcctgtttccagggccgagcagaagtagtgagtttgcttctggaccgaaaagccaatgttgaacatagggcaaagacgggtcttacccccttgatggaagcagcttctnggagggtatgcagaggttggaagagttcttcttgataaaggagcagatgttaatgctccccctgtgnctttcccaaaaagatactgcgtttacaatancagcgggacaaa

SEQ ID NO: 1664 - DNA, 411 bp, Homo sapien
  misc_feature (1)...(411): n = A,T,C or G
agaattctactctgtctgcaagtaacaagtgttgcataaatggagcatctactgttgtcacggctatattcggaggcattctccaaaatgaggttaactgcctcatatgtgggacagaatctagaaagtttgatccattcctagacctttcattagatattccaagtcagttcagaagtaagcgctctaagaatcaagaaaatggaccagtttgttcgttaccgagattgtcttcgcagttttanccgacttaggaagnaccttgatgagacnggagttatataatgtngccataaaatgcccaaaaaggaaccaaaagttcccccnaaaaaaagtttttgggattccnaaaacttaccccaaggggggctanggctttacattttggaaaaggattttcctttggggccg

SEQ ID NO: 1665 - DNA, 351 bp, Homo sapien
  misc_feature (1)...(351): n = A,T,C or G
cctcccaaagcgctgggctactggtgcgagcaaccatgccggccaaggaggtgagaccagcctgagcaacgtagtgtngacttcgtttctataaataaataaataataaaaattatatccatcctattagtttctactatctttagaaaaagaggccgaggcgggcggatcacctgaggtcaggagttcaggaccagcctgacccacgtagagaagccccatctcttctaaaaagtgcaagattggcctggggtgtggtggcgcatnctggtaaatcccaagctatattgggaaggcttggggcgggaanagtcactttgaaaccccgggaaggccggaagttttgtttgt

SEQ ID NO: 1666 - DNA, 338 bp, Homo sapien
  misc_feature (1)...(338): n = A,T,C or G
aaataaattgttttatatgctggctgaatagctaacaaaatatttgtgttttgatcaaaattaaagcattcaaagaaacctctcccatctccaagaaagccattctggtttcttcaccatctttgagactaaaggccttgaaatattttctgggtatcctgcaagatttttcaagatatacaacctagttttcccaggtattaaggcaacagtctagttctgatgcagagagaaattttaatccagagcactcatgagtgacacatgggncccagaaaatngggccagatatgggtcccgtaatgnggacctttacccacaaaccagggttgaaaaag

SEQ ID NO: 1667 - DNA, 312 bp, Homo sapien
  misc_feature (1)...(312): n = A,T,C or G
cagtatccactggatatgggacgaaagaaaaaaatgtcgaatgcgctggccattcaggtggattctgaaggaaaaattaaatatgatgcaattgctcgacaaggacagtcaaaagacaaggtcatttatagcaaatacactgacctggttccaaaggaggttatgaatgcagatgatccagacctgcaaaggcccgatgaagaagctattaaagagntaacagaaaaggccaagagtagcccttagaaaaatctgtttcncagaaggtccccgcagccatgccagttcgagcagctgncaaaanttggctcc

SEQ ID NO: 1668 - DNA, 250 bp, Homo sapien
  misc_feature (1)...(250): n = A,T,C or G
aaagaatgagggaaggagttggcatttgttgaaagtatagtctttttctcttttttttttttaattgcaacttttactttagatttaggaggtcgtgcgcaggtttgttacatgggtatattgtgtgatgctgagcttgggatgcgaatgatcctgtcacccaggtagtgagtatagcacccagtgaaactgtagtctcatgccaggnactgtgctaagccactctgggtcatttaaancccctccnaaa

SEQ ID NO: 1669 - DNA, 330 bp, Homo sapien
  misc_feature (1)...(330): n = A,T,C or G
agaagtggaagtgtcctcccttgagcctcaccaagctctgggaacgagagccacagagacggtgtacagtgagatccggaaggtcgaccctaatctcatggaaaacagatactctagaacgggaaggctcccttaatggaanttaagacagtcaaggcagtgcacgtccctgggaggtcgtccatgtcccgagaagagcagccgattcctggattgcgaaaatcctgtgcacgtatttatgaagcctgtccccaccgaaagcagtaatccttcagggcaaagccatccnatttttaaaaacccggcttggccttggntccangttttggg

SEQ ID NO: 1670 - DNA, 405 bp, Homo sapien
  misc_feature (1)...(405): n = A,T,C or G
gatctagttcccgtatctgagctgggaggccctgacggcgccacggccccaataaggtcacctacaatggctggaggcttgtntgccatgaacagacagtatttcaatgatcttggacagtatgacagtggcatggatatctggggaggagaaaatctggaaatctcatttccggatctggatgtgtggcggcaantcttcatcctcccttgctcaagagtaggacacattttccgaaaaaggcgaccgtacggatctccggaaggccaggacaccatgacacacaactcccttgaagactggcacatgtctgggcttggatgagtacaaaggaagcaatatttttccttaagacctgatttgaaagaacaaaagcttcggggaatatcagtgagcgtgttgaaa

SEQ ID NO: 1671 - DNA, 421 bp, Homo sapien
  misc_feature (1)...(421): n = A,T,C or G
tnnatgatcaaaaagatcctttatttaatgtagacagacaatattaagtcatcaaaataatttataanagttaaatgcctcttaaatatacatgatatcttctgaagctaaaagtaatatgcactcaaccagtttttaaaatctatttggaacattaggcatgatagaaatagaaaaaaatctcttatgaagtcctctatgaaaggaaattgtgacaagttcctgattggacagaaacaattccatctccaagggagaatgcgaaanaacataaatatgaatacaaatgcctacttcctgggtttatactctggtagacccaactcctttangaattnattgcctggttttcccngggattaaaccaagaatccccttaaacaggcagctccnggaaagtaaanccccaattcccaggtgg

SEQ ID NO: 1672 - DNA, 230 bp, Homo sapien
  misc_feature (1)...(230): n = A,T,C or G
tgaagtgtgctggggccagcgaggagaggacggcatgtgtatggggcccctgngggacctgccctcacttttgatgactgctgctgccgccaaggccgcgnctggggtaccagtgcagaccgtgcccgccacgtggcacccgggtcccagtgcccgacttcacagagtgagagcaattcattctgggacacaagcccccctgctactggggaagtctccgcnagacgaag

SEQ ID NO: 1673 - DNA, 436 bp, Homo sapien
  misc_feature (1)...(436): n = A,T,C or G
tttttttttttgagcaggcccggcggatgtatttattgtacaaaccatgtgaagcctggtcagcaggtcaggcacatctagtgtacataatcagagccacaataaattctatttcacatcctgggtcccagctcagtccaaccccgccaagcagttgatcgcttgcccgctttggatgtgaatatcaatttgccttgaaagccaagagtaaattaaaggggcagatctgatgtcgaagtttctaggaatcacccttggggataaagcagacagcactctgcagacaggagcacccttgggtgttgggggtgttgggaaggagatttgtgggccctgaaggatccttgggtccatgctctcgttttgggtcaggaagcaaaaggatgtaccttgtccgtctccactttcagtggaaaaatacccncgaatgatcgan

SEQ ID NO: 1674 - DNA, 127 bp, Homo sapien
  misc_feature (1)...(127): n = A,T,C or G
taaatgttttgatttatataatagtataattatatttgtgtagggctagggctaggattagttcagagtgttcattggtcatgaaatcttctgggtgtaggccagatgctttaatatttagcnctac

SEQ ID NO: 1675 - DNA, 334 bp, Homo sapien
  misc_feature (1)...(334): n = A,T,C or G
tctcgntaatnataganatacccgcaaacaaagatcanccagctactaccatcattcaagtagcacaactatatattgccgctaccccaatccctccttccaacataactccaacatcatcaacctcatacatcaaccaatctcccanaccatcaagattaattactccaacttcatcataataattaagcacacaaattaaaaaaacctctataatcacccccaatactaaaaaacccaaaattaatcagttagatccccaagtctctggatattcctcagtagctatagcagtcgtatatccaaacacaaccaanatccnccctaaatagat

SEQ ID NO: 1676 - DNA, 407 bp, Homo sapien
  misc_feature (1)...(407): n = A,T,C or G
tnctacaacataccccgcttccacctcaaggctcatggatctatgttgaaatgtgtatgagagtcagaggtgatggatggctccatggaaacagtgtcttctagatncaacatngntggatacacatatgaagtcacaggaacagtgacaatatgaacgaaaccaatctacccaaactcaagctatataaaatggcagcctggaggaggaaacagggggataaagtcagacccctaggtgaggaactttgatattttattgctgctggaagagcacaaagtcagttttgttcaatagagtatcacctgggcttacaaccacactcccaaagacacgctccatggcccacaaagttgggacaacgcnaacttagacnttgaggggaccagaacttttggggattnttt

SEQ ID NO: 1677 - DNA, 324 bp, Homo sapien
  misc_feature (1)...(324): n = A,T,C or G
aggatttggaattatttcacatgtagttacttactactccggaaaaaaagaacctttcggctatataggaatagtatgagcaataatgtctattggctttctaggctttattgtatgagcccaccacatattcacagtaggattagatgtagacacacgagcttactttacatcagccactataattatcgcaattcctaccggtgtcaaagtatttaagctgacttgcaaccctacacggaggtaatattaaatgatctcccaggctaatactatgagcccttaaggctttnattttccntaatttaacaggttgggtgggtc

SEQ ID NO: 1678 - DNA, 309 bp, Homo sapien
ttttcttaaacttttaataatttaaatttaaatagccacatggtctagtggctactatatttggacagtacaagcctaggttatagtagtagctaacaattagtgagcatttcctacgttccaggtactattttatttagaccttaagtaagtctttgaggtcaatattactatcattttacagaggaagaagcaagcagaaaaaggttaaaatattcctggccaggatattcctggctactaccgtggctaatattttgagaccttaaacccagacagtctttgactccaacggggtctgctggctaa

SEQ ID NO: 1679 - DNA, 390 bp, Homo sapien
  misc_feature (1)...(390): n = A,T,C or G
ttttttttttttgtacacctggaatttattagcatctgtcatggatgacagaagtttaatttagttattttccaaataaataaccattttctccagcatcgtttattatattgctatccttttcttcctaaactggaatgtcatttatatcacattttccattacagattgagtatcccttatccaaaatgctcaggaccagaagtgtttcagctttcagattttttcatattttaaaatattctcattatatttaccagttcagcatccctaattcaaaaatttgaaatccagaatgcttcatgagcattttcnttaaagcagcctgtctgtgcttaaaagggttcggaattttgggagcantttgggattttgggaatttccagatta

SEQ ID NO: 1680 - DNA, 336 bp, Homo sapien
  misc_feature (1)...(336): n = A,T,C or G
aacattgcaagttgctgttcctcatattcagaatctgaagttaattttttacactcatctacctcttcctcatctgaatctgccttgtcatctgtttgaaatggctcaagaactgcctttatcaactcccnacactgaccaaacagaaactggaattttggctccttctttatatgcgtttttaaaatttctgccaattctttcccattcatctagctccattgtccctttgttcctgggaaccatggggcaaaacctggctctaactggtaatcaaaagagtggttaataaagttcntgaaggaatttaacttttcaattcccnccttttccaat

SEQ ID NO: 1681 - DNA, 149 bp, Homo sapien
  misc_feature (1)...(149): n = A,T,C or G
ttaaatttcttaaggcatttattatggagagggggagtgaaagttaatactcagaacttattaacactctttgatacagtagagcagttttgcccatggttcccagaacaagggacaatggagctagatgaatgggaaaaaanatttgg

SEQ ID NO: 1682 - DNA, 368 bp, Homo sapien
  misc_feature (1)...(368): n = A,T,C or G
ttgcctctgcatctcaagtcctgtaagttgtaggtgtaagccatcagtcacatccagacactaacagcttctttacgtagagttgttggcccaggagaacaccaggttttcaggtgtgtctgggttccatagttcttcctcatcagtcagtgattggcttcaccttgctgcactccagaactgcacggtaaatccgcacagagcagtaatttcagagaaggttgtgtataagtgtgaaattncctctncaagaattggaaagtttacacaaccaatcggncttcctggttcttggccctgntccttcctgtaagatcaatgaataaaatgggtaatnttaaccnaaaacaattttgggggaanggggc

SEQ ID NO: 1683 - DNA, 428 bp, Homo sapien
ctcgagacagggtagagaaaaggctgtccttgaacttgctctgtagaccagtgagttccaggacagcctgggcttcacagagaaaccagcccctccccaaatgttttgttatataccatatattcatgatctacagaagagcagggcagaacaggaagccgatggtgtgtaaacttccaattctggagagggaatttcacactatacacaaccttctctgaaattactgctctgtgcggatttaccgtgcagttctggagtgcagcaaggtgaagccaatcactgactgatgaggaagaactatggaacccagacacacctgaaaacctggtgttctcctggggcccaacaactctaccgtaaaagaagctgttaagtgtctggatgttgactggatggcttacacctacaacttacaggacttgaga

SEQ ID NO: 1684 - DNA, 322 bp, Homo sapien
gactccaggttggtgcacttcaatgccaagtactaaccacacaattacaggatgccaccaaaaccttgatatggggctgctgcatcctaattaaaaaaacagttaatagacattattttttagaacagttctaggtttacagaaaacttgagtggataatacagagagttctcctaggctcccctgtcctccaagcacacaattttccctactagtatgttgtaattagtgtggtccattcattacaaattgatgaaccactggttgatacgtcattaatcaacctaaaagtccataggtttacattaggggggccattcct

SEQ ID NO: 1685 - DNA, 426 bp, Homo sapien
  misc_feature (1)...(426): n = A,T,C or G
tanttacagcaattttattcatcattnccaaaacttggaagtgcncaanatgtctttcaccaancgaaagaataaacaaactgttgtagccatacaaggaaatctgattcactgattttaaaaaacaagttatcaagccatgaaaagacatgaaggaacttaaagtacataatgctagaaagaagccagtctggaaacccacatactgtaccactccaactctaggacattcttggaaagtcaaaaagatagaagtagtaaaatggtgagtggttgtcaggnggtggcggagaggaggaccgcgtgaaatggtgaagcacagggaattttcagcagtgaaactctttcgcatgacgcnggtattnggggatttaggaccattatgtaattngccaaaacccataatcngtgaaactcaangaatga

SEQ ID NO: 1686 - DNA, 397 bp, Homo sapien
  misc_feature (1)...(397): n = A,T,C or G
tttttttttttttaggagaaaaccacttttaattgaaaaataaagcaatacatctcaaataagactctgttttaacaataaaactgtaatttgttgaaatagctttcctaagtggtattgtgaaatttaggtattggagtatcaatacaattccctcctttaattctgactcagctataagtaatattaaaaataaaaacttttccccataaatttaatttccataaatctgtaaagtctatccctattcccaatgcactgacaaaaagaggggaaagtttaaacaatcattttcatactgagaaattctcagataaaagccaataaagtattttccntaatggaaaaaagctggatatggtggaggacnccccaaggacntatccaatnggtattt

SEQ ID NO: 1687 - DNA, 316 bp, Homo sapien
  misc_feature (1)...(316): n = A,T,C or G
aataagcttcttcaaaattcattccaagcacaaaagaaattttttccctttgcatataaacttgacatcagttgattctgttggggtcggggtgggtatgcagggattgccttttattatcaagtgatttatttcaagagcctttgaggggattcaggtgaaggaacccccatctgtgctggagagttggatactcccttaaaatagncccccaccacaggcataaccaataatgataatgctggantaatttggtaaagccaaaggttgtcctggcctcatatccatcaaaggcggtttgcaaanattccttggg

SEQ ID NO: 1688 - DNA, 379 bp, Homo sapien
  misc_feature (1)...(379): n = A,T,C or G
tttttttttttttttttttttttttttgtaataggatgaatgtaattgtagaataggattgcacaaatacagaagtcatgccctaaaggctacagcaacaaattaatacaaataattctggcagtcttataaaattacatctatctctgtagatatttcacttttgtgtcatcaaaaacacagtttgtaaaaatattttcaaactttttttaaacttcaacagtaatcaaagttatctgactgcaagtaacatcaaaatgctagcaaatagaccattttaatcagttttattgattcatgcttccagttcntattcngttaaaaacaaggcacattaaatacatccncctaatggccccataaatggcatgcagctcat

SEQ ID NO: 1689 - DNA, 454 bp, Homo sapien
tttgaatttttgcaggaatttaatgcactctgatttttccggagatctaacaatagcgcacatcaaagtgggtggcactgggctctgttcagaacattccagcaactggtcactgcagcagcgcactcacatggcggtgggcgctcgggctgacctcaccttctggaaggtgcacctgtgtgcgcaggcatccgagtccatgtcacgtgctggcaggcaatcgccatcctttcacaacaggtcacgaagccgactgattttgaatggctgtgtgggtaatactgcccatgaccttcattccagagagcaacaggcatcaggaaacgtctgtcacaacaggcagggctgggagcttggacacggttgaagaatccctggatgctcaaccccgtattttctggctaccagttgaaagaaagggtgaagaggatgcttggctccgagcaagtggctt

SEQ ID NO: 1690 - DNA, 333 bp, Homo sapien
  misc_feature (1)...(333): n = A,T,C or G
gaagaatcaagagactgtatcctggactcaaacgaacagagtgttttcagtacagtaactgccgtactacctggaagttgaatgagatgatgttatgtcttagtcaaggaaagcagtttggacttaatttttcttcctcttaatttttcttccttttataaatatgttgatgtagtgcactagagtaatctatcatttcttgctttacttttcatctttataaaagttgaacaaagttaagctatgtgacctgaaccccaggaaaaagatctaaaataacccactaactaagctctttttgnaaccnatttggcaagattcnggggatttttt

SEQ ID NO: 1691 - DNA, 417 bp, Homo sapien
  misc_feature (1)...(417): n = A,T,C or G
aatcaactcattggttatatagatccatttcttagtgctcttttctgaccacttaagacatcagaatacactgtgatgagattaataaagccaaacaaaaatccactggtcattacctagggtacaagcaattatttgacactatcaaatgcaaagcaagactccacacggctgccctcactgcaccctcctgaagttgtccttggtgtgaaggtgtgcaccacgctgtcctttggncttctggatgactagcccatgttctgtcggttgccgtagcccctgggatgggtgtccttccagtccgtcccactctcgcatcctgtgcaaggctttctcctcactctcctcatccttttgctcttgatcttcctgctggctgagctgctctttgggaaatcagctgatgncggcttggcn

SEQ ID NO: 1692 - DNA, 462 bp, Homo sapien
  misc_feature (1)...(462): n = A,T,C or G
cgtttatttcttaaacccacacagagtaagggcagagttagagatgcctggcacagcatttctcatccaggatcacttcctcgttctttcttctttgctgggagcatcttagatttatatcattttctacaaagacaatatcctgaatggcagtcgcaggtttatttcaaagttggagtcttctcaggaagtaggggagactggattcccagctaatggaattttcactgtgatgtctgtgttctcagtgaattcttccagaaagccggaggagactgtctcaacatcagtagagaactcagaattctgtttgtttgcggctgggcgtgaagtccatgatctgctcagagtcagtgcttaaatccatcatctgtataatcctctaagaaggagcttttggtccctcnggtaatgatccccaggttgggtcaaaggantggaggttttagtagggtcnatgga

SEQ ID NO: 1693 - DNA, 301 bp, Homo sapien
  misc_feature (1)...(301): n = A,T,C or G
tcacaggaacatacagcgtttatttgtcacaggggtttggctcacacctttgggggtagggaacaactcccagccttccagcttgccgatcttgaacagggcggccgcagtgccatgtagacacagcccatggtgntagtcccatagctgtgagtgcgagctcccantgtnaggcctcncgcgcagcaccaatgnaagtagttcagggggtcatctggcttctctcggacctgggcactgacacaggtggtaaaggccanccatcgctccaaatagcagctgncgtgaatgtgtaccggnc

SEQ ID NO: 1694 - DNA, 454 bp, Homo sapien
  misc_feature (1)...(454): n = A,T,C or G
aaagtcggggccgtcaatgcagacaaacatcagtccctgggaggtcagtatggtgtccagggatttcctaccatcaagatatttggagctaacaaaaacaagccagaagattatcagggtggcagaacgggagaagccattgtagatgccgccctcagtgccttgcgccantcagtcaaggatcgccttggtgggcggagtggtgggtacagttctggaaagcagggcagaggtgataagttcaagtaagaaagaccgtggtagagctgaccggatgacacctttgataaagaatgtcctttgacagtgaagacgttttgggatggtttgagttttaatgcctccgttggttgttggacactggcaaaaaaccnttggangccagaattgggcttgctgccgggctaccggaagttaaagggggccaancaaaagggaaaaagtggaancttgg

SEQ ID NO: 1695 - DNA, 468 bp, Homo sapien
  misc_feature (1)...(468): n = A,T,C or G
acgacctctctgcccgttgtggtgatctccaacgtcagccagctcccgagcggttgggcctccatcctttggtacaacatgctggtggcggaacccaggaatctgtccttcttcctgactccaccatgtgcacgatgggctcagctttcagaagtgctgagttggcagttttcttctgtcaccaaaagaggtctcaatgtggaccagctgaacatgttgggagagaagcttcttggtcctaacgccagccccgatggtctcattccgtggacgaggttttgtaaggaaaatataaatgataaaaattttcccttctgggctttggattgaaagcatcctaagaactcattaaaaaacacctgctccctctctggaaatgantggggtgcatcaattgggctttcattcagcaaaggaagngaaagttggcccctggtttgaagggncccaagcagnccgggggacctt

SEQ ID NO: 1696 - DNA, 288 bp, Homo sapien
  misc_feature (1)...(288): n = A,T,C or G
ttttttttttttttttttttttttccatgctcaaacctctatgctttatttcctttacagcagagacttttagatgaaccaatcactattgaaatataacctatttccatttatatttctctggtctggactatgagtactttatcagcagagtctggtttctcatacaactttgctttcccaattcctattagggtagaagtaacacattgttgctaagtgaaaaggggntattgaattcatccttgctgngcctaaaagtgccgggacacattattctaactgggc

SEQ ID NO: 1697 - DNA, 353 bp, Homo sapien
  misc_feature (1)...(353): n = A,T,C or G
tttttttttttttttttttttttatgtgactacattaaaactttattcaacaaaataccataaagtaaaaagaaaagtcacaagatagactagaagatatttgcaacatataaaactgacaaatgattgatgtctagaataaaagaactcctaaaaattattcagagaaaaataattcantacaaagttgagcacaggatatgaacaggttcttcacaataaaatgtccattagaatgaaggatttaacgagaattgaggaaaatgcaaactaaagtcataataaaacaccattccatactcatgtaattcacaaaaactcacattttactttgaaagagccatttnggccaa

SEQ ID NO: 1698 - DNA, 277 bp, Homo sapien
  misc_feature (1)...(277): n = A,T,C or G
ctgaaatccctacatttactcactcccacttccctatttccaatgacctaagatatcagaatttctatctacttccctttttagtccccagaagaaccaatattttccacaggcaacctttagttaagaagtatcactggatgtgcttaagttaagaagttatcactggatgtgctttggcctttttaatagaaaagatatttatttaccaaatgtgctataaatatatctctatgtgagacaaatcntattaccgttaaattatcagctaaaaatt

SEQ ID NO: 1699 - DNA, 441 bp, Homo sapien
  misc_feature (1)...(441): n = A,T,C or G
ttattctattttacctctaacagaagtttaaggttcgtgtaagtttcgttcctctctgattgtaggggagacgcccagagcgccatttggaggagagaacctggcatcctttccttaccttgatttcaggtacncagctcctagcaaatgtgtcttcctcccagggttctttggggtaaagaatttggtgagaaggagctgaatgttatggctgcgtttctcagccacttgctccggagccaagcatcctctcaccctttctttcaacttggtagccagaaaataccgggttgagcatcaggggattctcaacccgtgtcaagctccagcccctgcctggttgttgacagacgttttcctgnattgcctggtttgctctcctggaaatgaaggtccatggggcagtattancccacaacagccantccaaaaatcaggtcg

SEQ ID NO: 1700 - DNA, 430 bp, Homo sapien
  misc_feature (1)...(430): n = A,T,C or G
agttttgcaagtatgacagcttctaatggaatggaaatatttttatgtgctctgcatagacttaaaaagttttatgttactttcacattgaaacagttcatgagcatctatttggcagttagagtattgtactttgacatagtaggtggcactgctattttgattttttttttcaccaagacagtgtgaagataccagatgtgttgggaaatattgaaagacagtttactcagtattatttcactgacagctgcccaggattccaatgaaaatgttatctgtataaagtgatgatggtatctccatttgaccatcacaaatgagataccatccacatcttgtaaaggtaagtttgtattattgtccattttacagatgagaaaattccaggtaccacangggttaataanggtgtaaatgatagcnaaat

SEQ ID NO: 1701 - DNA, 426 bp, Homo sapien
  misc_feature (1)...(426): n = A,T,C or G
gcgngcttccggagctctttgaaacaagcaaaaaacttctggaggacgtggaagtagcaactgaacccaccggctcccgaacaatccaggataaggtgtccaaaggactagaactccttgagaaggctgctggaatgttatcgcagcttgatttgttcagccgaaatgaagatctggaagagattgcttccaccgacctgaagtacctgatggtgccagcgttgcaaggagccctcaccatgaaacaagtcaaccccagcaaagcgtctagatcatttgcagcgggctcgagaacacttccgtacatttcttaactcagtgtcattgctatcatgttggcagagtttcagctaccccaaaccaagactaacttcagcttgaaaataatacttgctagctcctccatgggcctatcccaaatctcgg

SEQ ID NO: 1702 - DNA, 428 bp, Homo sapien
  misc_feature (1)...(428): n = A,T,C or G
caaggtcctggtgatcactgtcttctgtggtctgactgtggctttccccctgtcagaattagtttcaatcaataaagaactacagaattcaatcattgacctactaaactcagtctttgaccaactgggatcatacagagggacaaaagctcctctagaggattatacagatgatgatttaagcactgactctgagcagatcatggacttcacgccagccgcaaacaaacagaattctgagttctctactgatgttgagacagtctcctccggctttntggaagaaattcactgagaacacagacatcacagtgaaaattcccttagctgggaatccagtctccccctacttccctgaggaaagactcccaacttttgaaatnaacctgcgactgccattccaggattattggtctttggtagaaaat

SEQ ID NO: 1703 - DNA, 433 bp, Homo sapien
  misc_feature (1)...(433): n = A,T,C or G
agctaggtatggcgatggtgaagcggttctttgaatcttaccatgaggtccccgacggcacccagtgtcatcgcaagacctacatcaccacggccttagncggcatttgcggcataatcggctccgcttacagcgtctcactcaaccccgcagattccaccctggaagcagtggacagagtcggccggtacacattcactgcagctgctattggagcgatgtttggccttaccacctgtgtcagtgcccaggtccgagagaagccagantgaccccctgaactacttcattggttggctgcgcgggaggccttgacatttgggagctcgcactcacagctatgggacagcagccatgggctgtgtctacatgggcactgcgggccgccctggttcaagattcggcaagcttggaaggctgggaagttgtttcc

SEQ ID NO: 1704 - DNA, 447 bp, Homo sapien
  misc_feature (1)...(447): n = A,T,C or G
actatccaagcatttattcattactagtttttctagtgagtggggtatacacagatcatttcagttagttctgttagccctaactcagttatcatgcagtcaatcaagcttcagattcaaagacaatcttttatccagaacattttagatcctaaacctaattttgaattgctcttaatttctattactgcaattctcttaagattgaagctcacaaaactgaaatttatcatcctactcagcaagtggctgaagacacatctacattattctccttggaganctgctttcaccaaggggtgggggtaaatgggataagttggactaaaactaggctgagatgttgggatgggcctccctccagctatccacttcaactccttccccagntttcctccactctactggcaaatnttccaaaaccagnggccgcccaaggccgggctt

SEQ ID NO: 1705 - DNA, 450 bp, Homo sapien
  misc_feature (1)...(450): n = A,T,C or G
gaaactgcgcggcccctctcaccagtcaaccccaaactggaaaagtctgatcagagctccacagaagattcaggcaagcccacaggaggtaattctggcaagcccacaggaggtgattctggcaagcccacagaagctggttcgaataaggccacagaagatgattctggcaagtccacgaaagttgatttggacaagcccacctccaaaatctccccagataccggagactttcgaagacttgacaaagtccagccaacttgaaaaaggacaaaaacccaacactttactttccaaaacttgaatcttgggggaaacacttgggcagggggactctgacttctcttttaaagccagagaaaaggagattaagtctttcagagcctacttgaagacgtggaaanccaaggngattgaagaggggtgacacagaagccggaangaaaggct

SEQ ID NO: 1706 - DNA, 444 bp, Homo sapien
  misc_feature (1)...(444): n = A,T,C or G
cttaggccaaggcagagttatcatagtccctaggttgctacggcttatcatgtgcttggtaaaaggtgatcgcaggttctcagacgagtttactttacatgagatggaatcaggcagagaggctgggatgatggagaaagctccgaggtgaagttttaaaaaaaaagttgtggaaaggaaagttccaaagaggtggtttctgaggaagtcagagccgcccagggccagagcagtcagtaatgggtgaatgaaggttgtttggaaaagtccggtgtgacagacacatggatgcccatcctacttctaagggttgcctggttgggtattaaatatgcacaatattccatagctcactgaggatttttaaaaattataagcatagggattttaatatttttggggggtgaaaagaattatctgggcacattanggtaattggagntt

SEQ ID NO: 1707 - DNA, 428 bp, Homo sapien
  misc_feature (1)...(428): n = A,T,C or G
agatttcggccaactagaggagtctggatggccttctgcatttcagaagccaaaaggacgattgccatatgaacttcaggactatgttgaagatacatcggaatacctagctcctcaggaaggaaattttgtttataagttatttagcctgcaagacctgttgttactcgtacgctgcagtgtccagaggatagagacaagaccacgttctaaaaaacggaagaaaatcagaagacaatttccagtttatgtactaccaaaagtngagtatcaagcttgttacggagttgaagctcntgactgaaagtgaactttgtcgctttatggactgaaagtttattgcattccaacagctcattttatgttgggcatatcgatgcatttacttcaaaactttttctactggaagaaattacctccagaagaat

SEQ ID NO: 1708 - DNA, 425 bp, Homo sapien
  misc_feature (1)...(425): n = A,T,C or G
acataacgttgaacttttaagggtctcagtccccattgattaaagaacagatcctagccatcagtgacaaagttaatcaggacccaagtctgcttctgtgatattatcttgaagggaggtactgtgccttgttcatacctgtaccccaaattcctaggatggcatctgcccttcagggggcactaaaatgtattattgaaacagcattctgggcttaaataaggtgtatgtatgtgttggttgtgactgtactatttctagtatagtgaactacatactgaatatccaagttctcagcacctacttttgtcaaatcttaacattttgccactttgaagatcacattggccattcctcccctccagagggtaacaatttatccacaattttgatgtttagcattccngtgttggttggaactttcn

SEQ ID NO: 1709 - DNA, 433 bp, Homo sapien
  misc_feature (1)...(433): n = A,T,C or G
aaaatgaccagcaggccaagataccactaaaaaaacgagaaattaaactgagtgatgattttgacagtccagtcaagggacctttgtgtaaatcagttactccaacaaaagagtttttgaaagatgaaataaaacaagaggaagagacttgtaaaaggatctctacaatcactgctttgggtcattgaagggaaacagctggtaaatggagaagttagtgatgaaagggtagctccaaattttaagacagaaccaagtagagacaaagttttatgagacaaaggaagagagctatagccccccttaaggacagaaatatcatcacggagggaaattggaacagagtccttaaattctgtcataaccaagtatgaaaancagggtgagcttgagaaaggaaacagcccctttngaggaaagatgccggataggt

SEQ ID NO: 1710 - DNA, 199 bp, Homo sapien
tcggctcacagacaggcctgccaggctttctatcttccctgcaatgtgactctatgcaaacaggaaaaatagcataccgaaatcaggttatagcttcaatagctgaagaaacatgaacatttccatttttaacattaactctctatcatcgtctatgagtaagttcttaccatgatttgttttcaaataaaatttatgg

SEQ ID NO: 1711 - DNA, 433 bp, Homo sapien
  misc_feature (1)...(433): n = A,T,C or G
ttatccttgcatccctagggaatagcacaagtgcctggctcctaacaggctatcatgctataaatgcttacaaaagaaatgaatgaacgatacctggagccatagtggagctggctagcctcctgagncgtataggaactgaaaggaaaagctgagtcctggcataatatcaaggtttggatgaaaggcccatcactctgaatcattctagcacaaattataggctttaaaaatggtttgtgaatgttaacggttttgaagtttactgcactgtaagatatcttaaatttcngctcccttccctggggcccctactctttctgattgtatgttggtttggttcactcaagtgaggaaagaaaggcagtttgaaaataaaccccaaattncagattggttttccctnggtcnggattcccccctttggtttttg

SEQ ID NO: 1712 - DNA, 405 bp, Homo sapien
  misc_feature (1)...(405): n = A,T,C or G
gacgtggcggcacagctgggcgagtatctggaggagctggaccagatctgcatttcttttgatgaaggcaaaaccacaatgaacttcattgaggcagcactgttgatccagggctcagcctgtgtctacagtaagaaggtggagtacctctactcgctggtctaccaggctctcgattttatttctggcaagaggcgggccaaacagctctccttagttcaggaagatgggagcaagaagactgtcaactcagaagactccctggtgaaacagagaatgagttcctggtcacttggacgacttcccctgactcccgggcttaatgttggatctggaaaaatgattcagggcatccagtgaacttgcttatccataccccctacttngcccatgggncctgggtgg

SEQ ID NO: 1713 - DNA, 348 bp, Homo sapien
  misc_feature (1)...(348): n = A,T,C or G
agagttcgggacaaacagcctctggaaagtgaggaagaaaatcctgaaaaggagagccccaagttcgtcgcatgaacttagaaatttctggctgacaactgaaccgtgtatacttaggccagactccaagcagcccagccaaggctaaaagcattgactgacaggactttacagatagtggtttgcagggcttagctgaccgaccctcttcctactgaaggaaattacttgtatataaaccacaccaacaccaaagtctcctgaaaatttnccccagaaagcatnccaacaaattnaaccattcatttcagggaaaatccccttactaaagtctttagnaaagaacca

SEQ ID NO: 1714 - DNA, 363 bp, Homo sapien
  misc_feature (1)...(363): n = A,T,C or G
cctaaatacttttgatccacagttggttgaatccacagatgaggaatccatggatatggaggaacaactgtaattgttcctttaccttccttttttaaatatgatttcctttagttctttgaacaaacacatttatgtgttcagccagtgtttggtcagaggttctgcttaagcactttgagctaataagatttctgctctttgctgatggatctgtgtatgccttagagaatgctttcaagtttgtttcacatctgattgctccctgaagtggatacagccctgtccatacatacttcccgaacctccaaggataaaaccaggattccaggaagggctccttccttgggctaatccnccttt

SEQ ID NO: 1715 - DNA, 371 bp, Homo sapien
  misc_feature (1)...(371): n = A,T,C or G
tgaaaaccaataaagttatgctataatggtgttttcctaagtaaaaaatatttaaggtaactggtaagaagagcttgtacttgtatgctgaattttgagttaaaattctgtattttagccatggcttaagagacattataatttgtattggagctggcaggaaaacaggaaataataaaaattaacaatgtggactacatatttaaaatttggttttaaantagataccttgtttttaaaatttagggaccattttgggaataccccggccttttaatagggaaaatnaatgggtcccttaaaaatggtngagttttttnaataaatnccccaaattggggggggnccctaaggggtttaattaaggggga

SEQ ID NO: 1716 - DNA, 297 bp, Homo sapien
  misc_feature (1)...(297): n = A,T,C or G
ttttggaatttgtaataagttcatttaatatactcttgctccagggatttcagtatttgtcttgaagaaataataaaatctcacctgtcaacttttcttattgtagcttttgtgaagtatagaaggctaaagcaaattnggttaaattagacattgaaaaaagtatatgattattatctccaaaatattgagactttacacataacagcttttgggggctagatttagaaaatcactaacataaaaccattaggaatgttcctaantataggttttccaggacctgacctttgtagg

SEQ ID NO: 1717 - DNA, 322 bp, Homo sapien
  misc_feature (1)...(322): n = A,T,C or G
gaaattggtaagtggaggtagtcaggaagttcttgtggttcttcacatagattttacagctttggctttcattttgtttagctaaagtcatggggacaactcttcaatttagaacttaaagttgaattataaaaatgatggatataagtggtagctgtatctagtgaagtgtctgtcagtaagtgaaacattttttggtggtggcttatccacaaacagtttaagttgtagaataaaccttatgagtgacatcctggaaaggtanccatgcctaagatggcaaagcacncctggaaaccatttngggcccactttgggcttt

SEQ ID NO: 1718 - DNA, 254 bp, Homo sapien
tagaatcaaaattcaaagtaattgtcagcggcttggaagagaatcacggaattctctttcaagaaatgctgctgggcacggtggctcatgcctgtaatcccagcactttgggaggccaaggcgggtggatcacttgaggccagaagtttgagaccagcctggccaacatgagggaaccccatctctactaaacatacaaaaattagccgggcgtggttggtacgtgcctataatcccagttaccttaggaggct

SEQ ID NO: 1719 - DNA, 443 bp, Homo sapien
  misc_feature (1)...(443): n = A,T,C or G
tttgagacagaatctcactctgtcacctgggctggagtacagtggcatgatctcagctctctgcaacctccacctcctgggttcaagtgattctcctgccttagcctcctaagtaactgggattataggcacgtaccaccacgcccggctaatttttgtatgtttagtagagatggggttccctcatgttggccaggctggtctcaaacttctggcctcaagtgatccacccgccttggcctcccaaagtgctgggattacaggcatgagcaccggtgcccagcaagcatttcttgaaagagaatccgtgaattctctttccaaagccggttgacnaattacttttggaatttttgaattctaagctccgtggccggaatttcctggaaancccggggggattccactaagttccaaaangggggccggcnaccgngggtngg

SEQ ID NO: 1720 - DNA, 268 bp, Homo sapien
  misc_feature (1)...(268): n = A,T,C or G
ctgaaggtctaggaaattttgtattaaataatagtaatgtacaaatcattccaaagcagttacaatcatatgaactgaaaaataaaattctaaacagctttattgaggtattagttatatactataaaanttcaccccattgaaagtgattcagtgatttttaagtaaatggaaagagtttgtacagccatcggccagaatcctggtccttaaaatattttccatcacccctacggngattcccctggtgccttgnggtanaggtata

SEQ ID NO: 1721 - DNA, 263 bp, Homo sapien
taaatttaaaaaaatgcccaagagcagatgactttattggcaatttccattatatactgaaaggagaaataatatgaattctttacagattcattcaggaagaagagacactttacagctcattatatcagtccagcattattctgatacaaaatgtagaagacatcacaaaagcagaaaactactgacaaatattcctcataaacatagacagaaaaatccttaacaagacactgggcttggcaaattgaatctgcaatatg

SEQ ID NO: 1722 - DNA, 254 bp, Homo sapien
  misc_feature (1)...(254): n = A,T,C or G
tggtaagtccatgttgtcaaatattgactatttttatattgggtgtcctacccaattaaaaaaaataagagggagaatgggcctagccagcaactcttatcatttgttattgatacaatcctaattcccaaagacaagataaaattgctgattactggctcaggaatatgggtttaaaaagtggaaggcattcantccttttccccaaagggaaatggcttangggatnccattaaacccccccggtgacccaa

SEQ ID NO: 1723 - DNA, 377 bp, Homo sapien
ggcgtttgcattttctgccctgtttataagtccagagtctggtttttaacaagctgttcttcagtattcagcttaagataggcaactcttttctgtacatagtgtacattacaactaaaagtaatgggaaacactgtattttgtagcattgatttgtaagtttgacccacttaattattatgcccaaaagatataatcattgattttatttgtaaagatttttaaaaaggtttgactcccaaagtgtgggttctcctctagcttaaattatggttgacacctcagcctccacttctggcctggatatacgcgtccactggaagttgagggctgaccattggagttttccttggaagcatgaccccccttataacacg

SEQ ID NO: 1724 - DNA, 197 bp, Homo sapien
  misc_feature (1)...(197): n = A,T,C or G
gacactacaggtatctgtccctgggccagcagggacctctgaagccttctttgtggctttttttttttttcatccctggtgggtttttcctaantgnacttttnaggantttggaantctcataantttcnaagctcaacnaacttcctaaatcttaggaacttaaattgacaggttcnaatngagggggntgtttg

SEQ ID NO: 1725 - DNA, 251 bp, Homo sapien
  misc_feature (1)...(251): n = A,T,C or G
agatattaaagcattaatcacgtgtaactgtctgtaaacagcggttttgtagttttttgcttttagtaaataggctcccccgtgtgatcaatactaaactgacagcaaaagagcagtccattcttattagaccatgcttggggagataagttgctgctggctcatgaaggacacattcttcttgatgtagggaggtggaatgaaggatttaagcnctggccttcctccccctttgggtaaagggtaccttg

SEQ ID NO: 1726 - DNA, 172 bp, Homo sapien
  misc_feature (1)...(172): n = A,T,C or G
actaaaagtctcatcacaaacattcccactggcaccttcaccaaaatcactaacaaccataanagtaaaaaccccttgagaattanaatgaactgaaaatctatttgcctcattcattaccccaacaataataggattcccaatcngttgtagccatcattatatttccttc

SEQ ID NO: 1727 - DNA, 437 bp, Homo sapien
  misc_feature (1)...(437): n = A,T,C or G
tttagattttaaaaggtttaattaaattgatagatgatagatccatcatgaaaggtaaatttaaggggtgggggacattctgaatgtttttaggacaatgtcagtaaagggcagtgctcacccaagagacatatattggtatcactgtcagaatatagggccggatgaactgttgtgcttgtgaattattgggttacattattgaattgtgacccatttaatgaccgtgttctgcttagcgtctttaaggccccacctaactcttccagctctctattccgacaattcccctttggaattgttttgctataacttgaaatttggggatgtcacaaacgaaactggcaanctggtttcccgccaaactgtgggttcctgctaatctccccaggctggcagcanttggagacttgccgacttctttcatcccccactct

SEQ ID NO: 1728 - DNA, 432 bp, Homo sapien
  misc_feature (1)...(432): n = A,T,C or G
gcaagagcctttcagtgctccctcatattgagggcagtggcagaaaagtgaccactctgcaggctgggccaggatgtggtgtcctgagatagttttgtatcttaaagactgaggcacagaagcgaaacgagaacacacctgtttttgagacacagttgtccaaatgtttctggccagctccggcccctttttgtatgacacttctcttccaccctgcacagcacatgtgcccgtcattcttttaattttaaaagatgaaatggcagatgctagtaattcacagaatggcctcttgtgggggtgggtctgagggaagtcagctataaaacatttgctggngttttgttcaatggggctgtgcatttttaatattatgtgtttgtaaatgacatgtcagccattgtttcatgtttcctaaaagcagaatatttg

SEQ ID NO: 1729 - DNA, 450 bp, Homo sapien
  misc_feature (1)...(450): n = A,T,C or G
tcatcattgaaatgatcccctttattctccctgttccaatgtctgcaatgcacaatctccaattgagcaagcacaggagtcatcgtctcaactcctgtcttctcactgggggctgacaaaaggcaggtatcctctcccgtaataagagaaggaataaccagtttccagtcttctgggggcatttttattgaaaagagttgatatgcctggcacacaatgaccccgaagatggtgcagcttggatagtgaatgtgcaagttagctatgcagagtgtacttccttttctgagctgtgtggtctgtccagctttcacacattgatatgtgaggctacatttgcatgttatctcaancctcagagcatttgtatagctggccaggtttatcntggttaattatttttcaataatacaggaacaggtatagatgtagccttgaaagacntttcca

SEQ ID NO: 1730 - DNA, 458 bp, Homo sapien
  misc_feature (1)...(458): n = A,T,C or G
tttttcaacattggctggaattgagtagaaaaaagtccacgatgcctcttcacatgtgtcatgaaatatgagaaatctgtctgattctagatactatttctttacgacacaatgggcaggtctccagctgcaaggcacaatccatgcacaggtcactgtgtccacatggcttcaattgtgtgtctgctacctcatcacaacaaagggaacagcagttttctcggatactgacttgcttcaacagagcaagacgcctgtgccttgnaaaatgattttttcttcagctgttaggaaggcgtagtcattaaaagtgctaaatttcatagatggtgggtatttgaatggttttgctccaaaattgaactcacattgttgatatgacatgaaactagctgcagcaaaaaatccagatacagtagatgaaaagacttgcttttcaggaggcagctggttgccat

SEQ ID NO: 1731 - DNA, 385 bp, Homo sapien
  misc_feature (1)...(385): n = A,T,C or G
actatgttaaacattctatatacatggtctcatatagtccttacgagtcaatgtggtaggtaatcctatattcctattttagagatgaacaaaaaaaaaggctttgagaatttatcaaggacccataataatccacagaacctaaattcaaatccttttgtccaactccgaagacttatctcttaaccacttcataagattaaaacgctgaaggggcacatactgttatgaattttaatggctcctacacatgcatcctttatatatacccttcatgatttttcaaaccatgtcagattctcatttttcaattctcaagatacagcatcttcttatagcatcttcaccanctttcccggtttactggtcttaaatgtgcccaatc

SEQ ID NO: 1732 - DNA, 485 bp, Homo sapien
  misc_feature (1)...(485): n = A,T,C or G
cctgaatttaaatagtttattaaaattataataattaaacataaactctatcttattggtaccaaaaaaaggttcttctggtacatttgacatagccttctactgctggagtacattataaaatcaatatataaactacattgacacaatttcaaaggaaaaagcttgccttttgaggttagaagtacactctgatgtcctaacttggataattctaggtgtatactatagataggatattgagtaaccatactagactatggaaaagacatatacagacaaaatgtaaacatttaataaattggaccacacaccaaaattgggtaaatttccccaagactgactctaggtagaaaggcaagaatgtatttcatttatttgttcttactaacgggtgaaaactctaaagataccaaattgctaatcgagtctcttactaaactggcngatgctggaaacaagccaattaggcagacctggggggg

SEQ ID NO: 1733 - DNA, 488 bp, Homo sapien
  misc_feature (1)...(488): n = A,T,C or G
ttccagttattaatttagttttttatttaaccagtgaaactttcatcaaacaataaacggtttccttttagattcaatattgtggcttttccagaaccagcatgttccctttcctcagtaaacgaggaatccataaaacaagtttttgttggttactaccagagtcatgtgcatgctacaagtgctgcagccagctgggcgccgtctgggtgtagtgtcattttaagtatttggggtgggatgagggagagagagcagctccacagacaaggcagactgccccaatgtctccatcgaggctgggggacagctgctgcccccactgggagacagcggactgtccttcagtagaagacaggtggtctgcatcgcccagcggcagcaagcancaggaatcaagacaaagcacacgagatcccactgcacttcagagggagcagtgccagagtgcgagtgagaagacaaaggaacaggaatcctagttttag

SEQ ID NO: 1734 - DNA, 488 bp, Homo sapien
tgttttttttttttttttaaaacaacacacatttattattttacagttttataggtcagaagtctgacgtagaggttacttggctaagatcaaggtgccagcaggtgcatttcttcctggaggccccgggggaaaatctgtttcctcaccttttccagcttcataggccccttcctccaacttcaaaggcagcaagattaggctgagtccttctcatgctgacatgtctctggttctttcttcaaattccctcttccactctaaagggccctcttgattccattaggcctacctagttcccaggagatgtgatgcttctggtccacaaaccacattttgagtagccacttagtgcctggtaacttaagttttctgagagcaaagttctgagagcactgttgattctccactcattgtagtgtctttttgcacattgacttgcaaaagctccttagtatatctcagatggaaatgcagaaatcacccgt

SEQ ID NO: 1735 - DNA, 481 bp, Homo sapien
ttttagtatgcagctgctataaacatttaattgtttacattcattgtctgtatttgaaggttcttagcaaatctgaaggctttcccatattgcttatattcatagggttgctctacagtgtgagtcctttcatgcaccagaagttgtgagacagatctgtaggctttcccacattgcttacattcatagggtttctcgccagtgtgaatctttctatgcatctgaagttgagtggcagatctgaaggctttaccacactgcttacattcatagggtttctctccagtgtgagtcctttcatgatatcgaaggctactggaagaaatgaaggctttcccacactgcttacattcatagtgtttctctccggtgtgggtcttttcatgatactgaaatgcagtagaagacatgaaggctttaccacactgcttacactcatactgtttctctccagtgtgagtcctttcatgggactgaatgg

SEQ ID NO: 1736 - DNA, 312 bp, Homo sapien
cctgaatttaaatagtttattaaaattataataattaaacataaactctatcttattggtaccaaaaaaaggttcttctggtacatttgacatagccttctactgctggagtacattataaaatcaatatataaactacattgacacaatttcaaaggaaaaagcttgccttttgaggttagaagtacactctgatgtcctaacttggataattctaggtgtatactatagataggatattgagtaaccatactagactatggaaaagacatatacagacaaaatgtaaacatttaataaattggaccacac

SEQ ID NO: 1737 - DNA, 470 bp, Homo sapien
  misc_feature (1)...(470): n = A,T,C or G
gaaacacaccaaactacctggggacaaatgctgtcagccttagnaagactaaattggaaagaaaggtgtctgccaaagaaaacaggcaggcccctgtcctccttcaaacatacagggaatcctggaatggagaaaacatagaatcagtgaaacaaagccgtagtccagtttctgtgttttcctgggacaatgaaaagaatgacaaggactcctggagtcaacttttcactgaagattctcaaggccagcgggtcattgcccacaacactagagctccttttcaagatgtaaccaataactggaattgggacttagggccgtttcctaacagtccttgggctcagtgccaggaggatgggccaactcaaaatctgaagcctgatttgctctttacccaggactctgaaggtaatcaagttatcagacaccaattctaaatgtttgaagctttgtttctaaaagtaccttga

SEQ ID NO: 1738 - DNA, 347 bp, Homo sapien
  misc_feature (1)...(347): n = A,T,C or G
ggttctttttacatgtagcaggcttatttattgttaaattacananacaatactacnattacnacagattaactcagcaatgagaaaaggttgagtgaagatgtcaaagagttaatttaaccctttccgttgttaaaattttacactcgttctgttattcaacaaatatatatccccactccccagaaatgtcattttcttaattctctgtgtgttatatattgttttctcctattcactcaaatataatcacnaaatccaatatacaggagagaataaaggcagtaaaaagaaataatatacagagtatgataaatattttttaaaagagagaaaatatatactgg

SEQ ID NO: 1739 - DNA, 494 bp, Homo sapien
  misc_feature (1)...(494): n = A,T,C or G
aattttccttttcctcttgctggtctcctacagttttacagctgagcttttgaggtttggaaaattcaagatgtttgtttcataagaaaaggggcagaaagcaagcacaagacacttttaggtctagactaaaatggtagttacaacaatttgaaccttgttggtgcagtgccggntgaatgcttaccctgcacagcctctattaccttaaggaattagttgtcattttcctattgaattttgagtaaatggtgaaattcagtgtcctttagaatcgactcccaagactatatttgaagaatgcattgattcaagaaggacatttaaaagcaaattctgactttttcaagaccaacacacttgtttaggcctattaaattggtactatcacttggttacatgccctctgaattgggagaaagtgggcttgcacactttgagggtaactaactggtaatttacctggtggttccccccttcctgctctccctcct

SEQ ID NO: 1740 - DNA, 492 bp, Homo sapien
  misc_feature (1)...(492): n = A,T,C or G
actggaaatgcaataaagtttgcattttattgctaccgatgcccaccacaaaagcgttaacctcagaaagctataagaagcatcaaaagattgccatagccccctgtaagagcttctgaacattgtccaaatgaaaggaggctcagctgaattctaattttcctaaagacccatgtttttagcatctatgagctttctacaaatctccccattggctgcatctctgaccttgcaccagtatctggttgggattcccttttttttntttttttttnttttttttgagacagagccttggtctgtcgcccaggctggagtacagtggcgagatctcagcccactgnaacctctgcctcccaggtccgagcgattctcncggctnagcctcccaagcagctgtgattcacaggngcccaccagnagacccagctaatttttcanagtttttaggagaaacagtgtttcgccaagttggccaagctggtctcgaan

SEQ ID NO: 1741 - DNA, 481 bp, Homo sapien
  misc_feature (1)...(481): n = A,T,C or G
ggtgtctattgccaatctgattaattctaattatattcagcttcatttaaattaagtaacatgaaggctttcttacccttgttcattcaattcaagtatagttttatatagttgactaatcaactgatgattatttattgagtagctattatgtgcttggaattttcttatatatctatagtttaagttctgcctcacagagcttaaaatcttagcagtaaaaaatataaagcatattgaagtgtcagttaatagtgtgatgccgtangggagtgtcagtagtagaagtccaggaaagaaagacgtaaaagacacccaggataattggcgatgaagaaagtttgtaaggagaagaaaaagcactgtaggcgattaaaactgtagaggaaaagctctgaggcaggagagtggaatagagaatgtgaagggattagaaccgntaaagtgttttccaaacaattctgaccttccctggttggtt

SEQ ID NO: 1742 - DNA, 470 bp, Homo sapien
  misc_feature (1)...(470): n = A,T,C or G
ccgtttaaatagctttgagacctaatttctccatctgttagaggtggtgataattatacttgccctacctgatcagggtttttgtgaaaagcagagaatttagataaaacgctttgtaaactgtaaatagtttatcagtataagctggtaaaataatagcagcatgggatattttaagaggctttattttatacttgatgagtaaattcagagaactttgaatctgtaccattgttatgtagtcccaaagttatttccccgagaataatgctaatgttttccaaggcttaatatactggttgtgaatattaaaagtttttccccattggatattgcccctacaagaaaccctactttaatacattttttagcngacatggggccatttccgggttatccataatagggggtcctaacccggggctacacctttggaaattcctggggggccttaaaanaagcccaaaaaa

SEQ ID NO: 1743 - DNA, 237 bp, Homo sapien
  misc_feature (1)...(237): n = A,T,C or G
gtaataaattgttgnctnttttnttaanagntgantnntttncttcacacagttnngtacgttncattncatgtttngttntagcccatntcaataagngtgngttggcacngtgtgnccatcacngatntgacacatacagttngcaccacacattttattaatgcagntagccacnttgaccattnccaatatgtacangcaccattttacacanccacacatgntttttncagc

SEQ ID NO: 1744 - DNA, 511 bp, Homo sapien
  misc_feature (1)...(511): n = A,T,C or G
nttctcaaaatatattcctcattctcgaagaagcagagaatgccaaggctgcatatctgctgtaatctacctagcctcttctgcttaatatgatccattattgaatcttctcagattaaaatccattcctatatcatctacctttcccaaagtgtgtgcctgtaaacctaccttggaagtggcaagttaactgatttttttgtgtcatttttataccaatccttaaggtcaaagccttttgctatcaatgtatttaaactgagttgctatatgttcacttaatttgttttcaaaatgttttgctccaacttaaattatcttttaacatcttttgagtgccaagaattgctaagtaactgtaatatgttgaagagagtaattgccaagcaagcagtcataagccaaaatgtaatgagcttagtatataaccactttagattatacactcaccactttttgtattcattcatgcaaaccctcctggaagtcgattagaagaggatccaattnc

SEQ ID NO: 1745 - DNA, 514 bp, Homo sapien
  misc_feature (1)...(514): n = A,T,C or G
aaatatataaaatatgtagtttgtaaggtacttaataagggttataaagaaaaataaaacagggaaagggatagtatttggggaagagaagttccagtttgtaatagggtggttaggtaggcatccctgagtgacctgttaatatctgtaggaaaagtattccaggcaaagggcacaggaagtataaacggtcctaagacaagaatgtgcttcgtgtattcaagaaccagaagctgggtggatggaatggagtgaatgagcgggagtatagtaggagatggtgttagagacttaacctggaggccagatggtatagaatcttgtaggccattgtaaggactttggcttttactcttaaatggctcttagatagccatcagagttttcaattttttttactttttattttaaaataatttctagctacggaagattcgcgaggggtattccaaggactcttgtataacctntcccaaattcaccaattgttaacattttgccacatttgccttat

SEQ ID NO: 1746 - DNA, 268 bp, Homo sapien
  misc_feature (1)...(268): n = A,T,C or G
gagaaactttaatatagtattgtctcaatgttaggttttccaaattngatcaatgngagttatttaagagaatgtttttattcttaggaaataaacacatgagaatttaggagtcacaataactctcaatggttcagttatgttcacacacagagatcataananagcaaatgtggcaaaatgtnaacaattggtgaattngggataggttatacaagagtcctttgaatacccctcgcgaatcttccgtagctagaaattattttaa

SEQ ID NO: 1747 - DNA, 514 bp, Homo sapien
  misc_feature (1)...(514): n = A,T,C or G
aggatttgaaggcctcagaacacntgaatgagaaatcagtgagagaggtagcaggtaagcaaggaagcagattgaagaccctagatgtttatgatactgctgtgctaatgccttgatgagtgagaccagcagaaataagtgaaagcaggagaagccatgagataatatatctgaagtctgatttaattgatgtgaaatatatcactgacaaagtaactaaaggtcctccccctggaaccaacctgggatccattccttgagatgcaactggtcttccgcattaacagtgaagatgatcacactgagcagagactagtttgagaatggatatctgagtttcatatnagtgtaggaaggcaagaactttgagaatggtataaaggagagaacaggcatcacaaaccatgaagtagaaggnagcaagggaatattttctggcttaaaaggatttgaaggcctcagaacactgaatgagaaatcngtgagagacggtancaggtaagccnggaagcgg

SEQ ID NO: 1748 - DNA, 489 bp, Homo sapien
  misc_feature (1)...(489): n = A,T,C or G
ttagattagcagctttatgatgccgatgctgaaggaacttttcaccccattcttacaagtctgctactgttttaagtgacatccttatagttgtagataagcaaatgtaaggttatatcaatgtgaagaagcccttagtatcacattttaaaatttatcatttagcaatatgacttttaaatttattgtttccgaatgagtgttgttgaggaatgttagcagtagtaaaatcttgtgttacaagatttttgcatttacatgaactttcactcatttttcagaatttgttcctagaagacagagaaccccaatacaaaagtgagaacatgtatgcntaaatcnggaagggatgccagtgccgaatgccctagtgaaacctctggaaagcaaaaaatgggtacctgaagaaaggttcccccgcagaatggtgcccacnggtggctgccaattaaattaaagataatggggtaatcctaaaagaacgntccc

SEQ ID NO: 1749 - DNA, 512 bp, Homo sapien
  misc_feature (1)...(512): n = A,T,C or G
ttttttttttttttttttcatttaatctggcaattttaatttcaacaaatacatattaacaacaaattaaatcctattgtaaatacacttctttgttataccacgaccaaattttctaatcctagtacaggccacaatgaaataggccaaacatgctaccattaaagtttgttgggatgagattgtagtaagtttacncaaagtattcaagttctaatttttaaggtgcngtagagaaacatanaagatttcactgtatctacaaatatgactgttttgatcttaagctatacattttatttttatctaacggntttaagacctgcccccttaatggaggcacatnttttgggcatttccnggtaaatgctgctaacatacnaagttaggattaagggaaaaagccggngaataggtaacnattccatangcctttccctgggnaaaatttttatattccccccggaattaggccatatccaggggggccatccnggtatngaacggcnaaa

SEQ ID NO: 1750 - DNA, 264 bp, Homo sapien
  misc_feature (1)...(264): n = A,T,C or G
gtgcacgaggcaagaggaatgttattgaaaccgtntacnatanactgacaccttacaaaaatgacgacacntgactctanatcaacagatgatatgtgntaaaactgctcanctagccatggagtttacctncacctccnaaggagagtacaanctcaacatttgttganacgtnttaacagtccnatcctcaacgtttaaggaatgggnagtntgacaatgggtgagaatgattacatcagagaacttncagcaagtacaaca

SEQ ID NO: 1751 - DNA, 334 bp, Homo sapien
  misc_feature (1)...(334): n = A,T,C or G
ctgtttctaagatacttgagcgttctctaaagctgctatttgaaacgagagatataagtcctaattaaacagtatgttcagcgacaatgtatgaagcttctggaaggaaaggccagcatacaagactttatctttgccaaggaatacagaggaagtttttcttataaaccaggagcttgtgtgccagcccttgaacttacaaggaaaatgctgacttatgaccggcgctctgaacctcaggttggaggagcgagtgccatacgtcatcntttattgggaccccccggaagtaccactttatccagctttgtaaaggcggcccagtggaagtccc

SEQ ID NO: 1752 - DNA, 494 bp, Homo sapien
  misc_feature (1)...(494): n = A,T,C or G
cgcccgcgatctgngccgntttgaaatctcgcccgtcggagatcttatattgcactttaaacacacctaaaattgacatggaaagactcttaggaggacaactaggactagaagatttcatatttgcccatgtgaaaggaatcgaaaaagaagtgaatgtgtataaatctgaggattcacttggtctcaccattacagataatggtgttggctatgcttttataaagagaattaaagatggtggtgttattgactcagttaaaacaatctgtgttggggatcatattgaatccataaatggagaaaatattgttgggtggcgtcactatgatgttgcctaagaagttaaaagggnattaaaaaagggaggaactcctttactatggaagtttaaatagaaccctaaagaagggccatttggaaattaggagcccganggtccaaaggcctggaaagtccancaggnggaaaaaattgggttgttggaagggcac

SEQ ID NO: 1753 - DNA, 405 bp, Homo sapien
  misc_feature (1)...(405): n = A,T,C or G
atatttcaaagaatatattccatacacatgaaattaaaccagagttagtaaaggtgtccaaaaacagatcttataggactttttaaaaaagagaaaaaaaaagaacgatgggttgtttcttcagagatggagtgtacacatcataatcctcttcgtttggcatcaccaatgactccccaaacatcaaagacaaattcgtctgggaacgcaaagtctccaagagtttcgtcaagtgccacagcaaattcatctggatttactttgtcctttccagcttcaaacattgtggtggctaaatcaatatctcgaattcccatgtacaactcaagaacatcatcaatcttttccaatttgccctttggccttgggntttcagaagggcattttccttccacgggnggggca

SEQ ID NO: 1754 - DNA, 338 bp, Homo sapien
  misc_feature (1)...(338): n = A,T,C or G
ctgtttctaaganacttgagcgttctctaaagctgctatttgaaacgagagatataagtctaattaaacagtatgttcagcgacaatgtatgaagcttctggaaggaaaggccagcatacaagactttatctttgccaaggaatacagaggaagtttttcttataaaccaggagcttgtgtgccagcccttgaacttacaaggaaaatgctgacttatgaccggcgctctgagcctcaggttggggagcgagtgccatacgtcatcatttatgggacccccggagtaccacttatncngnntgtaaggcgcccagtggaagtcctgcatgacnnaact

SEQ ID NO: 1755 - DNA, 332 bp, Homo sapien
  misc_feature (1)...(332): n = A,T,C or G
tatanattattttggtttttattaaaatgacttttctttcctgcagagacagattctaaaagaaaaacaagtcaaacttctgggatgcctttctctttcccacaggntcaggaaaaacacagtgaggccaaccaaaagtatcagccccttaaaaaatatgcataatctcatgtgcaagacactggtcaatctagaacctgctagaganatgccagaaatgctttatccacatcatgtctctacatgactaatttctttacaattaantagctttcaaacatcaacatatcngnactgaagattgtcaccatctacagcaacagtgggantta

SEQ ID NO: 1756 - DNA, 380 bp, Homo sapien
  misc_feature (1)...(380): n = A,T,C or G
tctccctgaactggttattatatttcctcacttgaggaattcatactacaaaaatttggggttctccagtggagaagaatggaggaattagcctaggcaaaacaaaaacctcnaagtgctgtcatggagaatgtagcaggagaaaaatgactttggggaaaaaagacctgagagagaaagatatattaaatggggtaaaaganatacaaggagagatgatgtggattatgcagagggtctatcactgagctggtagggggcatataagcctgagnacaaaccttgaaagtaattacaagaagaaaagaatctccaataattagaaagagtctggtatttcatagccctaggagcaaactggttggtttgagccagcatac

SEQ ID NO: 1757 - DNA, 419 bp, Homo sapien
  misc_feature (1)...(419): n = A,T,C or G
ggcacgaggaaangngccatgttagtgtttcctgtgagtttgtgttgtgatgcantaagagataagtaatgcagagagaaatgaaccatggaaagtaagaacactgatggtgattccccctgcaaagatgataagaangagaaccaataaatcacacaatctttatgtgctttctatatgtatttccttagtagtgataccattgatcccncttacctttttttactccattaatactanataattaatatacctttgccgaggatcaaaacagccaagaaaaggaattactgctaaagcatctaaagattctccctgaactgtaaaatcaaccaggaaatgggcccacctggggaggagaaggatttgggtatttgggtgaagggggcttttctccccttttancctggcctcnttcc

SEQ ID NO: 1758 - DNA, 146 bp, Homo sapien
  misc_feature (1)...(146): n = A,T,C or G
tctttttctagacagtgtttaataaaacttacttctttacaaattaatagtcatttccaatgcagaccnaattgtagtgatttcanaaaagtgcagacaacataaccagacacagcaaaacagacttcaatcagtagtccttgcat

SEQ ID NO: 1759 - DNA, 114 bp, Homo sapien
  misc_feature (1)...(114): n = A,T,C or G
tcctgcaatggagggntttggantcatgnngatctntaccnggtttggnaaacgcttcaaagaagggcaaataacttcctggttgcccctttcaaatttggtcttcttccacga

SEQ ID NO: 1760 - DNA, 435 bp, Homo sapien
  misc_feature (1)...(435): n = A,T,C or G
tgtctattgcctgtatagcagctgtgtaatccagaataaaaacataaatgagattatgttactccttttctcaatgcatttcactgagagttgaatgcaaagttcttaacctagcccacaaggctgcacatgcttgaatgtctcacagcctctctgatctcatttcctatcatttttctcctcactcactctgttctaaccatactagcttatctgccattccttgtacttactgagtgcattcctactacaaaggctttgcacttgttctctgcctgagaagtgctcctttgtataatcatggggctcattccatgacttccttcagtgctctgctcagatatcacctctcctaagatgcttccttggtcactccatatacaatagctgccagtcattcttcattgtcccnattctgctttaatttttgncata

SEQ ID NO: 1761 - DNA, 484 bp, Homo sapien
  misc_feature (1)...(484): n = A,T,C or G
tacaatgattcaacaaaattttactgagagctgtgtttcaagatgttccaagccttggggattcagcagtgaccaaagtgatcaatgtccctaccctcatgaagccaatattctagtgaaggaaaataataaaacaaaaaatcagtaaatattatgtcagatgtgataagtgctatgacaaaaataaagcagaatagggacaatgaagaatgactggcagctattgtatatggagtgaccaaggaaggcatcttaggagaggtgatatctgagcagagcactgaaggaagtcatggaatgagccccatgattatacaaaggagcacttctcaggcagagaacaagtgcaaagcctttgtagtaggaatgcactcagtaagtacaaggaatggcagataagctagtatggttagaacagagtgagtgaggagaaaaatgataggaaatgagatccagagaggctgtgagacattccagcntgtgc

SEQ ID NO: 1762 - DNA, 289 bp, Homo sapien
  misc_feature (1)...(289): n = A,T,C or G
cacgagaactatgctaaatagtactaaagcttcagtactaaaatacagaattacaatttgaacnttccattagctacattcactacctaatgccactgtaaacangtaanagtccctanagtagnatttaggncattnttttcagatatagtgcattgcactaagatgattaantnaagnttcagaatcaggaagcagttggccggaactcagatatttgtgtgaatctgggcctgaatttttgctgagcaactccataaccaggggctcagtatgtatgagggcatat

SEQ ID NO: 1763 - DNA, 116 bp, Homo sapien
  misc_feature (1)...(116): n = A,T,C or G
tattatactttaagttctagggtacatgtgcacaatgtnaggntttgttgcatgtgaacaatgagaacacttggacacaggaaggggaacatcacacaccagggcttgttgtgggg

SEQ ID NO: 1764 - DNA, 272 bp, Homo sapien
  misc_feature (1)...(272): n = A,T,C or G
ttgnnantatttgaagtatgancttnaancanattattggaatggtggttaatatnnatnagatagttnaaattnagnanntgtatagtaaanagtggattttanagaagtaatgnnttaacnatgaagatanatgagatttnnnaattnaaaattgggattattnagnattttnantttnataangaagacatnatggagaggataaatagattggcaagaattttntatgtattttanaatgatgtatggaatnaatttattgaccactt

SEQ ID NO: 1765 - DNA, 490 bp, Homo sapien
  misc_feature (1)...(490): n = A,T,C or G
gaatgaattaaagtttcattagctttatttagaaactggtttaccccagcttcccgtttttttccaaatataaaatgataaaatattgattatgtgccaatattgtcatttaatgttcttaaaacttgtgaaggccacctttttaggtagctgagaagagtgatagttggtatcaatttgttagccaggcatggtggctcatgctgttgggaggctgagtggggaagatgcttgagcccaggaggtcaaggtgcagtgaaccatgatcacaccactgcattcctgcagagtgacggagtgaagaccagttctgggagctgggaacttcaagatcaaggtgccagtagacttngggtctggtgagggcccacttctgttcataaagacagtnctttcttgccgtggtcctcacntgggaaaagtaccangcatctctgtgggtccctttccatgcagcccattcatgagggttccatcccccatgacctaa

SEQ ID NO: 1766 - DNA, 461 bp, Homo sapien
  misc_feature (1)...(461): n = A,T,C or G
aaacagatttgcaagaattggaacacatttttcctaatttgcatcatcagctgtttaaacccttagaaccacatccagattttgacttatcatcatcatcctctgggatttctccagacaacagagacttttaccagagatcagattcttcatctgaaagccactgtgctactggattatccaaaagtacagtttatttcacagcacntgaggaggaccagcatgcattcttctcttaacacaagtccgaatcaacaacctgacactaacttggctcatgttggagctcacagttttgctacagaaaatattattgggggatctgaacaatgttttgaacagcttcagccagaatattcttcacaggaggagagccagcatgctgatctaccaagtatttttagcattgaagcaagagattcttcccaaggcatgaaaaatcaganctatccctctgaaag

SEQ ID NO: 1767 - DNA, 337 bp, Homo sapien
tttttttttaatgttactttgtttattaacatgtcgttctaaatattacataaatacagcttacatactagagtatcaaacattgttccagtaagaagttcaagagtacatttagggctatcttaagaaatatgaatactttggcttccattattacattagatgaaaaaatcaattcaaataagagttgtcatatcctgctatgattaacaaaaaaacaagtagaaaaataagagagtgtatttaaaaaaaataaagataatcaaatgctttttgaaagacctgttctcttcactgccacacatattcatacaaatgacttaagtaatctaatatg

SEQ ID NO: 1768 - DNA, 463 bp, Homo sapien
  misc_feature (1)...(463): n = A,T,C or G
aaaaacaagcaagngaatgacaagttaaagaaggagatttttacccttcagaaagatttgagagacaagacagttctcattgagaagtctcatgaaatggaaagagcattaagcagaaaaacagacgagctaaacaaacagttaaaagacttgtcacagaaatacacggaagtaaagaatgtgaaagagaagctagtagaagaaaatgccaaacagacttctgagatacttgcagtgcaaagatcttttgcaaaaacaacatgttccattggaacaggttgaggctctgaaaaaatctcttaatggcacaattgaaaatctaaaggaagaactgaagagtatgcaaaggtgttaccgaganagagcagcagacagtgaccaaactgcatcanttgttggagaatcaanagaactcttctgtacccctggcagancatttgccagatttnagaagcattttgag

SEQ ID NO: 1769 - DNA, 457 bp, Homo sapien
  misc_feature (1)...(457): n = A,T,C or G
tcgtnagnctanttttatcaggtggaaatctctgcaagccaaattgctgatactccttcatgcagatcaacttggtgtcccagtcagaatagaacagcataattacctggagttagggggagtatttctgcactattacttgtcagggagagaagaaacttagaattgtccctcaaaggagtgtcaagaagtatgaataaatgnncnttcaccagctcacaggccagaaatggaggacccaagtcaactaggtgaaactactagcagacccagctttcccataataacctaatctgcaaattgttctattaaagtctcattgttttcaggatgcaatgaaagtggatttcaaaaggctttggaaaaataagtggaacatgactgatcttgaaaaaaaaagcaaagcttaaatatttgatacaagtttacttagctacaacatactttacattggttg

SEQ ID NO: 1770 - DNA, 454 bp, Homo sapien
  misc_feature (1)...(454): n = A,T,C or G
agaaagataggcaatagaagaatgagctatgatgtacccatcattttgattcagttatcatcacgtcatggccaatcttgttttagctatacttccatctgcttctcattctcttgttacttttgacctgtaaattttgaagaacagatatcccctacagtagccctgtgaggaagatgttatctctacttttgagatgagaaaattgaatgttaggataaatttcttttctaaaatcacccagcttgtaagtggcagaataagaattttaaccaggtctgttaagttcttcctctgcagtcagttgtttttccttctgtttaggtcagattatnaccaaggagggtggtgtattctgacagcagctaaatgttttactggagtattaccaattcagtacctacagacacttgttaattgttttgggttaggggtagcttagagttagattttt

SEQ ID NO: 1771 - DNA, 397 bp, Homo sapien
  misc_feature (1)...(397): n = A,T,C or G
ttttttttgagacagagtctcggtctgtcgcccaggctggagtgaactgcaacctccccttcccgaattcaagtgattctcctgcctcagcctcggagtagctgggactacaggcgcctgccaccacgcccggctaattgttttgtatttttagtaaggcagggtttcgccatgttggctaggctggtctggaactcctcacctcaggtgatctgtctgcctcagcctcccaaagtgctgggattacaggcatgaaccagcgcacccggccttcaatatgattttttaaatggtcaaaaataatgcagaggaaaggaaaaaaatctaactctaagctaaccctaacccaaaacaattaaacangtgtctgtaaggtactgaaattgggtaantactc

SEQ ID NO: 1772 - DNA, 531 bp, Homo sapien
  misc_feature (1)...(531): n = A,T,C or G
tttggttcaagtgctgcaatctgtatgtactaaatagctttactttgtgtatgtgtacttataatgtgtagatgtacntactacccaggttttgtcaaatcatcttttttaaagtttttttttttttaattggttcaggaccntttgtaggagaggcctaatatgtttaagtagaagatattactgatagcnttttcccccatgcnccgtacataaaaantaaatatttccattttatagctttttcaatatacagaagagggttacttcttcatcaagtatattgttgcctttgaggacacagcaaaacccttcntatatgtancttcattgataagtggcagttaaaaactaagttatcccagttaagacttaaaaaggtgacccatattaattgccanggccttaaaaagcngaaaatgccaggaggtgtagccagcaancattttagatggccaagggtcccttccggcanctgtcaggangttcccttangttcaggcctaggancctactnggggngtggagnaa

SEQ ID NO: 1773 - DNA, 355 bp, Homo sapien
  misc_feature (1)...(355): n = A,T,C or G
attaattcaagtccttattatagactatttgaagcacaaccntaatggaaaattgtagagaccttgctttaacattatctccagttaattaagtgttcatgtggtgcttggaaacctgttgttttccgtgaacatctaaagtgtgtagactgcattcttgctattattttattcttgtaatgtgaccttttcactgtgcaaagggagatttctagccaggcattgactattacaatttcattttggtggagtttagttttaggttttattgtatataanatcctgcactgaatctgtgtctcctctgttacctacttttgccagtgaaatttaagttttaaaatactttcagaat

SEQ ID NO: 1774 - DNA, 528 bp, Homo sapien
  misc_feature (1)...(528): n = A,T,C or G
gccttttaggtggaccgctctgtatgactctcatgcttcaaaactattttttattcaagtgacttacaatggccctaggaaacaagttctgttattatcccccattttaaaatgatgaaaatggacaaagcaaaagcaagcaacttaaccaataccccatggcctcacagcctttagaatagtcatattatataaatatggcaataacaatgcactgaaaatgtctccaaaacaaactctacattttaaaaaatgtataacaggaatctaaggaaggggtcttacttctctgattcagggagtgcgaaatcccttaaactcatatcagacctgtgatgaacaaactcacactaagttttaaaaactgcttaatttactttatcatgactagtaatatataagagttttgtatatactttattaaaaataactttggaaaactatttttgcctgatcagcaataaaactactgataaggataagctgggttatcaaatattccctagtggttaatcngggcnaataant

SEQ ID NO: 1775 - DNA, 534 bp, Homo sapien
  misc_feature (1)...(534): n = A,T,C or G
ggagacggaaatgtccgaagccgcagtacttgaccctgtattttgggagtcgaacggagaatggaaactgaaagtggaaatcaggaaaaggatactggagatctaaaagatagctctctcgttgaaaacaaaaaggaaacataagaaaaaacataaagagagacataaaatgggagaagaagttataccattaagagtgctatcaaagagcgaatggatggatttgaaaaaagagtatttagcgctacaaaaagctagcatggcttctttaaaaaaaacaatatcccaanntaaanatcagagtcagaaatggaaacagacagtggagtacctcaaaacactggaatgaaaaatgaaaaaacagccaaccagggaagagtgtcgcaccccaggagaaagttaatgccacaggaccacagttcgtgagtggagtgattgtgaagatcattagcacagagcctctacctggcaggaaaccaagtccgggatactttggcagccatctcagaagttctttatgttgntttgctagan

SEQ ID NO: 1776 - DNA, 465 bp, Homo sapien
  misc_feature (1)...(465): n = A,T,C or G
tttccctttaactttacagattacactcattcccaatgttaagtgggtcagcaccttattccctaaccaccttcagtgaagttgttttataaacttgtcatatacttagacnttgtcactttctgcattccatccttgtattctccaaactnnttttttttaaatttgtacctgttaangtttatattttgccataaaatcctatggattttgataatgcttaatatcttgcattcaccactactgtattatacanaatattttcaccacccgtaaaaattcccctngtgttttatatatttagctagtccttctccaccacctactgaacatctgggtaacccactgatctgattaccactgctacagttttgcttttttagactttcatataattggaantaataatatgcaatatgcatttgagtttcatttataacgttccattggcntgataagctcatt

SEQ ID NO: 1777 - DNA, 470 bp, Homo sapien
  misc_feature (1)...(470): n = A,T,C or G
caaggatgtggagcaacaggaactcttattcattgctgatgggaatgcaaaatggtacaactactttggaagacattttgagaggtttttacaaaactaaacataggcttaacacaaaatccagcagttgcactcctaggtatttacnaaaatgagttgaaaacttcacagaaacctgtatgcnaacttttataggaattttattcaccaaaagcagagcaaaaccaagtgtttcttgaatagatgattaaacaaacttgacatactgtgcaatgaaatttattcagcaatgaaaagcaatgagctatcaagcaatggaaagatataaatgagacttaaatgcatattgcatattattattcccaatttatatggagagtctaaaagagcaaaactggtagccggtgggtatcagatcagtggttaccagatgttcngtaggtggtggagnagggactagcctaaattta

SEQ ID NO: 1778 - DNA, 276 bp, Homo sapien
  misc_feature (1)...(276): n = A,T,C or G
cctattactgaatttagatttgtgcctagtgataaatcagcgttggaggcaatgttcactgcaatgtgcgaatnccaggccttgcatccagatcctgaggatgaggattcagatgactacgatggagaagaatatgatgtggaagcacatgaacaaggacagggggacatccctacnttttacaccgtntgaagaaggattatcccatctaacagcagaaggccaagccacactggagagattagaaggaatgctttctcagtctgtgagcagcca

SEQ ID NO: 1779 - DNA, 346 bp, Homo sapien
  misc_feature (1)...(346): n = A,T,C or G
tcgcnctctctctttttttttttttttaatttataaatgctttattgaaaaatacacttatcttcatataaaattacagtagcagtatcttgagaagttttataaatatttttgcagaacactattctaattgaacaatgtaagttccatatttctctcagcaatatgaagttacctagtaactttgtttatacctgattcantttncnattgaattttctccctaataagattattaatttgacttgaaaactgctggaacaatagtgattaataaagatatgtatagataattcagctgttaaataacattttctaatttgtataaatggtacnatggtactaa

SEQ ID NO: 1780 - DNA, 309 bp, Homo sapien
  misc_feature (1)...(309): n = A,T,C or G
aaagtgtaagacaggccagtggattttaatgtattaacaatataagagtgcattaagttttcggagtctacattgcctttaagaaactatgacttgtgagccaccgggccntggccaacacactggattttaaaatgcaagtgttaagtggaaatagaaaacacggtaacaatcagcagacaaggagggtttggttgaagttacttgacaatnagaagaatatcatgcacnttnctgcaaccctagaaagactgattnacaattatatgaaagtatatcagaaatgagtttgtgagtgaaaattttagc

SEQ ID NO: 1781 - DNA, 299 bp, Homo sapien
ctatttatgtgctaaaattttcactcacaaactcatttctgatatactttcatataattgttaatcagtctttctagggttgcagtaatgtgcatgatattcttcttattgtcaagtaacttcaaccaaaccctccttgtctgctgattgttaccgtgttttctatttccacttaacacttgcattttaaaatccagtgtgttggccaggcccggtggctcacaagtcatagtttcttaaaggcaatgtagactccgaaaacttaatgcactcttatattgttaatacattaaaatcca

SEQ ID NO: 1782 - DNA, 346 bp, Homo sapien
  misc_feature (1)...(346): n = A,T,C or G
aaattatgtactggggacaggtttttgtcgctttacattgcttcctagtttacagcatgatgcaaatgattttctaacttagtgttaggagaaattattttccatctttaacctcttagttgtctaagagttaaatattactgaatttcagacgttcaaattgatcatcacaaatcctttaaaacaattacctaaaagaaaccaaaaatcctgccttctttgtgcgcgngccncnggnganaggngnagnanatggaacaaggttgtgtttgtgttagcatgtgggtgatgtaaacttcaaattgggagatgttccgacccccactcccatataagcattcaatca

SEQ ID NO: 1783 - DNA, 360 bp, Homo sapien
ggcacgaggtgaaagagacttttttcaagaagtcaaggagagtgaaaatgtggtttgccatttctacagagactccacattcaggtgtaaaatactagacagacatctggcaatattgtccaagaaacacctcgagaccaaatttttgaagctgaatgtggaaaaagcacctttcctttgtgagagactgcatatcaaagtcattcccacactagcactgctaaaagatgggaaaacacaagattatgttgttgggtttactgacctaggaaatacagatgacttcaccacagaaactttagaatggaggctcggttcttctgacattcttaattacagtggaaatttaatggagccacc

SEQ ID NO: 1784 - DNA, 234 bp, Homo sapien
  misc_feature (1)...(234): n = A,T,C or G
aatttataaatgcnttattgaaaaatacacttatcttcanataaaattacagtagcagtatcttgagaagttttataaatatttttgcagaacactattcataattgaacaatgtaagttccanatttctctcagcaatatgaagttacctagtaactttgtttatactgattcaatttacaattganttttctccctaatnagatnattaatttgacttgaaaactgctggaa

SEQ ID NO: 1785 - DNA, 342 bp, Homo sapien
  misc_feature (1)...(342): n = A,T,C or G
tacaagtaaaagaatatgtaaagacaattgagtattgtgcaacattgatgtgtatttataaaatagctttattttataataaagtaatatgtgtagatagtgtcatgaaggaaatattctccccataatatagtttcccttcttcatttcagcacatgaaattaaacaaacagaggaaacttcatctcaaacccatctaacctagtcagtaccatagtaagctgctttaaatcatatttaaaacaaggtagagtacaaatnaatacatgcatgtaagacccaaattaaagcccctcaaaaatctattacttttaatttcataaataaattttttattgggcg

SEQ ID NO: 1786 - DNA, 399 bp, Homo sapien
cctctcaggttttcactgagagaacccaactgggctgtaggaggtacatttcatgaaagtttgggggcctcgtaagattgagttcccctagaattttttccacactgtgccttcagcaatttgtcaattacagtttagggtttcctaacagcattgtttcccatggaggtttctgcttctaggcttctgcttcagtaaatcgtgattctctgtatcttacctgtgtgtctctccattttagggagcaatatattgccctttgacctcacttctctgatgtatctaagaagagttattgagtttcagtttgttctgttttttcattgtagtgagaatgggagtgatgatgcccaaggttcttacatgccatattggaaactggaagtcatgaattaaaca

SEQ ID NO: 1787 - DNA, 368 bp, Homo sapien
  misc_feature (1)...(368): n = A,T,C or G
tacttcctgcttttgcaannnatggagtagggaagaagatagtcgaacttaaaatcatacctaccctgaaaaatgcttaaagtagtgccaaaaatcttgaaatctctctctctctctctatttggatgaatcaaaatgtaatttgttgagttttgccttttcttttgcctaaagatgttaacgtcaggcagtgggttttncctagaggagagattagtacctattcattaacacaaggatacataagagacttgccccttttgaagatcatttctacttggtgctgatgaatttatgcctagctttttttttctaggtggtgatttttcaatttcttttatatttacggaagtagaaaaaaatgttcc

SEQ ID NO: 1788 - DNA, 477 bp, Homo sapien
  misc_feature (1)...(477): n = A,T,C or G
aagaagcaagtgtccgtaagttgagtaactttccctaaaatgcatacccaggaggtagcagagtcaggattcaaaccaagtatagctgactctaggtccagagtcttttcagcatgatgtgttcctaccccctaccccactgtctgccaaaccaccaccaccactatctctccacatcttttcctccattgtcaatctttaatagctgtgttgttatgtattgaaagcatgaatgttcactatcttactaaaatgctcccacaatcatgcctctttttgtagtaccatccttccagatacaagtaggaaaagtcgccagaagacaagagctgtagggaaaaccaccaacccggtcntcnaccacactatgggtgtatgatgggttcaggcctgaagatctgaatggaagcctgtgtagagcttactgtctgggancattacaaattaaccaancaatttttgggaggtcttcgtatt

SEQ ID NO: 1789 - DNA, 480 bp, Homo sapien
  misc_feature (1)...(480): n = A,T,C or G
ttccctgctccactttgagtatctttctgcgactttttcccacaacctacaaaggtcctgcaagggtaccagaccctcttaactgtggcacagaattgtggtgtgaaacncatgatggcaaacaagaacattttgcttcttaacaataccccatgtttaatgctctggggcagctttttctttgaagcagcagcagaaattcaattttcctagcttgttcaaatatcttatttaatattagagtcacaatttacacattttgttatatttaaatcccttgggccttgtaatcaaagaagcacatgcagattgacttttacatgctgtgtagtattccttaggtgcaatagatagaaagtgaggatatttgtccacctactcagattttcaagatcagattccaccggtttagtagttttcagtggaggagccagtggaatttgggctcatttggaaatcctggcaatcaaaagcattctg

SEQ ID NO: 1790 - DNA, 442 bp, Homo sapien
  misc_feature (1)...(442): n = A,T,C or G
tagaaacaattatttttcccattatttcttatgagattagttgtttcaagtaggagacagaaaagttctgttttgttggaaatgtaggttttagatgtatctttcagtcagctctcagtcactagactatttcatattttttgaaatgtttttgaaaattatgactagcccattttttgtcctttattcaacatacttatcctctgaacacataaataagtgaataagataaaaatatctttaccttattaatattatacatacttgaaaaaaatttcatttagaaacctagttcagaatctgagcaaatttacaagtgacctctgtaataaatggtattgataatcagagaatgtatttcagaataccacagtacnatatattatgaagcatgaccactttattttggaacttagcaattgtattgctgggggtttattgt

SEQ ID NO: 1791 - DNA, 230 bp, Homo sapien
  misc_feature (1)...(230): n = A,T,C or G
tagaaacaattatntttcccattatttcttatgagattagttgtttcaagtaggagacaganaagttctgtnttgttggnaatgtaggttttagatgtatctttcagtcagctctcagtcacctagacctatttcatattttttgaaatgtttttgaaaattatgactagcccatttttngtcctttattcaacatacttatcctctgaacacatanataagtgaatnag

SEQ ID NO: 1792 - DNA, 432 bp, Homo sapien
  misc_feature (1)...(432): n = A,T,C or G
gttatcttcagtccaaccactgaatttgttccacatgccatgctctcttaccaccatagctttgtgtgcaacattctcactcctggaatgacttccttctttctctgcttggtacacgtcaacaaaggttagcccaagaggcaaaaatggtggacattttataaatacttaattggctaacttgtaggcaccatgcagaacactttaaatccattatttagtttccctgacaagcctgtggttagaggctattgtagttctcgttttataggaaacccgagaaaacacaggaggccatagattattacctccttttgtttcatttaacatgttttaaataacacataactttactaacattttaataacataattttntttaacacatacacatatatacatatataatatatngatataggtagatncatc

SEQ ID NO: 1793 - DNA, 235 bp, Homo sapien
  misc_feature (1)...(235): n = A,T,C or G
ataattaccgtgaaaggagttagcctcagcagttaccttgaaggactgatggcaagtacgatatcctcaaatgctagtaaaggccgagaagcaatggaatgggtaatacataaattaaatgctgagattgaagaactgacagcctcagcaagaggaaccataaggactccaatggcagcagcagcgtttncagagaagtgatcgtgacagttggtagacaacatcgggtactnca

SEQ ID NO: 1794 - DNA, 431 bp, Homo sapien
tacttcctgcttttgcaaataatggagtagggaagaagatagtcgaacttaaaatcatacctaccctgaaaaatgcttaaagtagtgccaaaaatcttgaaatctctctctctctctctatttggatgaatcaaaatgtaatttgttgagttttgccttttcttttgcctaaagatgttaacgtcaggcagtgggtttttcctagaggagagattagtacctattcattaacacaaggatacataagagacttgccccttttgaagatcatttctacttggtgctgatgaatttatgcctagctttttttttctaggtggtgatttttcaatttcttttatatttacggaagtagaaaaaatgttctgtctttttgaatgccacttagctgcattttcagaagcttataggctataagaagcctttaattt

SEQ ID NO: 1795 - DNA, 420 bp, Homo sapien
  misc_feature (1)...(420): n = A,T,C or G
gaacagctccggtctacagctcccagcgtgngacngcagaagacgggtgatttctgcatttccatctgagatatactaaggagcttttgcaagtcaatgtgcaaaaagacactacaatgagtggagaatcaacagtgctctcagaactttgctctcagaaaacttaagttaccaggcactaagtggctactcaaaatgtggtttgtggaccagaagcatcacatctcctgggaactaggtaggcctaatggaatcaagagggccctttagagtggaagagggaatttgaagaaagaaccagagacatgtcagcatgagaaggactcagcctaatcttgctgcctttgaagttggaggaaggggcctatgaagctggaaaaggtgaggaaacagattttcccccggggcctccaggaagaa

SEQ ID NO: 1796 - DNA, 434 bp, Homo sapien
attcatgaaaagacacaccctggagagaaaccctataaggaatatggaaaagcattcaacaatttctcttcctttcaaatacatgcaacaatgcacagaggacagaatgcctatgaatgtaaagagtgtgacaaagcattcatatctgccaagatccttcgagtacatgcaagaacacaccctggagagaaacccctatgaatgtaaggaatgcggaaaagcgttcaattatttttcttctttgcgtatacacaaaaggatgcacactggagagaaaccatatgaatgtaaggattgtgggaaagcattcagtttgcctggttcctttcgtagacataaaagggctcacactggagtgaaaccgtatgaatgcaaggaatgtggcaaagccttcacttcttctggttcctttcagtgtcataaaaggattcacc

SEQ ID NO: 1797 - DNA, 393 bp, Homo sapien
  misc_feature (1)...(393): n = A,T,C or G
gttatcttcagtccaaccactgaatttgttccacatgccatgctctcttaccaccatagctttgtgtgcaacattctcactcctggaatgacttccttctttctctgcttggtacacgtcaacaaaggttagcccaagaggcaaaaatggtggacattttataaatacttaattggctaacttgtaggcaccatgcagaacactttaaatccattatttagtttccctgacaagcctgtggttagaggctattgtagttctcgttttataggaaaccgagaaaacacaggaggccatagattattacctccttttgtttcatttaacatgttttaaataacacataactttactaacattttaataacataattttatttaacacatncacat

SEQ ID NO: 1798 - DNA, 420 bp, Homo sapien
  misc_feature (1)...(420): n = A,T,C or G
cactgtcttaacaatggtactgccctttatttacacagagaagatgctcagtaatgacaacttcatcccatgccaccttcccacctaaacaaactcactcctctctccacccacaactatattttcctacatctctatcatttcaaggtacttttagaaacaaagcttcaaacatttagaattggtgtctgataacttgattaccttcagagtcctgggtaaagagcaaatcaggcttcagattttgagttggcccatcctcctggcactgagccaaggactgttaggaaacggccctaagtcccaattccagttattggttacatcttgaaaaggagctctagtgttgtgggcaatgacccgctggccttgagaatcttcagtgaaaagttgactccaggagtccttgtcattcttttn

SEQ ID NO: 1799 - DNA, 438 bp, Homo sapien
  misc_feature (1)...(438): n = A,T,C or G
gacaacgcagccgtgataaacaagtggacgacttttcttaaggccagactgatttgctcaattcctggaagtgatggggcagatacttactttgatgagcttcaagatatttatttactccccacaagagatganagaaatcctgtagtatatggagtctttactacaaccagctccatcttcaaaggctctgctgtttgtgtgtatagcatggctgacatcagagcagtttttaatggtccatatgctcataaggaaagtgcagaccatcgttgggtgcagtatgatgggagaattccttatccacggcctggtacatgtccaagcaaaacctatgacccactgattaagtccacccgagattttccagatgatgtcatcagtttcataaagcggcactctgtgatgtataagtccgtatacccagttgcaggaggg

SEQ ID NO: 1800 - DNA, 438 bp, Homo sapien
ggcacgaggtgaaagagacttttttcaagaagtcaaggagagtgaaaatgtggtttgccatttctacagagactccacattcaggtgtaaaatactagacagacatctggcaatattgtccaagaaacacctcgagaccaaatttttgaagctgaatgtggaaaaagcacctttcctttgtgagagacctgcatatcaaagtcattcccacactagcactgctaaaagatgggaaaacacaagattatgttgttgggtttactgacctaggaaatacagatgacttcaccacagaaactttagaatggaggctcggttcttctgacattcttaattacagtggaaatttaatggagccaccatttcagaaccaaaagaaatttggaacaaacttcacaaagctggaaaagaaaactatccgaggaaagaaatatgatt

SEQ ID NO: 1801 - DNA, 441 bp, Homo sapien
  misc_feature (1)...(441): n = A,T,C or G
ttttatgacacattttatttgcacaaataatactgcatcagtttcattgagaaaagttggaattttgttatcaaaatcattggatgggaaactgcattttcagaacccacttcttttcctctttcactaacggtattccnttacaacttgtaaacattcatgaagaactctatcattgtgatccatttttaaaccaatgcacccacttggagttataatttccccataaaaactttccatgctgatcactttttttcctttaataccgctttgagcatcagggcacactgctccatccatccgcaggcgctgcggggtggagtttctatctcagtgcacagcatgaaagcttgggtccatctgtgccacacaaaaccaagcctctcttgaagtgatttgtttacagtgtcatttgatggagtggaatgttctgcaactcat

SEQ ID NO: 1802 - DNA, 437 bp, Homo sapien
  misc_feature (1)...(437): n = A,T,C or G
ggatcttgggccagccaagaaaagtgtgtctgtttaatagtctaaaaataaattttcaagttccctttagaacttctgcatttctcatacttagtttttaacttttacttccaaatggtctactgaaggaaaagaaaagtcttgattgcttcgacttttctcaaaaaaattatgaaacttttaaccnttggaactcacntgatttagaatatttattaagatttctaaaaataataaaaaatttgattatgtaccaatagagcctcacagttgaaatctttaaaaattaagaatgttaactatcacagatgttttctgccaattacagtaaggatatgtattctctattgtcaactacaaagataacctagagaataaatgttttatatttatatatgtacatctgcatgtctgggtgtgtgggtgaaaggagagag

SEQ ID NO: 1803 - DNA, 434 bp, Homo sapien
  misc_feature (1)...(434): n = A,T,C or G
tcggntgtntnttttttttttttgcttttttttaaagtccccaagaaattcaaaagtgtagcccaggttaagaacccctattaatgataaacagaaattgacccatgtccgctaaaaaatgtattaagtaggtttcttgtagagcaatatcaatgagaaaaacttttaatattcacaaccagtatattaagccttggaaaacattagcattattctcggggaaataactttgggactacataacaatggtacagattcaaagttctctgaatttactcatcaagtataaaataaagcctcttaaaatatcccatgctgctattattttaccagcttatactgataaactatttacagtttacaaagcgttttatctaaattctctgcttttcacaaaaaccctgatcaggtagggcaagtataattatcacccc

SEQ ID NO: 1804 - DNA, 399 bp, Homo sapien
  misc_feature (1)...(399): n = A,T,C or G
tgcaagaaatatcttctttcatacttacacttttaacatttttgtttatttaacagggatttttcatagcgtatattgacnttttttatacagtgtggaaatcatggtgttttaattgtagtagtcagtctgttcctttcttacattcctactgatatatttgggtataaacctattgttttctatttgcactacctgttctatattcnttatttccttttatcctcttttgggttgagttatattgttattnaattttnctactgttattaactggggattttccttcctgttcctttgatgggtaacttcaaaagattaaaacaagtaatncctaccaaaagtataacataaatgaacatggttaattttantttattcctcttctgaccttaacaa

SEQ ID NO: 1805 - DNA, 483 bp, Homo sapien
  misc_feature (1)...(483): n = A,T,C or G
ggaaattgaatcagcgatatctccggaagaaaattgattttgtcaatgttagctcacagcttttggaagaatctgttccaagtggagaaaatcagagtgtgacaggaggtgatgaagaagtagtagatgaataccaagagttaaatgcaagagaagaacaggatatcgaaataatgatggaaggctgtgaatatgcaatctcgaatgcggaaccntttgcagaaaaattgtccagagagctgcaggtgctagatggggctaacatccagtcaatcatggcatctgaaaaacaagtcaacatcctgatgaaattgctagatgaggctctaaaggaggtagatcagattgaattgaaactgagcagttatgaggaaatgctccaaagtgtaaaagaacaaatggatcagatctctgaaagcaaccacctaattcatcttagtaacactaataatgtaaactcctatctgagatagagttccttgt

SEQ ID NO: 1806 - DNA, 510 bp, Homo sapien
  misc_feature (1)...(510): n = A,T,C or G
tagctgggattacaggcgcccaccatcacgcccggctagtttttatattttttagtagagacagggtttcgccatgttggccaggctggtcttgaactcctgacctcaggtgatctgcctgccttggcgtcccaaagtgctgggattacaggcatgagcaccgtgcctggccagatatgncaanttcatttttttccctctcagatatcatagttttcatctctacaagtttgacttgggccttctacactcttaatctttcctttattctgtattcctcctttccactgtttcccacctatacactgcattcaaatgcaacgtggtgttccttctataatgtgtatccctcctatcctctgcatcccatatgtaatctacagcctcctcatcctgcttatttttctcacctcagcatctacatttatcttgcactactctgcttctggtccaggtaggaaacctactcaaganttcaactccacttcaactcttcaactggtcattcca

SEQ ID NO: 1807 - DNA, 372 bp, Homo sapien
  misc_feature (1)...(372): n = A,T,C or G
nngacgtgtccattaagtgcagatccttgacataattcccttacctctgtcgacctgtgaaactgaacaaacagcttatctgcccctaatgtgaaatgatgggacagacatagaataaccactacagtgattctagttcaaaatgagggaacatggaggggataaagaagtcaataacccaaaatagtttggaaatggagctgggcaaaatccagcaggagtttcttagttaggatccacagcctgggactgaccctctgtcctgtgggtcctttgcctctggctctctgctctgcattttcttgaaaccattataattaatcattttcctcaaantctttggcgnatggctccaatggcactcaaaatgtt

SEQ ID NO: 1808 - DNA, 471 bp, Homo sapien
taaatatccctccctcatacaagtgtatgttaccattttaatataattctttttgtatctttccttcttgttttgtgaagatttttgtggcatggattgctgtgctcactgctgtaaaaggtgacctagtgtactgggcagctggtggtggtgcagaaaagagtctcaggttattttttgtttttagttatttcttggaccttgacagtatctaatgactcctcctgaaaatgctgcagtataaaagagcaaagagctttgggaaatacctaagaagcaccttaagattagggtggcattgcttttatagattcttgattttaaagcaacaggcctttctcaggtgttgcattttttggagcaaaaactatgggttgtaatttgaataaagtgtcactaagcagttataacgtttgatggctggggggtaggaagaggatggaattgagatgtttgagcctcatttacatc

SEQ ID NO: 1809 - DNA, 516 bp, Homo sapien
  misc_feature (1)...(516): n = A,T,C or G
ctgcagttaagtgaaaagaaaatccagcctccccctccaaaaaaaaaaaaaaaaaaaaaaatttaatttttaaaaattagtggtatggcaataagacacttcagaggctatcttaacctctgaatacccatcttctagtttaaagacagagacatcccatctggaaaatgttaacttgtgttgccatctcgttgccggagtaagtagacataagacagagtttaagaagtaaaaatatagaaaaattttgatggtcacaatgagataaatattagaatattactattccaatgattaaatgaggatcttgaaataaattctgaagtcttccaatttttacatttattggaggggtccctgagttctgtcaacttttttatttaagtctcttgctcttattttgtgcataaatgttaaaccttccaaaaatgaaatgttagctttcttncttttactttttattaaatttaatggaaaatatgacctgagtagttaaaaagtattttgcattattgg

SEQ ID NO: 1810 - DNA, 110 bp, Homo sapien
ggctaactgacctggaaagaaaaagcaataacctcaaagtgactattcagttttcaggatgatacactatgaagatgtttcaaaaaatctgaccaaaacaaacaaacaga

SEQ ID NO: 1811 - DNA, 468 bp, Homo sapien
agaaaccaacacattttttcctgtgaatttgttaattaaagatagttaagcatgtatcttttttttatttctacttgaacactacctcttgtgaagtctactgtagataagacgattgtcatttccacttggaaagtgaatctcccataataattgtatttgtttgaaactaagctgtcctcagattttaacgttgactcaaacatttttcaattatgacagcctgttaatatgacttgtactattttggtattatactaatacataagagttgtacatattgttacattctttaaatttgagaaaaactaatgttacatacattttatgaagggggtacttttgaggttcacttattttactattatagaccctcttttatagattatcagggattatatatataaatatataaatatacataaaaatgttatggaattaatttattagaaacacttaagaagtaca

SEQ ID NO: 1812 - DNA, 117 bp, Homo sapien
  misc_feature (1)...(117): n = A,T,C or G
ggtaggttaacattagaataggaattggtgttnnggggggggtttgcaagaatattttattttaattttttggatgaaatttttatctattatatattaaacattcttgctgctgcg

SEQ ID NO: 1813 - DNA, 318 bp, Homo sapien
  misc_feature (1)...(318): n = A,T,C or G
aaaaacaagctgaaaaggaagaaaagcagaaaacaaagaaaatagaaacaagtgcagaaaagtnncnnncctcattanaagaagagnagngnccaaagaagaaaagaagaaaatcaacttcttcttcaagtgtttcttctgctgatgaatcagtgtcttcatcatcatcctcttcctcttctggtcacaaaaggcataagaaacataagaggaaccgttcagagtcttctcgcagttccagaaggcattcatctagggcatcctcaaatcagatagatcagaataggaaagatgagtgctacccagttccagctaata

SEQ ID NO: 1814 - DNA, 512 bp, Homo sapien
  misc_feature (1)...(512): n = A,T,C or G
ttcaactggatttcttttgacaatactgttggtacctattacttgggggaggacatgttgcggaagaccagatcatttttatacagaatgtgaaatactgatacagttattcttttttttaaagaacattgttttataaagaacgtgatttccagtgatctctggaagcgctaaagctaaaatttctgttcttgaaacacttcagctttgcaacntaaaatattacagattaataataaattaaaccaaccaatgataaacactactcagtccaccaacaacaaacggtgtttgaattcaccttaccaatattaatcccagcgtgtgtaaaacagaacagtaactctatgtgaccccagataacattttgtaacattgtgcttccttgtagtttgtaatgtgagttcaatcagtatttatgttgaaatttctaacattaaatctagtctctatcctgttaaatttaatttttnaatgcttaaccatttgtgcaaaggtaacgcagatggtac

SEQ ID NO: 1815 - DNA, 485 bp, Homo sapien
  misc_feature (1)...(485): n = A,T,C or G
gaagattttctttagcaagaataatgaggtcatgtcatttgttaataagtatctgtgataaatccgtggttcaaggttaagccattctggtattctggtattagcaactgtaaattctgccacctcatacatggaacagagcttgtgggatgctaatagttagtgaagtatacatgatttaatttctaataatctttatgttttctttaaggatggtggtgtattgctctttttcagctttatttttaagagtacagtcaggaaaccaacaaggggcctaagagtggctgcccctgcttgggacattacagcaagtgaaaccaaagttaatgtgacaagctttgcttttgttatcattggtccttcactaagaggataccttttacatgtacttctctcctggatcaaatatgtctttaactgtacatctcagtggctggaggcatgccttttaagcatgtgtaaaatttttnaaaagaaatgac

SEQ ID NO: 1816 - DNA, 147 bp, Homo sapien
  misc_feature (1)...(147): n = A,T,C or G
gaaaacccagtgattattcaagtccttttgtcatacagaccactcaagggctgaagtgttggtaaccttcatttcggtgtccaaagcctcacctgctgtgaggatttggntcgaaatgaaggtgangccacccctgagatgcntttt

SEQ ID NO: 1817 - DNA, 200 bp, Homo sapien
  misc_feature (1)...(200): n = A,T,C or G
aaggtgtncagggtgnnagctgcctgantgncttccagtggcatggntcttcccagtgacanagtgtgttccatggtcaannngtggcagacaatggttggancncacagttgatgtcangantnccagntggttanttnnttcagngngtngtgtgttggttttcntaaaanacacaacantcaaggtacnggaagacc

SEQ ID NO: 1818 - DNA, 478 bp, Homo sapien
tagtgttaaattttattgaatgctttctccgcatctgatttttcttctttaatatgatatgtttcattaatattctgatgttaagccttatattcccaggataagcccttcttggtcatagtagaggcagtgtgtctgtgtctgtgtgttttgttcagtatactgctggattcagtttgccagtatgtttgcctagtacttttatttaggatttttttgcatgtacattcataagaaagattgatctaaaattttattgtattgtccttttccagtgtttcaggacaatatcatagcctcataaaattaaatgggtagcttcctgcacctcttaccttttttctttttcttttcccttccagagacatgatctcactctgtcactcatgctggagtacagtgctgtgatcatagctcactgcagcctggaactcctgggctcaagcatcctcctgccccagccccccaagcagcaggg

SEQ ID NO: 1819 - DNA, 315 bp, Homo sapien
  misc_feature (1)...(315): n = A,T,C or G
tttttttttttttttttttttttttttagctttccttgatactttaatccaatgattaaaaatgtgatataaagaaatacgnaacatagactacaagctatcgtaggtctggaacatgagccttatattatattacatattctaatcctacatgnaactatcagtaaacatctttttttaaaacattactacacaaagaattccacaaagcatacattcaaacaagaggcatctaaagnttaaaaaaattacccgctgtatttttgnataaaaataatcaacattcnctaatgnacacaaagccaaaagataaat

SEQ ID NO: 1820 - DNA, 438 bp, Homo sapien
  misc_feature (1)...(438): n = A,T,C or G
ttgtctgtggttctggtaagtggcttgggggctcccatcaggtagagtcttgggttgaaaggatttgggatgacgtggtgaccggtcagtagtgagtcctacctgcgtagttctcaacccacctgccgaggactccacataattctgtttcgtctgaaccaaattacttgttccacatatgcacagagggtggtgctccagaaacttctcccagcttaatttgtactcacaggagatcaaaaaggaggtcaggtcttggtaatgatccagttggaataaatgttaagaccggacaaaacctaaccgaaatgagaatttagaatgttttgtaactccattatcagtctttgcanagaaaattataaatatgtactatagatgttagaacttgatttaacatataccagaatctaatgtcttaatgtcaaattgagtata

SEQ ID NO: 1821 - DNA, 476 bp, Homo sapien
tattggtgcatcctatttttaggttgctttcattattttattttttatacagatacatacacattgctagaatcaaagcaaaaatattaatgggcaggtactacagaactaaagtgaaacaaaacaaaacaacgaacaactgaaaaacaatagctataaactttcaaggccaaaagataagatttaagggcaatacctgttgaagaaggaaaaggagtataaagttcctagagaggtatttataatgcaaatctaatgccagctttttagtaataaaaaagagaagtgctttactatacactgactagcacataatacttaatttggaaagaaaaattaatgacgttccttgggccagcagcagatatggtgtgtccattgccggcaacagacacaacaccggaacagaaaaacccaaatcccagggctaaagtattcacagaagtaatggttgaaggtttcaggatttaacaggc

SEQ ID NO: 1822 - DNA, 370 bp, Homo sapien
  misc_feature (1)...(370): n = A,T,C or G
aagcattatagtactgcaaatcctttttccaccatcttttcaaacttttgccgtgacagaattgtttttgatacccacatagaaaagattaaatgagtagaaaagaagatcaatatgaaaaatttaaaggaactgtcatttttcagcctaggaagagagagaatgctgaaagacttctaatgtatggagtttaaacatcagatggtgattgattgctattaatttatgtcagcaaaggaggagaagaaataccgtaaaacctgcctcctgaagaatttacattaaacaccaaaaagaatcctgactcctggaaaatggaagaaaccaaggnatattgtttgttttgggaatccaaagaaaaaaaaaactt

SEQ ID NO: 1823 - DNA, 458 bp, Homo sapien
  misc_feature (1)...(458): n = A,T,C or G
ttttttgacatttcctttttatttgaaacatgcttttcttgagaatgacatgatcttcttgatatggtttagtaagcttcanctgataccaggttctaaggtcttttagatggcttttttttacaaatgaaaaaaaaaaaaaggacaaatttttaaaatctatagcgcaaggcttaaatacaaggaancacaattatttttacaattngtcactagttacttaaaaatgctgatggtaacaggatacatttttcctgcagaatagtttgtcaaaatttttgaaaaaccttaaaattgctcctaatctctgctcaagcagttctacttgcagaagtacaggacaggttaagaaaatagtcngaaatacnttccaaagtcctatgccaaagggncatccaggaacnctttttttnaatggatgaccaaatgngggtnatccaaaaggttttaaaacnaat

SEQ ID NO: 1824 - DNA, 496 bp, Homo sapien
  misc_feature (1)...(496): n = A,T,C or G
ttcagtttggagtctggcacaactccattatgtggattagagagtaagatattatggatgataaagtactaaatgaaacataatatttatttataaaagtgtgtagattgttaaatcacaaaaagagtgctatgaccattatgtatgaggaaacaggcctttgacctcctggaaagcactgctcaaaagtcattagtgcccatttttgaattccccaaacagaaagcttcttagaaaacacgctgagattttatttacagggaattctttgacacatttcaattggtgtgtagtcaagtatagcaagtacttaataatgactgaatttccatgttcctacagtccatacatattcattagaagttttatgttgttgggtccgatctgattcctccttgtttgtggggtggnacggcactgagagaagtatagttttttaaacctgaacatggtccagtagttacattnccctngaaaccccagcncctagccgtgg

SEQ ID NO: 1825 - DNA, 526 bp, Homo sapien
  misc_feature (1)...(526): n = A,T,C or G
ttccaaggggagaatgaagccattttatttaggggaatgttaaaacaaagccatatacaatctgtaacaaatacaatacaattgtttgttccctagtcctgaataattacagtatatacaaaatctgtaaggcactggttcccccaaaagaacaaatgagtcttcttgtgaaacagacaacgaaacccctatattgccaacttttctccaaaaaatatggcattgtttttttgttttgttttacaagaggaatcacaattgctaaattaagtcacttctgatgccatttctttcatttccactgctatgtgtctgggttttctaaggcaatgtaactactgaacatgttcaagtttaaaaaactatacttctcctcagtgccgttccaccccacaaacaaagaagaatcagatcagaccaacaacattaaacttctaatggaatatggtatgactggtaggaacatggaattcnggtccattantaaggaccttggccaaacttggcctacacncccattggaatg

SEQ ID NO: 1826 - DNA, 493 bp, Homo sapien
  misc_feature (1)...(493): n = A,T,C or G
accaagcatgcccggcgccatctatcagccaagaagctaccaaactggcagatggaagtgagcaagctaaatgacattgctctacctccaacccctgctcccacacagtgacagaccggaaagtgaagagtcagaactaactttggtctcagcgggancaagtggtgatgtaaaaatgcttccactgcaagtctgtggccccacaacgtgcnttaaagcagaagccccacagcctggcacgaaggcccgcttgggttaggtgactaaaagggcttcggcacaggaggtcacagaaaggcaggtttcatttcttatcacattaagagagattgagaaagctttttaantccctttggaataattttttttgnagggtttccgaattnaaggtcaacacaagggtagcccagatttttgaatcnggtgtgcaaaatttggntacctttacctttttgccggttanacttnggganccactttttcaagggggatt

SEQ ID NO: 1827 - DNA, 503 bp, Homo sapien
  misc_feature (1)...(503): n = A,T,C or G
tcacacaggacctttggccgctccttgtccagcgatcccagggcggagaggctatgacagcaattaaatcgcacaaacttttgaaccgtccttgccctgcagctgttaagtcagaggaatgcctaactctaaagtcgcatagactattgactcgatcttgttctggagatccacgatgtgagcacaacacaaacttgaagccccataaactgttaagcaggtcttactctagtaatctcagaatggaagaattatatggactgaaaaatcacaaattgctcagcnagtcctactccagtgcccccaagtcatccaaaacttgagcttttccaaggaaccttaacgcagaaggggcaggaaggctctctccttacctcagggcttatttgggtatccctaacaccatcnttcatccttcatcttcttaagtttgctccnaatgggngcaaaatgcattccagtacgagacngtgggttcnttggngcagaaanttgagttttgg

SEQ ID NO: 1828 - DNA, 525 bp, Homo sapien
  misc_feature (1)...(525): n = A,T,C or G
tttcaatctgtttattgtatgagcaacccaaacttcagtttaagtgctgttgaaattttattactagattccataaccctacaattgataaatcttataccattttaggtatttaatgagatacttagaaatactaagaaaaaaaatcagtattcaaagggttaattttgtttataataacaataaataattttataatcttcttcagttcaaaatccagctttgaacccgaggaaggctttcgaatcatgttaattaaatggtggtcctttaaccagtagcagtttgattaccaattactcggaggatctctttgtgaatgcctccttcttgtgtattaatatttgcatctcccacttggccgtcttcatagacgaaaaagaatcgtgtgcagacatggtcagtattgggggacaaccccatatctccccatggtttgtgcaggtccagatganggtgatccccttccccataagggctatggcattttaaagttaccgggcttgncagggaatttggggatgg

SEQ ID NO: 1829 - DNA, 477 bp, Homo sapien
  misc_feature (1)...(477): n = A,T,C or G
ggcatcgagctgtcttcccaatttatttagatgatgtatatgaaaatgctgttgatgcagccagattacattacatgttcagtgctttgcgcgactgtgtacctgctatgatgcatgcaaggcatttagagtcctatgagatacttctggattgctatgacaaggaaattatggaaattttaaatgagcatttgctggacaaattatgcaaagaaatagagaaagatctgcgactttcntgtgcatactcatttaaagctggatgaccgaaaccctttcaaagttggcatgaaagacctggctcntttttttctctcctgaatccaattcggtttttccaatccgtttccattgacattcgggcttacgtaactcactaccctagacaagactttctacaatctaacaactgtagccctcatgactggggccacttatagtgagatgngaaacttagccactcagcggtaatggact

SEQ ID NO: 1830 - DNA, 435 bp, Homo sapien
gagcatcaccacttattaaaacacacatagaatgatgaattaaaaaagttttctaggattgtcttttattctgccacatttattgataaacagtgaaggaatttttaaaaaatttttaagaattgtttgtcaccgtcatttttagaaatgttctaccctgtatatggtaatgtccagttttaaaaatattggacatcttcaatcttaaacatttctatttagctgattggttctcacatatacttctaaaagaaacttttatgttataagagttactttttggataagatttattaatctcagttacctactattctgacattttaggaaggaggtaattggtttttaatgatggataaacttgtgctggtgttttggatccttatgatgccgagcatggttctgcactgggtgccaatggtccaatataatttt

SEQ ID NO: 1831 - DNA, 186 bp, Homo sapien
  misc_feature (1)...(186): n = A,T,C or G
aatttcattcctttttattgctgaatgaatattccattggatgtatatactacattttgttgatcagttcgtctggtgatgaacacttaggctgtttctactttttgtctgttgtgaataatgcttaatgcttctgtgaatatgagtgtacaaatatctgttngcatctccagcttcaatnctttg

SEQ ID NO: 1832 - DNA, 424 bp, Homo sapien
  misc_feature (1)...(424): n = A,T,C or G
aggcattcttctaaattaaacatgtattgtttaattctcattaaaatcctgagaaaatggaggtacaaattttggggctggccaaagttaaaggtaataatttgagaagcgtgtgctttaatagcagaacacaggtgcctgctactcactcaaaacaggggctgctggtgtgggtggagtggggtgcaggctccttcccacaggaaccaggaagtacagcctgccattgncagaaggctgctcaaagccaggccacggatggctctgtgtgggaagctaacacacatggacagggtgggtgtctgcagaggcagatctatggttcctcaaccttgggtaaccctgttaaaaatcacctggggaatgnacccgaaaaccattatgctaagtgaaagaagccagacnccaaaaggncacatactgg

SEQ ID NO: 1833 - DNA, 187 bp, Homo sapien
  misc_feature (1)...(187): n = A,T,C or G
ctaaaaaagctaaagggaaagctcaaaaatcaaataagaagtgggatgggtcagaggaggatgaggataacagtaaaaaaattaaagagcgttcaagaataaattcttctggtgaaagtggtgatgaatcagatgatttttggcaaccnggaaaggnccaaaaaaaaatcnggaaaccnagccaggt

SEQ ID NO: 1834 - DNA, 178 bp, Homo sapien
  misc_feature (1)...(178): n = A,T,C or G
ttttttttgctttttcctttctcttttttcttgttccaatcgttcctcttctttacgcttggcttctaattcttcaagccgttttatacgttcttcctcttctctcttctgtctttcttcttcctctttaagcttagccagagcttcttggaaaagggttnaaaagggggntttgcca

SEQ ID NO: 1835 - DNA, 323 bp, Homo sapien
ccaggtcatgtaggacagtatagctcaaggtaagcagtggggatttgaagtgtactgagtaatcattgttttactgagtaatcaaagctttaagtggaggtgtaactttgtctggtttacactcttgctgccatgtgagaataggtggtgagaggcgagaatgaaagcagggaacctattgtagtactccagatgataaagttagagatgtattttggaagtagaactaacaggcgtgatgcacgtgtttttgaggaaattgaaataatctggaatggctacatggcttttggtttgaatggtgggcaatgatgtttattgag

SEQ ID NO: 1836 - DNA, 278 bp, Homo sapien
ttcaaaccaaaagccatgtagccattccagattatttcaatttcctcaaaaacagtgcatcagcctgttagttctacttccaaaatacatctctaactttatcatctggagtactacaataggttccctgctttcattctcgcctctcaccacctattctcacatggcagcaagagtgtaaaccagacaaagttacacctccacttaaagctttgattactcagtaaaacaatgattactcagtacacttcaaatccccactgcttaccttgagctat

SEQ ID NO: 1837 - DNA, 443 bp, Homo sapien
  misc_feature (1)...(443): n = A,T,C or G
caagcagganancncntnagagnagtcanccnaggnnngtcttnanatggcaattctgcagnccatgancnnntgcattanngnnttgctnacgggcntnaaatngnttgatgtgaagacggaaaactccaagcaggaaggattttaacattttgaatctgattgactcatgtggtttctcagcacagttattccatgggctaaaataaatgcagaaatggtactttcagaccacagcngncagaggggatcgtggtgaatttcaatgaaaatccatttgaatcttgaggttcagatcttaaaaaagcaaaggacatgagagaagtaatattgttgcntgggantntcattgcttatatctaaaagaaactcctatttttangagaaatgtttgaatctttgcaacgtggtagacgctccacaanactttctcctgaaatagg

SEQ ID NO: 1838 - DNA, 433 bp, Homo sapien
  misc_feature (1)...(433): n = A,T,C or G
gttctgtggagccagaattcaaaacccagatacgcaggaggacacattcttgatcggtattttattctattatttttattagttccaatccttatgactctgtttaaaatgagtatctgcattattgtgcaaacacttctgagatctcatcacatacctgatcccatttaacttcagtctatccctccattactttttgtggaaagtgctatctaagttggaggttctgcttgagtattcttaatttttcttctttttaatgcatacggtggtcaaagtaaatagctaacatattggcatcaaaccattgcctattgaagcaagctttgaatgaaattggtttgtcattgaccactgtaagaaactcatttggtaaagagaatactgaaaaacatcctgactcntatgtatgcttgcctgtctcngaactcna

SEQ ID NO: 1839 - DNA, 440 bp, Homo sapien
  misc_feature (1)...(440): n = A,T,C or G
gttctgtggagccagaattcaaaacccagatacgcaggaggacacattcttgatcggtattttattctattatttttattagttccaatccttatgactctgtttaaaatgagtatctgcattattgtgcaaacacttctgagatctcatcacatacctgatcccatttaacttcagtctatccctccattactttttgtggaaagtgctatctaagttggaggttctgcttgagtattcttaatttttcttctttttaatgcatacggtggtcaaagtaaatagctaacatattggcatcaaaccattgcctattgaagcaagctttgaatgaaattggtttgtcattgaccactgtaagaaactcatttgtaaagataatactgaaaaanatcctgactcttatgtatgcttgcctgtctctgaactccacctctaat

SEQ ID NO: 1840 - DNA, 473 bp, Homo sapien
  misc_feature (1)...(473): n = A,T,C or G
ttatattattatgacaggttcttcttttattaatgtatgctttgacaatggaaaaatggattataaccttctgttgttagccattatttnattatttaaaatacataacagtcatttaaaaatttttgtataacaggacatatatgtttagaaaagcaatctcagcaacaggtctcatagagaaatacatctaataatttgcttcaatggaaatcactgctgcttcttcagggcaataacagcataacatctaggagatttcacgggatcaaacaacttcacaagagcagaccatgcaatatcttcctgctctttcaggtaacaaagtcgatccagaaagaatcaaagtctctatacagggagccaagtacaactttcaacattattaanagcttccagctcattcattcgaggcttatacttctcggagtagttcnttataattttttctggcagcttggactcatcnaatc

SEQ ID NO: 1841 - DNA, 474 bp, Homo sapien
agcagaaaagtgatattgttctcaacatgacagatatttgagttcctacaatgggaaaggcacattaatgatgtttttctttattgcctataattatggttcgatatactcaggaaatctcttgggagagatatctaacccttctcaaagatggcttgaaatgttcagcacttgggagaggttgtcatagttaaaattaattaggaacaagttcatccaatagcaagtctctcaggaataatctaagagtgcattcctttgttttcactctatttgcagacagaatgctagtaacagactaacgtgtaatagaaaaagattgagtatcattagcaacgaatcatagttcagaatctctgcaatctctaatagtgtgattttaaaggcctaatctaagatattttacttgttctttagggaattaccaaaagcactttatatacttgtttgtgagtttggggcctaataaaattg

SEQ ID NO: 1842 - DNA, 381 bp, Homo sapien
  misc_feature (1)...(381): n = A,T,C or G
ctgctaggactacgggcacacaccaccatgcccagctaattaaaaaaaattttttttttgtcccagatggatttcactatgttacccaggccttgaactcttggcttcaatcaatccttccgcctcagcctcccaaagcactggaattataggcctgagccactatgcctaccccaaattagcagtatctatgcagattaaaagtatcctctggcccaaaaattacacctactagaaattaattccatatgctcacacatgtggcacaaaaacatgtaaaagagtatccactggcagcatagttggtaacaanagattgaaaccaaataaatggtccggcattaggtgggccagtaaaattaattacngtaagttcncatt

SEQ ID NO: 1843 - DNA, 343 bp, Homo sapien
  misc_feature (1)...(343): n = A,T,C or G
tttttttttggtcattacacaggacttcactccagagttaccattatgagtgtgttcagctctggtccacagaggatggataaaaatggtttgttatgtttttttgctctgcagtgctatgagccttatatctgttaatatgaaggacaaagtcaaaagcagcagtggatagcaggaagggtagagactaatatgtttgggaccaaaaccatctaagttagagatttccagatcacagaggggctgggcattctctggagcagtcattggttggtgctttattgtaatcattttgcgccaatccccaacaattnggaactggaccctgggaanaagctgaggg

SEQ ID NO: 1844 - DNA, 468 bp, Homo sapien
agagttttaacatcatatttggtgaatgtccatattgtagtaagccaattaccttaaaaatgtctggaaggaaacactgaaataagaatacaacatttcggtgaagagctggaaacttaaaaaattatcaaaaggaattttggtatcatcttcagagaaaaaataaagcaagaaatactaacatcaaaaggacaggtatgatgatgcgataataataaacatctgcgtttgtctcttcactaagagtaaactgggaaattgtaggccaaagtccagttgaactttctaagtctgtgatccccgtgctgactgtggaagtgtatttataccaagatggagatcttgacttcttgaatatatctggactggtaaaatcttgatgaggctcataaaatgagtttgggaattgtgtatagctgattttttggtgggaactgtttacttcatccaaggtcctgagactcctga

SEQ ID NO: 1845 - DNA, 474 bp, Homo sapien
  misc_feature (1)...(474): n = A,T,C or G
tttagtgttacatgggaataaggaatttcattcacttcagccactaagaaaagtttagaatcacgaaagcttaactgctgtggtttaaagtacagtttctctaaagatcagacatggcactgtctcctctcaagcctggttgtagttcagatgagtcttttcaacatggtcttcaacatggtctagagcttaccagtgatcttctgatcttcaagaagactaagtttgagacttgaccagcatacaagtatagagacctaggaggtggtcttgtggtggtacatttggttaacccattgctggcagtgggagctgatttaggcagggtaaacaggaaagcattaaaagttaaaattcactacaggttttttgttacttttnaagggaatatggataagcatagtaacaaaacccaccagaatctaagcagttttcaccccctccagaaaccccctgtccnttagtttancaaag

SEQ ID NO: 1846 - DNA, 282 bp, Homo sapien
  misc_feature (1)...(282): n = A,T,C or G
aagtgaggtttttcttgactataagttttcccttttggaaaaattcgctgtggatttgagtatattttctcttagacattaaattgagactgagaatttaaaactttttgtagcaatgtattgataatagaaagcattaaagctgttttgctaagtagtgttgttgattcagaagtgatttggactatccattcatgacaccgtaaatattttgttttggactccttccaattgtttcattagataattgaaacaaccttttggattttttngctttgcatt

SEQ ID NO: 1847 - DNA, 480 bp, Homo sapien
  misc_feature (1)...(480): n = A,T,C or G
aggtgcctcagccatcccaacaggtgtcgtcagagggtccccagggcattttcatggcaagtacccctctgcccccactccagcagtgcttcccaaagtgtgctctgtcacctgctttgcaatcggcttccattagcgcatgttttattttggtgtgacggttggccctcctaaacacggactttcctcaggctggttcaagacggaaaaggactttcttctgttttcttccaaagtgcaaccacagtggagagcccacggtgggcttagcctgcctaggcccttccatttctcttctttgaccgtgctaggaattccaggaaagtgcattcctgccctggtgaccttttcctatgtctaggctcctccacaggtgctgctattttgtgagctccggctcctgtttaagcttttaattcagttctaacctcagtncagaaacatatgtgangttgntttccctctttagccaaggctaca

SEQ ID NO: 1848 - DNA, 311 bp, Homo sapien
  misc_feature (1)...(311): n = A,T,C or G
ngtnantgcatntggattgnggtagctntanaanttaangnatgatagatanatatgaggggnaanagtctanatggntnctnttagtacnntngaggctantatntagtctgtggctgacagntgctantanangnaggggtctangcctcagncagagaagctatnnattantattagcnttngttnctgcntagcttcntcnntgtgattganagcntngnggctgaangcttattttaatttattaattgctttgagtacaactttaanaggatatcatggggtcctgggcangccacacgctggtg

SEQ ID NO: 1849 - DNA, 123 bp, Homo sapien
  misc_feature (1)...(123): n = A,T,C or G
aggntggggcanagngacaannggagagganngcgannncncaccccacggtaatagcagcnccggtggccnccaaagntcnctttgccagtagctcnnagggacngaaaacatgcacncacc

SEQ ID NO: 1850 - DNA, 476 bp, Homo sapien
  misc_feature (1)...(476): n = A,T,C or G
tcgtnncntcggttctgagaaataggcactggcaatttacacatgccttgctgtgtaatctcactatatttgctcaggcaaagtgggagaagcagccttaggttttcattctagagatgccggctttcccacctgatcggcttagagttcacgattgactgttttgggcttcatttcaccctctacataacaagcgggtggactagatgccttagcaagggtccgtgttgtgtggtgtctccagccacgcactcagctcaatcttagcacagttaaaaaatgcctttctagcaagttatctgcccagtgcctgaaaaagtatcatttcttgtgttcaataaaaaagcctcctaatttaatcaaggacctatggagataactgtcttttagttgtggcattgcaaggatacaaatgcagagatattttaaaagtgatccttctgtaagagtgaacccacgatatgatctggnagcaa

SEQ ID NO: 1851 - DNA, 420 bp, Homo sapien
  misc_feature (1)...(420): n = A,T,C or G
tttaatccacagccaaccccaggagatcaacagggtgtagactgtgaggcctagagaggtcaagggaccttcccagggtcccagaggttgttggtggcaggactggcccctaacccactgctgttctgcttctcccattcttgcatagagtaatggagttagtgaaaatgggctttcttttacaacacaaagtgttgctcnttctttctcctagggagaaagtagtaagctctgtgggtgtaggaggaggaaaatagcaggagcttagccaaggagggtgctgcaacacattgtgggtcttcatagtccaggaagggtgagtgacacccaagggtctgaggagctggcattccagagtggcatgcactctgccctcagagaggaggcattcacctgggaccttgccgtcctaggacctta

SEQ ID NO: 1852 - DNA, 457 bp, Homo sapien
  misc_feature (1)...(457): n = A,T,C or G
tttgacattcanactaagaaactcatgagagtgaaagggggtgctattaattaagacaggacaacaggcttacttttaagactaccctatgaaaacatattcttattgttaacctatatgcctgtttccatttttctgtttgcctaatgaaggggaaaattgctatccttgctagttgctttancntgtacttttttttttctgtttgctattgccttatctgaaaagaaaaaatattattgatctctgtttaccaaagtgttctgattcttgttaatagtcctgcttaagggccgagggtggataaaggagcctggattatgcagatagctatgccctgtcttccctcagctgcatgttctccgtttgcccctggagacacactctcctctattctcctctccactctcttctcagtcccgagacattgacctgggatacatcaaaactccttccn

SEQ ID NO: 1853 - DNA, 485 bp, Homo sapien
tttttttcctgtcacccaggttggagtgtagtggcgtgatcatggctcagtgcagcctcaccctcccaggctcaagtgatcttcccctctcagcttcctgtgtagctatgactgtaagcatacaccaccatgcccagctaatttttctattttttgtagagatggggtttccccatgttgcccaagctgatctcgaactcaggagctcaagagatccacccacctctgcctcccagagtgctaggattacaggcatgatccactgcacccggcctggtaattctttctgtagccctcatcgcatctctaattacttgctttcccaggtattactgtaaactttaaaagagcatgcactgctttcctagtacatggcgagaattccgtgtttaatgaatacataaatgaataaatttaaaaaaatgactgcaagcaattgtttccactttaccagatgtttggtttggttaaacacaattttaaaa

SEQ ID NO: 1854 - DNA, 397 bp, Homo sapien
  misc_feature (1)...(397): n = A,T,C or G
taccccttaaatcttcatcttccatcttcttcacagttttactactctgagtgattttattcatgctcatggctttgtatatggttataatatgaaaccctaaagctgtatcttgaaaaagtggcctagaccacttttcctgggccacgagaaccatatgtcccatcccactcttggcatatagacccccccttttaatgtaattagnattctgaacttattcaacngtgagntatcttaacttcattttcccaatcttgaagtttctgntaattaaaaaatatattgggcaatggncacagacttgtttgatgtttttataatcatcacacactagttatacaacccaaagcaaattatttaacctactntggtnagttttctactgctgcataac

SEQ ID NO: 1855 - DNA, 400 bp, Homo sapien
gactccaccgaatatactgggcctgagagttacgtggcagaaatgatcaaggaaagaaaccttgactggttccccaggatgagagccatgtcattggtcagcagtgattctgaaggagaacagaatgagctgagaaacctgcaggagaagcctggagtccaccatgaaacttgtcacgaacctttggccagctgtcggaattaaaggatcagatgacagaacaaaggaagcagaaacaaagaattggtcttctaggacatcctcctcacatgaatgtcaacccacaacaaccagcataagcaaatgaaagaaaggaattgtatttaccttttataattattattagtgtgggtatggctaatgagttctgattcacccacgaaggttacatttatgctgg

SEQ ID NO: 1856 - DNA, 460 bp, Homo sapien
  misc_feature (1)...(460): n = A,T,C or G
ttttttttttttatagagaatattttattagactttacaaatgacaactgcataaaacagaaaccagtttcatgatctagtttagggagtatgtattttatacaactcataatcctttacaaatagaaaaaaatcagtaatacactgaatcaacttgaagaatcttcagcataaagttcaacaaagtcccttagatgcaatttcntttggntttacagcaacactttttgttatgttgtatgtcttgtaaattccaataagtctatccgaaatctcaaacatattatttcgaagagaaattattatgaactgngcatttttngtttgttcatatatataanatgcaacaatgggcacatttttaaaatcaagggntgcatcnatctcanccanngaagtaaaggggagtgggcctgtagtggngaagngcnaatnctaaagccnatgaaccaagtggttt

SEQ ID NO: 1857 - DNA, 498 bp, Homo sapien
  misc_feature (1)...(498): n = A,T,C or G
tttatttctgaaatgtttcttttaatcaatacatattaagtatataatttccttaaaaattaacaaataactctgattttcactgttaggacactgttacagagaaggaaacatattgctcttctaacttttcttctttttacatttatccacattccaagtagattatcatagtaaggttcttctgtgttacttttgtccaagttgtgacaactgttttatgaactgtgtagcattaaaaagctcactgcagccatataaaatgtgtttgccttgtttcccctttatgtagtcaacaagattctgatattcaatgtagttgcctcctcccaccacaaaaacaatggcctcttggaatggatttttatttctgggaactgagctgtcattgccccgcagcattttgggatcaaatatctatagtcatcagtttcgggggtttgacttcatctccataagattgtccaaaatacgagtaacaggnagantttgctgttt

SEQ ID NO: 1858 - DNA, 474 bp, Homo sapien
  misc_feature (1)...(474): n = A,T,C or G
taaagttgttganagtgttaaggtgtgcactgctcgtttgtttgaccaacctaaaatagaagacccctatgcaattagcttttctccatggaatccttctgtacatgatgaagccagagaaaagatgctgactcagaaaaagcctgaagaacagcacaataaaagtgttcatgttgctggcctgtcatgggtaaagcctggctcagtacagcctttcagtaaagaagagaaaacagtggcgacttaagagatggtgaatctggtgcaccatgcactttcctgctagactctggcctagttcaagctgaccaatggcagaggactgcctgaagagtaaaactgtgtgaacaatgactgactgccagtgttttccatgtatgcataggttctaacagcagggtttggaaacctgtctctaagtaatgcattacttctgtcagaagtgtcttagggtggttatctagttcagtactc

SEQ ID NO: 1859 - DNA, 480 bp, Homo sapien
  misc_feature (1)...(480): n = A,T,C or G
ttttaaaaacttnntagactctttgcaaaatgtatattactaacatagtttggaagaaaaattgagtagtggtaagttttgttcaagcacaatgttgaatgttaagcttcctgtattaattttagttcagttaatggttcagcccatacaaaggtgctatcctagggattttatgaattcctgaaaggaaaatagaatatgatcaattccttgccctgtggaagagtgcagaactgtggttttgttttcctttgacttctgtaaaatgtgaccgtttgacatctgtggtagattgaacggaatatcacagctgctgagtttactccatagctttcaaaccttttttattttaagaaattcttgaaaaaccctatgttccatgggaacataaagttattatagtgcctcctaaggggttaatataaatcaaggaggaagtttatatttaaggaagaattggagtgacgtatcctagaaaaa

SEQ ID NO: 1860 - DNA, 473 bp, Homo sapien
  misc_feature (1)...(473): n = A,T,C or G
atgagtgtgggagcacttcagctctgtaaggggccagcgttctgacctttaaccacatgaactaacctgcgtcantntgcagaaagtagcctgttaggacagcagctgctaacgtntgcctggtattttagtggggagaaggctgggactcttcatggcatcaacacttgcatgctctgaatctttgatcagagatgaggtgccatttttggcatttccaccccgtctcgtggtagcctttaaaagtggtagaagatgctgccctaattccccgaggatgattgtcattccatgcagcataatgtgccgtgagagttttctcattccagttctttggacttcgtaacattggaattgtttttccataatttccggcattccataaatatttgtcaaggacaaagaaaaggaatgtggatgtttattcttttcatatgaatgactttgtacacatgacttcctgctttcattat

SEQ ID NO: 1861 - DNA, 419 bp, Homo sapien
  misc_feature (1)...(419): n = A,T,C or G
ttttttcagggtgaacaggatcattttattctcatttatgcttaaaataaagatacaattcaagttttacaattcagtatgattagacgtgatttataattttaacaatttaaaaaaacaacagaaataaagaactagtacaaactttaaaactaccagagcaaagagaactacctttctgatcaaaacatgtgccacagttaaacttccttagaaaactttttaagttttctcagctaaattttctttaaaaaggtttgtgaaaagcctttaatcataaatatttaaactgtttttgtaaccactaaatgccttcaccaactcattaatccaatgntttctaaattcaggaaccagtgaccaagtgggctgaaacatgtaagccttgatcctattcttccagctacaaatactnatat

SEQ ID NO: 1862 - DNA, 459 bp, Homo sapien
  misc_feature (1)...(459): n = A,T,C or G
gccagtttgatgaagaatcactggaaagctttancagtatcctgatccagtagatccaacaacagtgactaaaacattcaagacaagaaaagcgtctgcacaggccagcctggcatcctaaagataaaactcccaagtcaaaaagtaagaagaggaattctactcagctgaaaancagagttaaaaacatcaggtatgaaagtgccagtatgtctagcacatgtgaaccttgcaaaagtaggaacagacattcagcccagactgaagagcctgttcaagcaaaagtattcagcagaaagaatcatgagcaactggaaaaaataataaaatgtaataggtctacagaaatatcttcagaaactgggagtgatttttccatgtttgaagctttgcgagatactatttattctgaagtagctacattaatttctcaaaatgaatctcgtccacattttctta

SEQ ID NO: 1863 - DNA, 496 bp, Homo sapien
  misc_feature (1)...(496): n = A,T,C or G
tttttttttttttttttttttttttttttgaaaagtaaaaatatttggaaatgtaaatgatacatacatagtcattcactaacactggagattcagtatcaggacttccagccagagagctttcaggagtttcctgagcagatttaacttctttgactctaggcactaagggttccatttcaggtaaacgtaacggcaaagggttaggctgttgagttgaatcaacagtaggaggtgactccttatgggcagcactatttaaaggttgctcatcttccaagatattgaggtaacagggtttcacaggacagttattttggtcattttnactagtggcttcncgttccaatgggacatttttgctttctgctgtctttttaaagtcacgttgtaggacctgttcatnatgttcattttcttcagtagcctcagtgttagcctggagggaagtctggacatccacagggccttcttcaaattcttccatttcttcatc

SEQ ID NO: 1864 - DNA, 478 bp, Homo sapien
  misc_feature (1)...(478): n = A,T,C or G
ttttaaaaacttnctagactctttgcaaaatgtatattactaacatagtttggaagaaaaattgagtagtggtaagttttgttcaagcacaatgttgaatgttaagcttcctgtattaattttagttcagttaatggttcagcccatacaaaggtgctatcctagggattttatgaattcctgaaagaaaatagaatatgatcaattccttgccctgtggaagagtgcagaactgtggttttgttttcctttgacttctgtaaaatgtgaccgtttgacatctgtggtagattgaacnggaatatcacagctgctgagtttactccatagctttcaaacctttnntattttaagaaattcttgaaaaaccctatgttccatgggaacataaagttatnatagtgcctcctaaggggttaatataatcaaggaggaagtttatatttaaggaagaattggagtgacgtatcttagaaag

SEQ ID NO: 1865 - DNA, 469 bp, Homo sapien
  misc_feature (1)...(469): n = A,T,C or G
caagccacaaagaaattggatttatggtccctgcctccagtacttgtagtacatctcaagcgattttcttacagtcgatacatgagagacaagttggataccttagttgattttcctatcaatgacttggatatgtcggaattcttaattaatccaaatgcaggtccttgccgctataatctgattgctgtttccaaccactatggagggatgggaggaggacactatactgcttttgcaaaaaataaagatgatggaaaatggtactattttgatgacagtagtgtctccactgcatctgaagaccaaattgtgtccaaaagcagcatatgtactcttctacccagagacaagacactttcagtggaacttggctttttttccccctgaccgagaaactaaaggtgcttcagctgncactgggatccccattagnaaagtgatgaagatagccatgataatgnccatg

SEQ ID NO: 1866 - DNA, 503 bp, Homo sapien
  misc_feature (1)...(503): n = A,T,C or G
nanacttaaaagggatttanttgtgatttcctatatatatttagcttgtaaatacaagactgtaaatgtattaagagacaatttctgttaaagttttcattatgtttcacttcaagtactgcacaagttaaaatctgataaaggatttacattcggttatctgaaactccccatctcagacttttgttttaatgtggtgggtaacttcatcatttccatagataccaccagcaggaaagtgtctcttttatggcttctaggactttcattagttagtgtgcatacagttttcattttctatatcattgtcattatcattgctatcttcatcactttctaatgggatgccagtggagcttgaagcacctttagtttctcggtcaagaggaaaaaagccagttccactgaaagtgtcttgtctctggtagaagagtacatatgctgctttggacacaatttggtcctcagatgcagtggagacactactggtcatcaaatagtac

SEQ ID NO: 1867 - DNA, 490 bp, Homo sapien
  misc_feature (1)...(490): n = A,T,C or G
attgttgatcaacaaaatttgttgaaaagtgtagcatcatactcaaatacagcagtacatactagggaagtttctgtaatgttggtcctccttgttctccccctaccttcccccctaaaacaaccttagtaataaaaaaaaaaaacacctagcacagttgcaaatacattcctgttttttaaaaagccagaatatacgtgtgtgtgtgttatatatatagttttaaaatgtgccctataaattttttagtttttcccttggtcttttgcaaaagaaaacaaatcctcaaatatacttagagctacatcataaaaatgatcttgaattattgggaaaggaagggcgtgtactctctttatgaaggtagagaaataagaaaaatacaatcaaaaatgtttttatctgtgctgaattaagaatatcctaccacgtgagagttacccgttttggtaattttttaaaanattaaccacctccacccattccaaga

SEQ ID NO: 1868 - DNA, 480 bp, Homo sapien
  misc_feature (1)...(480): n = A,T,C or G
atgagtgtgggagcacttcagctctgtaaggggccagcgttctgacctttaaccacatgaactaacctgcgtcanattngcagaaagtagcctgttaggacagcagctgctaangtntgccctggtattttagtggggagaaggctgggactcttcatggcatcaacacttgcatgctcctgaatctttgatcagagatgaggtgccatttttggcatttccaccgcgtctcgtggtagcctttaaaagtggtagaaagatgctgcctaattcccccgaggatgattgtcattccatgcaagcataaatgtgccgtgaggaagttttctcattccagtttctttggacttcgtaacattggaattgtttttccataatttccggcattccataaatatttgtcaaggacaaagaaaaggaatgtggntgtttatcctttcatatgaatgactttgtacacatgacttcctgccttcaata

SEQ ID NO: 1869 - DNA, 502 bp, Homo sapien
  misc_feature (1)...(502): n = A,T,C or G
ttttttcagggtgaacaggatcattttattctcatttatgcttaaaataaagatacaattcaagttttacaattcagtatgattagacgtgatttataattttaacaatttaaaaaaacaacagaaataaagaactagtacaaactttaaaactaccagagcaaagagaactacctttctgatcaaaacatgtgccacagttaaacttccttagaaaactttttaagttttctcagctaaattttctttaaaaaggtttgtgaaaagccttnaatcataaatatttaaactgtttttgtaaccactaaatgccttcaccaactcattaatccaatngttttctaaattcaggaaccagtgaccaagtggcctgaaacatgtaagccttgatcttattcttccagctacaaaatactaatattttaagnaaacaaccaaatattttctaagcacgnagcttcnggaaacttccattaccttttctggctcagtacctactgga

SEQ ID NO: 1870 - DNA, 446 bp, Homo sapien
  misc_feature (1)...(446): n = A,T,C or G
ggaaatcagcaggaaagccaagcaaggaatctgccttgaccctgagcccccgaatggaggggccacccctggncaggcctgcccagcaggaatagctccgggtgcttaatgccaagctggtggaagcgggacacacagagcggccacacacactgcacattcatctcaaaaccctaggcccgaagtcatgaatggcaatttttagagacctaaaggcctaaccctccactagagaatcatatcctaagtatctggttttacnaatctcctaggacagaaaggaacatctgagaaagtggcaagagggacccggagaagcttcactgatgggccacgggacttaggaaaagagggtgccgtgacggangcttgggatgctcnccagggcttggccaggntcttcctctttcagaaagctggcatctggaaaaggnggtgaaaattta

SEQ ID NO: 1871 - DNA, 453 bp, Homo sapien
  misc_feature (1)...(453): n = A,T,C or G
ttttttttagatttcacagcatctttatttatagcacttaaaaccaggaaaacagtgcaaatatatctcataggtgaatggataaactactacatcaaatatgtatactactctcaaatataaacaactttcatctggttagatacatggtggtaaaaaaaaataataanacaactattcatcaactcatataaaccttaggagtaatttgctgagtgacaaaaatgccaaaagcttacatactctctatcaataaaaattcatataacttatttatataanatttataaaaaccatttacaaaaacaattttgtttttatcntattcntgaaatgatgaaattatacngataggagaaaagtggttggcagagttaggtttggatggagtgtaagcctaaaaggtagcatgagggactttgtgttcnttagtttnatgtgggtgcngtggta

SEQ ID NO: 1872 - DNA, 429 bp, Homo sapien
  misc_feature (1)...(429): n = A,T,C or G
aacaagaaaggtttcaagagattactggaaaacttgggcactttcttaagcaagcaggttttaaggagagtgatgtaggttttattcctacaagtggtctcagtggtgaaantntaatcacaagatctcagtcaagtgaactcacaaaatggtataaaggactatgtttattagaacaaattgattcctttaagcctccccagcgatctattgacaaaccttttagattatgtgtgtccgatgttttcaaagatcaaggatctggattttgcataactggtaaaatagaagctggttatatccaaactggtgaccgactactggcaatgcntcctaatgaaaacttgtaccgtgaaaggaatcactctgcatgatgaacctgtcgactgggcggccaggcgatcatgttagtctactttggttgggatg

SEQ ID NO: 1873 - DNA, 373 bp, Homo sapien
  misc_feature (1)...(373): n = A,T,C or G
tttttttttggagatactcagacactgtattgttattggcgctgtcctgtgagggcagtgtccaggctgccctgcttgtcatatccatgccctggctctggcccggtgagcacttgtntgcatgaggaaaggaggatcaggtggggtcaaaaccaaagcatcgaggctggcactggccaagacagactntggcagggaggggagtggaaggaaggagccccaaacctggagtgagacctttgactttctgatgatgtggccaagaactaggagtcacctggccagcacagccaagagtggggctgggggcgcacgngcttttaaaggtgtcaacacctggcccttgcggggaaagagccttcagcagccccca

SEQ ID NO: 1874 - DNA, 441 bp, Homo sapien
  misc_feature (1)...(441): n = A,T,C or G
tcagcctctgaagctagcttatttgaagaggcactggaaaaatatggcaaagacttcaatgacatacggcaagattttcttccttggaaatcattgactagcatcattgaatattattacatgtggaaaactactgacagatatgtgcaacagaaaccgtctaanagcagcagaagctgagagtaaactgaaacaagtntatatcccaacctacagcaaaccaaatcccaaccaaatatccacttagtaatgggaagcctggtgctgtgaatggagctgtggggaccacgttccagcctnagaatcctctcttagggagagcctgtgagagctgctatgctacacagtctcaccagtggtattcttggggcccaccctaatatgcagtgtagattatgtgcaatttgttggctttattggaaaaantatgggaggcttgaa

SEQ ID NO: 1875 - DNA, 441 bp, Homo sapien
  misc_feature (1)...(441): n = A,T,C or G
atgaaaacntactaaaccggtggaatctgatcttgaaaatctgagtaggtggacaaatatcctcacgtttntatctattgcacctaaggaatactacacagcatgtaaaagtcaatctgcatgtgcttctttgattacaaggcccaagggatttanatataacanaatgtgtaatttgtgacgngtaatattaaataagatatttgaacaagctaggaaaattgaatttntgcntgcgtgcttcaaagaaaaagctgccccagagcattaaacnatggggtattgttaagaagcaaaatgttcttgtttgccatcatgtgtttcacaccacaattctgtgccacagttaagagggcctggtcccttgcaggacctttgtaggttgtgggaaaaagncgcagaaagatccccaaagtggagcaggaatggagccagccacan

SEQ ID NO: 1876 - DNA, 532 bp, Homo sapien
  misc_feature (1)...(532): n = A,T,C or G
cagattgggagaatatatttccaaactattgttggggctcagaaacggataccctaacatatagtgatttgacaggtggaactaaagaagactcgaggtctctctgacctcctcctcaacctctgtttcttaatcctctgttttcccagagcacaggaggaagttctctgaagttcctttatctgctttaagttcagactcaccaaataagaaaacagttaattctggtgccttccatgggttttcattaactgaagtcatattgtaggaaaaagaatgaagtctcttaacccacctggatagatttttcctcacaaaccattgtcttctctgcaagcccagtaagactttggtcccaggccatttatgtgatcttcaccccattaggtcctcccaaattatttactcctncccccaaatcaccacactttcccatcttcctcttccctaaggacnagggatatcccatctatancccaatgcntggtggggtgntactctgatctctgcaagcattttaaaganttggttg

SEQ ID NO: 1877 - DNA, 478 bp, Homo sapien
  misc_feature (1)...(478): n = A,T,C or G
caagcttgaaattttactgaaaagtaaacatttcaattaagcttaaggaaaaaagaaatttcctgagatttccagtgtatacagaagtgtctttccattaataataattaaaagttaaaaaaatatgctgataacttgccacaattgacagaatgcagattaataggataaatggcaaacaaatctataaaaatgcatgcagagaatcagagtgatcaccccaccaagcaatggggtatagatggtgatatacccttgtccttnggggagagggagatggggaagtgtgggtgattttgggggaagagtaaataatttggggagaacttaatggggtgaagattcacataaatggcctgggacaaagtctactggggcttgcagaagaanaccatngtttgtgaagaaaaatcttatccaggtgggggttaagagacntcattcctttttcccaccatatgacntccggttaatngaa

SEQ ID NO: 1878 - DNA, 533 bp, Homo sapien
  misc_feature (1)...(533): n = A,T,C or G
gttgtagcaggaaatgtggctcatattctggactcaaatcatggaaagaaggcattactgtacactgcggtaaatcagttggctatgggaagcagttcagcagaagatgaaaaaaatactgcactaaagaccattcagaaggcagctctcctttctccaggtgatcctgctatctgggctgggctaatggcagcctgtcacgctgatgataaactggccttagtgaacaacactcagccaaagaggatagatttatacttggcactgttatctgctgtttctgcttcaattaaagacgaaaaattctttgaaaattacaaccagtcccttgaaaagtggtctctctcacaagctgtcactggtctaatagacacaggaagaatatctgaaagctgaaactctctggcacaagaattttaaaagtancctgattcagccagccgttatcttacttttgagacagttcagtgttaaccactcctggagtccaaagccactccagatgctgtacntgaagactnccaaaacngtct

SEQ ID NO: 1879 - DNA, 529 bp, Homo sapien
  misc_feature (1)...(529): n = A,T,C or G
aagaatcctttgaatgaacctaaaaactggtgctagcaacaagtgtttggcaactaaacgcaaggtgaaaatcctatggcttcactctaaagtcttttgcatttgagactgaagactctttaacttcaaagtaaaaacntgtagtaataattgagaatttttgcagcaatattactttatacttgtaaaactggtcatcttaaaattttgtaaaatagtaaaatttagcaaaattgatactagaaaatttatgaaaatatcttggctttctcttagtagtttttgtaggctcttaagagtgtatcattaagctttagtgtaacagattcttttcaatcaagtactggaatcagttgtccaggtggagtaatacagaaaagctaaggtctagaaaccaggggaccattttagataccaagcagaattgcggaattgccagattataacttgaggtttgttccggggnttttttttaaccatctaaaataaatggtatataagatggactgagtcttctaaagagatctan

SEQ ID NO: 1880 - DNA, 383 bp, Homo sapien
  misc_feature (1)...(383): n = A,T,C or G
ttagatgatgatgtatttatgcccttatatcccaaaaatgtcttagaaaataaaaattctgggccttacttgttttttcaacgacagttttggtcttcagttaaggtcataaaacccccattccagagagggtcctgccccatacccagaaggaaagaatgctgctcagagaggccaagaagaatctggacggacaggccttgtgttgtcttctcttgagcagtagatcatacctttttgtccagtcatgtttctgcatgcctgtacatatttcgttaaacctaaacatagtagacaatttctcctccatctttgggtcttcattctgaaggctgtcatgttacataaaactgtgatcaaataaatttatatgccttttcncc

SEQ ID NO: 1881 - DNA, 379 bp, Homo sapien
ttttttttaacaggagaaaaggcatataaatttatttgatcacagttttatgtaacatgacagccttcagaatgaagacccaaagatggaggagaaattgtctactatgtttaggtttaacgaaatatgtacaggcatgcagaaacatgactggacaaaaaggtatgatctactgctcaagagaagacaacacaaggcctgtccgtccagattcttcttggcctctctgagcagcattctttccttctgggtatggggcaggaccctctctggaatgggggttttatgaccttaactgaagaccaaaactgtcgttgaaaaaacaagtaaggcccagaatttttattttctaagacatttttggggatataagggcata

SEQ ID NO: 1882 - DNA, 527 bp, Homo sapien
  misc_feature (1)...(527): n = A,T,C or G
aaaaaattaaaaatgttgctggtnttacatcaaacctactctggataaattttccagtagggcatctgaaattgctttggcaaaagcaaaacaggttatcaatacaccaaggacatcaagtagttttaatgcaactacagtgttgagtgcttttttactgggagaaaaatcctagcagaacctgctactctgggcgcattaggtagttttatgcaactatagtattaagagttttattggaagaaaaaacactgtcagagcttactgctccagacctttttttttaatagaagagactggtaaaaatgatgcaggggctgaatgaaagccagctctgctccagtggctctctgagttgagcatgcatcagttaccttaagggcttgttaaaacatcgctaggctccaccctgtttattcaataagtttgttatgggatataagaagatgcattttattaagttccccagtgatgctgctgttccactataggaaccacacttgaagaactagttcctacattcagca

SEQ ID NO: 1883 - DNA, 532 bp, Homo sapien
  misc_feature (1)...(532): n = A,T,C or G
ggcacgagcggcacgagcagaataggcatacaaaggaccatggatggcaacacataagaagaagtggcctacagtccctggtagcttagggaaggtgcctgggaggaaatgacaccatctgcnttttcccctaatcagccaatgtaagagtactttnatgtggcaagtctatgatgttgcaagacagtcttaacctatctaagtccataaacacatggcaggtagtgtgactgtaggactagtaaaattgtaattatctatcatttgttcatgaatggttgagtcactntttaggctatatgactcttctttttatgaaaggagcagatttagcttcctgagagaataggtattttttttcctttnaaaaaaatggaaaattgtattcctttagacctacccccagtagactgctgttatagtcctgtgtcatgagtggtccccttgtatgaaaacctaaaagaaaaaaaagctantcctaagtccggtgattgctaccaaaagaagcagcaatcatatggggcttctttnc

SEQ ID NO: 1884 - DNA, 549 bp, Homo sapien
  misc_feature (1)...(549): n = A,T,C or G
gagacgganccgcatctttcgcccaggcaaaaacattttaaactttatggaagatatacttatcttcagaagtataaaanacacattgataaaaattgttaggctgacataaaaatattcattaaaaagcttgtatgcaaaatttaatcatataataacttgaaacttttaaaatgggatcacttgttatctccacatgttctcttctcaccaatttctcacaaaatctaaaacacagatgttagaactgtaaacattattaacctagagactaatttcctaanatnattacattttgcagaatatagagtgaatagttgtttctttctcacaaaaactgggattgtgtaatcctaatatgaaatcacccaaatctccatgaaaagtaactttggcaaaccctagcccttaantttccctaattnggataggggcanttaccagccnagaagagantcctgggcaacacagatgggtttggtcccccnatggtggaaaactggtcccaaatcccttccttccatgggaggttantttggcnaggatagg

SEQ ID NO: 1885 - DNA, 494 bp, Homo sapien
  misc_feature (1)...(494): n = A,T,C or G
tcctgaagcaagattttgaaaaataaaaaaactcataaaacacaaaatagaacaaaacaatgagctctgagtttgctttgttgaaagcaatgggttgaattgtgtctccccataatatgtattttgaagtcctaacctcgtagtaccttagggtgtgaccttatttggagatgcagacattacagaagtaatcaagttaaagtgaggtcattgggatgggccctaatctgatacaactggtaatttggacacagacacattcaggcagaacaccatgtgaacataaagatggtcaggtacaagccaaaggggagaggcctggaacagatccttccttcacaggcctcagaaggaaccaacccctgccaacatcttgatcttggacttctgggcctccagacctgtgagaccacaaatttgtgatcttttgttatgacaatcctagccaaatacactgtgacacccagtttctaatctgatgacnacgggggcat

SEQ ID NO: 1886 - DNA, 267 bp, Homo sapien
ttttttttttttaaaaacacatactttatttgcctgtaatacaaaaacacaggttggcaattcaggctggtaaattagccccacaatcttgacggtcttctttttgtcgctctctcatcctcaacagctggtttccatctgaaagtccataatggctggcttaactcctatcatcctgccagcttcccagccaacaaagagagcacaggggatgagatggcacatcccttagctttaagagcacagccaacagtgtacatagtacct

SEQ ID NO: 1887 - DNA, 359 bp, Homo sapien
  misc_feature (1)...(359): n = A,T,C or G
tatccgtattaacaatttctagttacatagtttctagttacatattaccatatattactctttatctacaaataaatagctgatactcaaactgatcatattttgattgttaaacacttggntctctcantacgttcgtgtnagttaaagtgaacttaaacagtttcttgaaaaactccagtaggtggcagaatacctattgaatattccgttgctatactttgctgtttgtcattaaaacatctctacccatattcttgcaaaataatatttntattttaatggataggaaantgatttgcaattagatgtttccattcttgaaagaaaaaagctgcaaataacattttcaagaatat

SEQ ID NO: 1888 - DNA, 324 bp, Homo sapien
  misc_feature (1)...(324): n = A,T,C or G
caaagatactttaaaacagtagagctagcaatgacaccttgcatttcatttcaacactgcttcaaggtttcttttgtatatnattcttagaatgctcatttcttttnnntggtttaatttgtacagcagaggaatgttattgtagtagtatgtaactnttccgtaatactgagtttttgcaaaanacaatgaatgctcatatgtnattganatacttcagatcacatgaaaatgcntgatttacatttaagtatcacagcattaaaagaaaaagaaagtaaaccnagtccgtttgtatccagttaccntaatggggtgccatca

SEQ ID NO: 1889 - DNA, 390 bp, Homo sapien
atctcagacagttcctcagtttgtctttcataactgatacttttgaagagtactggtgggatattttgaggatgttcctcagtttggatttatttgatgtactcagatgccttgaggttttgcaattttgaagagaataccacagaaaatgcatcatatcaagaggtgcattctagtgtgtcatttcaagttccttattttggtgtatcagtcttaatcacttggttaaggtggtgtctgccaggtatctccactgcaaaattactgtttccctttgtaagttaatatcttgggagagatacatgagacatgaaaattcttttctcctccaacttatgctaaagttttgcattcattagtggatccttgtctgtaacagttaccgctgtg

SEQ ID NO: 1890 - DNA, 436 bp, Homo sapien
  misc_feature (1)...(436): n = A,T,C or G
tttttttttttttttttttcagtacaaaactcatgagtttttaataagcagacacataaatgtatattcattaatacacatacatgtatttcccagctgtatctcctgaaaggcccaagaggcaatgacaccctattggcaattagtatacttaaatgaacaaatgttggtttctaaataccattttccaattaaaggaaccagggttccttgaagtggttgtttccagggctgggagaggaaaaatagatggtcctgtagtattctgtggtgccagtaagaaagtgttcaaaaaaatatgggaacttgttaaagaacctaggagttaactcaaaggagttccctaatgggcaaatgcagaagaatttgngcaacaaaacnatgatagtaagtaatggaattttggccccctataataaaatttncccggtggtcc

SEQ ID NO: 1891 - DNA, 347 bp, Homo sapien
ctggacagtaaaaccccaacgcccccagcacccactctgctaaaaatgacctctagccctgtggccagggcactgcctcagcaggacccagcttacctggcggtgctctccccaccagtgtacgctcgatagtaaccactctggtaccctccgagctcatctccgccgtaccgaccacaaaaagcaatcatggtggcatagcatctgagtcacttgcgggtggcctagtggaggagaaggtgggatcccatccagaacttctacccagcatagccccgtcgcagaatttagtctcaaaggaaacttcaaccacagcactgcaggcctctgttgccagaccagagctg

SEQ ID NO: 1892 - DNA, 384 bp, Homo sapien
  misc_feature (1)...(384): n = A,T,C or G
gangtatgcaaggaaagtttctctaccaatatgcttctgatagaacatgccaaactgcatgaagaggatccctacatttgtaaatactgtgattatnagacagtantttttgagaacctcagccagcacattgcagacacccattttagtgatcacctctattggtgtgaacagtgtgatgtacagttctcctcaagcagtgaactctacctacatttccaggagcacagctgtgatgaacagtacttgtgtcagttctgtgaacatganactnatgatccagaagacttgcatagccatgtggtaaatgagcntgcatgtaaattaatagagttangtgataagtataacaatggttgaacatgggacagtntagcctcttta

SEQ ID NO: 1893 - DNA, 363 bp, Homo sapien
  misc_feature (1)...(363): n = A,T,C or G
ctggacagtaaaaccccaacgcccccagcacccactctgctaaaaatgacctctagccctgtggccagnggcactgcctcagcaggacccagcttacctggcggtgctctccccaccagtgtacgctcgatagtaaccactctggtaccctccgagctcatctccgccgtaccgaccacaaaaagcaatcatggtggcatagcatctgagtcacttgcgggtggcctagtggaggagaaggtgggatcccatccagaacttctacccagcataagccccgtcgcagaatttagtctcaaaggaaantttcaaccagcaggcactncagggcctctgttgccangaccagagctggaggtaaat

SEQ ID NO: 1894 - DNA, 302 bp, Homo sapien
  misc_feature (1)...(302): n = A,T,C or G
ttaatctacacatacaaaaagctcaatgaattgtaagtagggtcaactcaaagagacactcagtgtgacattgaaacacattataatcatactgtccaaaagcaaagcaaatcctgaaagcagaaagagccactggacacgtacaaganatcttcgatangattaatagccaatttctcatccaacatcatggaagtgagaaggcaatgagatgacatnttcagtgtgctgaaaggaanatcttgggtggtcttgntacttgtagatgttcatctgtgtctgagcattgaagagttaggtat

SEQ ID NO: 1895 - DNA, 335 bp, Homo sapien
ttttttttttttttttatgataaatacctaactcttcaatgctcagacacagatgaacatctacaagtatcaagaccacccaagattttcctttcagcacactgaatatgtcatctcattgccttctcacttccatgatgttggatgagaaattggctattaatcttatcgaagatttcttgtacgtgtccagtggctctttctgctttcaggatttgctttgcttttggacagtatgattataatgtgtttcaatgtcacactgagtgtctctttgagttgaccctacttacaattcattgagctttttgtatgtgtagattaactcgtgccga

SEQ ID NO: 1896 - DNA, 371 bp, Homo sapien
  misc_feature (1)...(371): n = A,T,C or G
tggcacgaggtcactccagcattagtatcccatgaaaaatgtcctgcttaggctgttgtataacattcttctttaggttaaagggctccagtttggagtctgggctcatctagcagctgctacattctgtttggataaaacatacaattggtgtctatttcctttggattgggaggaattagaagactctcagttggatgagaggatgactggcttggttatggctgatcactgattggatgaaagaataaatctttggatggttctagattttgatcgggtaggaagcnatggaatggactgggctagctctgaactctgggtggaatgactgctaagtgaatttggatttggattaaatggcaaggtgg

SEQ ID NO: 1897 - DNA, 235 bp, Homo sapien
  misc_feature (1)...(235): n = A,T,C or G
ttaaccagtccaccttgccatttaatccaatccanattcannagcagtcatccaccagagttcagagctagccagtccattccangcttcctacccgatcaaaatctagaaccatccaaagatttattctttcatccaatcagtgatnagccataaccaagccagtcatcctctcatccaactgagagtcttctaattcctcccaanccaaaggaaatagacacnaattgnatgt

SEQ ID NO: 1898 - DNA, 412 bp, Homo sapien
  misc_feature (1)...(412): n = A,T,C or G
atgtgtttgtgtgtcacaaatccagaaagtgaactgcagtgctgtaatacacatgttaatactgtttttcttctatctgtagttagtacaggatgaatttaaatgtgtttttcctgagagacaaggaagacttgggtatttcccaaaacaggtaaaaatcttaaatgtgcaccaagagcaaaggatcaacttttagtcatgatgttctgtaaagacaacaaatccctttttttttctcaattgacttaacctgcatgatttctgttttatctacctctaaagcaaatctgcagtgttccaaagactttggtatggattaagcgctgtccagtaacanaatgaaatctcaaaacagagctcagctgcaaaaaagcatattttctggtggtttctggactgcactgttgtcctt

SEQ ID NO: 1899 - DNA, 404 bp, Homo sapien
  misc_feature (1)...(404): n = A,T,C or G
ggcacgagcggcacgaggagaaagcattctcttaagtttgtgtggcataacaggtttttaaacttttaattctttttaaccanatttagaagtcagggaaggcttagcaggaacgatgtctcctttcaaggtgaaccnagattctctgagtaaaataacaggacacccaaagttcagttttagaagttctacattagctcctcattanaaatnaatnanaagtctaatttatctccaaaaaggaagatattaaattaagaaatttttgaggaatggtgattttcttacttttgaatatatgaatacttcttagttttattatatgaaggaaatccctaacttcaagccaaacctaattttttaaaaattccaaatttgctatgtctgtctatatttatagacgn

SEQ ID NO: 1900 - DNA, 403 bp, Homo sapien
  misc_feature (1)...(403): n = A,T,C or G
tcgccttgtttctaagttattccaagtctgacttttatagttctgtcattttcttaatttcttttagcttattaaatattgggttacagtcttcatttattttatgactgggtctttctgatgtgcatgggtttctgtaggtacattattttgctgtttagtctttttttttctttctttctgtcattcatatatatatatntntngtttgtttttgtttttgtttttttccgagacagggtcttggtactatcatggctcattgcagccttgnccttggctgcctgggctcaagcgatcctcccatctcatcttcctgaagtagctgggaccacaggcacacactgcaatgccccagctaaattttttttttcctttttggtagagacaggagtctccacat

SEQ ID NO: 1901 - DNA, 438 bp, Homo sapien
tttttttgctgtccacattgcatgcctgaatgcatatatcataattacattctggtgtgcaacttcagcaatgtgtgtaggtccacgcagggtcatgatgtcattaaaacccaactagaactgctgaggagatgtaaagattgtttgatcaatcagatatttgaatgtatcgatgcactcatcctgtgttaagaagagataaaggatactaaaaatttgttataatacattctgcaaatatagcaacaggatatttattgtatgcaagtgaaatgtcaaatgaagagagacatataatttcagaggaaggacaagagtgaagctgaactacagaattgggtttgaactgagcttcacaggctcagtgaggaaaagtggagagggagagaattgcatgttacacagcagacagctcagtccaacacctggcgctgaaaa

SEQ ID NO: 1902 - DNA, 413 bp, Homo sapien
  misc_feature (1)...(413): n = A,T,C or G
gctgatgcttactgagaactattacctactcttggctcctgttactccgtagcttcttaatcttccaggcattacagcagcacagtgttctactttttacatcatttctatgttcggttgtttttaggcataaacaatgtgtattgcagtgcatttcggcatttgtgccatacctgaaagaatcaaaaacaaatcatccaaattaaatttcaaacattatttcagagaacacagggcaagacacatacagtgccttcagatattanngcnttccacaacatcgtgcattctgtatcagctggtccaagtccattctgggtcctagattactgtcattgtctaanaggtaacttttaaaaaagcagagttcatgaaaactgcaatgctgggaaaagnaggaaacatganaataa

SEQ ID NO: 1903 - DNA, 343 bp, Homo sapien
  misc_feature (1)...(343): n = A,T,C or G
atagatgaaaatggaagttgcatgagaggaggaacctttacctgttttgttcattgttatattccaagttcctagnacagattttggtatacatccngagatcaacactttcctcatactntacactttatcataatgagaaccagtgaagaaataagattaattgaatggaggtagaaaagtatagagctgtatataatangcttcgctantgnacntacatttctcaaagtcagaatttgaacaccagnnaggnagagtatgcacgtattttagntgaaggggaaataaaatatgaatcagagattgcaagactggaggaagataaagaaggacttncgta

SEQ ID NO: 1904 - DNA, 364 bp, Homo sapien
  misc_feature (1)...(364): n = A,T,C or G
gtaataccacaagtttttgataaccttcttctttggcagcttgtactttacgtattaattcacgatccttttctactaagagcactttgtgatgttcaacagctgctttgagaatttcattgtcngactgtaatccatccagttcactttgaatcttattcctttctctttctagctcactcttagctcttgctgtctccagtttgatgtctgtnatttccagtttgtttgaatgtttaagttcttttactttactggacaatgtattnatttctcgttcagctttatgcaattnattaattcacaaggtatttngttcantgctngattgtaggctnctttttccaaacgttctgcccgtcaa

SEQ ID NO: 1905 - DNA, 403 bp, Homo sapien
ttgacttgcagcgagatgcaaacaaggacattggaaaatcgtacagattcttttagaagctggggcagatcctaatgcaactactttagaagaaacgacaccattgtttttagctgttgaaaatggacagatagatgtgttaaggctgttgcttcaacacggagcaaatgttaatggatcccattctatgtgtggatggaactccttgcaccaggcttcttttcaggaaaatgctgagatcataaaattgcttcttagaaaaggagcaaacaaggaatgccaggatgactttggaatcacacctttatttgtggctgctcagtatggcaagctagaaagcttgaagcatacttatttcatccgggtgcaaatgtcaattgtcaagccttggacaaagctacac

SEQ ID NO: 1906 - DNA, 499 bp, Homo sapien
  misc_feature (1)...(499): n = A,T,C or G
aaaaaaatgcagaaaaagaaaagcagcagagaaatcagaaaaagaagaaggatgatgatgatgaggagataggaggtccaaaagaagaacttattccagagaaactggccaaggttgaaactccattggaagaagctattaaatttttaacaccgttgaagaacttggtgaagaacangatagagactcatctttttgcctttgagatttactttagganagaaaagtttcttttgatgctacaatcagtnaagagggcatttgctnttgattctagtcatccctggcttcatgagtgtatgattccgtctctttaatactgcagtgtgtgaaagtaaagatttatctgatacagttagaacagtattaaaaccagaaatgaatccgtcttttttggangcaacgaatccnaaagaatttttaatgaaacttttcntgaaaaggaattctgattcattgccacacagnttatccagctgcccaaattggtatattnctt

SEQ ID NO: 1907 - DNA, 544 bp, Homo sapien
  misc_feature (1)...(544): n = A,T,C or G
aatttgttcaagtactgatatttctgtatataaagatttagcatatatatataacagctatcatgagaagtgaaaaaagattttttcccaaaaatgaaaatattaaaactaagttaaaatacatatagttagtattccacacagcataaaatttgacaaatcaaagtttaacatgtcccagttgaccatgtgtgaatatgcaaagcaggtattanaaccagtatgtccaatatttaanaccagtttgtaattgggggaacttctaaatccttaattaaaaaacacaaatgaagtgaaagctttaaactgggtacacactgttcacaccctatatttcaagtttgggaaaatgccatatttgcaagcaggccattaccaanaggtatttcctggaaggaatgccataatccnctggaaaatttatggaanccatccccnggcttccccatacntttgccaagttngaaaaccggacctacccatatttgggtaccttcnggtgtagccgggagaaggttcnctttttaaaccgggtaaaatcccg

SEQ ID NO: 1908 - DNA, 392 bp, Homo sapien
atatggcaatatttatatacaaggtcatttaccatttaaaaaaaaatcagtggcaatggtaatgtaatacattagttcatctttgttcaactttttgctattatacttcctggcctgcaggagtatttgccaggatacaaaagaaaatatgtgacctcaattttaacagtacatagaaagctctggctgtccatgcttaaccctacatttactacatgatcactaggaatgttttcataccaccactctgactttattacatttatttttaaggccattcccaaggaatcaaacattttaacagattcatttggatattaaaggattattttatataaaataagaagtgccaatatcagaatttaatattcctatatgcccaaatttacaga

SEQ ID NO: 1909 - DNA, 472 bp, Homo sapien
  misc_feature (1)...(472): n = A,T,C or G
gtccatgacacccatgtccggacaagatcagatgatagtagcagaaatgaagtcataagcgcacagcaaatgtcccaaattgtttcttgtgaagtaagattaagagatcagtgcaaaggaacaacctgcaataggtacgaatgtcctgctggctgtttggatagtaaagctaaagttattggcagtgtacattatgaaatgcaatccagcatctgtagagctgcaattcattatggtataatagacaatgatggtggctgggtagatatcactagacaaggaagaaagcattatttcatcaagtccaatagaaatggtattcaaacaattgggcanatatcagtctgctaattccttcacagtctctaaagtaacagttcaggctggtgaccttgtgaaaccactggtggaacagctcntgtccnttttccataagccngccttccacntttgccccagagttatacccgtc

SEQ ID NO: 1910 - DNA, 485 bp, Homo sapien
  misc_feature (1)...(485): n = A,T,C or G
caggatcacnttccagggattagtcctttcctccacccccacttcctaaatgattttatttgtaccctgagggccttttccccacttcccccacagacctgcgtgagtagacctcaggcaccaactgcacaactaactattggagaagcaaagattaagctccagcacagccactagncaaaacctgggacacagggattctaatgtgaacttgcagagtaagattctctgcttctgagaaaacagctgtgtgggctgtgaagatgggagaggaggtttgagactccagttacctcagcaggagagcagccagtccctgtcactccaccttcatcttgcagtgagtgatgttcaagcagtgctggcctgggctgggctgtcctgcgggctccaatgccctcctgacaaaccaggaagctgtcttactccattttgtgctgctataacagaacaccacagactggggtaacattaatttacagaat

SEQ ID NO: 1911 - DNA, 485 bp, Homo sapien
tcttgctgtaagaagggctcagctgtggtttagatgtctgttccctcccaaacaactcatgatgaagtgtattcctattgtaacagtatcaagaggtgggacttttaagaggtgattagggcaagaggactctgtggattaatcctgttatcaccagagtgggtttgtcttctcgggagtgggttccttataaaaggacgagtttgacccatgtttacttctctctcgttctcatcctctctttactgttctaccatgtggcgccttcctgctgtgctatcatgcagcaagaaggcccttgccagatgctggcctttagctcttggacctcccagcctcagaactgtgagccaatacatttctgttaattatgttacccagtctggtggtgttctgttatagcagcacaaaatggagtaagacagcttcctgggttgtcaggagggcattggagccgcaggcacagcccagcccaaggccagcac

SEQ ID NO: 1912 - DNA, 291 bp, Homo sapien
  misc_feature (1)...(291): n = A,T,C or G
atatggcaatatttatatacaaggtcatttaccatttaanaaaaaatcagtggcaatggtaatgtaatacattagttcatctttgttcaactttttgctattatacttcctggcctgcaggagtatttgccaggatacaaaagaaaatatgtgacctcaattttaacagtacatagaaagctctggctgtccntgcttaaccctacatttacntncatgatcactaggnatgttttcataccaccactctgactttattacatttntttttnaggccattcccaaggaatc

SEQ ID NO: 1913 - DNA, 497 bp, Homo sapien
  misc_feature (1)...(497): n = A,T,C or G
gtccatgacacccatgtccggacaagatcagatgatagtagcagaaatgaagtcataagcgcacancaaatgtcccaaattgtttcttgtgaagtaagattaagagatcagtgcaaaggaacaacctgcaataggtacgaatgtcctgctggctgtttggatagtaaagctaaagttattggcagtgtacattatgaaatgcaatccagcatctgtagagctgcaattcattatggtataatagacaatgatggtggctgggtagatatcactagacaaggaagaaagcattatttcatcaagtccaatagaaatggtattcaaacaattgggcaaatatcagtctgctaattccttcacagtcccctaaagtaacagttcaggctgtgacttgtgaaaccactgtggnacagctctgtccatttcataagcctgcttcacattgccccagagtatactgncccccgtactggtatgccagcaaaccncattatgcc

SEQ ID NO: 1914 - DNA, 239 bp, Homo sapien
  misc_feature (1)...(239): n = A,T,C or G
tttttaaagcagagctgatgcacacactggatgcgtttgaatgtgtttgtgtagtttgttgtgaaattgttacatttagcaggcagatccagaagcactagtgaactgtcatcttggtggggttggcttaaatttaattgactgtttagattccatttcttaattgattggccagtatgaaaagatgccagtgcaagtaaccatagtatcaanaaagttaaaaattnttcaaaagccta

SEQ ID NO: 1915 - DNA, 420 bp, Homo sapien
  misc_feature (1)...(420): n = A,T,C or G
ttttgagacagagtctcactctgtcgcccagtctggagtacagtggcaccatctcggctcactgcatcctctgccgccaggttcaagcaattctcctgcctcagactcccaggtagctgggattacaggcacctgccaccgcgcccagctaatttttgtagtttttagtacagatggggtttcaccattttggccaagctggtctcgaactcccgacctcgtgatccacccacttcggcctcccaaaatgctgggattacaggcgtgagtaaccacgcccagccgccactagcatgattttaaaaatggtatcaaaaattcagacaatcaaaatgtgatttaggctctgactgaaatanaatttattttattcaacttaatattaaacnatatggactactgggtaggttttgtctgcaa

SEQ ID NO: 1916 - DNA, 467 bp, Homo sapien
  misc_feature (1)...(467): n = A,T,C or G
gccantaattaacattgccttgaagactcctggacaccgagactggcctcagaaatagttggctttttttttttttaattgcaagcatatttcttttaatgactccagtaaaattaagcatcaagtaaacaagtggaaagtgacctacacttttaacnttgtctcactagtgcctaaatgtagtaaaggctgcttaagttttgtatgtagttggattttttggagtccgaagtaatccatctgcagaaattgaggcccaaattgaatttggattcaagtggattctaaatactttgcttatcttgaaagagagaagcttcataaggaataaacaaagttgaatagagaaaacactggattgataataaggcaattttaagtggnccttttaatggttttcctgcngtgaaacaattttccagatttattgaatttttttttttcacctttccccatcacactcanaa

SEQ ID NO: 1917 - DNA, 453 bp, Homo sapien
tggtctgcaatacaggttttattttattatagcttgtttctgtatatgtatgttgagagaaaaatttctaaacttaagcatatggtaaaaagttccacaacttcagttttttcctggttgtacttttagttcagtgcatttcagtttattttcattttctctaagttatgtacataatcagtctcatcatgttgctaaaggcaaaagtagatagaatcatgaggtctctgttgaacaaaaacattgttgaggtgactggccagtctccgggcaaaaagctctccgcaaatcactgaatccgctgctgttgctgtttgactgccagaagcaagtcatggcctgggtccgaagagctacattcatgcactgcagaagggcatcagcagcattggtgcaggcctcaatgcctctggaagaagcaagatctccttcctgaagggcctttatatgacc

SEQ ID NO: 1918 - DNA, 439 bp, Homo sapien
  misc_feature (1)...(439): n = A,T,C or G
ncttgcctctacttctcacatgacttctattcatgcatcaaaactaaacagatgatgattttctccaggaagctttcaaaatccctcccagatgaggctaaaagcgcttactccttggtaccaaacaactctataactctgtcatattcctaccatcatattagatgtatctgtatgtttaatgaaaggatgaatgataaatggatgggtggatgggtgaacggatggatggatgatgggtggatgaatggatgaatagatgatggatggatgaattttttcactactaagataagaggacagaatctgtatttttctttgatataccagctcctacacagttcagaccctagttcataatatatcctcaaataaatgttgacatgaactgaccttgaagatgatgctgatggaatttccacagaagaccaataagata

SEQ ID NO: 1919 - DNA, 446 bp, Homo sapien
gttcatagcagttttattcataataggaaaaactggaaacattcaaatatctatcaatacaagaatggatcaataaactgtgatacattcattccatggaacggctaaaggaacaaacttttgacacacaaaacaagatggatgaatctcaaaaacattttgagtgcaataggagccatacgcaaaagagtgtgaggaaaatgataaataataatggtttcaagaaatgcagagagagagcccagaggcaaagacccacaggacagagggtcagtcccaggctgtggatcctaactaagaaactcctgctggattttgcccagctccatttccaaactattttgggttattgacttctttatcccctccatgttccctcattttgaactagaatcactgtagtggttattctatgtctgtcccatcatttcacattaggggcagat

SEQ ID NO: 1920 - DNA, 105 bp, Homo sapien
ttttttgaaacatcttcatagtgtatcatcctgaaaactgaatagtcactttgaggttattgctttttctttccaggtcagttagccaactaaaaaggccccaaa

SEQ ID NO: 1921 - DNA, 447 bp, Homo sapien
  misc_feature (1)...(447): n = A,T,C or G
ttttttttttttttttgctgagaccggtaatattctttgtttatagtagtaatatcatttggaatagcgtgtttaagagtaataaatacagtctcttggacacgggactcacttatcagttcatactacaataaaatcattttggaaaatatactactaataatatatttcaccaaaaaacaatattacaattttctttaaaattataccaattatgactcatacaatagcaacacctagaaaacattttgtctgacgtcataaaatgagtgcagatataaaagaatcaacagcagataatgcacctaattcatggattaaagacaaagattaaaaaggaaagaagagtttgtcattttacatatcagnggaaatataataagttaagtctacaataatctgggttgaatgcatcacacttacacattgaaaatttatcagactgac

SEQ ID NO: 1922 - DNA, 463 bp, Homo sapien
  misc_feature (1)...(463): n = A,T,C or G
aatgatttgtatattttattttgactttacatgcggtgttaaaaacccaaagtacatattatttacacatccacaatacaagtttacaaggtatctattcatgttaaagtactctataaaacagtatagagacacttcacttgagggttactttttatggcgtaccattaaaaaagatacaatctgcgtttacctttgcacaaatggataaagcatttaaaaattaaattaacaggatagagactagatttaatgttagaaatttcaacataaatactgatttgaactcacattacaaactacaaggaagcacaatgttaccaaatgttatctggggtcacatagagttactggttcngttttacacacgctggggatttaatattggtaaggtgaattccaacacgtttgttggttggtggacngagtagtggtttatcattggttgggttaatttattang

SEQ ID NO: 1923 - DNA, 170 bp, Homo sapien
  misc_feature (1)...(170): n = A,T,C or G
gagttatttggctgctttgggcttcaaggctggagaagcaggtaatggcacagtatctcactcactgttcttnctgccctggngttggcagcancaccagaatgcccagaccactgagttggaattgtnttcccagatttccaactcangtaanagaacaaaagccanca

SEQ ID NO: 1924 - DNA, 203 bp, Homo sapien
  misc_feature (1)...(203): n = A,T,C or G
ttgactttgtctaaaagaggcttgacttcaactgggataaaaatgtcagtgaattttntgnncntagtaagtcnncngcanacttantannntnacaaaattcactgacatttttatcccagttgaagtcaagcccttttagcaaagnaatacctaacctcaaatgttgccagttataaaattatataataacnctttntccc

SEQ ID NO: 1925 - DNA, 193 bp, Homo sapien
gtcgtgccgcgctctgtccaggcaggttttccagctcaaactggagaatatcttcgacaatcggcccttcaaggcgtaccgcgtaatcctgtttagcctctggaccgtagctggacatatgctcggcggagtaattcagcccgccaataaaggctatacgcgcgtcgatcaccacaattttgcgatgcatccg

SEQ ID NO: 1926 - DNA, 315 bp, Homo sapien
  misc_feature (1)...(315): n = A,T,C or G
gtcaaaatgtagccgtggcaactacatcaataagtgggtggagaataacacaaacaatctggtgaaagatttggtatccccaagggattttgatgctgccacttatctggccctcattaatgcctgtctatttcaaggggaacntggaagtcgcagtttaggccctgaaaatactagaacccttttctttcactaaagatgatgaaagtgaagtccaaattccaatgatgtatcagcaaggagaattttattatggggaatttagtgatggctccaaatgaanctggtggtatctaccaagtcctagaaatacca

SEQ ID NO: 1927 - DNA, 344 bp, Homo sapien
gacaagagaaatttattactaaaaataaagcagctgaaggttttcccagggaaaacatcaccacaggaccttccatgatgaaatacgttagtatcttctttacttctgaattgctgccttctttcatatacccaaaattttagtttaagttaaattaatcacgacaaaaacgatgtggcatctgatcccttcttgttcaatctgaagactgaattgggctaccctgtgatggagacttcaagtgctgcaggtgagtatctaccaagggttcatgtgtcaggtacatgggctggtaagaagacacaaaggctgcaggctgaagctctgggaggtccaaggatcct

SEQ ID NO: 1928 - DNA, 570 bp, Homo sapien
  misc_feature (1)...(570): n = A,T,C or G
acttgggtctgaggggtttgtgattatcaattttaaaaggatgcagctcccacttgtgcaggaggggctgacttttcatttttggagccaaacaggatctttttttattttctttttaagtagctcaaatgacacaagaccagtattgacacatctcgcataaatatgatttttgacagatgtacttattttctgctgtgtaactttttttccaatctagagaactgcatcttatcccatgctgtttactattaatagcagcacaggcatcaaattttaagattacatttttggggncccccttttcttctgttctagctattactttacttgtgtcacctagaaaaggaccagtccttagtcttacttcaaagactgtgatcttgggaggttcagaggggtcatagcacacattgggctggtcactgcctggattacctactttatactgagtggtaattatacaacagggtccctttggagtcctaggcattcntaataccatanataatatgactgagcaatctttgtcccaccncagtgaccngatgttatccgggacagnttcag

SEQ ID NO: 1929 - DNA, 597 bp, Homo sapien
  misc_feature (1)...(597): n = A,T,C or G
taatagtcaaacattataatttaatgttttctatgtgaattcacaattgaaatattgtataatatgacaccaataaactgtgcaaaggtctttgaggtagagccttatttaaattctgcactcaaatacatatactttacataaatatgatcttctcagagttataaacaaagtttagaaatatggtaaaatctctagaattatcagaggnaatttagaggcaaagtggcctgcctgttcagtaactgatatttcagcaaaaggtcatagcttcttctattgattcatagagtggggttagcctgtggatagacatttgtactaacatacactgattacattcatactacagaatcatatgttagatgccagagcntaatcttaatctttcatcctctgcatacactccnatttggggacttagcatgccactgcatttactcntgatgaagtttgttttcccaacnagntttttaaacatccctggangcagaatcntgagatattaanantcnacaataaggtggccctcagcgccaataatgntaantgganccngtaaaaacccagcagtnttanagccgcnattagatcttt

SEQ ID NO: 1930 - DNA, 463 bp, Homo sapien
  misc_feature (1)...(463): n = A,T,C or G
tttctattgcaagaactctaagttttattgtgtaatgttgaatcttgaaagtaatttttaaattcatgctgatagacaactgaaaggattattcacactgttggttctgaaaaaaaatttatcatacattcattcaacagtaaccagccagccatttaaagccgatctctgtattaccatgtattaaagcaaactgcagactactactcagggcatgaacactgaaaacctaaaaaggcatttttatatgatcatagaaatctcttgagcagatacaagaactgttaacagcagctgcattagcaagtagattccaaggtatggtccaaccatgtatatttgtaaatnaaattgtatttgttatggtactctcttgtactgttcatattcttgacttttaatcttcacatcccatgcatgttttatcccnagtttcatggatgacactgaagcacagtgatta

SEQ ID NO: 1931 - DNA, 434 bp, Homo sapien
  misc_feature (1)...(434): n = A,T,C or G
tgttgttgttaaaaagggcctactacattggcgctattcttaggacttctgcaacttttaaagtcttacttgtctttcttgttgcttttgtattaggagttccccgtgtgggtctagaactcccctttggtaatgcttctttgtttttttatggcccttctgttctcaggatggagagaacacagaagctgctatccatgtcaggatttattctatntatatcttattacaataaaattagtggcactttattcataaatattcatgagcctgttaattgttagttgtcttcctgtagctgaatcaacaagttattttcaactcaattttatgacttgcgaaaaagcttttgccctggttggtggtacccataaccatttaaaggaatgggaaaatgactggaaanccaattaggataattttangaggatttt

SEQ ID NO: 1932 - DNA, 424 bp, Homo sapien
  misc_feature (1)...(424): n = A,T,C or G
atatggcaatatttatatacaaggtcatttaccatttaaaaaaaaatcagtggcaatggtaatgtaatacattagttcatctttgttcaactttttgctattatacttcctggcctgcaggagtatttgccaggatacaaaagaaaatatgtgacctcaattttaacagtacatagaaagctctggctgtccatgcttaacccntacatttacctacatgatcacctaggaatgttttcataccaccactctgactttattacatttatttttaaggccattcccaaggaatcaaacattttaacagattcatttggatattaaaggattattttatataanataagaagtgcaatatcagaatttaatattctatatgcctaaattaacagaaaaaaactttacagttattaagtggaaaatt

SEQ ID NO: 1933 - DNA, 315 bp, Homo sapien
  misc_feature (1)...(315): n = A,T,C or G
gtccatgacacccatgtccggacaagatcagatgatagtagcagaaatgaagtcataagcgcacanaaatgtcccaaattgtttcttgtgaagtaagattaagagatcagtgcaaaggaacaacctgcaataggtacgaatgtcctgctggctgtttggatagtaaagctaaagttattggcagtgtacattatgaaatgcaatccagcatctgtagagctgcaattcattatggtataatagaccaatgatggtggcttgggtagaancccctagccaaggaggaaagcttntttccnccagntccatnggaat

SEQ ID NO: 1934 - DNA, 359 bp, Homo sapien
  misc_feature (1)...(359): n = A,T,C or G
cncacatantcnngtgtnnaagtncaggaacannngtnnntganaancttnnangnaattcnancngaagnnatnctnnatannccaagannacnnnncncnctganagatnccaggctncctcancnncgcaagancnnccatgacgncgtagtnncggtngaannctgcnnatncccnctntctgtgntcngcgacacggnacttanacaaagcgngcaagccccagggatagcacgaatgctgcagcnntnnggctttcgcagacagcctggccatnancggcnccgcatccgnngtnttggcaaagcttcgggagccatggtagtcactgncngtgntangnntgctnacntcaa

SEQ ID NO: 1935 - DNA, 377 bp, Homo sapien
  misc_feature (1)...(377): n = A,T,C or G
ttagagccatttttaatacttccttggatgctgaacagaaatattcttttcaacctttaccattctatattacttacatatgcccactctaaggtcagaagcctaaaactcaaatatctgtaataatttttagttacaggatttttgtaatcttgttttctgactctatcataatagaacctttattgattagggtattttctgtctgtagaaaattagtattattggttaagtatatatgtgaatgtgtgtgtatatacacacacaatatatatatccatatatgtataatacacatacatacacacacgtaatacccatactttcncacacatatattcaaaaatttgcattttccccctttaaatntgtttatt

SEQ ID NO: 1936 - DNA, 379 bp, Homo sapien
ctggcttctgtggccagttcagaaacctcctcactttctcttgtgccccctaaagatctgttgccagttgctgtggagatcctgcctgtgtcagagaagaacctttctctcaccccttctgcacccagcctgaccttggaggctggcagcatccccaatggtcaagagcaggaggcaccagattctgctgaggggaccacccttacagtgctgcctgaaggtgaggagttgcccctgtgtgtgagtgagagcaatggcctggagctcccaccctcagcagcatctgatgagccacttcaggagccactggaggctgacaggacctcggaagagctgacagaggccaagaccccaacctccagcccagagaagccacaga

SEQ ID NO: 1937 - DNA, 338 bp, Homo sapien
ggaggtcggcccctcttccgtttgggtggggacgttgaaatggtgacagtggtgacagtgttggcaacagtagcagtgggacaaactagcagtggtgggagtggggttaggggtgatgggtgtgggggtggctgtgtccgactttcggagttgccatcccctgcagaggaaatggtcccagggatgggcaaatctcgtgctttagggggtcgtcctcgccttcttttctccacaggtgacaggaggggattgggtctgtgaactggctggggtccaagaggctggggcccaggaataagctgtggttccaggacaggatctgcaacaattaagggtct

SEQ ID NO: 1938 - DNA, 397 bp, Homo sapien
gagacagagtttcgctctgtctcccaggctggagtgcagtggcacaatcttggctcactacaacctctgcctcccaggttcaggtgattctcctgcctcagcctcccaggtagctgggactacaggcgcacgcaccatgcttggctaattcttttgtgtttttagtagagatggggtttcaccatgttggccaggctggtctcgaactcctgacctcaaatgatccgcctgcctcagcctctcaaagtgctgggattacaggcgtgagtaaccatgtccagccacccagcgagttttttgtatttttagtagagacagggtttcactgtgttgaccaggctggtgttgaactcaagtgatttgcccatctcagtctcccaaagtgttgggattacag

SEQ ID NO: 1939 - DNA, 377 bp, Homo sapien
  misc_feature (1)...(377): n = A,T,C or G
tttttatgtgatcttgctaaactttatgcatttttaaaattcctttggatttcctatgtagatatttatgtcctgaaaacaggaatgtatttatcctttcaaatcaatatgctttttattttgttatttatgaccacttcattaaaatataattcacatgccatacacttcacccatttaaaatgtataattaggccaggtgtggtggctcacgtctgtaatcccagcagtttgggaggccaaggcctcagatcttgagcccaggagttcaagaccaccctgggcaacaggcaaaaccctgtctctattttttaaaatacaagaattagccgcagtggcacgcacctgtcgtcccagcaacccaggaggctgaggtn

SEQ ID NO: 1940 - DNA, 357 bp, Homo sapien
gttctgcaggctgtacaagcatggtactgacatctgcttggctcctgggaaggccttaggaagcttttactcatgacagaaggtgaacaaggagcaggcatgtcacatgacgagagagggcagaacagatagggcaggagttcccaacaaccagctttcaagtgaactaatatagagcaagaactcactcattacaaggatggcaccaagccatttatgacagatgttcctatgatccaaacacttcctaacaggccccattctccaacactggtgatcctatttcatgagatttggaggggacaaaatatccaaactgtatcagttcatattatccagaaggtggaaacaatccac

SEQ ID NO: 1941 - DNA, 379 bp, Homo sapien
  misc_feature (1)...(379): n = A,T,C or G
aatgctttaagcttagtcataaactacatttgcctatggacctttggttattttgttaatgttgtcattatatttaagacttattgtaggaagtaattttaaatctatttcataacctgttttgatctgtctgcatacctgctatatgttaatttattacggccttttacaattcacttgtcatctgagattgttctagaaactgatgaggaaagagtcgtactaaccaaaatgaatgggcaattgacataacattctatttcaggtttccttgtacttggggagccaaagcacaaagatctaaggaantcttattcacatttgtccctcagagcatcttaccctaagccacagaggtataaatagtaagatgagaatn

SEQ ID NO: 1942 - DNA, 375 bp, Homo sapien
  misc_feature (1)...(375): n = A,T,C or G
aaattcacttacattttaaagacagaacacacttcatgtcagtggtaggctgattctgattttgctctcagaaccccttcccccttcatcatgcccctctgctttagggttacgctagtggaaaaatttgagcagcaaactctaggtatgtcactttgtccctatttggtcactctacacattcttataggttctcttttataagtacatagtcttgaataaacaaagaggaaagatggtctaataaatatatagtatggtgaatactttaaggtaaccagtagtcaacactaactttgtttccaactagaattaaattcatgctgtgcaaggagtcagacaatgagcaattctcatcttactatttanacctcn

SEQ ID NO: 1943 - DNA, 379 bp, Homo sapien
  misc_feature (1)...(379): n = A,T,C or G
ctatggaaatganttttaaagggaaaggtaatgattttctggcaggaaaagcagcaatgacaagattacttaagtcttgtgaaataacacttctcttccttgacctgctgcttcccttttttaccacacacacacgcacacataccacagccctttgagactgaaagcagctctattgagaatagtagtgtcaactgtattatgtagaaattctanagtttttgggattatttcatagccctgaccttgctacttctctccactttatgtggcaggtttaatctcaggtctccctcatanacttctcagcctcagcacctaaccctcacacaacactccagtattgatgcagtcaatcttgtataacattttttgaatg

SEQ ID NO: 1944 - DNA, 344 bp, Homo sapien
  misc_feature (1)...(344): n = A,T,C or G
ctagtcttgaactcctgggctcaagcaatccccctacctcggcctcccaaagtgctgggattacaggcgtgatccatccaccatgccagtgccctgctccatgtctctcttaacatggaaaccatcatgagttttcctgaagtattaggttagacgttgacaacccagctgtttctgttcactatggttgtgagaagcccagttatttaaaaggccattaagattgaaaatagatttagaggtgtaggtacagactgggaaggggcatgaaggaaatttcaggggtgctggaaatgtcctaaacattggtgggtgacatggggtgttaacatnacattaaaaaa

SEQ ID NO: 1945 - DNA, 406 bp, Homo sapien
  misc_feature (1)...(406): n = A,T,C or G
tntttttttttgtctgtgaatataatcatttatttgtctttacagtgacgatggaagaatgtacaggtgtcccctttcaataaagtataaaaatatgtttatatacagtgaagtcacaataatctttaactgggaaatttatttagaattcctgatctgttcttattaaaactgtgggggaaacaaatgttttacgtaagtgctacatttccagtagattgcacctggcatcaaaagctcagcttcatcttagggtcctgcttgatattacaaaagactaattttaagtcctaggactcnaaataaacattgattttttggaataatagatatatacatcaaanatacatctaaaaaggcattggttagtgctattaaaaagctctatgtgctcgggtacattttt

SEQ ID NO: 1946 - DNA, 404 bp, Homo sapien
ggctaccttagattttttatttatattttatagagaagttccttaaagggggaaaatatttttatgggaataactctttatacagtaaatctcttaaagcactaaatgcatatacatttatcaaatacatggagatttgatttccttttgaaaatctaccatgtgtgctgaatactttgagtacagttaatcataaaaaaaacttttgattaattatttcaaataaaaatattaccatgggtgctagggaaggcagtccatctaaattttgttaagtgctgctccaaatttgtttaaatttgacgagtattttgttttaattcccatgaccagtggaaacaatttctatgatcaaggaagacctatcgcccatttaattgaacagactgagtgaaaaatattag

SEQ ID NO: 1947 - DNA, 384 bp, Homo sapien
tcggaatgaggcaggcgaaaggcacggacgtgggagggcacggctacccaacgggacacctacgaagggagctacgaattcggtaaaagacatggccaggggatctacaaatttaaaaatggtgctcgatatatcggagaatatgttagaaataaaaagcacggtcaaggcacttttatatatccagatggatccagatatgaaggagagtgggcaaatgacctgcggcacggccatggcgtatactactacatcaataatgacacctacactggagagtggtttgctcatcaaaggcatgggcaaggcacctatttatacgcagagacgggcagtaagtatgttggcacctgggtgaacggacagcaggagggcacggccgag

SEQ ID NO: 1948 - DNA, 412 bp, Homo sapien
  misc_feature (1)...(412): n = A,T,C or G
aaaggataataaagacgtttatttgcatttgtcaaccaacttaacatacagctgagaaagaaagactaaaaaccctctaataaagattgttaactgacagaagcattttgtttttgtttatttttttgagacagggtctcgttctgccacccaggctggagagcagtggcacgatctccactcactgcaactgccactttctggactcaagcaatcctcctgcctcagcctctcaagtagctggaactagatacacacagcactgcacccagctaacgacagaagcattcttatgatacgntctcctctcggctcacttcatcttagtcctggaggtctgactgtctagtttcttcttcttcagaattaatgtttccctcatccatgtcatagcggaactcctcctgggtca

SEQ ID NO: 1949 - DNA, 355 bp, Homo sapien
ttttatggttattataagtgtaccaggactctaaaagaaacttgtttgtataatgctattctatccaaggtatgtagcccaggaaataaccaacttgatgcgtgttatgacccattttaagcctcccatgatcacagtttttaaaatacaattaaggactggtccttttctaggtgacacaagaaaggtaatagctagaacagaagaaagaggggtccccaaaaatgtaaccttaaaatttgacacttgtgccactattgatagtaagcagcatggatgaggatgtggttctctaaattggaaaaaaaagttacacagtaaaaaaaaataagtatatctgtcaagaatcatattt

SEQ ID NO: 1950 - DNA, 319 bp, Homo sapien
gatatacttatttttttttactgtgtaacttttttttccaatttagagaaccacatcctcatccatgctgcttactatcaatagtggcacaagtgtcaaattttaaggttacatttttggggacccctctttcttctgttctagctattacctttcttgtgtcacctagaaaaggaccagtccttaattgtattttaaaaactgtgatcatgggaggcttaaaatgggtcataacacgcatcaagttggttatttcctgggctacataccttggatagaatagcattatacaaacaagtttcttttagagtcctggtac

SEQ ID NO: 1951 - DNA, 273 bp, Homo sapien
  misc_feature (1)...(273): n = A,T,C or G
acatggttacagggtggtgaactcccaggtggaatggggcaggatcccagctacgtgccccccctgcattgcgggagggcaactgcctgccccgncggtggttgctcagagggtcnacagtttacagttttagcgccaaacgcccacaggaaatagtgcaaaataaaanggggaggagagatggaaggcagcggngtggccgagctccaagggccccggctgctcctcccctcctcgcncttcccccttctaccctctccgaaanagagancc

SEQ ID NO: 1952 - DNA, 381 bp, Homo sapien
  misc_feature (1)...(381): n = A,T,C or G
aaacttggaatntctgaccggacttggcagcatttgggtggaaggacgtagaaaatattttttaactgcctaccttattttcataatcataatttgtttagtcagcttgtctattttcttctttttcttgaaaattattttccactgagtttaattttttgtaaaagttacacagcattctcttgtcattctttatatctccctttttgtagttatgttccttaatttctgtaactttctgaaaccagggttaatttgttttgaaattgtccaacgtgtgctttgaaaaaaagaagggatgttttctgtgtcaaatgaaggtaatcatngatcaaatttgcttatngtctngttcaaatcctagaaaaccattagcatttt

SEQ ID NO: 1953 - DNA, 326 bp, Homo sapien
  misc_feature (1)...(326): n = A,T,C or G
tttttttcactatttactgaaagtttaatgaaataaaaaatagaataataaaacaatcaaggaccaagggataatcaaaaccaagtacatttgaaaaagaacaaaatagaactttgctatactccataatgataaaataaaaatccaaaaataagatgtaacattcaaaaccttatatgcacttgactacagaaccactactatgtcaataaataactgacagaattagaaggagaatttcaaatttacaattgtagggtaacctttcaatattctgtatgagtgttagattctcatattacangcaangaaaaatgctaatggtt

SEQ ID NO: 1954 - DNA, 380 bp, Homo sapien
  misc_feature (1)...(380): n = A,T,C or G
cagggttctcactgataggaagggagctgcaaatatggaatcaaggaaggaggaagaacctggtggtgttggcttgcagtaagaaataacagtattaacttatgatttaaaaatatatagatatatacacactcatatttaattatatatatttacattaaatacatgtacatatttctctcctagctgtgtccactgaaaggacatagaacagtgacatcccagtggcaatgagcacatctaatgccccgatcttggtttctaaataccactccccaccaaaaggagctagggtacatttaaagaaatggcagattccaagctgatttcctggagaantggggtagggaaaggtacggggtgattctggagcttctttt

SEQ ID NO: 1955 - DNA, 409 bp, Homo sapien
  misc_feature (1)...(409): n = A,T,C or G
taaatccaagatccaattaaggagcatacattgcatctggttgtcatgtctctccaatttcccttatctagtctggaggcaggagggacgggactggcttttggacgttgacatattttgaaaagtgcctgccagttgtcttggaggaggtcccccgtaagttggatctgcctgttcccntgtcatgagattcgggtaatacatgcttggtaaacacagttcctgggtggtatgtgctttctactgtattattaatcagttattgataatgctaagttcgatcacttggttaaggtggtatctgccaaatttctccactggcaatgatatagtttcnccttngtaactaataagtaatctgtactgcaatttgagattttaagcatctngttccctaacaaaattttcn

SEQ ID NO: 1956 - DNA, 380 bp, Homo sapien
  misc_feature (1)...(380): n = A,T,C or G
aaggaagagaantagaatcagaagttaggacatctattgcttgatgcttctgggatgggtaagacgtagttctggtgatagaagttgaagctgcagcataatgagagatgaaagagaaactgctcttctggtgattttaaccctagggatgtagctactgggacaggaggaagtgagggacccagtgctgcagggtccctgttgtcacatatgtcaatcctactttaaagtcaaataatggattctggctgataaagcctatcagaattatgggtgttgatacgaaagtgtcacatagccaccaaaatgtgttctctactttcttgctttgctctgattagctaagtcttggtcacatggctttatagcactgggaaaac

SEQ ID NO: 1957 - DNA, 414 bp, Homo sapien
aatagttgcacaattctgtaaatttactaaaaaacactgtataccttaaatgggtaaactgtatagttaagtgaactgtatctcaataaaacaaaaacaaaacccaaaaaccaacagctgaagctcagaggtttccagtatctccccttggtccctgttgaaggggaaaagcaacaatttgaaggcttagagtagccaacactgactgccttttaatggacattcacattttataaccacatcatctgagcccatttcccatgcttgggaaactccccgccacaaatctacacaaaagatagggctcacttcctaccctataaaagaccagatcctggtttttcccagtgctataaagccatggtgaccaaggacttagctaatcagagcaaagcaaggaaagtagagaacaca

SEQ ID NO: 1958 - DNA, 383 bp, Homo sapien
tttgaggtcctgttccaaccttcatttctgaaactgttctagagcactttgtctttctcgtagttcataacttaccccttcagtctagaattagaattacattatctgttttactactttactagactgtaagctcctagaagataaggactagggagttcatctctgtattccaccagaaggtacagtgactcataactagagtctttagatgaaacttactgagttgaataacttaatatatttctgttttcattcccaagggaggccatgtctggagatagaccttgaatttaaataaattttaggcactataccatttcagtggagaaaattgttgggaaatttgggggggatggatatataagggggaggaagtcact

SEQ ID NO: 1959 - DNA, 384 bp, Homo sapien
  misc_feature (1)...(384): n = A,T,C or G
attgctgaaaanattaccaaacacctcccagacaatgaatgtattgaaaaagttgaaattgctggtcctggttttattaatgtccacttaagaaaggattttgtatcagaacaattgaccagtcttctagtgaatggagttcaacctacctgcctctgggagagaataaaaaggttatagttgacttttcctcccctaatatagctaaagagatgcatgtaggccacctgaggtcaactatcataggagagagtataagccgcctctttgaatttgcagggtatgaccgtgctcaggttaaatcatgtaggagactgggggaccagtttggcatgctcatcgctcacctgcaagnccaaatttccagattatctaacagtttca

SEQ ID NO: 1960 - DNA, 378 bp, Homo sapien
  misc_feature (1)...(378): n = A,T,C or G
aattaatctggntatatttgtaatctttgtaacttgtctgaacaagtaatccccattgaaaactttatgttgttctggctgcatggaaggccaaacctctccatcaatagtttgctggattggtaccactttcagttttagctgaattatttatttactgttgtaaattgagatgagtttttcatctcaatttctcttggggttctgaaccaaattgcccactgtatgtaaaagtacacaaatttctaaaatatgttttcatgagtcaaagaaatcatgaacttatagttagtatattaatttcagttagctataaattgaaaggtaaatccagatttaagtttatggaataacaatattgataaaaatcacttcatt

SEQ ID NO: 1961 - DNA, 221 bp, Homo sapien
  misc_feature (1)...(221): n = A,T,C or G
gttttttttttttttttttttttgtttactgctataaagcttttttatttcggtatgtaaatgtctacttttgcacacagttgataattaaaattttacagaacaagtttctacatatgcaatgcttcactgtcactaaaatatatgttttagctttaaccatcaagaaaataaaaaattagaagtattatcatgnctttataatatttttgccaaatatc

SEQ ID NO: 1962 - DNA, 378 bp, Homo sapien
  misc_feature (1)...(378): n = A,T,C or G
tgaaaactacgtaaaaaaccatggctttcatatggacagataaaatgaaagaaagggaaaaggcagtggtgtgtaggcaaatatggtttggcatttgtcttttaatgacacctgatatgatgtcattttgattttgaaattgaacactagaactgttaatcacctttaaaaagaagagcttattgggaattatatattcccttaaaatatacatgggggccctgaatgtcagccatcctttatactatagaaaaaggattatggatgcatgaatggtcatgctttggagatcaaatattggttgaatgcctatgtatgtcaggccctgtgctgagccatggaggattaaaaagattntttaacatntcttgtttaggg

SEQ ID NO: 1963 - DNA, 408 bp, Homo sapien
  misc_feature (1)...(408): n = A,T,C or G
tttttttttttttttttttttttttttttttcctttccattgngtcagcttttggacacacactttattgcacttgatttttttanacatccatttcctaaacaagatangtttattcatctttttaatcctcatggctcagcacagggcctgacatacataggcattcaaccaatatttgatctccaaagcatgaccattcatgcatccataatcctttttctataggtataaagatggctganattcagggcccccatgtanatttnaaggaatatataattcccaataagctcttctttttaaaggtgattaacagttctagngttcaatttcaaaatcaaaatgncatcatatcaggngtccttaaaaggcaaatgccaaaccaaatttgcctaaacaccactg

SEQ ID NO: 1964 - DNA, 184 bp, Homo sapien
ggaagggtacagtgattaatagcccaaattccagagttgaactgcctccatctggatccttactttactctgcatgtagtaggcaatcttaggtcaagaaagatttggaaacatgacgagggtctattaccgagaagctatgggtgcatttattgtcttcgatgtcaccaggccagccacattt

SEQ ID NO: 1965 - DNA, 187 bp, Homo sapien
  misc_feature (1)...(187): n = A,T,C or G
acgtttaaatagcccgtgttctcattactctgaccacatacatcatagggtgctaaagttgatgaacacattaatccgttaagtaaaatggactttgtaattgtacagcatacctaagaaactcagaaggtgcatttaagagagagacttgaaagaaatagtatggatttttaaaaattcttgtcnc

SEQ ID NO: 1966 - DNA, 170 bp, Homo sapien
  misc_feature (1)...(170): n = A,T,C or G
tgtgggtccaggagacaggctggcagcacctgtctgtgccttgaggactgtaagggtcatcaggacacgtgctgtgnagcaggccactgttctccacacacccagtgctgttctttcttggaccatggcagctgtgagtcangcaccgtgtagtttgtgcatccttgtga

SEQ ID NO: 1967 - DNA, 189 bp, Homo sapien
  misc_feature (1)...(189): n = A,T,C or G
ttttttaatagagacaagngtctcactatgttgcccaggttggtctccaactcctgagctcaactgatactcccacctccgcgtccccagtgctaagattacagctgtgagttaccgtgcctggctctccaggggaatatttttaaaatttaagtcagatcactcctttgcttaaaaccattcaatgcc

SEQ ID NO: 1968 - DNA, 189 bp, Homo sapien
  misc_feature (1)...(189): n = A,T,C or G
ttgtagttcctaagtaaangccattccctcaggcctcagtcccttctttagaaaatctctgtctggtgagaatcccttctacagagatgacaactaaatctacttcnaacttcaaccttacctttcctttgcctgatgggcaatttcatctaggttttacntccttatctaaagcttagtaaattcaaa

SEQ ID NO: 1969 - DNA, 199 bp, Homo sapien
tttttttttttttgagggagaatcactttttatttattattttgcaaataaaaagattttaggtcaaatacttttatgtcatcacagattataggcaactgctcagctattcaaaaatctcatcctgtagaatctcagcatatagtagcactgcatggtgcagccatatctttcctgtttgtttccttctattccttct

SEQ ID NO: 1970 - DNA, 167 bp, Homo sapien
ggatgttcgccaacaaagctgccgttgtgggtcttcatggtgtagtccataaaatgtcaagaagcaatttctaagaatttcagagcaccaactcaacttgggctagtagagaacctctgacttccatcagcgtgcagttggcaccgtcgttctgaagaaatgcagcc

SEQ ID NO: 1971 - DNA, 187 bp, Homo sapien
tttttgagacatgaaaacgtatgcatttttattaaccagatttttaaaaaaggacaaaggcacatgtatcagggtgccgggggtgcatggtgtacatctgatttcataagcaatgtcagtctcctctaaactggcatcctgcgcttgacaggtaggcagaacaaacgggacgctggcaccggaacct

SEQ ID NO: 1972 - DNA, 132 bp, Homo sapien
  misc_feature (1)...(132): n = A,T,C or G
tatcaaggagtgataacaagacaagttattgcagagtcagggtgcttttatatataagagcagcagccgcctttgtaaagtgtgatctatgagaattggagacacnttctttacntgttcaccaaagaaatg

SEQ ID NO: 1973 - DNA, 150 bp, Homo sapien
ggaaaaagctacaggcaagacaaccagttaggaggatgtcttagttgttgaggaagatgaaggcctgaactaacattgtggtattagtagaggagagaggacagatttttaaagttttaggaaagaaaattgggcaagacttacaagacc

SEQ ID NO: 1974 - DNA, 167 bp, Homo sapien
ggcacgaggttttcatgtggataattttagtgcattgctcacccggtatgtttttttttttttaacttgaacattttgcttgttttgtttttcttttttaattagataatcacacggaaaattaagctgttcatatctttaaattaggattgcaaaccaaggaaaga

SEQ ID NO: 1975 - DNA, 189 bp, Homo sapien
  misc_feature (1)...(189): n = A,T,C or G
attattatcaggagtgccttttaggtggaccgctctgtatgacgtcgtcatgcttcaaaactattttttattcaagtgacttacaatggcccntaggaaacaagttctgttattatcccccattttaaaatgatgaaaatggacaaagcaaaagcaagcaacgttaaccaataccccatggcctttttn

SEQ ID NO: 1976 - DNA, 190 bp, Homo sapien
atccaaatattttaaaaatctgtctctcttttcttctctcataaagtgaattattccttttttttgttttatgtaagtgtatatattcttagtttttcttgaaatcattgtaatgttaactttgttgtttcaaatatcttggtgattgcttcattatctcttcaacaaaaaaaacctttaattttggggg

SEQ ID NO: 1977 - DNA, 179 bp, Homo sapien
  misc_feature (1)...(179): n = A,T,C or G
ccaaggctgggaaaantgcagaggatgttcagcatcagattttggcaactgagagctcaaatcaagaatatgtaaggatgcttctagatctgcagaccaagtcagcactaaaggaaacagaaattaaagaaatcacagtttcttttcttcaaaaaataactgatttgcagaaccaactt

SEQ ID NO: 1978 - DNA, 203 bp, Homo sapien
  misc_feature (1)...(203): n = A,T,C or G
ggttaaatgacttactgtgtaattttatttcatattacacaaatgttaatcaaatgctgagtagacatgcagatgacaagcagtatatgacaaactctgaagaaatagttacntgtagagtttctcagatttttagtgtatctaagaattaactgaagagtttgttaagaatgcaggcttaaaggccaatccacagatcataa

SEQ ID NO: 1979 - DNA, 205 bp, Homo sapien
aaacatgagcctgatgtctcctcaaagtcgtcttcagtgttagactccagtttagaccacagacataaacagaaagtcttacatgacacaatggatctgaatcatctcttgaaagcttttctgcaattagataaaaaaggaccacaaaaacatcactttgatcagccttcagtagcacccgggaaaaactactctttcacaagag

SEQ ID NO: 1980 - DNA, 379 bp, Homo sapien
  misc_feature (1)...(379): n = A,T,C or G
ggcacgaggtggtgaggcatgtaaaaatcttaagatatgaggagaaagaaatagcagctaactttggccatgtagcaggtgctattcttcattaatcaggtttgtttcgtaatgaaactttgatagtacttccactctctaatagataaataagtacttggaagttcgtattgacttgttacacaaggtgattatagttagtagtggacacaaaatgctgcaatacagatcttctatacctaacttattgaatttgttatgtaatgatgtaatanacttaatttttttcaagtagtttctacaaacaagtagttaaaagtcaaggaatgggaagtttaatcatacatattacacttaccttggtttccttgacctttga

SEQ ID NO: 1981 - DNA, 359 bp, Homo sapien
  misc_feature (1)...(359): n = A,T,C or G
tatatgagaaaattcctattttatatttattatacatttgatcatttttaaaatagccaaaactcaaaaaggcaagattgtgtgaagtctggtagtcactttagttaaggagcatctttcatttaattagtcagacaaaagnccaaagcaaacccaaataaaaaaccaggaataaccctccccccanaactggtaanaattcgggtaaaaatatttccataaggtactnattttccatccctcctggangtatggaaattaaattattaattaggcaccngggggaatttttaaaaatctttggggcaaaactgttttaaagttaccaaggttaacttgactcagtganacctnggggt

SEQ ID NO: 1982 - DNA, 157 bp, Homo sapien
  misc_feature (1)...(157): n = A,T,C or G
acatttgancagtcngtggaaactgnnacttanatgcctgnctangngttcgtantcnatngcttncncaccntcagaaatagtagttggnnnagtnnnanntgaannnncctaaaattcaggnntcntacngagtgcanagancngntgcacacct

SEQ ID NO: 1983 - DNA, 379 bp, Homo sapien
  misc_feature (1)...(379): n = A,T,C or G
tttgcttttcaaatgctcccaaggtctcagatgaagcggtgaaaaaagattcagagttggataagcacttggaatcacgggttgaagagattatggagaagtctggcgaggaaggaatgcctgatcttgcccatgtcatgcgcatcttgtctgcagaaaatatcccaaatttgcctcctgggggaggtcttgctggcaaccgtaatgttattgaagctgtttatagtagactgaatccacatagagaaagtgatgggggtgctggagatctagaagacccatggtagccttaaaaaaccttcctaaaatgcttttgattctgaaaattgggggaaaanactttttaatcacaattttcttcaatacaaggggaaaatat

SEQ ID NO: 1984 - DNA, 151 bp, Homo sapien
  misc_feature (1)...(151): n = A,T,C or G
tntanagtantatatanncagaataanagactcaagctggnnacatgngtcctgatagactganantngagcanntggnagaaganncagtnttgtntagntcagaatcattngncnntattttngtttagtaagtttgaagatttcatgg

SEQ ID NO: 1985 - DNA, 305 bp, Homo sapien
  misc_feature (1)...(305): n = A,T,C or G
ataaatgtcgtggtatccatgctttttttcaactaataacatcatctctcttcatgaccagttaattgggctatttggcagcccagtgaacctatgtactaatggcaagttaggggcaaatggaaatggacacatccgataaagttgaaatgtatgttttaatctttcacagaagtattacaccttgaatatttaanaacaaaaccttttaaacttcctaataggtttatgatgtttgttttcatttatatggacataatccttcatagctcagtttatatgccattgttgtattagaagggatc

SEQ ID NO: 1986 - DNA, 335 bp, Homo sapien
  misc_feature (1)...(335): n = A,T,C or G
tgggacctcatttgcaatcttataattagtgggtgcgattctacactaactgtactgggcatgagtgctgtaatttcctcagtagcccattatttggggcttggaatattggcctttattggatcaactgaggaagatgacaggcgtcttggctttgttgcacctgttttattttttattttggctcttcagactgggttaagtgggctaagaccagaagagagacttattcgcttaaagtagnaacatgtgcctttttnttaactgcagtcctgcattttatccatggaatgacagaccctgtattaaatgtctctcagtgcctctccatgtga

SEQ ID NO: 1987 - DNA, 182 bp, Homo sapien
  misc_feature (1)...(182): n = A,T,C or G
tttatgtttctttttttattatttttgtgtttgacttagatggttgaaatgttttcatttttcatttataagcattacattaatttccatgcaaaaacccaagatcgcatatgtctgatttcaattggccaaaatccaacccttgagtttggacattcaagaccaaaatgaacacgnttact

SEQ ID NO: 1988 - DNA, 380 bp, Homo sapien
  misc_feature (1)...(380): n = A,T,C or G
cacagcttattatctctgggcaggagctttcccagggtcggaggggcaagggtctagttgtgagggagagaggtgaaagcaaaagggaaatgctaaatgacatggcacagcaagcaaggtctaggcagctgcgccttttgataacaagctgcttgaagagaaagaccagatcggcntgagtgaaagcactgtccatcctccccaccccttccttcctgcttcctcctcttcccatctcctccagcttctccttaaagggactaccgaatgatgatttccttgccagtaggaccttgacataaaacccaacccacaacatcacagttgattttcaagggatgagcttctcagaaaccagaatttaattacttaattttgaa

SEQ ID NO: 1989 - DNA, 358 bp, Homo sapien
  misc_feature (1)...(358): n = A,T,C or G
tgtgattgtcaaaggtcagccctcattctttatctataactacagcatgagtataacaatatattatggagtcatttcaaaattcaaatgagatgaaggaccctagtttagagtttaatacacagtacccattgttgttattttattatagaattgataattgcctggattanaggagagttgtaaattatttaagatagaaataggaaaagatagcttaaaccaaaaaaaaaatcttctatatctaattatgtatttattttatgggaaaaaaggtttcattagtattatgagattgttccctaattttttctggggtctacaatttttaccnaggtccccgcttttcctgtangtt

SEQ ID NO: 1990 - DNA, 176 bp, Homo sapien
caacatagtgagatcccgtcttgaaaaattagccaggcatggtggtgcatgctatagtcccagctattcagggggccgagatgggagaattgcttgagccctgtaggtcaaggctacagtgggccatgatcgtgccactgcactcagcctgggcaaccaagtgaggccctgtctca

SEQ ID NO: 1991 - DNA, 389 bp, Homo sapien
  misc_feature (1)...(389): n = A,T,C or G
gcctttggtgtgatgtgtgtgcatgcatacaagcatgtgtatgagcctggagaaaggtgtgcaaggacacatctcagtatactgacactggctgcaggattagacggggagtgctgtgtgtgtgtgtgtgtgtgtgtgtgtgtgtgtgtgtgtgtgtggtgatgtgtatgcatacatacaagcatgtgtatgagcctggagaaaggtgtgcaaggacatctcacagtatattgacaatggctgcaggattataaagaagaaattcctttcaacaatgttgtgttgtttttgggagtaatattaagtttttggagttttaaaaatttaattcctaagtatttttttaatatatattccaatngtaagatggattttttcctaaatttttt

SEQ ID NO: 1992 - DNA, 338 bp, Homo sapien
agcaactcactgtaagtactgtagaaacaaactgaaagttgggttagaaaaaaaaaaagaagaaggtccaagtagtctgaaggactcgggaggccaagatgggaagtccacccagatgacaccggggagatcgaggctgcagagaataaggatcacatccctctgctggacctgaatggtactgatgctgttgagagccatctggtcctcagacatgggaaggcaagagccatctgttcgaccttagacatggcaagatgaaagctaagtccagtgctcgctgccaacacgtttctcaaaataaataaacaaaaatttcaacagtaaatattcaacaa

SEQ ID NO: 1993 - DNA, 275 bp, Homo sapien
  misc_feature (1)...(275): n = A,T,C or G
ntaaaaatggctgggtacagtggctcacgtctgtaacccntagcactttgggaggccgaagcaggtagatttcctgagcccaggagtttgagtccagtctaggcaacatggcaaaacccatgtctctacaaaaaatacaaaattagcctggatgtggtgaatgcatgcttatagtcccagctacttgggaggctcagccgggangttgaggctcagtgagacgtgatcatgccgctgcactccagctgcggtgacagagtgaaacccatctcaaa

SEQ ID NO: 1994 - DNA, 417 bp, Homo sapien
  misc_feature (1)...(417): n = A,T,C or G
gatctttgatgttcaatttatttgcaatggttcttggcaaacactaacagaccacatgacaagtgtgtcagccaccatggaaatgcacagattttagaagatgagtttgggtaacatctgttattttcatgatgtccatgctttattttcttactcaataacaagatggccacaaagtcatctaacaactggaaaagctgttagatcctatcttcatgctcaactagatttctttcctgtttacatcttgttgagagaattaaaagctttggatttgattccagcattgagtgcagaggtacacttgtcgggtcctatactgcttctggtttttggtagaagaaggttttccttcatttcagctgacaattcccattggtgctgtaattttggtttttcctccagtccttgggtgna

SEQ ID NO: 1995 - DNA, 294 bp, Homo sapien
  misc_feature (1)...(294): n = A,T,C or G
gattttcaggtgaattttaactggtctattcttgcccttagtatctacttcaaattgaagtctacaaacaaagcagttcctttgggaggtttttagtttgagttttagcgtgtgtgtgtgtttgtgtgtgtgcgtgtgcgtgtgtgtgtgtgttggaatttccctatctgccctggatatattagcagagtttgaaatgtagttttggccctttgnatgtaagaccttccnattaaaattcattaatagtcatacaaccaacatagaagntgaaatgagaacctgcccgattgt

SEQ ID NO: 1996 - DNA, 407 bp, Homo sapien
  misc_feature (1)...(407): n = A,T,C or G
ttggtgcatcctatttttaggttgctttcattattttattttttatacagatacatacacattgctagaatcaaagcaaaaatattaatgggcaggtactacagaactaaagtgaaacnaaacanaacaacgaacaactgaaaaacaatagctataaactttcaaggccaaaagataagatttaagggcaatacctgttgaagaaggaaaaggagtataaagttcctagagaggtatttataatgcaaatctaatgccagctttttagtaataaaaaagagaagtgctttactatacactgactaagcacataatacttaatttgggaaaganaaattaatgacgttccttgggccagcagcagatatggtgtgtccattgccggcaacagacacaacaccggaacn

SEQ ID NO: 1997 - DNA, 181 bp, Homo sapien
  misc_feature (1)...(181): n = A,T,C or G
aaattgtggtgatcgacgcgcgtatanctttattggcgggctgaattactccgccgagcatatgtccagctacggtccagaggctaaacaggattacgcggtacncttgaagggccgattgtcgaagatattctccagtttgagctggaaaacctgccctggacagagcgcggcacgacgc

SEQ ID NO: 1998 - DNA, 313 bp, Homo sapien
ttttttttttttggagacagggtctcactctgtcacccaggctggagtgcagtgatgaatcttggctcactgcaacctctgcttcccaggttcaagggactctcccacctcagcctcccgagtagctgggaccacagacatgcatcactacatccggctaatttttgtatttttagtagagatggggtttcaccatgttggccaggctggtctcgaactcataacctcaagtgatctgcctgcccctcaaagtgctgggattacaggcatgagcaaccacactcgaccagataaatatttttaaaagctcgtg

SEQ ID NO: 1999 - DNA, 598 bp, Homo sapien
  misc_feature (1)...(598): n = A,T,C or G
ggcgatagaaacagtggaaggaagcacaaggaagtagcaatgcaaatagcacattcagtgggtattcaccaactcatcacatattcactgaacacctaccatgtgtgggtgtccaggatgcaaggggaataaagtcacagttctcctcctctacacagtttaagtctagccagggggacaggagccttaaaggcagtattatctttagtgtgtcgaatgttacatcatatcagaggcatgtggaatactctgtgtttatcactgacccagattggtggggagtgtggggtttgggggaaggatggtgagagggcagtgggggtggggagagggatcaggagatggcacctggaaaccagccaggtggagtagagatggtgtcatcacttgaactttgccctccttactaatgcctgcagcatcatctatgggaaacagctctcataaattaacagatattgcacaacgctcttggggggtgtgggatctggatgtgcactggggcatttctagatgggaaggtgacatanggcantttccagtctggaattctgctaatgataagcttcctagagaaatttgttttaaggaagaaaaa

SEQ ID NO: 2000 - DNA, 577 bp, Homo sapien
  misc_feature (1)...(577): n = A,T,C or G
tttttttttttttttttttttttttttttgacaatgctaacaatattttattgggccaggagcatgacatctttactgcttatcaatatagttctttatcaaaagatctttaataaaagcaaagtgcagaacagtatatacagtaagttcctatttgtgtaaaataagaaagctacatttatttctacctacacagaaaattacaatacaaggacatctaagacattccaagtagtctgtgtaatgatggaaaaatgagacaggctagggaaaaaaacttacttttgctaatctactctttggtactgtttgaatagtatttttataatgtttgtgaattacttttccaagtaaaaaaaggagacctttgatactgatgatgatacnactgtagggatatagtttggcttttacaatcccatactcaaagaatgaagattcnccaaaattattataggnttttaaatattcngatcccnctcttaacaaaaacngggaggtttaccccccattcnatccttagnggtaaaaacccaaaanctaacccctttaaattccttcncctttgganaggcgg

SEQ ID NO: 2001 - DNA, 587 bp, Homo sapien
  misc_feature (1)...(587): n = A,T,C or G
aggccctgcaaggacaaggtagactgggtacaatgtgatggtggctgtgatgagtggtttcatcaagtttgtgtgggtgtatctccagaaatggctgaaaatgaagattacatctgtataaactgtgcaaagaagcaggggccagttagcccaggtccagcaccacctccttccttcataatgagctacaaactaccaatggaggatcttaaagagaccagttagcagatgcttggttagtttgggacatggggggacatggaccacattgagaccttagtcatcaagtagagtggtttatatccacttggaatgttgcttccaaagatgaatggccttcagagaaagtccccttagtgctggcttcctctttgcatggactctgtgggttacattctctatcaacatatctatgcagagggtgtcttctttggtacaacagccaatatttcatgtctcctttgagtgtggtttactgcattaaggccagatgcttaattgagctctagggtggctggttagtattaatacattggtgtgctacagggcatatangatgtggcttttgtccagctgatagtagtagn

SEQ ID NO: 2002 - DNA, 356 bp, Homo sapien
  misc_feature (1)...(356): n = A,T,C or G
tgcatcactgtggctcagtaagatagtacgactggtcatcatcgtcatcttcttctctttttttttttggcagaagctggatccatgtacctgctcttccctaaaatgtagacccaagacagcaagacttttcaaagccaaaaaacggctccttgccttggtagtaggttcttctcctcagaatccaatctagtcagatttctgatctagatgatatcctcatcttacaaagataaggtgacctgccccagcttgtgaganggtctccnatttgggatgttctctaggacaacaagcacaatcgctganggtcaatagactgggntacantcctgangtctaacagaatactttgg

SEQ ID NO: 2003 - DNA, 172 bp, Homo sapien
  misc_feature (1)...(172): n = A,T,C or G
agatacacctagctataggtaaacaggaaaattggttgtgcaaanaacaagtgaggttnntcttgactataagttttcccttttggaaaaattcgctgtggatttgagtatattttctcttagacattaaattgagactgagaatttaaaactttttgtagcaatgtattga

SEQ ID NO: 2004 - DNA, 191 bp, Homo sapien
  misc_feature (1)...(191): n = A,T,C or G
gacaacgcagcctgataaacaagtggacgacttttcttaaggccagactgatttgctcaattcctggaagtgatggggcagatacttactttgatgagcttcaagatatttatttactccccacaggngatgaaagaanncctgnngnanatgggntttttatnaaaacnggcccatntttnaaaggcccc

SEQ ID NO: 2005 - DNA, 614 bp, Homo sapien
  misc_feature (1)...(614): n = A,T,C or G
tggttctttttacatgtagcaggcttatttattgttaaattacaaaaacaatactacaattacaacagattaactcagcaatgagaaaaggttgagtgaagatgtcaaagagttaatttaaccctttccgttgttaaaattttacactcgttctgttattcaacaaatatatatccccactccccagaaatgtcattttcttaattctctgtgtgttatatattgttttctcctattcactcaaatataatcacaaaatccaatatacaggagagaataaaggcagtaaaaagaaataatatacagagtatgataaatattttttaaaagagagaaaatatatactgaaatatcattggttataaataaaatgtctactcttcctatgattcttcagaagaatttatgtttcctcagattttgctagcagtttgttataatctagattttttttaacagatgaattacaaattggcagctacttatacccnagtggaaagagctccattacattactcncactttatttggtgattggtcctccctttcntggggatatgagnttccccaagccagaattatggcggncttcctccgtctctacaatcccacng

SEQ ID NO: 2006 - DNA, 318 bp, Homo sapien
gtcacaggcatccgggacctttatttcagggcatggctgaggggtttcagttgttgactatcacaagcaggaaaagaatactcaggaaagcaacttagacttcaaggtcctaccacacaagtgtgacacgttcaccaactattggctccaagacactttcagagtgatggtggagagaagcccacaagagcatggagcgttaccaatgccggagatggcgcccagcaggtccttgtgcaggctgttgtccagggtgcttcccttctgcggcgtcaccagcggattcacagctggtagagccagggattcatcctcgtg

SEQ ID NO: 2007 - DNA, 345 bp, Homo sapien
  misc_feature (1)...(345): n = A,T,C or G
tanncagaggnnattcaacnatagaataaagcccttttagcacnanaaaatccaatgttttgaantttttttttattgcccancaatanagnngcnntttacaacttttanaatcccgaagnnattcccntatttggngttttttcaggcantcnggtnnnnngcntgangtcngatgnggtcngtaaaaaaggnngcaangaantagnagccatgannnnaanccncnngnaatngaaaaacaanggggattttcnnttcngtannggcancnatgaanttntcngggngtaactggccanctaaaaggaactgggncatctttcccntggnncaaattagnat

SEQ ID NO: 2008 - DNA, 587 bp, Homo sapien
  misc_feature (1)...(587): n = A,T,C or G
aatattctgatggttttattaacaagtatataatatatattgcatactgtatatagtatatgaggactgtacagtacaaatttatgttcacagtttgacatgacaaaatgtcattactgaattcccattggactacagagtagaaacagagaaggtacattaaacattcacatctttagtaagaaagattaccaaaatgtttcagtatctgcaagtatactaacgcatgctaaaaacctttacccattcagtcttattagcttataaaatatattacactttattaaaaatttctgcatagtttatacaagtattaaagtactgtaaatgtaataatcctgctatatttgcaggtatggtttaagagatgctaagcagaaagattattttgaccctctaacactaagtacataacagaaaaaaaagtgcnagtatttggtaaaccaatatggtggagnccccggttaatgcntggtaagatggccttggtaatggnaatggttaggggggaattgcgntccattaggccattggttanccctggacccaggaggnggattaaggcagcnccggnggccaccttcccg

SEQ ID NO: 2009 - DNA, 277 bp, Homo sapien
  misc_feature (1)...(277): n = A,T,C or G
tgggctcctcnacagtctcannctngcggctccanncatnaataggancgtntntgaactgngnatatcntangacgagatnncaaatngtatccnattcnnggtnnncagangctgctnctnctnagannagggtaattgtcgtatcccggnctagagtgtttccncttgggtcagcanttacagtggattnattggagtcanantcccanntgtncngggtancgnngntgtgcttngaagtgacaataancnnntcngcgannagganggcgga

SEQ ID NO: 2010 - DNA, 564 bp, Homo sapien
  misc_feature (1)...(564): n = A,T,C or G
tctatacggaatattaaacacattactgatatcccatataattctgaaggacaagccatagtggaaagaatgaatctctccctgaaacagcagttgcagaagcaaaagggggaaaacaggtactacaggacaccccataagcaattgaatcgcattattaactttaaattttttgagcctgcctaaaggccggatcttatcagcagctgaacagcatctacagaaaccagctgcaaagacagaagcagaacaactggtttggtggagagacctgataacagaaagttgggaaataggtaaaataataacttggggtagaggttatgcttatgtttctccaggactgaaccatcaagacacctggaaaccttatcatgagcgaatgctgaggaagagattccgggangatccgggggaacccccccagttggcagccatgtcaagacttgatgctgaggaggacccccactggtcacgaggcaacacccgttcaaacacagccattcacctgaggtccagntccaggaagctgttcncagattggccgaagaaaccttgagtctt

SEQ ID NO: 2011 - DNA, 331 bp, Homo sapien
atgaatccctggctctaccagctgtgaatccgctggtgacgccgcagaagggaagcaccctggacaacagcctgcacaaggacctgctgggcgccatctccggcattggtaacgctccatgctcttgtgggcttctctccaccatcactctgaaagtgtcttggagccaatagttggtgaacgtgtcacacttgtgtggtaggaccttgaagtctaagttgctttcctgagtattcttttcctgcttgtgatagtcaacaactgaaacccctcagccatgccctgaaataaaggtcccggatgcctgtgactcctcaggatcatacagtta

SEQ ID NO: 2012 - DNA, 551 bp, Homo sapien
  misc_feature (1)...(551): n = A,T,C or G
tcacttcatanaagatggtgcataaaataccaaaaaagcaatgatataatctcagaataatggacagaccatcacaaaacagtctgattgttacaccctttccacttttggcacacacacacacattttgattttttttgtttatgacagcttagtaacctttcctctatggtggagaatttggggagcattttttcatatttatcttaattgaagtagtcttagagctagctagttctcaagaaaatcttgattctacctttagacacatcttcatcccatctttgtctggagatagggtgccattatttgactaaagtgtttatgttaatgttcttaatttcatagtgtgtcaaccttgtccgttcttggtaatcaaagttttatggtatactcctagggtgaaattggcattctacattcttgacagaatatatcttatactctgtcctggttaccttacagnatttcacttgaacatggtattacagatgtagggattaatattcttaaattggcngtttttaataatgacaaatgggatacccatc

SEQ ID NO: 2013 - DNA, 170 bp, Homo sapien
  misc_feature (1)...(170): n = A,T,C or G
tttaaggccanagagggtcaaggaaatttacctgttcgaggcacaattcctgatatgattgcagttttatatatttgcctgaatctgcaatcatatcaggaattgtgcctcgaacaggtaaattccctgaataatgattgcagattcaggnaatatatataactcnatga

SEQ ID NO: 2014 - DNA, 489 bp, Homo sapien
  misc_feature (1)...(489): n = A,T,C or G
aacagttcatttaacaaagatccgttttaactctgaacaaaagcaacccagagcggccattctctattcccatgctggtcaatacgctttcattaccaattggcccttaccaaacttttcttatatatatatttgtattttactatgatagttgagaaatttagcctcttagtcatttttagctgttattgtggaagacctcaaatacaagattagatgcccttgaacatgttttaatgatgtgtgtcatgttactatcaatggtgatttcaatcgcaatattttaaattgatgagaatgatttgtaaacatgaagttactattacgtaaattctgtttgttatagagtttcttcagttgttacccaagtgtcatcctagagaagtcagaagaatcagaatccatccgtattttagagttatgtgaatccacancataaatgggcattnacattctaaattgcctgggtttggagaatgtgtagcagca

SEQ ID NO: 2015 - DNA, 477 bp, Homo sapien
  misc_feature (1)...(477): n = A,T,C or G
agatgtgggnttgctcagtattagtagacaaggtctttgttcagacgattaggtgcctaactggcaaatgccttagtttcttaaaacgtattttctgatgtggctttacatttcaaaagtgaacttgattcaaccctgagaaaactgattaaaaaattagtttaaatttgccagcagggaagtaaaataattatgggaagagtgtcttaagcctaatattaaatcagtttngttaaggggaaaactcaatagttctgttacttaggctgttagatccaagttgatntttgtgtctacagctaaattttgtttacaattaggctattttttaatataggatttagaaaccaagggtatgtgttttaaaattacactttttcttaaccctgtctagctgtcggaaaaggtaacagaagatggaactcgnaatcccnatgaaaaacctaccccgcaaagaagcnttgcctttagnctcca

SEQ ID NO: 2016 - DNA, 190 bp, Homo sapien
  misc_feature (1)...(190): n = A,T,C or G
aangaggatggtgttcgtggtttggctnanggatgggcaccgaatttccttggctnctcnaatgcagggactcatgaaagtttggcttttntgnngtctttanngtnttgtntagcaaatatgcttggngnggngnatacattatctntggcgcacatacatatgtttggcatgccatcatgccangtgc

SEQ ID NO: 2017 - DNA, 393 bp, Homo sapien
  misc_feature (1)...(393): n = A,T,C or G
cgtttctcggcctccaataatttggcatttgcgcttcttccttctttttctttttagcctctagaatttgctgagctcgaagttctttttccattctgatttgctgtattctcttaattttttcctgctgtttcataatctttatctgttcttttngcttccgcttctcctcagcagccattatngcttgtngtttntnggcttcnttagcaacccgagcctgttccngcttttgaagttttctcaaaangctttatttgngctgcttgcctggctatttcttgagcttgcagttttcttangcaacttngcatctgcgttatctaggaattcagcattgccaacatttggaggtcgacctttccgacgtctcatccnggattcctctcttgg

SEQ ID NO: 2018 - DNA, 452 bp, Homo sapien
  misc_feature (1)...(452): n = A,T,C or G
gagttttttttttttttttttagctagactcaaaactgattacaattaatcaatgtaattgtataattcctgtaattttataaaaggaaattaaaaccattcaaacaccaacctgacccttctgtaagttagcatttctccattatgtaggtagactcatgtatttggattacaataacaattgtttgtccactgctccattcttagggaaattctcaactggttttatataaccttctggaaggctgaggttctcccttcgagctcccatccccatgcaagatgacgagattccccactctctgttaaggaagtctctaggtattcaggaactggctaaagtggcagcttggtctggtccgtggaaagacacagtgggcaggtgtaaccctgggaggggtggtggtttatcagagggtcatttccgaaaaaggggcctttccntttcctct

SEQ ID NO: 2019 - DNA, 551 bp, Homo sapien
  misc_feature (1)...(551): n = A,T,C or G
agtctatgtaagttgaagtcaacattaaacgtactaaaaattcacagtatatatgcttttataaacaagtgtgaacaattagtacatgctcacctctactaatatactgacaaatctaggtcttaaaagtaaacatgcagttattaaggatttagtatattcaacctgagatctaattactaatcacttaggagtatactaacatttcatttcggggaacttactaccaaactcaggtctttgttatttacctctatgactaacgcatttatgtcggcacttacttaagttagccctatgtatctgtggttcctgcatccaaccacaaacagactgaaaatactcaggaaaaaaaatctcacgaagtccccaaaagccaaacctgaatttgccacacgcaaatactatactgnatctacatgaataatatggtaagatattttaccagattattccagccatatatagacagcttaaagcatacaagaagacatggtatggatttacatgccaacactgcaccactttaccatagggncttgagcncctgg

SEQ ID NO: 2020 - DNA, 332 bp, Homo sapien
  misc_feature (1)...(332): n = A,T,C or G
ttacctcgcacatgaaatcaactggataaaggcatcaagataaaaaaaccaacgtagtaaatcgaatgaaaacaaatactatgtattcaaagtacatagtgtaatctatgaagagctgtataaataaagtacatacccatagtttggaaataaggtttnaaaagaanagttgcttataagaccaagaagtctaccaaatcttccagatgctaaaatctaactgatttagcaaatntctgtagagggcctactctggggtgtgctagggtaaaatatgatntaatttaattaacataatatgtctgaagggtggtaggcagcagactccagag

SEQ ID NO: 2021 - DNA, 483 bp, Homo sapien
  misc_feature (1)...(483): n = A,T,C or G
ttgttacaaagtcagttaaaggtacgttttaatatttaagttattctatcttggagataaaatctgtatgtgcaattcaccggtattaccagtttattatgtaaacaagagatttggcatgacatgttctgtatgtttcagggaaaaatgtctttaatgctttttcaagaactaacacagttattcctatactggattttaggtctctgaagaactgctggtgtttaggaataagaatgtgcatgaagcctaaaataccaagaaagcttatactgaatttaagcaaagaaataaaggagaaaagagaagaatcctgagaattgggggaggcatagattcntataaaaatcncaaaatttgttgtaaatttagaggggagaaatttagaattaagtanaaaaggcngaattangtatagagtacnttccnttaacatttttggccggattattccccgtaaaacggtgggggcncctttccgat

SEQ ID NO: 2022 - DNA, 374 bp, Homo sapien
  misc_feature (1)...(374): n = A,T,C or G
acagatgaacgtgaactgcgtattccattggaatatggctggcagagagagacaagaataagaaactttggagggcgccttcaaggagaagtagcatattatgctccatgtggaaagaaacttaggcagtaccctgaagtaataaagtatctcagcagaaatggaataatggatatctcaagggacaatttcagcttcagtgcaaaaataagagtgggtgacttctatgaagccagagatggaccgcaggaantgcagtggtgtcttttgaaagaagaggatgtcattcctccgtatcagggcantggaaggtcgtagnggaagncccccanatccaggatngaccaccgggccaggaggggctnccaggntta

SEQ ID NO: 2023 - DNA, 553 bp, Homo sapien
  misc_feature (1)...(553): n = A,T,C or G
ggtggtaaagctaaatgaagtcatccggcaagtcgatgtcgtaataacttgcacaggaaataagaatgtagtgacacgggagcacttggatcgcatgaaaaacagttgtatcgtatgcaatatgggccactccaacacagaaatcgatgtgaccagcctccgcactccggagctgacgtgggagcgagtacgttctcaggtggaccatgtcatctggccagatgnaaacgagttgtcctcctggcagagggtcgtctactcaatttgagctgctccacagttcccacctttgttctgtccatcacagccacaacacaggctttggcactgatagaactctataatgcacccgaggggcgatacaagcaggatgtgtacttgcttcctaagaaaattggatgaatacgttgccagcttgcatctgccatcatttgntgcccaccttacagagctgacagatgnccaagcaaatatctgggactcaacaaaatgggccattcaacctaattattacagatactaatggaccatactaccaaggaccagtccactg

SEQ ID NO: 2024 - DNA, 374 bp, Homo sapien
  misc_feature (1)...(374): n = A,T,C or G
gaattctcaaagcgagaggaaaaggaaaggccctttttcggaaatgacctctgataaacacaccctccagggttacacctgccactgtgtcttccacggacagacaagctgcactttagcagtcctgaatacctagagacttccttaacagagagtggggaatctcgtcatcttgcatggggatgggagctcgaagggagaacctcagccttccagaaggttatataaaaccagttgagaatttccctaagaatggagcagtggacaaacaattgttattgtaatccaaatacatgagtctaccctacataatggagaaatgcctaactttacagaaggggtcaggttggtgtttgaatgggtttaatttncct

SEQ ID NO: 2025 - DNA, 397 bp, Homo sapien
  misc_feature (1)...(397): n = A,T,C or G
tacctgtgaaatatgtatttgtattcttactttacatatgagatcagaagttcattttcaagcagaatggaaaggtggtaaatggactctgaattaaaatatgtcagtattttaaaaggttatcttctgcctagtatttttatggaatctgacaagttctcagatcacacttgtttccttaaatcttggtaagtctgaagcattcttcattttgtttatattatacacgttagtaaggtgggagttcttttgttttttgtgtnttttggccagttgataacatgaaagtttaagagaggaggccaaagtatataaaaagtcttaaactcctgcttctaatnaatgtcaatatgtgttggctcctgggttgagtggttattantgggctgtnctaact

SEQ ID NO: 2026 - DNA, 430 bp, Homo sapien
cgatgtctaagatatctggaaggatggatggatggatggatggatagttagatagatagatagatagatagatacatagatagacgattcagagatagataatgttccaaactcttgagggccaagaacctggtgacatcttgtatcaacacatctaggtctacaatcttggtttctaaacaacattcattaaaaggacccaagggttgaagttagaaaatacaagttgagctagagtatcttgtaaagccacaaagaaaaaagtgcttaataaaaatgatggggacttttcaaagggagccaacctgaaagacctcccaatggtccaagctccaacaatatgagcaataagttatgatagctttggattatggcccacagaattaagtaatactcatctctactgtgtgaataaaaaaaaaaaaatggg

SEQ ID NO: 2027 - DNA, 434 bp, Homo sapien
  misc_feature (1)...(434): n = A,T,C or G
agattttaaaaggtttaattaaattgatagatgatagatccatcatgaaaggtaaatttaaggggtgggggacattctgaatgtttttaggacaatgtcagtaaagggcagtgctcacccaagagacatatattggtatcactgtcagaatatagggccggatgaactgttgtgcttgtgaattattgggttacattattgaattgtgacccatttaatgaccgtgttctgcttagcgtctttaaggccccacctaactcttccagctctctattccgacaattcccctttggaattgttttgctataacttgaaatttggggatgtcacaaacgaaactggcaanctggtttcccgccaaactgtgggttcctgctaatctccccaggctggcagcanttggagacttgccgacttctttcatcccccactct

SEQ ID NO: 2028 - DNA, 430 bp, Homo sapien
  misc_feature (1)...(430): n = A,T,C or G
aagagcctttcagtgctccctcatattgagggcagtggcagaaaagtgaccactctgcaggctgggccaggatgtggtgtcctgagatagttttgtatcttaaagactgaggcacagaagcgaaacgagaacacacctgtttttgagacacagttgtccaaatgtttctggccagctccggcccctttttgtatgacacttctcttccaccctgcacagcacatgtgcccgtcattcttttaattttaaaagatgaaatggcagatgctagtaattcacagaatggcctcttgtgggggtgggtctgagggaagtcagctataaaacatttgctggngttttgttcaatggggctgtgcatttttaatattatgtgtttgtaaatgacatgtcagccattgtttcatgtttcctaaaagcagaatatttg

SEQ ID NO: 2029 - DNA, 457 bp, Homo sapien
  misc_feature (1)...(457): n = A,T,C or G
ttttcaacattggctggaattgagtagaaaaaagtccacgatgcctcttcacatgtgtcatgaaatatgagaaatctgtctgattctagatactatttctttacgacacaatgggcaggtctccagctgcaaggcacaatccatgcacaggtcactgtgtccacatggcttcaattgtgtgtctgctacctcatcacaacaaagggaacagcagttttctcggatactgacttgcttcaacagagcaagacgcctgtgccttgnaaaatgattttttcttcagctgttaggaaggcgtagtcattaaaagtgctaaatttcatagatggtgggtatttgaatggttttgctccaaaattgaactcacattgttgatatgacatgaaactagctgcagcaaaaaatccagatacagtagatgaaaagacttgcttttcaggaggcagctggttgccat

SEQ ID NO: 2030 - DNA, 419 bp, Homo sapien
  misc_feature (1)...(419): n = A,T,C or G
tttttttttgactgagttacagtaattttactttagcaaacagacatgtattctgtgtctcacgggccacctgctgaatgagaggactccagttgaaaggtcaagaacataaaaccacaagagctttttgagtgggtcttcaacttagttaaaataaaaataaaggacctgtgttccttgagaactggcccctaaattttctttctctacttcagagtgtggcaatgatgtgtttggggactttggccaaaattgaaggtttaggaaacattgaacatgacttgagaatatttagaatgtttacaaatgcatttggaaatatttatatcaccatctatataaaaataaaactgtgaacagctggacaagaacactggtctactcgccgaacttttttnccaagttccttgacaccgagg

SEQ ID NO: 2031 - DNA, 435 bp, Homo sapien
aaatgtcaaaagtcacaggtgtcactgttggggtagataggatttgaccatagtggtgtgatctggcctacctcctttatatttctcttaaattgaaaagtagagtgatacagtgtgaatatagtttccaagctatttagtagcagagtagcctcaaggactttctcatgtaattctatgattaaagaaaaaggtcgagggttaagcaaggtcgaggtaagttaaacaatgcatcagaagaagaaatgtcaggaaaaaaagcattgtatttatttctgaatgatgtatttggaaatttaaatgttcagcagaaaaataaaatttgataattaggttctaaagaaactgggatatatgaggatgtgtatgtgtgtgtatttacctatgtagtttgggaagataaactgaagtaaaacataacactaaaatgaagct

SEQ ID NO: 2032 - DNA, 436 bp, Homo sapien
  misc_feature (1)...(436): n = A,T,C or G
attgtacttttatgtaataaaatgcagtatatttaaaaatcattagattatgtgcaaacttaattttatttttttaacatgttaagactattgtgcatttaatgaagcattattccactaactttaacctatcccaccttactcaagggtgtaggtaaaagatggtagcaatatactatttggtacatagtgaaataacatctcctagtaatcacctttgcgagtggctttaaacagcaaatgaatttaagaatattgtttccataggttagatttttattcttttttcttattgaaatttattattggtatttgtgggtatatagtatgtgtatatatttatgccttatatggcatattttcattcaggcctacaatgtgtagtaattacattagggtaaataaggtatccatcacctctaacatttatactttn

SEQ ID NO: 2033 - DNA, 408 bp, Homo sapien
  misc_feature (1)...(408): n = A,T,C or G
aaagcatcaacatttcatgccacataaattatatttaataagaaccagattgaaatgagaacgtattggtgtttgtacagtgnacatgccaccttttttctcatggtttcagtagagcagctaccacatgttgcatgagttcatactttctacggtggcatttttctccctttctaaaatgaaagcctgatgaatcttaaaaggnagaagaaaagaaaagctgtgcnaattcatagtaaagttcgttttttatatgtttccagtgtagcagatctctatataaatntatanatatatataactggcttattttcntttaatgtgcaatgatggctggatcanttaaagttctttttaganaataacataagccaaagactcaagtggtaaatatgtctatatggagng

SEQ ID NO: 2034 - DNA, 439 bp, Homo sapien
  misc_feature (1)...(439): n = A,T,C or G
tggcctgcaggttccagaaaaaaacaggagatcagtgagctagcagcagagaagccttcctggaaaagtcttcaaagctacatctatacctgttcctgtattattgaaaaataataacaagataaacctggccagctatacaaatgctcctgagggttgagataacatgcaaatgtagcctcacatatcaatgtgtgaaagctggacagaccacacagctcagaaaaggaagtacactctgcatagctaacttgcacattcactatccaagctgcaccatcttcggggtcattgtgtgccaggcatatcaactcttttcaataaaaatgcccccagaagactggaaactgggttattccttctcttattacggagaggntacctgccttttgtcagcccccagtgagaagacaggagttgagacgatgactcctgtgct

SEQ ID NO: 2035 - DNA, 453 bp, Homo sapien
  misc_feature (1)...(453): n = A,T,C or G
aaatgtccagttagaacaagaatttagcattctgcaaaagaagttaacagctgagataacgaggaaatattctgaaatggatcccaaatatttcatcttaattttgttttgtggacacctgaacaatacatttttttcaaagacagagacaattacaaccagagaagcagtcacagcctaccttattcacatcatcaatggtcacaggtattggctaattctcaaaacaccacagggaatcctttgggtcaaccancacaattcagcgacactttttctggacaatcaatatcacctgncaaaagtcactgctggacaaccaaccaccaggctgtctatacctccttcctgaaaaacccaggaagcaccatacnttcttgctgggacaacccacttgcctacnacaccaaacaaaccaancaccaataggccacaacttccttccagcaagcg

SEQ ID NO: 2036 - DNA, 336 bp, Homo sapien
  misc_feature (1)...(336): n = A,T,C or G
tgaatttagatttgtgcctagtgataaatcagcgttttaatttccttgttcagtggaggcaatgttcactgcaatgtgcgaatgcaggccttgcatccagatcctgaggatgaggatcagatgactacgatggagaagaatatgatgtggaagcacatgacaaagaccaggggacatccctacatttacacctatgaagaaggattatcccatctacagcagangccaancacacttgagagatnggaagaatgcttctcagtctgtgacagccagtataatatgcctggggcagacagaagatccattaagngttatgaagatgggatgaagttg

SEQ ID NO: 2037 - DNA, 430 bp, Homo sapien
ccagatcaggcagtggtaataccaaaggtcatcaaacacatacaaggaacatcttgatcatagggcatgtggggaagtttactgggccatcacagacttttgttctagtgattgtatgtattaggagtcatagcatgccctacggcagatctggattcttatacactaagatgtgtcttaagaatcacagtgcgtgcttcatccctttattgaagaacagaaaattatgactactctacaaggtggataatattttggtacctgtgcttgccacagccctgttcctcaaagctgaattgatagatttctctttgacttccaagacctagcagttataaggcaccttgaaataaattgtttgtgcctggaaatgcagggagggcaatagctttgtaaattggtttacatttttctccttgaatttttctag

SEQ ID NO: 2038 - DNA, 413 bp, Homo sapien
cagtatctggccagttccctattacaaccttagtacctggcattaattaaaataaaaacactttttacctgggcaagtggctacttggaataaagacagcatttttcaacattccctgaagctaggtacagccatgtgactaagttctggccacgcaagataaccagaggtggaggaacaacttctaaaatatgtctttaaagtgaatgtgagtattctttaaccattatttcttcctgttgggtgaaaatcagactggatggcaggagctcaagcagtcatcttgaactatgaggtagaagccttgtccataaggatgacacagcaaaaagatgaagtgtgtgggtctcgcctatgaacatcccgcctctgcattgacttactgtggacacctattaccagtgagagaaaaa

SEQ ID NO: 2039 - DNA, 416 bp, Homo sapien
  misc_feature (1)...(416): n = A,T,C or G
catattattcaatgactaatacaaaaatacggttctacctcctgtttgtggtaaagctactcatgggttttcctgtgaattcaccaccatataaattgtgataattttaggctggttttaatgttaattatgactttcaagagaacaactaaaagtttgcagtatgaaacgtggcccctgcaccagcagaactncagttaagttggctttcctttgaagtcagcacaaatgataactgtaaaacagtcagtttctctggcaggtctaatttgggatgtatattaaatagaaggtgcctttaaaaaataacaacttccattctatataaaggcttaatagctttctctagtcattagatgcaatttaaaacccagtaatacaatgcaatttaaaacccagtaataactttaatgatg

SEQ ID NO: 2040 - DNA, 429 bp, Homo sapien
aatagtagcatatgtcattgggtttaaaagcaacatgcctgcaaaacatatgataaaaaatacctctgtaagggtttttatttgtccaccttcgatggaaggtaaacatggctgatcccagccaagatgaaacaatagccctttgtctcctcagaacaacctatctccaactctttgtccactgttcttaccccaattaaaacaagaaagcatgtgctaatccttttttaatttttatcaacctgccttggcctcctttcactgtactccattattccttctgtgatgttctaccttcttcaccttttgagaccagggtgagttgggagcagtttgcctaccttcttttagaatctggggcttatcttttagtacaagccattgaataagcctcttccttttttttgctcaaacattccacatccttgg

SEQ ID NO: 2041 - DNA, 399 bp, Homo sapien
tgcttaattctttaaagtaaactcttattgacttggatctaaatagtttgtgaatacaaagtctgaggaaaaaagtgtttgctaaaaataaaaacaacacttgaatgatgtttgtaaggcagttttaatttcttagaaaagctgaacaaatggcacaatgcaaagagcagaagttttggaataaatagattgaagccattaaattattggataaaaatagtttcaggttgcttttggcctaggttctcccctccccccatcactatccacttcaggaataaacattctgaaagttaattttacccatatagtgagcacttatttccaagttgccttatcaaataccatctatgttatggcatttaatctcgcagttgcctgtgcattagagattagcat

SEQ ID NO: 2042 - DNA, 329 bp, Homo sapien
  misc_feature (1)...(329): n = A,T,C or G
aaatgcccacactactattttgaaagtaaatgaggtaatgtatgtgtcagaacccaatacccaaagcgatcgtagtaagaggtggggcctttgggaaggcattaaattgcttagggaatgagggtggaacctcatgaantgagattagagccttataggagaggttggagggagttgcctggcctccctctcccatgtgaagactcagcaagaaaacattatttaggaagcagagagccctcatcaaacaccagatctgctggccacctgatctggcactttccagccttcagaactgtgagaaataaatttctgttgtctataaatca

SEQ ID NO: 2043 - DNA, 428 bp, Homo sapien
  misc_feature (1)...(428): n = A,T,C or G
tttttagaagctaaagaaagtaattatgcttcctgtgaattgtcttttactggcatctttgttttcctctttgatgttagtaaatttggtgtaatacgtggggcttccatatttcaaagtggaagctttcttctctgaagtcgatatatggttttgaattactagagctttggtcagtatttccttcccgtatatgtcacagagggcaccactgagaactgcgtgcataggacctcaaaatacaaaattagcagggcctcacagtcagcttcctcatggctagtttttcccccttatattacaatttttgttttataagtcatttttttcctgatatttccaccacttttcagagtcatctacaaaatttttctttcctcaagaaaagagttccttttgccttattccttatgccttccccactggtn

SEQ ID NO: 2044 - DNA, 450 bp, Homo sapien
  misc_feature (1)...(450): n = A,T,C or G
gaagacttcaaaaagccacatacagtacaatttaaaattgtgtgaacatcctgcaaatgttagtgcaaagtaattatgtagactctccaaacaagactgtgctcttgtttcccaggtttggtcaatgttgctcttttataattacaatcacagaagcttaacttaccaaatagcaatgcctctgtgttttatgtcctatgtaccaagggaatgtcacaaggttttgatgaaatgcagcttagtttcattaataaagcaaatttcttattgaatttaacaatcaagttcctgggaatgctgcatgtgttgtttcatgggaaatgctcttaagcttatgcctctaacttgttcaataaaattactccgtaagatatcctttttacaatggtaactgggaattggtttcatgatccttaaaatgcaaccagtataaatggaacatttcagang

SEQ ID NO: 2045 - DNA, 467 bp, Homo sapien
  misc_feature (1)...(467): n = A,T,C or G
ttaacatcatttttcttttatttatcctttatgcatcattttatacattcacacacacaaagaacattaaaaatatatccaattattcaattttggttgaattttcattaaaataagtgttaaaaatatttatttgttttctgttttgagaaggcttttattgttgtactccggagtgttatttctggagacaaagttgcctgtgctttaatagggagattcctgggagaatctaaaccataagcaacaaaattttaagttaataaattcaagacaaagcagaaagtatagatttgctttcagcattcccgaggtgtttagatttttattangtcacctaattaacatattgttccaataattggttcntttcctccngaaaataagcagaaactcatacttacaccaaaacacttccataattttcttacacctaagggtttatcctcnggaatgntatggggtat

SEQ ID NO: 2046 - DNA, 456 bp, Homo sapien
  misc_feature (1)...(456): n = A,T,C or G
tttaattataaagaacagaaaatattcatttatttaaaaaagtgatctaccacgttccatgctagtgctaggccctatcattgtaacatgatttttataacactaaaatatagcccaagcactctctctgaagtataagattatgtagacaatgaaagttttatagggaaaacctaacagagatgggtttatcatttttaattcattatttcacttgagatactgagaacctaaaataatagcgatgaagtttttctctcactggtaataggtgtccacagtaagtcaatgcagaggcgggatgttcataggcgagacccacacacttcanctttttgctgtgtcatccntatggggcaagggcttctacctcatagttcaagatgactgcttgagctcccgccatccagtccggattttcaccccaacagggaggaaataatgggttaaaggata

SEQ ID NO: 2047 - DNA, 409 bp, Homo sapien
  misc_feature (1)...(409): n = A,T,C or G
ttttttttcagagaggaggttcatgatgttgcccaggctggtcttgaactcctgggctcaagtgatccacctccttggcttcccaaattcttgggattaaaggtgtgagccgccacacccagcaggtaatagtctgggttcagagtccagtgtggacttaaccacaaagaaaaactgccacagtaattagaaaatgatacaaatgccgtcttcacactgggaaagtgaatgccctcccttgtcagggcttcccctggccttgtgtctttcaccacctgccactgcggcccacctgcaggacccctcctttgaaccgctgaagggcagcttcccaacttcatcttcccatcccacccctgggcacgagctnggctcccaatgaaagtgtactgaagtaggattgcnaatc

SEQ ID NO: 2048 - DNA, 387 bp, Homo sapien
  misc_feature (1)...(387): n = A,T,C or G
atttatttttaacacacaagtgagtttaattactagctgtctaccctactccattcccttgctattgagaattacttttttgtcctaaaatcagatattatcatgtatgttctctgtagaaaatattctgagatccttgcagaggtcagcctaggttaatgagcctgtaatgcgaacatatacatatagctgggatttgctgaggacagcaggtggcaccccaattaaatggcactcatgagccatcatccggaagaantcacggtttctgcttggacttgaacttttctttggttctccttcctggagtccacctgaaatcacagtcagctatgtggggacttacaagatttgttcatcttaaaaaagactgaaagttttctttgg

SEQ ID NO: 2049 - DNA, 327 bp, Homo sapien
gaaatttatttctcacagttctgaaggctggaaagtgccagatcaggtggccagcagatctggtgtttgatgagggctctctgcttcctaaataatgttttcttgctgagtcttcacatgggagagggaggccaggcaactccctccaacctctcctataaggctctaatctcattcatgagggttccaccctcattccctaagcaatttaatgccttcccaaaggccccacctcttactacgatcgctttgggtattgggttctgacacatacattacctcatttactttcaaaatagtagtgtgggcatttttaaaaactataaa

SEQ ID NO: 2050 - DNA, 452 bp, Homo sapien
  misc_feature (1)...(452): n = A,T,C or G
ttggtattttcagttagattctttcttcttagaggtacagagaaagggaggaaaatagctacagacatggtgtaagtaggtcacagcagtttcaatgcaccaaaaaatgtgacatctccatccagtgatatttgtgcattttctcttggtattgcaagttggagttcatctccttcttccagttttgcaatgccagctgaatagcaggaattattgggtagtgtttcaggcatattttgaatacatcgaaacaaagtcaccagactcaattcatccccaaagacatggaccttctncctctgaattagatgtcccatggcgtaggtcttatcagtatataaaacctgaccatatataaaaaagtaaccagtttcttgaccaatattttattctnttttcttcagggcacttccccttttaaagctgagaagcctggaacaaatgtgctcgtg

SEQ ID NO: 2051 - DNA, 149 bp, Homo sapien
ttttttttcagaaggtgctttccttttatttgcaactcacacatataggcctttgtttgacaatcttgctagagccttaggaatttttgtcttcattccacaggtaaggagacaggaattcagagagggtacttattcaaggttatata

SEQ ID NO: 2052 - DNA, 644 bp, Homo sapien
  misc_feature (1)...(644): n = A,T,C or G
gagacacagtctcactctgtcacccaggctggagtgcagtggcacaatatcagctcactgcaacctctgcctcctgggttcaagtgattctcctgcctcagcctcctgagtagctgagacaacaggcgcgtgccaccacacctggctaattttttgtatttttaagtagagatggggtttcattgtgttagccaagatggtcttgatctcttgacctcgtgatctgcctgccttggcctcccaaagtgctgggattacaggcatgagccaccgcgcctggcctagacacactctcaaagcaaaggtcctgctcatgtatcagaaagattgcaaattaatgtatgtttaaattacattaaaataaatgtttgaagtgtaagtttttacggcctcccaaataaaaaacaactaccaggctgnaagcnttttaatataatgatgtggccagttaaactgcagattaacagcacagaagtggctcgtccaatcaaactgggaaatgttccataacttcccncgtgcgattctgaanccggggttcnctattttaaggggcgcaccgtggagctccctttgtnccttgtgnggtaattcggctgggaacatggcaagngttccgnggaatgttcgcccatccccanaag

SEQ ID NO: 2053 - DNA, 398 bp, Homo sapien
  misc_feature (1)...(398): n = A,T,C or G
ctatgtagcaacagtggttagatgatctttgtctgaatgtaattaaactttgaatagttttagtgtgtccttaaagccaagtatatgctttaacatcaaatggaagtcaaattcctaatgcatagatagagagagctaaactgtgtaatttaatggtatcttccttgctggatgtggcagaatccacaccagcttatcaaccaacacagctaattttagaatagatcctttatctttccatatggcacacgtaagaaagtgtttttctactattaatattaaattaaaacctttacttttgtataataaattaaaactcaggataaacctgtgaccacgttatttgcttcaacttatnacttagngaaccccttgtaaagtcaataggattgagcncc

SEQ ID NO: 2054 - DNA, 633 bp, Homo sapien
  misc_feature (1)...(633): n = A,T,C or G
tcgtgngagaacaccttgcaagcaaggaagtggaagtagcaaagctggagaaacaactcttagaagagaaagctgctatgactgatgcaatggtacctcggtcttcctatgaaaaactccagtcatccttagagagtgaagtgagtgtgttggcatcgaaattaaaggaatctgtgaaagagaaagagaaggtccattcagaggttgtccagattagaagtgaggtctcacaggtgaaaagagaaaaggaaaatattcagactctcttgaaatccaaagagcaagaagtaaatgaacttctgcaaaaattccagcaagctcaggaagaacttgcagaaatgaaaagatactctgagagctcttcaaaactggaggaagatanagataaaaagataaatgagatgtcgaaggaagtcaccaattgaaggaggcttgaacagctctcccagctctcctactcaacaagctcatccaaangcagngtcgcagctgaagggctgcagcagcagtcaacagctccgaaccagctggcggatnccagaaacacaccagggggtcntttcgttcagatgcatctctgtatgtgtcagggccgatggtnaaattccgaagtctagnaatcctnccttgtaa

SEQ ID NO: 2055 - DNA, 489 bp, Homo sapien
  misc_feature (1)...(489): n = A,T,C or G
taaaagaagaaaatcnagagattgcagtgagtgccagcaccatccccgaacaaatacagtccctctctgtgcacgactctcagggcccacccaatgctaatgaagactacagagaagcttcttcttgtgccgtgaacctcgttttgagattaagaaactccagaaaggaacttaatgacatacgatttgagtttactccaggaagagatacagcagatggtgtatctcaggagctcttctctgctggcttggtggatggtcacgatgtagttatagtggctgctaatttacagaagattgtagatgatcccaaagctttaaaaacattgacatttaagttggctctggctgtgatgggtcggagattcctgatgaagtgaagctgattgggnttgctcagttgagtgtcagccgatgtatgtcccctgatgtcaccctgatctgtcatgccccaccgcaaccctactnccttcaaacctcctctttctg

SEQ ID NO: 2056 - DNA, 368 bp, Homo sapien
  misc_feature (1)...(368): n = A,T,C or G
gattctgtaacatgggaanntaaatgtacattttgccaacgagctgggaaaataaggcacctttgctttgggagattgacgtgttcaaagtatctacttggtgctactgaaaatggcattctttgctgttggaatctgctgagctgtgcattggagtggaatgcaaaattaaatgttagagttatggaacccgatcctaattcagagaatattgctgcaatctctcagtcttcagtgggttcagacttgtttgtatttaaacctagtgagccaaggccattgtatattcaaaagggtatctccagagagaaagtccagtggggagtgtttgttccacgagatgtccctgaatccttcacctcagaagc

SEQ ID NO: 2057 - DNA, 610 bp, Homo sapien
  misc_feature (1)...(610): n = A,T,C or G
atgaatgtgcttatatgattataagaatactaattaaagtcccataccagaataaagaggaatctaaacaactaacttctgccattaaagactaaagatgatagaggtcaccttaagcaagattttggaaaaggcgaaggtaaactttcttcatttgtgctactcttccattttcaataccacttttagacttggggaaggagataccttgccctagaccccatgcttgagagcagtgatcctcaacatgtctatgatcaaatacgaaatttgcatttctaattctttgaggttaaatattttcataaaatgtaatgatattatggccattccaaagtgcagtaaaattctttcaatgcttattctcaatatctacactttccttttgacagacggttccccagggcatgttcactgacatcaaggtgcagaacttnctttaagtagcacacgtatgagggctgtacatctcacaaacaaacagaaagncataacttggtaaaagtaagttgcacttttgtcataggntggcagtcgtgcggccctacgactccaatttaacattctctcggtggtccatcagccaggnaccangtcttntcttgggnag

SEQ ID NO: 2058 - DNA, 533 bp, Homo sapien
  misc_feature (1)...(533): n = A,T,C or G
aatgatacatacaaatataaaacagatggaaaagaaaaggaggccatccttgaagaagaagatgacctctgggttagaattcgacatcgacatattgcggttgtgttagaggaaattcccaagcttatgaaagaaatttcatcaacaaagaaagcaacagaaggaaagacatcacttagtgctcttacccagctgatgaaaaagatgccccatttccgaaaacagattactaagcaagttgtccatcttaacttagcagaagattgcatgaataagttcaagcttaatatagaaaagctctgcaaaactgaacaggacctcgcacttggaactgatgcagaaggacagaaggtgaaagattccatgcgagtactccttccagttctactcaacaaaaatcatgataattgtgataaaataagagcattcnctttatatcttcagtattaatggaactacggaagaaatttggacaggttgatccgaatgtaagatngaaaatggggtgcatgattcgtactggngttaccttg

SEQ ID NO: 2059 - DNA, 545 bp, Homo sapien
  misc_feature (1)...(545): n = A,T,C or G
tagaatataaaagaattganagcataggtttaatttcatttttataaggaagactacatttacctgaaaaagaaatatggcatcacacacaaacacgcttcagggaaggagtatatttaagaatatggtgtcattctgaatgctaaaggaaaagtgatccctgtttactattaaaatatgtagtgtaaaattctttaaaggaaacaactcactaaatctctactaggtaagttattgtgaatttagttttcaaatcacagtaatccacataacccattattaacagctctgtttcatagaactgcaacaagccaacnaacatttaaatgcacttcacatccagagtatgtaaaccttaattttccccttcaggcctcagaaagttaggggccattcagcagcccatctngtccgaaccctgaaggcaaatttagtgcccacgtgattgaccattgttgcctgcacaatctggtagtgaagttncccatcaggggttccagaagcccgagttnaggtaccataaaaatgccnccctgntttgtagg

SEQ ID NO: 2060 - DNA, 578 bp, Homo sapien
  misc_feature (1)...(578): n = A,T,C or G
gtgctcagttttcangcattcattgagacttttctcctccttcctgacactggaatattttagtcatacatgtagttttaaagaccaaacctatacccactccttttcagtgctaaaaaaaagtaccaccaaaatgtaaacaaatggcactaaccaagcaagtcttgggagtaggggtgaggatgagtatagcagcatgaaagaaatgggtggaaaccagtgtttgtcaatgtcagcacgtactcttgattcctccccatctcagcaaatatagactttcacaattaatactgactttcagagataatagaagagctccataagccaggtttgaccttattttctgtatgagtcatatgtactatgttgataataccatacgtttatacattttttgaagnttaacttcnctaatgnctcattatncccaaatctgataaggtgtctgcnccactccctaataaatttcccaagataattccngcttacagattcnccaaggangcctcttcagggggaatggganaatttccgagaanccggangggtcaagatgtgggnccaatgngaactgttta

SEQ ID NO: 2061 - DNA, 486 bp, Homo sapien
  misc_feature (1)...(486): n = A,T,C or G
tctgtccatttaaaatgttttatttttttaaaactagatgacgtgccactgaaataggcaatgttgggaaaaccaatgtccgttncnantaaattaccttnagaccnttnaantaattancnttaaaannnagntnangggnnntaancccnnnngntngannnnggannannntttnnngnnnannngnntnnnggnnnncnncnngtnaaannngntngnngtaancngannganccntcacanncctaangangannccancngggccgggggtaagntggggaaagttgggttgggttgggttgancggggccaaattgggtgagggangtagcaaccccaaacacaatanctgactgaggtacgcaagnctctgctcngtgcagaaaaattggcttgtgnataaatnttannctgtgatctcatnttatctccggctnctntgcaagagacactatacntgctatngagtttnagaaaaaa

SEQ ID NO: 2062 - DNA, 420 bp, Homo sapien
  misc_feature (1)...(420): n = A,T,C or G
agtctttggtcactgaagccatatatgcattaggaggcaccccaatcccagtaatgccatgactcttgcagacttgtagaagtactgccttggtagtcttagataagaactgggaggattccctggattaccaggcagtcttctattctcttccctactttccctcaaatagaatctctctctccattctgagctgcctggagttgggggaggggtgacacaagcactcttgtggccaccattgctgggactgtgctggatcacacctaaagccagtaaagtactgggtctcgcccaaggcctgtgtcaattattgcctggctattgcttatgtttactcaaggcctaagggctcattagtcaagaggtgatgaatccgccaggcttggngtctttcccttcagggcagtgggttccctt

SEQ ID NO: 2063 - DNA, 597 bp, Homo sapien
  misc_feature (1)...(597): n = A,T,C or G
tccataatgagcaacttttattggcattagggtgtcagtcctgtaaggatcatcacttaagtgtgtctcagtggagaaaagatcaagaatcatgtcaagaagaccatggggttttattccacttgagcaagagcaaatcagagccccatcaagcaggaatggtggcctttcccaggttccatccttaactaaactgactgttcccccttctgatttctccacggtcttctgtctcttgctctgccaaacttgttttcttatctctgtagagatgagtggcttgtttgatgttctttccatggcaaaaatttattcaatgcaaagttcacttcagacacttggttgagacttgaagtttagaccaatcctgagatgcgtggtgatcctgagagagagcagactgcctgccaggtaaatggtccatattatttcctgggcagaggccctgacaggggctggggtcccgtgttacctcagcagtcttctgctggcctactctgctgctctgtangaaggcccatctggccatttctgtgaaactgccccttctcaagcactccgtaanggtggtgttggccngcgcagaccagattcgct

SEQ ID NO: 2064 - DNA, 592 bp, Homo sapien
  misc_feature (1)...(592): n = A,T,C or G
tttttttttttttttttttttttttttttttttttttctgtaaaaccaaatttattccaaaataaaacatttattaaaaataaatgatgcctgggtttctgacttgggcacttgggaaaccaggtagctctaattctctaagacagaatgtcatagaggcggtttggagaggggcagatggtaaggctcagctttagacatactgagttcgatgtccctaaatctggagggtgagctatctaggaatgagttgatttggagctcaggaaagagatccagattggcaaaaaaacactgagagtcaggatgggtttgcaggcttgcctgagattgccctggggacacttacattcaaaggcagagaaccgtatgtcanccctggtgaggcctgaatgcagaataacaagtttaccaatcattatacacttactgagcacttaccacatgccaagcccgaactaaatgtttacctatattactcatggaattctcatatctacccatagaataggtgctatttagtcttgtacagatgggaaatctgtgccggatagtngtgctttngtagcgcacccntgggtaggcgtcaaac

SEQ ID NO: 2065 - DNA, 574 bp, Homo sapien
  misc_feature (1)...(574): n = A,T,C or G
atttttgagtctactttatttacagttatttatcctttcttgaaaacttttagcatcgccttgattaaaataagttcataaaataatcttcactgtatttgttacatatggcacagaataatttagcactttataaatatgtctcattgatgcacaaatgggaggagcaccctttgctgaaagagtacagtgacttagttcaatttggctacggtagcactttaaaaaattaccatgagatggcgctgtggccaagtaaatgcagtatgctttaaacagttttccctaattatggcagttaattgcttttttttgaatatagaggaatctatcattcaacttaaagtagagcaaggtttgttactccgttttaatagtattcattaaaagtgaatccttaatcacagatcctaaatctttgacaactgtgtttcattaggtgtgagtcgtttaaaaagcctagtagtcagaaaattgccgactaaacaagggcccaaggtaccttttatttaggatcagaactatatagtggaccatgtttcgccatcctctagattgtctaagtctccncaaa

SEQ ID NO: 2066 - DNA, 337 bp, Homo sapien
  misc_feature (1)...(337): n = A,T,C or G
aaaaagaanttaagtataattttattctattctgcatcaatgccatacacacacanaaaaatgtttggatccttaataagttataacattctangttttaacattaataacaaggacataaatgatcatttcctgagttaacagtgcaaggtaaaatttaatctgtattgctaataagacattttacagcatagaaacatgatngaagtgatcatttactttatcatgtcataaaacacaagtgcttattgtagaacagtgatataatttaaatggcaaggantttgtgttcataacaangaatcctgtatgtatttgtngccatgattaatttccc

SEQ ID NO: 2067 - DNA, 108 bp, Homo sapien
  misc_feature (1)...(108): n = A,T,C or G
ggtgagaaagccagctgactttattgctctgggggcagggngctcaggagctcttggtgaagaggaagcggacccgccccaccaagagctcctgagccccctgccccc

SEQ ID NO: 2068 - DNA, 562 bp, Homo sapien
  misc_feature (1)...(562): n = A,T,C or G
tttgtataattatttggataccaaactcactgtttaaactacctattatctgctgacaggccgccctcaacttcttacaaaggacaggatgttaaattccatttcgtatcagtctagcccatatcctcagtcactcactatcccctaactttattattcgtcatggtccttaccagcggaaattacattatttactagcttactgtttgtctctaccaccagaataaaagctccatagcagcactgacttcatctggttctctaacacctagaacagccccacaggaagcaattaataaatatttctgaataaatgaatcatcttcagctctctagaccaagcctctcctctgagcttcagactaacagacacctctacttatctcctaggcaccttaacctcaacatgtttctatactaaattcatactctccccttccccgatcttctcttctcctnttccccttctcaataaatttcacagccatccacctaaatcgaaacatgggcatctttcntgcgnttccttctatctcactcccanaccattgatcaccaggtt

SEQ ID NO: 2069 - DNA, 103 bp, Homo sapien
  misc_feature (1)...(103): n = A,T,C or G
tacacaataaatatttttatttttaaacactgaattgtacatctttcatataaaacatgagattctagcctgttttaaaaaataagtatacttgcnagtacta

SEQ ID NO: 2070 - DNA, 430 bp, Homo sapien
  misc_feature (1)...(430): n = A,T,C or G
aatncnntganaaatttatgntcangntgntnccattanaaagnanngnntttaaaaactnataanntataactgnnacacgcanaanagatnaaccnaagnggnncnaanaacattntcctntccttctgaaggttttacgatgcattgnnancatnanccagncntttactnntnannntaantggnnggttgaannaaancgtnntgagancgntntncnacnantnantangagtggggtggcncgtntcngggaannnantcanttagcctctgagcttctgggcaggctangngancttgccangnntancagccttnttgtggacngcttnatgacacccacngnaacngtctgtntnatatcanggcaagcanggggcccaaaggtggatagtnngggaagctntnngnaacatgggcctgc

SEQ ID NO: 2071 - DNA, 218 bp, Homo sapien
  misc_feature (1)...(218): n = A,T,C or G
atactcaggctttgcaggagttagccgaccacgaggaacctttcatgacgacagagatgatggtgtggattattgggccaaaagaggaagaggtcgtggtacttttcaacgtggcagagggcgctttaacttcgaaaaatcaggtagcagtcntaaatggactcatgacaantaccaaggngatgngatgntgaagatggagaagagaccatggaaat

SEQ ID NO: 2072 - DNA, 409 bp, Homo sapien
  misc_feature (1)...(409): n = A,T,C or G
ttatgagantaaagatccccgcacttttgtgtctttggtacctacctctgcacatactggtgatggcatgggaagtctgatctaccttcttgtagagttaactcagaccatgttgagcaagagacttgcacactgtgaagagctgagagcacaggtgatggaggttaaagctctcccggggatgggcaccactatagatgtcattttgatcaatgggcgtttgaaggaaggngatncaatcattgttcctggagtagaagggcccantgtaactcagattcgaggcctcctgttacctcctcctatgaaggaattacnagtgaagaaccagtatgaaaagcatagagnagtagaancagctcatggggtaaaaattttnggaaaagacctggggaaaacattggctggt

SEQ ID NO: 2073 - DNA, 316 bp, Homo sapien
  misc_feature (1)...(316): n = A,T,C or G
ttatgagantaaagatccccgcacttttgtgtctttggtacctacctctgcacatactggtgatggcatgggaagtctgatctaccttcntgtagagttaactcagaccatgttgagcaagagacttgcacactgtgaagagctgagagcacaggtgatggaggttaaagctctcccggggatgggcaccactatagatgtcattttgatcaatgggcgtttgaatgaaggagatacgatcattgntcctgaagtagaagggcccantgtaactcggattcgaggcntcctgttantcctcncnatgaaggaatta

SEQ ID NO: 2074 - DNA, 277 bp, Homo sapien
  misc_feature (1)...(277): n = A,T,C or G
ggcacgagtantgataaacagtgaaggaatttttaaaaaaatttttaagaattgtttgtcacgtcatttttagaaatgttctacctgtatatggtaatgtccagttttaaaaatattggacatcttcaatcttaaacatttntatttagctgattggttctcacatatacttctaaaagaaacttttatgttataagagttactttttggataagatttattnatctcagttacctactattctgacattttaggaaggaggtaattggttttaatg

SEQ ID NO: 2075 - DNA, 189 bp, Homo sapien
tttttcatgtggcagatgtttagctatttggggagaactttcatggctcttccctaatcatcaagtattcaaggtaaagattctcggttcctgtaatggttcctcaccaggcataatttgtccttttaccatcctactttctgtcttctgaaaaacattctttatctgaaatacagcaattaatattaa

SEQ ID NO: 2076 - DNA, 157 bp, Homo sapien
acttttccaatttacttgctatataaccttgaataagtaccctctctgaattcctgtctccttacctgtggaatgaagacaaaaattcctaaggctctagcaagattgtcaaacaaaggcctatatgtgtgagttgcaaataaaaggaaagcacttc

SEQ ID NO: 2077 - DNA, 235 bp, Homo sapien
  misc_feature (1)...(235): n = A,T,C or G
agcacacngtaccgacagtgntacgagtcncactntgcgntnnccctgggncagcaanaagngagcnnngctgaatcctgangaagaaganattttgaacantaaacgatatannannttcaggagannatgatgaaagtannagatgccgatancagcagtctcctggaggagcagttccngcagggcnaanttcntggntcaatngttcnagncctggacagtgnngccgagc

SEQ ID NO: 2078 - DNA, 139 bp, Homo sapien
  misc_feature (1)...(139): n = A,T,C or G
gtgaccctagctcttattgtgaagttagtggagtatacttagaaatgttacaactttaaaatgttacaaaaccattcattaaagctcatatttaaagtagagcatntagttngagaaatanaaatcagtnattaaagaa

SEQ ID NO: 2079 - DNA, 490 bp, Homo sapien
  misc_feature (1)...(490): n = A,T,C or G
cattttcagcaaatcatgatagctgatcatggttattttatttttctaattactagtgagattgaatgtcttttcatatttactggtcatttgtatattttcttattgtggaatatggacaaagtacatgaaacatatgtatgcatgtacacaacagatatgtacacacatacatatatattttttaacatatcataatgtgcataccatatgaccaccgggtcaagaaatagaacatctccagtacctcaaaagctccatatatgtccctccctaacacaaccctctgtccactttaacatcatccctactcttgcttgntttcttcatagttttaccacccatgtatatgtctctaaagaccatatttagtttcaattttgggaattatatgatccaattatactggaacactttgagacngggttctttgcnagcatatgagattcatcctatcatgtaggaggcccagtgggttattcntggatga

SEQ ID NO: 2080 - DNA, 200 bp, Homo sapien
  misc_feature (1)...(200): n = A,T,C or G
aacaataaacacctcnataacatgggtgnaganaaaacaaggatatanntgcnttagcgggnnttganantcctaagatagaacnccaactctttncccacaagnacanagnnatatgctcgggcacactgtncnntccntgaagcgattnacgcaagangcntgnnctgctngaatngntcctncaggnnactggtgat

SEQ ID NO: 2081 - DNA, 337 bp, Homo sapien
atgtgcctacatgcatattttaacatctacttacaagccaaaaatggctggaagacatttatgaatcgtaggactgctgtgaagaaaattaattcacttcctgaaataaaagggagccgcttacaagaaataaatgatgtatgtgcaatctgctatcatgagtttacaacatctgctcgtattacaccgtgtaatcattatttccatgcactttgccttcggaaatggctgtacattcaagatacttgtccaatgtgccatcagaaagtatacatcgaagatggtatcaaggataattccaatgttctaaccacatggtttattccaccccatgaaa

SEQ ID NO: 2082 - DNA, 600 bp, Homo sapien
  misc_feature (1)...(600): n = A,T,C or G
aaaaatataaatatatatataaatatatgagttattaaaatcagaagaatactttgtggctgtgctgtttgtgccaatagactttgtcatgaccaaaaagagaaatgtaaatagttttataaaatacagtcgaatcaccaggaacctttgagctgcttttaaaattcttcccctggcaccactcagttttgcttttgcgaggcgatttgacataggaactttgagactccatgagaaagtccctttctgaggcccactgtctaccttgccagatcctcagtgcgtatcgccaatgcaggatgtccttagaaaagaaaaaatggtaaagaatggcatttaacgattcaggctttgaattactctgtccctctggaccgaatctctttaactgctggatagttttagaggaattctcctgctacttaggtactgggaaacatgcttgctaaaccatgcccacgtgagcacctgtctccactaaacctctcccatctnccacaatgactttgaatacngcgtgaaatggattactgttnccctggtgaactgcaggnatagtacgnggattttttctcactcggtatgcactggatcctccac

SEQ ID NO: 2083 - DNA, 481 bp, Homo sapien
  misc_feature (1)...(481): n = A,T,C or G
ctagacccaccctgggccagaagggaacccactgccctgaagggaaagacgcaagcctggcaggattcatcacctcttgactaatgagcccttaggcttgagtaaacataagcaatagccaggcaataattgacacaggccttggngagacccagtactttactggctttaggtgtgatccagcacagtcccagcaatggtggccacaagagtgcttgtgtcacccctcccccaactccaggcagctcagaatggagagagagattctatttgagggaaagtagggaagagaatagaagactgcctggtaatccagggaatcctcccagttcttatctaagactaccaaggcagtacttctacaagtctgcaagagtcatggcattactgggattggggtgcctcctaatgcatatatggcttcagtgaccaaagacttagatcacaacactcaatttcctttgagtacttggaaaacatt

SEQ ID NO: 2084 - DNA, 601 bp, Homo sapien
  misc_feature (1)...(601): n = A,T,C or G
tccaaaaactcactcatttcagtattactcattgacactgggctccctaatagaaaagcagatattataatatttcattgaaatggttactaaagagaaaaagagattaacaacagttaatccaccttgatattataacactcaaggttaaattgcatgttgttattagaatcaatgttatatatatgattacaatgctgaagcatttctattgaatgagaaatagtgtttgccctaaacctttgggaaaaaaatacagatttgaaaactaaagaatgtgggaagtgtcattgtgtaatttggaaatgcataaaattctcattatgtcctcatagatatgttgaaagatggttcactgtttcaaagatagaatgtataatatgctgctagtaccaaggctgcatttgaactgaactactccttatgatatacctactaactgatgaaaatataaatgttaaaatgtctccactctaatgtattttgccttcactgtactctgcacattcattatatattnggaaagatacgattctaccccatatactcatctgatcagatgtcattaatgtgcngaagtgcttgcnccattatacatgng

SEQ ID NO: 2085 - DNA, 624 bp, Homo sapien
  misc_feature (1)...(624): n = A,T,C or G
agaaacaattattaaggattgtttatatcttatacatattgggctaagccatgaggttcaggaagatttttctgtgcgggttgttgagagtgtgggaaaaatagagattgttctacaaaaaaaagagaatacttcttgggactttcttggccatcccctgaagaatcataattcacttattccaaggaaagatacaggtttgtactacagaaagtgccagttaatttccaaggaagatgttactcatgatacgaggcttttctgtttgatgctgccaccaagcactcatcttcaagtgcccattggnaacatgtttacctcaagctacctattacaggtacagaaatagtaaagccatatacacctgtatctggttccttactctcagagttcaaggaaccagttcttcccacaataaatacatccacttttgataaaaatctatcccctggactcttcacaccagagctgattgtcttcagattggagattgttctgtaagcagtcctgangggcattttaaaaatccagttccagaattgaagatcccttttgttggcactgganaggttccnccatggtaaanccgaattagcttgccgaaacccgttcngaatgagcgtg

SEQ ID NO: 2086 - DNA, 464 bp, Homo sapien
  misc_feature (1)...(464): n = A,T,C or G
tagaaccagatctttattctacttgtaattcactggataaacaaagaaatttcaaaccaaaccaaagtgatgatctgaatctcattagacctgaaggtcatgagaactttctctagaggcaaaacctgccctgtatcacatccagcctagaaccatccccaaaagtcaaatcaactgctctgcagctcaccagccatgttcatcccaaggtggtgattatcaaaaccacagactgctccccaaggggactgactctggtctctgccttgcttggtgtaggtcaaaattcttttttaaaaaatggaagagaagaccacaatgagatgctacttcacgctaactaggatggccataagcatgaaaaataaccagagctngtgaagatgtgggaaactggaancctcataaattaccagtggaaatgtaaatggtgcagctccgtggaaacagttgacaattctccc

SEQ ID NO: 2087 - DNA, 116 bp, Homo sapien
  misc_feature (1)...(116): n = A,T,C or G
cagagcaataaagtcagctgggggcagggggntcaggagctcttggtggggcgggtccgcttcctcttcaccaagagctcctgagccccctgcccccagagcaataaagtcagctg

SEQ ID NO: 2088 - DNA, 573 bp, Homo sapien
  misc_feature (1)...(573): n = A,T,C or G
ggcacgagatttgcattntagctagtacactgtaccagcagttaggaaatagtgagggaaaagattagacccagttaagtcacaaaggtgactagggtttactattgcaatggtagagggatgggggagtacatttaggagggttgaatctacaggaaacctggtgatcaattggttgtgggaggtgagatagaaggaagcagcaaggaaagatgtccatgtttctgatttaggtggatggctgtgaaatttattgagaaggggaagaggaagaagagaagatcggggaaggggagagtatgaatttagtatagaaacatgttgaggttaaggtgcctaggagataagtagaggtgnctgttagtctgaagctcagaggagaagcttggtcnagagagctgaagatgattcattattcngaaatatttattaattgcctcccgtggggctgttcnaggtgttagagaacngatgaatcattctgccatggagcttttatcctgtggtagagacaacattagccagttaataatgtaattccnccggnaggccntgccataataaatttgggat

SEQ ID NO: 2089 - DNA, 426 bp, Homo sapien
  misc_feature (1)...(426): n = A,T,C or G
aaaaattaaattgaagtagtaaatgctgttttataacatacatttttctgctaattcattctgttttgtgtgacctaataaagcaaaagaaaaataaaaaagcaattctccaagtacttcatagagcacataaaaccagatttcatgatgatgatgtattcactatcttttagattaagatctttgttatttggtaaatgatttcagtatggttttaaaacataaggcttttgatgtcttatgttctctaataatggtatgcttgtattttctagtgggaagttcatagataaagcagatttttgtcccagtttgctttccaatataaatttcagagggcttttcttactgtaatgaggtatgaaaataaatcttgtcagctcctataatttttgaatacngaatggattgagccgnaaaattgcc

SEQ ID NO: 2090 - DNA, 363 bp, Homo sapien
  misc_feature (1)...(363): n = A,T,C or G
tngganngcatcaggtnagaagttancgagagantggannatgcnntnctgnncctnntgcagtgnnttcanaanangncgntgnanttagctgnnnggntgtatgantncatgacaganaagctggnngngngataaggtcntgatcataatcatggnntcnngcagtgangtgnacatgnngcanattngntctggtttnngagaacntacggnnantcnctgnannantatanncctgnagggactaanggcgtntactatgaaacgctgctgtccctgtgatgtggagatnantgcagcgcnanacggcctgagnnttcacnnatagagntcatcctgnttccagnttanaggactaga

SEQ ID NO: 2091 - DNA, 411 bp, Homo sapien
  misc_feature (1)...(411): n = A,T,C or G
tacactgtcacatctttacagtctcgtatgttatagaatacaaaataagttgatggttttgtttggtgtgagctttttgtttgtttagttttgccttcataggttatatgccaagatagtatttgataagtcaatgacatttggatgttttcttcaaagaattttatttgacccagatttcttataaagttatcttacattaaggatgtcattttcatcagaccttctttctacatattattcatgaagcataatgttgcatttctccaaattttatgcctgaaagggtagtgttgcttcctaaggatcatgttgtcnttgtgcttgtccaactcttccgtggcgaacgttataactggtnccaaaacagttaanctgtgaaataaatattgaacataatccngaagaatc

SEQ ID NO: 2092 - DNA, 618 bp, Homo sapien
  misc_feature (1)...(618): n = A,T,C or G
taaagacagagagggtttggctctgacgcccaggctggagtgcagtggcgcaatcttggctcactgcaacctccacttcccaattcaagcaatcctccagcgtcanctcccgagtagctgggaccacaggcacaagccaccatacctgactcatttttttgtactttttgtacagatggggtttctccatgttgtccgggctggccttgaactcctgagctcaaagcactctgcccgccctggcctcccaaagtgctagaattacaggcatgagccactgcacccggttgaaatcagttttatagtatgttgaatctgtatcagaaatctttattagtggaaaaactattttaagtattgtgtgcaaacattcctatttaggccttgagagatatgggcatagaattcaccctcaaaaagctcatgttctgattaaccacatcaacagttaagtaatatggaagtcaagtaacaaagacaataacacaactaattataaacaagacatataagcagtttaataccacctagtgattctgattgactctattgataacatattccacaggtcatgcccataacttccattaccnaaatctggatagttccatcaaacac

SEQ ID NO: 2093 - DNA, 602 bp, Homo sapien
  misc_feature (1)...(602): n = A,T,C or G
taggttgtactaattgttctattttattatgagttattgtttttaatctcctgtgcctagtttatacactcactttatgataggtaaggatgtacaggaaaaatcataggatacatagagtttgttattatctgtggtttcaagcatcctctgggggtcttgggatacatcctccatggatatggggaaactactatatataaaaagtcggtaaaatgacaaatagagaagaaaagcagacatcattttacatatgctgaagaaggctaatcacgagttcaatccatccttcattgctcaggtccttcactcacaggatttgagtctacaggtgatgccaatgtttttattattttacgtctttcttccctgtgtagccaaatgttggcactttctatgcctcctttttgtctctccacttctaaagccaatcaccaattccggtttctgcaagtcggccatccttttctccagcgcacatggtcgtttcctttggccacgtactgcctctccatctggaatactcactcccctccatttcgtttattcaactcgtccatttatatgttccaagcgaagaagtcngtggtttgctttttcgt

SEQ ID NO: 2094 - DNA, 598 bp, Homo sapien
  misc_feature (1)...(598): n = A,T,C or G
tatattatttcacctttattttatattctattttactcaattgcaagcttattaagaacataaaaagtttgatcataacttactcttacctcatccatattacactagaattaaatcatatagaaaaacattgtttccattagttttataagatgtatccacagtgtggtttatttttagttatgtaattttaaaaaaccactttggtgtagatttctcaaaaatgataaccctgaaattaatgaaaattgtcattaaaagatttctagttttgcttttataaaaatcattatttcgaatttcacagtgaagaggtactaaattcctcatagaacatgaaattatataaaaatagaagacatagacatctttaaatcttaatccttgattaagcagcaagcatatcactcttccgggccaacactgctaaacaaaaagaaaaataatgacgtgcaaatatttacaaatatgcaagccccaataaagactctcctatatactgtgtctattacaatgaagcaacgttttcacgggtgctcaatgctgtaatcaattacagcantcctcagatacgcacctggccngtcgggaagagagt

SEQ ID NO: 2095 - DNA, 588 bp, Homo sapien
  misc_feature (1)...(588): n = A,T,C or G
ttctgaaaacctattagtttatttaaaataatggatggcatgtacctatatatgtagataagtctccttttaaatttttttaaagaaccaaagaatcctacaagcccccgtaacacacatacttgagttccagatactcatcaatgccatacttggacccctctcgcccaaggccggactgcttcactccaccaaaagggcactccacagaggaaattaatccttcgttgacgccaaccatgcccacttccagctgctctgccactctccagatctgggctgggtcttgagagtaaaaataacctgctaacccaacatcagctgcgttaggatttgctatagcctcctcctctgtatcgaacttgataactggtgccagaggccgaaagtctcttcatgagtgcacagcatgtcctgggtgacattgcacagcagggtaggctcnagaaattttttccagttggtgtcgttttccancgtcacaacggtggcaccttagaaacgggcatcattcanctgtttctccacctttctaccgctttttcattaattaatgggccngagtagttcttcctcaatccttantac

SEQ ID NO: 2096 - DNA, 381 bp, Homo sapien
gacttaaacaatagaaatttatttctcatagttttggaggctggaagtccaagatcaaggtgttggcagggttggtttcttctgaggccctctcttcttagcttgtaaagagttgtccttcctctgtgtctccttatggtctccctttgtgcctgttgtgccctactcgcctcttcttttatgatcatcagtcatattgaattagggtctatcctaatgaccttattttacctctttaaagaccctgtctccaaatacagtcacattctgaggtgcttcaacatgtaaattttggggagacattatcaacccacaagagaatcaaaatgtattgtttaggtaaaaaactaaaagagcaaacaaacaaagtcattagaaatt

SEQ ID NO: 2097 - DNA, 539 bp, Homo sapien
  misc_feature (1)...(539): n = A,T,C or G
tgcattttaagaatgaaaatacaactgttttctgtcttagattaatcctgctgctatgagaaactgaaaatcaagaatgtgatgcactttttacattactatataccatacatataccataggttgctttgatacctttcctgtagcacagccactaacaagagtgaatgaattataaaattctttttgggagggaatcaatacaagtaactaattcttagctgatattgtcctatgaaggacaataacttaggaatataagaattctgttaatagtacactttttggccttaaatgtcttctactactgaaaatagtttaaatcttagctttgtttctattattccctctctctgcctcagaaagaggaattgggaagaatggcttaaaggacgtggtgtcattgatttgttgctgatcttttagaaaacatttgtctatgtaagctggggactattttttgttgtatatagaggggaatagtgctgcccgaaccatcagatttagtttaaanaaatccatccaaactccgctggttc

SEQ ID NO: 2098 - DNA, 572 bp, Homo sapien
  misc_feature (1)...(572): n = A,T,C or G
gtatatgtccttttaaagatgcaaactccagaagacatgttcaaaatatccatagaagcactgtttgaaatatccccaaagtggaaaaaatccaaattgtccatcaagagtaaaatgaaaaaagtatatgtaatgtaatacattcatacaatggaataaacacactatggctacatacaatgataaggatgaatctcataatgcttagcaaaagaaaccagtctcaaaagtgtacagtataatttgattcatataaattccaaaaatagaaactaaatatggtctttagagacatatacatgggtggtaaaactatgaagaaaagcaaagcaaagagtagggatgatgttaaagtggacagagggttgtgttagggagggacatatatggagctttgaggtctggagatgttctatttcttgacccgtggtcatatggtatgccattatgatatgttaaaaatatatatgtatgtgtgtaatatctgttgtgtcatgcancatatgtttcagtccttgtcctattccncatagaaatatccaatgacagtaattgaaagcattccatctcct

SEQ ID NO: 2099 - DNA, 576 bp, Homo sapien
  misc_feature (1)...(576): n = A,T,C or G
gaaaagccaaaatttattctgtcggtattacttctgtggaacttcgggttattaattgtggaccatattcattttcagtacaatggctttttatttggattaatgctactctccattgcacgattatttcagaaaaggcatatggaaggagcatttctctttgctgttctcctacatttcaagcatatctacctctatgtagcaccagcttatggtgtatatctgctgcgatcctactgtttcactgcaaataaaccagatgggtctattcgatggaagagtttcagctttgttcgtgttatttccctgggactggttgttttcttagtttctgctctttcattgggtcctttcctggccttgaatcagctgcctcaagtcttttcccgactctttcctttcaagaggggcctctgtcatgcatattgggctccaaacttctgggctttgtacaatgctttggacaaagtgctgtctgtcatcggtttgaaattgaaatttctgatccaacaatattccaaggcctcaatgacaagtggttggttcagcagttccacacacagtcctncctcagtg

SEQ ID NO: 2100 - DNA, 226 bp, Homo sapien
  misc_feature (1)...(226): n = A,T,C or G
ttncatcntgtnntcgnnannacancgtaccnncagtnatacgagtcncnatatacgcanccnctgtncgtcaanaacgaagtaagctgatcatgnangatgaagngattntngncananaatgatntncaanaattcannagaagtatgatgtaatgaaaaagantnnnaaagtcaatagtctnntggangancagttgcagcngngnaancttcttgcgtgcat

SEQ ID NO: 2101 - DNA, 495 bp, Homo sapien
  misc_feature (1)...(495): n = A,T,C or G
gtcataaaaatgtgaaaacattttattctatgtacaataatgtacacaaatttaaacaggtcaccaaagagaccagaagtaattaaagaggtatatttacagtagcacatcacagtaaacggaaaaccattcacagattcaacattgatactgtttttgtgcttggttacacactgaaggtgaaggatattactccattttggatgaactgaattttaaacaaatacctcaatcattaataaatgctattttcatcagtcagtatcatcattaaattcttcagctgctgcgcctgtgtgctgaatcactccatttctttctctttgaacatcatcatcacaatctgtactgtcatcttcgttcaattccctgtcagattcagcagcagctttctcttacagcttcctctggagtttcattgggtggnataaatcantgttgttagatacattgaattatcctgatatcatcttcgagtaantttctgaggcacat

SEQ ID NO: 2102 - DNA, 452 bp, Homo sapien
  misc_feature (1)...(452): n = A,T,C or G
tacacttagcctattggtgtggctataaatcttatttattttagttgtgctctatttcttattgggntttacaatgtgttctctaaagtaataaagtgaatgcaaatatacgtggtcacaggtttattctgagttttaatttattatacaaaagtaaaggttttaatttaatattaatagtagaaaaacactttcttacgtgtgccatatggaaagataaaggatctattctaaaattagctgtgttggttgataagctggtgtggattctgccacatccagcaaggaagataccattaaattacacagtttagctctctctatctatgcattaggaatttgacttccattgatgttaaagctatactggcttaaggacacactaaaactattcaaagtttaattacattcagaccaagatcatctaaccatgttgctacataggctcgtgc

SEQ ID NO: 2103 - DNA, 557 bp, Homo sapien
  misc_feature (1)...(557): n = A,T,C or G
tgtcctgccaaggaatccactttacttcttttgagactggtttttacacatggtaaggatttgcttcagtactttctggacatcttcatccatctggccctgcacagcatacagaagatgcattctgtaaactgatatgacctcctggtgttgtttcttgcattccgccagctggttctggagctgtttgacttgctgctgcagcgcctccagctgctgactctgccttttggatgagcttgttgagtaggagagctgggagaggctgttcaaggcctccttcaatttggtgacttccttcgacatctcatttatctttttatctttatcttcctccagttttgaagagctctcagagtatcttttcatttctgcaagttcttcctgagcttgctggaattttgcagaagttcatttacttcttggnctttggatttcagagagtcgaatatttcctttccntttcaccgtgagacctcacttcaatctggacaaccctgaatggacctctcttctcttcaagantccttaattcgatgcaacacactcactcactc

SEQ ID NO: 2104 - DNA, 594 bp, Homo sapien
ggaacctattacagtcatgctgacaaagaagaaatatttgacaagctatttttttttctcttaggaaaatgctacctttgcttacctcctccccacacttcaaagcagtggctgtcttcaatattggcagcagaacaatgctcaaacgtttgttgcacttggtacactcacttctctgctttctgagacttgagtccatagatgaaaagaagcattggttttccttgggcttgaatggtatccatcctgagagtagatgtttagaattaggagtcgtatggtgcctgcactgactgccagacctaatgacaaaagtgtcaacttactttttactaaagttattgtcttctgttttgtttgtgagatgtacagccctcatacgtagtgctacttaaagtaagttctgcaccttgatgtcagtgaacatgcccggggaaccgtctgtcaaaaggaaagtgtagatattgagaataagcattgaaagaattttactgcacttggaatggccataatatcttacattttatgaaaatatttaacctccaagaattagaaatgcaattcgtattgatcaagacagttgaggatcatgct

SEQ ID NO: 2105 - DNA, 593 bp, Homo sapien
  misc_feature (1)...(593): n = A,T,C or G
tataaatactgtaaaagcatggaaggtgcaaaactcagtatttctacaattgcagctaagaacattaggatgaatggctggctgcttctaggaatataagatgcctcaagcattcattatttatgatttgaatactgtagctattttttgttgcttggcttttgaatgagtgtaaattgttttcttttgtgtatttatacttgtatgtatgatttgcatgtttcaatgataaagggataaaacagtatactgacaactgtttacaagaaagtggagaaaaatgtacatacatttttgtatgtttagatattaccgtaaatactcaggattggagctgcttgtaagtataacaatatacagaataactttattttatcttgtcagagtccatcactaatctaaaacaaaggtgggcattttttatgttaacctaaactctaggcctacggaagccctgataggggacacttcataccagatgtgtgcagtgcacagatgggcaatacacngtgggccngaaatttggcctcagaggtctgacagatggcgccgnaatagccccacttcngaaggcttagaggaaaaaaagnttc

SEQ ID NO: 2106 - DNA, 410 bp, Homo sapien
  misc_feature (1)...(410): n = A,T,C or G
aaatataaataagcaattaagcaaatataacctctgaaaagaaaccataagtaaaataataggacataatgggaaagccctggacttacagctgggaagcataccagttctaccttaatgcgctgggtatctaaggaaaatttatctagcatctctggtgctcagtttccttgtctttcaaacaaagggaccaccatgaactcttaagctgttaaaatccttgttttccacaataaggcattctccttacttgctttgttgctaaggttacttgcagctccagcatttcaggccacgttttagacaaggctccaatacagtcatgaatttaccaacattctaagatctaaccttaagggaaaaggatctcaacctcttgcccagttctgttaattatgacccttttgntt

SEQ ID NO: 2107 - DNA, 513 bp, Homo sapien
  misc_feature (1)...(513): n = A,T,C or G
tttattttttaaagttttattatgggattgcagcaattaataatggaaaagcttgttttattgtaaaaattaccagtatgtgacacagagacaagaagcaagcagatgccattggaaaaatggtgccagtagacttgcttgttgcagggttgccacaaaccttcagttaaaaaaaaaaaaaagaagcaatttctgctaagcacaatgaaacaatgtatgcctgtgcgtatggaggggcatggggaaatttgggaggtgatgaaaatattatcttgatttcacgagtgtatgcaggtcagttcattatacatcactgatatttcaaagggtacatgtcatcttctaggttttcttctggtccatactcatgttgatgaacaatcgtctcccttttccacacgctgcttctaactggctcgncgcattctttanntttttaaccaattcntcngnttcatttttcncgggtttccgtcggacttccttgctctctaangcttctgactaccccaa

SEQ ID NO: 2108 - DNA, 622 bp, Homo sapien
  misc_feature (1)...(622): n = A,T,C or G
ttttgagcatgtaagatcatttagtataggagaactgtacagttaatatacatttttctttttgattcacttttcttctctaaagggagatttgggcatgtactttatagactgagtcaaaggtaattgactgcaaaaaaaaaattgatacagagttgccacttttaagaatgatttgatactgactagtagctctctgtcttttgtaaattccctcttattatagttagttgcctgatgattgttacaaatttactaatttggaagtaataaaaactttcgaatattcttccttttctcattgaagttctttaccttttctctttgaagttacttacatatccctagaggcactagtttatggtagaagttgttaagggctatgtttgtccatcatgaatgatggtgtaacatctgcatggtgttacttcctagatcttgttgattagaagtgataatcagctactcgactctgaatcagggagtgttatcaagcccatgacatctgttgtccnggtgcttgtcccagctgcaggacnaggaaaagnccgccctnaagaattacccttcctgnccagtcagcatgatgggngtaaagatggtaccntaaacatggccaatt

SEQ ID NO: 2109 - DNA, 596 bp, Homo sapien
  misc_feature (1)...(596): n = A,T,C or G
ggcacgagattggacatagctgcagtaacttttcaccccatcattataccagtgctcatctgactgatgaaaaagaggaaagaataatcatttctagatactgaggctgcgaactagttctgtggcagtggactagcataagtggatgtctaagaaatttttcagttcactagactaaaatgttttacaacaaaaagcctccagttagcctcctttctagagtatatgttcagcaatgtgatctcataaaaggaaaaacaaaagatttaagtattctatataccaagtttttgttttgtttttactgtatttattttattgaggttctttatattcctgcctcttcatagtcaaggctcttagtacaggaatattgacttaggaattgtgaaaactccttaagtttcttaagttaaggatgtttggcttttttctttaattttttaaaaaccattttcctatgttaggagtgcaagaatagccagcatttccgattttgacatatgttcattttatgcatattaagaaattatagctgcatatcccttctttcaaaaatgtgctttttttttaaaggaattaatatatnccttaaa

SEQ ID NO: 2110 - DNA, 482 bp, Homo sapien
ggagctgggcggccttgctccatttatagtatttgacagtgccaacgtggaccaggctgtagcaggggccatggcatctaaatttaggaacactggacagacttgtgtttgctcaaaccaattcttggtgcaaaggggcatccatgatgctttgtaaaagcattcgccgaggccatgaagaagaacctgcgcgtaggtaatggatttgaggaaggaactactcagggcccattaattaatgaaaaagcggtagaaaaggtggagaaacaggtgaatgatgccgtttctaaaggtgccaccgttgtgacaggtggaaaacgacaccaacttggaaaaaatttctttgagcctaccctgctgtgaatgtcacccaggacatgctgtgcactcatgaagagactttcgggcctctggaaccagttatcaagttcgatacagaggaagaggcttagcaatcgctaacgcagctgatgttgggttag

SEQ ID NO: 2111 - DNA, 614 bp, Homo sapien
  misc_feature (1)...(614): n = A,T,C or G
ttctttgtatgtgtattcctcattccacaccttccccagaatgcatgcagaatttcttcctttctattttcttttctctttttctgaaactcttattattgggatcttctgcctcttggtttagggctctaattttccgacattttctctgctattttttactactttatttttctcctctactttctgagagatttcctcctcttgatcttccaaatcttgtactgaatcttttatttttgttaacatgttcttaatttccaagaactcttttttcttgtcttcggagtttcaacacttattgttgttttgtgcatgtattattttttcttctctctctgaggctatttaggaaattttttattgaagctcctcccccctgcttccttcaagttgcttttatctgcttttttatttgcttttcatgcaataagtttttctcacatgtcggtaactctggggantaccaaaaactcatagaaaattctgaccatgtgagtaacactgncaatttgagctcatgatagaagatnagcggacctttgcgcgggaaacggagtgatacttccacngcaagtgaacataagncagtagcggtgcgcttagnaagaagn

SEQ ID NO: 2112 - DNA, 448 bp, Homo sapien
  misc_feature (1)...(448): n = A,T,C or G
gattattgaataatgattngtcttagtttctgtttcagtaagggaattctgaggccgttgctatgataccatcattaagacattcacatgtcttcatataatatctcttcatttcaaatcctaatcactatttcatactattacagggctttgatgctgccagcactgtcttttacataggaaattctagatttgcacagtaatagaggaattagaagtacctaactatacactttgattcagcctgctaaatcaggggttcaatactagcttggacaaactttgtagtaattaattggctaccagccttattggaaacaaattatcaactagtttcccctgcacaaatttggaattcactggcttcacttaatcnatttatantaccaataatggattaataaagatgaattaattatatattacctaactagtattaaatgaaaac

SEQ ID NO: 2113 - DNA, 406 bp, Homo sapien
acaaaaaaaaaaaaaaaaagccccaagtacccatgcattccaaaacaaggtgctagaccacctatgcagaacctgccagcctagccatcacctatctctgctctataaaagagtgaggggaaagaagctaactgggagatggcgggtggtgtgatgtggatcctgccttgtctgtgggagatgggagttgggttcccccttcatctcaggcccaggggaagcggcatcaagggaatactcagctaatttcacacatcctcatgactggctaactaatttgtgggattccagtacaaaatgcaaatgtgggggcccttttcagaaagtaggaagagatggcttaaaagtacccaatttttttaaggaaaaaatcgtgcattactcttgaaacaaatctggttaagca

SEQ ID NO: 2114 - DNA, 506 bp, Homo sapien
ttcatcatctgccttctgcttttcaagaccaatttaatggtcctgtcatgttactgattaaatttactttgtcttgtctttatagcatttctgtttactatggtagatttccactttcaatttttaaaattaattttactttgaatgatttatgaagcctatttcattgtctaactatgaaaatattaagacttttttgttaattctcagccgatgtgaaggaagcatgaggagggatcgtcagattcagatttagaatagtgttcccgtttccagcattatttatttctatgacttctttggattttattatctaatagtaagtacagttgatgtgggtagatgactctaagaaatgctgaagtatcggcattacatgtgtttatttacatgtcctagtatgataatgttgattcatctgaacaaaagataatataaaaataacccttcagagttggacttcagttggtaaaataaaaataatatttaagagatattatatatat

SEQ ID NO: 2115 - DNA, 606 bp, Homo sapien
  misc_feature (1)...(606): n = A,T,C or G
ggcacgagaagccaaataangcagttccaatgaaagtaagtgaacacagtctcctgccccttatgctggagcagtttccgtttctttatgtttctggcccaacactaagcaaaatgtggaaacagcaaattgcacaggttgaacagcttaagaaagaagcatgtagagaaaatcgatcaaagaagaaactccaagatgaaatagaagaagccctaagaaggcatgacctccttactacccttgtcaagaaagaatatgaacataacaagagactgcaagacttcaaggactgcattcgtaggcaaaggttgacccaatcaaagataaaagaaaatcgacagcaaatcgttcgtgctcgaaaatattatgatgattatagagttcagttgtgtgcaaaatgatgagaatgaggacccgggaagaaatgatatttaagaaactgtttgaagaangtttaacttcaaagccaagattacgagacctagaacttgccaagaaagcgaatgaccaangagacgccaccngatgactgactcatgagactctatagaccgtttcatgctggcgagnctatcccggacatcagactttagccggggattcngc

SEQ ID NO: 2116 - DNA, 607 bp, Homo sapien
  misc_feature (1)...(607): n = A,T,C or G
gcgcccggaagtcgtgagtcgagtcttcccgggctaatccatgccgggttggaggctgctgacgcaggtcggcgcccaggtgctgggtcgactcggggacggcctgggtgctgccctgggcccggggaacagaacacacatctggctttttgttagaggtcttcatggaaagagtggtacatggtgggatgagcatctttctgaagaaaatgtcccattcattaagcagttggtctctgatgaagataaagcccaattagcaagtaaactgtgtcctctgaaagatgaaccatggcctatacatccttgggaaccaggttcctttagagttggtcttattgccttgaagctgggcatgatgcctttatggaccaaggatggtcaaaagcatgtggtcacattacttcaggtacaagactgtcatgtcttaaaatatacgtcaaaggaaaactgtaatggaaaaatggcaaccctgtctgtaggaggaaaactgtatcacgttttcgtaaagctacatccatattggaatttaccggaacttggattgccgcgaaacgacagttaaatcttatatacngatatgctgcaattaaccagcctcncttat

SEQ ID NO: 2117 - DNA, 506 bp, Homo sapien
  misc_feature (1)...(506): n = A,T,C or G
tgaagaagaatccacatcattcacaatggggtgatatgaaactctacttaaagttacagattgtgaagaggtctcttgaagtttggggtagtcaagaagcattagaagaagcaaaggaagtccgacagaaaaccgagaaaaaatgaaacagaagaaatttgataaaaaagtaaaagaattgcggcgagcagtaagaagcagcgtgtggaaaagggagacgattgttcatcaacatgagtatggaccagaagaaaacctagaagatgacatgtaccctttgaaatatcagtgatgtataatgaatctgacctgcatacactcgtgaaatcaagataatattttcatcacctcccaaatttccccatgcccctccatacgcacaggcatacattgtttcattgtgcttagcagaaattgcttctttttttttttttaactgaagtttgtggcaaccctgcaacaagccagtctactngcaccattttccatggcatctgctgcttctg

SEQ ID NO: 2118 - DNA, 524 bp, Homo sapien
  misc_feature (1)...(524): n = A,T,C or G
aactttataaagatanaatatcctcaggggtggagaagtgtcgttttcataacttgctgaatttcaggcattttgttctacatgaggactcatatatttaagccttttgtgtaataagaaagtataaagtcacttccagtgttggctgtgtgacagaatcttgtatttgggccaaggtgtttccatttctcaatcagtgcagtgatacatgtactccagagggacagggtggaccccctgagtcaactggagcaagaaggaaggaggcagactgatggcgattccctctcacccgggactctccccctttcaaggaaagtgaacctttaaagtaaaggcctcatctcctttattgcagttcaaatcctcaccatccacagcaagatgaattttatcagccatgtttggttgtaatgctcgtgtgatttcctacagaaatactgctctgaatattttgtaataaaggtcttgcacatgtgaccacatacgtgttaggangctgcatgctctggaagctggactct

SEQ ID NO: 2119 - DNA, 544 bp, Homo sapien
  misc_feature (1)...(544): n = A,T,C or G
aactttataaagataaaatatcctcaggggtggagaagtgtcgttttcataacttgctgaatttcaggcattttgttctacatgaggactcatatatttaagccttttgtgtaataagaaagtataaagtcacttccagtgttggctgtgtgacagaatcttgtatttgggccaaggtgtttccatttctcaatcagtgcagtgatacatgtactccagagggacagggtggaccccctgagtcaactggagcaagaaggaaggaggcagactgatggcgattccctctcacccgggactctccccctttcaaggaaagtgaacctttaaagtaaaggctcatctcctttattgcagttccaatcctcaccatccacagcaagatgaattttatcagccatgtttggttgtaaatgctcgtgtgatttccctacagaaataactgctctgaatattttgtaataaangtctttgcacatgtgaccacatacgtgttaggangctgcatgtcctggaanctggactctaagctggagcnctggaa

SEQ ID NO: 2120 - DNA, 194 bp, Homo sapien
ataggcccagctgagagccatccccacactcctcagatgcctccatcaacaccaagcagcagtttcttaaccacgttgaaaccaagactgaagactgaacctgaagaagtttccatagaagacagtgcccagagtgacctcaaagaagtgatggtgctgaacgcaacagaatcatttgtattttgagccccaag

SEQ ID NO: 2121 - DNA, 148 bp, Homo sapien
  misc_feature (1)...(148): n = A,T,C or G
ttgaaaatatggaataatttaatatattcaatgtctgtgaaacacaaagtagaaagtaatcttttaaaaacatggaatacatatttatttctactttaaaatctcccatttatancttataggctttgaaaanncaagntanngcttt

SEQ ID NO: 2122 - DNA, 361 bp, Homo sapien
  misc_feature (1)...(361): n = A,T,C or G
ttgagtttaaattcgagatgcatttaggtaaattggataaattcaacatttgaataaatccgtcagtntttagatggtgggattgatgaactttggtactttctcaatccaaaactaatttatttggaactagtacgttatggcttctcagtcatgaaaagctcagttatttggggtctacattttctcactgagagccttgatattttgccttctttgttatgcattataacttgactgtatcaccactgagtatctgctgtatcagaagttcacgaagaaaaggtaaaactgaaatcngaatgggggtagaggaagttaaaaaccaagtaatttaaaaagacccccnggtttttgggag

SEQ ID NO: 2123 - DNA, 206 bp, Homo sapien
  misc_feature (1)...(206): n = A,T,C or G
aaattgagtatattaaaatgtaattccctatcctttaacatcatatagttcagacngagtttttcagttggattttctttcttctgttgattctgtaacaactttctttcaagctaaagtagagaaaagcttttgcatttgatatacttttctgctttcaggataaattacaggaagtagaaagntttttatccccgcnaaatttt

SEQ ID NO: 2124 - DNA, 272 bp, Homo sapien
ttatatacaatgctagtataaagatgaaaatgatgatattattaatactaataatagcaattactatttattaatctttgttctattctagacactgttctaatcactttacgtacattttcttgcttacaatacaaattcatgatatcgaaacagtgcttttcccattttacagatgaataaatttaggtttcgatgggttaagtaagttaaaatgaagaagttgggattcaatcttaagcttgttgacttcaattcccaattggtacaat

SEQ ID NO: 2125 - DNA, 334 bp, Homo sapien
  misc_feature (1)...(334): n = A,T,C or G
attttcacttgtgacaccaccacagagacagccactgcttgcatggtgtttctctgcagtcttcttcctgtgcatataggaaggggtcacgtactcagtgtgggaactcttcccctcagtagcctatttatactgagcattttccacatggatacccttgaaaaaagtatgtcttttgttgttgttgttgttgttgttgttgttgttgttgtcggcggcggctcntttggtatcgtattgtttgtttattgaatccntctgtgggggggtttttnacgggtgggttttcaaagttctggntcttgtgaaaaaactttccttggtgcnggagtta

SEQ ID NO: 2126 - DNA, 218 bp, Homo sapien
aaaaagtagtatgcccatgtatgtgtgtttttcttaacacaggtccatgaaagtttggcttcctggtttgatgtctgttgcgtggcctggaaaccagggagcagcaacctattgagatggtttctgtgttcagtgaaaaattctatttcattgagacaattttttctttatccacagtaattttttgacacctgtcatccatgaaacctaccccttaa

SEQ ID NO: 2127 - DNA, 413 bp, Homo sapien
  misc_feature (1)...(413): n = A,T,C or G
tcagttaaatgaaaatatgtttgaatttctacttctacctttggtcattcattcatatgttacaggtacttatcaagttatatttcctaaaactcaaagtcttactgtaatttgattcttttcctgccttcaaatagttatgaactatatttacaactttgcttttggcatatataccatcggtaccagccatgtgtcctgtttgtgacttaatcctttgcaagatttagcaaacattttcctgtaaaggggcagatangtaaatattttaaggcctttcctgggaacatagtttctggcacaaccaacttcaacccctgctaattgcaggcacaggangcagccatnggccaatnccataaatggattagtcatggcctggngttccnatttcaaacctttaggtaaacaaa

SEQ ID NO: 2128 - DNA, 343 bp, Homo sapien
  misc_feature (1)...(343): n = A,T,C or G
attttcacttgtgacaccaccacagagacagccactgcttgcatggtgtttctctgcagtcttcttcctgtgcatataggaaggggtcacgtactcagtgtgggaactcttcccctcagtagcctatttatactgagcattttccacatggatacccttgaaaaaagtatgtcttttgttgttgttgttgttgttgttgttgttgttgttgtccggccggcggctctttggtatcgtaattggtttgntttaattgaaatccccctgttgggggggttttaaccgggtggttttcaaaggtcctgaatctgtgataaaacttttccttggtgccagaggtaaa

SEQ ID NO: 2129 - DNA, 385 bp, Homo sapien
  misc_feature (1)...(385): n = A,T,C or G
aaaaatgagacctctgctccttttaaggaaagaccaacaccttctctgaataataattgtactacatctgaggattccttggtcctttacaatagagtggctgttcaaggagatgtggttcgtgaattaaaagccaagaaagcaccaaaggaagatgtagatgcagctgtaaaacancttttgtctttgaaagctgaatataaggagaaaactggccaggaatataaacctggaaaccctcctgctgaaataggacagaatatttcttctaattccctcagcaagtattctggaaagtaaatctctgtatgatgaagttgctgcacnagggggaggtggttcgtnagcctaaaaagntgaaaaatncccctaaaggctaaaataa

SEQ ID NO: 2130 - DNA, 408 bp, Homo sapien
aaaaaaaaaaagtaagaaaagaaaaggactcccttagaatgggaaagaaaaatcataaaatattgagctgatgcctgtatatagaaattaagcgtttctcgaaagctgttctatgttttgctgttattttagtctttattctcttcctttaggtggagaaacaaagtaccaatttgaagggattttttttattttgtcttttggtttctgtcagtagaaataaccatatgtgctaaccaaatttcctgtgaaagaatgttttccatgggttaaccattaatattccaactataacctcccccatagttatgaaagagtaacccggaaatggccacctatttgtgggaaataggataaattgtaattgtgaaaaaataaattttaagggaatccttaccaggtattacc

SEQ ID NO: 2131 - DNA, 397 bp, Homo sapien
  misc_feature (1)...(397): n = A,T,C or G
aaaggcaaagcaagtaactccaaaagacaataacaaaactttgaaacctgccattgctgagtacattgtgaagaaggctaaacaaaggatagctctgcagagatggcaagatgaactcaacagaagaaagaatcataaaggaatgatatttgttgaaaatactgttgatttagagggcccaccttcagacttctattacattaaccgaatacaaaccagctccctggaaatcagcttagtcaatgaagctacctttggttgttcatgcacagatttgctttctttccaaaatgttgtcctgctgaagctggagttcttttggcttataattaaaaccnaccaatttaaatnccacctggtactnccatctatgnatgcaactccaaggtgtccgtgt

SEQ ID NO: 2132 - DNA, 273 bp, Homo sapien
  misc_feature (1)...(273): n = A,T,C or G
gaggctgaggttgcagtgaaccgagaattgtgccactgnntttcagcctgggtgactgagcgggactccgtctcaaaaaacaaaaaaacaaaaaaaagagagtcagggtctccctcctgtcacccaggctggagtgcagtggtgcaatcatagttcactgcagcccttaaacctcttgggctcaagtgaacctnccacctcaccctnccaaagtagcagggaccacaaggcacttgcaaccaataccccangctaaggggtcntcaattttgg

SEQ ID NO: 2133 - DNA, 359 bp, Homo sapien
  misc_feature (1)...(359): n = A,T,C or G
tccagatggcaaagaatctccaagtgataagaaatccaaaactgatggttcccagaagactgagagttcaaccgaagtagcagaacaagaagagaagtccggtgaagatggtgagaaagacacaaaggatgaccagacagagcaggaacctaatatgcttcttgaatctgaagatgagctacttgtagatgaagaagaagcagcagcacctgctagaaagtggcagttcagtgggagaccgagaccgatcttgctaatttaggtgatgtggcttcctggatgggaaaaaggacccntcagataaagctgtgaaaaaagattgaagtgccttcancggccagcaaaggaaaaaagcttta

SEQ ID NO: 2134 - DNA, 299 bp, Homo sapien
  misc_feature (1)...(299): n = A,T,C or G
ggcacgagcaagatcagggagatggtacaaggcctgtttgttacatggatgagtcgggtgcctggttgtgtgtgtgtgtgtgtgtgtgtgtgtgtgtgtgtgaagtcagagttgaaattcagaagatcagacctatggaaatcactgccccttttttttttaaaagctaatgaacctacatacagaccctaaaaggcccttaatgaaatccgaacaattttcttttactttcaagatcaaaaacatgcacccaaccccagnctttgggntcgccacccccccagggttttttgancccc

SEQ ID NO: 2135 - DNA, 184 bp, Homo sapien
aaagtcaagacagaacactagggaataccaatatttatggagctggacatgaaggcagatcccacagagaagtctgtggaggagcactggagaaggtaagagaacagggcagaacagtgtcatggaagtcaatgatggagaggattccaagaagaaggagagaacacttaatagtctgggacca

SEQ ID NO: 2136 - DNA, 337 bp, Homo sapien
tgaaacatttacctggagccagcctataactactggtaaagcaccttcacctcgtgctgcccatgcctgtgcaactgtcggaaatagaggcttcgtgtttggaggcagatatcgagtaagtattcaaacgacttcaatgacttgcttttgaattcttcaaaatgataacttaattatccttttttaggatgctagaatgaatgatcttcactatcttaatctggatacatgggagtggaatgaattaattccacaaggcatatgcccaagttggggtcgatcttggcactcactaacaccagtttcttcagatcatctttttctctttggggggatt

SEQ ID NO: 2137 - DNA, 512 bp, Homo sapien
  misc_feature (1)...(512): n = A,T,C or G
tgctgatataaaaacaaatgtatttttcacatcatatagcatatagtagtaataactaaagacaataaactattcagtacacccagactcagattgaaataacatcaataaatcactaacataacagtaaaaacagtaaatgcatagtaagaaatggaaatgacacaaggctcactatttgcagaagttgctgccattctgcaatttgcaacagacagctctattttaaataacacagtcactagtggggtcacttgtcttgaccttaagaaccccttagaaatgacaatttgaatcaaaactgtggtttttaaaaagcagccatttttacaatcatagattcctaggaaaggaataataaattgctcactcctcaaaatattaataggaacgtaaccagaaaaagnctcagatggttcatgaaacctggggtttcggcatcgcgttatcctgtgggtgctctgcaatcaattactgttataccnccatcattaataattttcctnatggaa

SEQ ID NO: 2138 - DNA, 296 bp, Homo sapien
ctctgcacaagaaagtttatcacagatcagaacttgaaaacaccgtaaaacccccacagaggattcaataaacaaacaatacgataccaaagagccgccgccgacaacaacaacaacaacaacaacaacaacaacaacaaaagacatacttttttcaagggtatccatgtggaaaatgctcagtataaataggctactgaggggaagagttcccacactgagtacgtgaccccttcctatatgcacaggaagaagactgcagagaaacaccatgcaagcagtggctgtctctgtgg

SEQ ID NO: 2139 - DNA, 577 bp, Homo sapien
  misc_feature (1)...(577): n = A,T,C or G
tctatacggaatattaaacacattactgatatcccatataattctgaaggacaagccatagtggaaagaatgaatctctccctgaaacagcagttgcagaagcaaaagggggaaaacaggtactacaggacaccccataagcaattgaatcgcattattaactttaaattttttgagcctgcctaaagnccggatcttatcagcagctgaacagcatctacagaaaccagctgcaaagacagaagcagaacaactggtttggtggagagacctgataacagaaagttgggaaataggtaaaataataacttggggtagaggttatgcttatgtttctccaggactgaaccatcaagacacctgaaaccttatcatgagcgaatgctgaggaagagattccgggagatccgaggacccccccagttgcagccatgtcaagactgatgctgaggaggacccaactgtcacgagcaacacccgtcaacacagccatccacctgaggtcagattcagaagctgtcnagatggcagaagaaacctgaggatggtctggaacccgacctggtggagacctgaa

SEQ ID NO: 2140 - DNA, 241 bp, Homo sapien
  misc_feature (1)...(241): n = A,T,C or G
aagcaaccttttaatatgcagataataccccccaacttttttagagacagcctgtctcttaaaaaaaaaattaatttggtagtgagagcttgtgtcactgccactctgttttatccctgaaattaaaggataacataaggaggacttgggcctttctgacatccatcctgaagagacaggactttgcgtttttcccccgggaccntacagtgatgagaatttaaatgattaacccccncca

SEQ ID NO: 2141 - DNA, 416 bp, Homo sapien
  misc_feature (1)...(416): n = A,T,C or G
tatccaggttatattttaatatctggagttttaatccagcatacaaaaatcaccagtatacatctattaagttaactgcagtattatttcaccatcaccatttacatgtacttttcaggtatcagagacttagtgctttaagtagcaaattacctaaattatgaacacatatttccaaaaacaaaatcaagctcataattaccaagtatatatgtacagtgcagattaaaaaaaaactgaattagcacatatttctcttttctaaagctcctatgaagaacttacactcttctgcactaccaatctattctggtacatttaaaataacatttgntttggatttaaagtccaaaatataaagggctnaaattttggaagactaacccttaaaaagggcccccattttnaacccatcc

SEQ ID NO: 2142 - DNA, 562 bp, Homo sapien
  misc_feature (1)...(562): n = A,T,C or G
tcttaatccaaaatactttattatgggtaatactcatttaatatttattggtaatcactgagagccaaggtaaagtgatgatccaaatgaattgaatgtcatgatttaaataggcaattctcaaattagggggtttgggtagaaaaataatatcaaaaagttcttgtagttaaaaaaaatcaatatgcttaacatgcctatttattttcttaaactacagaaagcaaatctcacatgctttgcttgtaagaatatgcaaaaaaagtaaatgctgtattaactgaaaaactctaagtactatattttaatttcgtgaatgatatgggtgatgtcatatagactgctattttcagtacattataaaattaccaaaatgttcaattttctacctttaaaaagtaggaaaatatccacttggcaaccaaccatcaaattaataactgattcnagtaaganttatcaccatactaaaagtagccgatgcnagttggaagagaaacagcctatatgcagtatctgcccccaattacttattatttcccaaagggaaaacnggggtggt

SEQ ID NO: 2143 - DNA, 298 bp, Homo sapien
tactctgcacaagaaagtttatcacagatcagaacttgaaaacaccgtaaaacccccacagaggattcaataaacaaacaatacgataccaaagagccgccgccgacaacaacaacaacaacaacaacaacaacaacaacaaaagacatacttttttcaagggtatccatgtggaaaatgctcagtataaataggctactgaggggaagagttcccacactgagtacgtgaccccttcctatatgcacaggaagaagactgcagagaaacaccatgcaagcagtggctgtctctgtgg

SEQ ID NO: 2144 - DNA, 603 bp, Homo sapien
  misc_feature (1)...(603): n = A,T,C or G
tcttcttatctttgtcctcagctccagtggccgacacaggcttatactctactcctatcaaagacttgtactgtgcctttagctgaaggagttcttgaacagctatatctacttgatccttaggggctttttcagttttaagtttccgaactacttccccttgagaagctactttgtcaaaaagtactttcgcttctggtgtttctaaaccagcaggttcagaatttctggttgggcttgaatccgaactttgagataatgggggctgaccaggtatgtactccttcccagttttttctttatactgagccttcagggacagtaagcattctacagcttcatttattttagccttaggggatttttcagcntttagnttacgaaccancnncncttgtgcagnaacttcatcatacagagatttactttccagaatacttgctgagganttagaagaaatattctgtncaatttcagcaggagggtttccagggtttatattcctgggccagtttgtccctanaatcngntttcaaagacaaaagctggtttaaagcngcatcaaatcttccttggggcctcctgggnntttaattcangaac

SEQ ID NO: 2145 - DNA, 415 bp, Homo sapien
  misc_feature (1)...(415): n = A,T,C or G
tttaatttttacatttaattttataccttaaatttctttatcattgaggtgccaatgttttaatggaaaagtagaaaacagtataaaattcagtatcacctatttgtctcaaatacaagtacagtgagtattaaacaggaatgacaatagagtagcaaaaacagaactgtagatttgcccaaattaactgtttctccgaatttgaggtgtatggcaagttgaatctttgatctctcagcagttgttaattacattatcagcttaaccgctttcaaacactacgggaggcatttctctgttcacatagacttaaagtacacatataccaaagctggtnaataagtctgcccttccantagtttgggtcctcnaaaggcactnttaaatatggtcggccttcntatccaggcctatg

SEQ ID NO: 2146 - DNA, 557 bp, Homo sapien
  misc_feature (1)...(557): n = A,T,C or G
ttttaaaattgttactattttcttaatataaaacagttgcatttggtgggggtcaatgggtaaatacaaaaaaaggcactgctgcttttattactaaatatctgacttcacagcctcatgcatgcaactgtttgattcttttataaataaaattcttttgctttaggatttttaaattgagctatatacctgtagtcaacacaggactcaaaacaaggtggggacagggtcttaaaatttatcaaacactcaacttaaaaaaaaaattaaaacactaatagcaaaacacaactaagtagataaatctatacactgtcnatgaaaaataagcttttcttctttaaaaaaagaattatgttgtnattaataacagactttatcatggttaccagccatagcnaggttaataagtagcctatccaaatantatctctaataatcagataaccatgtttctatattcngtgaaggantaatagaaatcngatttgcgatactttagggctcntcctttaaaggatnctgcgatgtgatggggtcccancggtttccgatac

SEQ ID NO: 2147 - DNA, 429 bp, Homo sapien
  misc_feature (1)...(429): n = A,T,C or G
ttttatcactttcagagctctttattcttttgtgtagatccacattatcatcaggtatcattttccttctgcctgaagaacttcctttaacaagccttgtactgcaggtgtgctggccaactctcacaacttttctttgtctaaggaaagacatgtttcatgtttgaaaggtgttttctctgggtctagaattttagattgacaaaatttgttccagcattttaaagatgttactccattgtcttctgacatgcatagtttctgaaaactctgttgtaattatttttatgttgttccctgtatggaatgtgcccttttttctctaattttaagatttttgtcagaattagtaacttgctgtaatttgataatgaagttcntggtgtggtttcccnagtaggtatcctgcctcatgttccgagtttcnta

SEQ ID NO: 2148 - DNA, 526 bp, Homo sapien
  misc_feature (1)...(526): n = A,T,C or G
cttgggaatgtacctgaacttccggacactacagagcattctagaacggacctgtcccgtgatttagcagcattgcatgagatttgcgtggctcattcagatgaacttcgaacgctcagtaatgantggntgcacagcagcacgtattgaaaaagcttctggctataacagaactgcttcaacaaaaacaaaaccagtatacaaaaaccaatgatgtcaggtagcagccttcgccccagtgttctgcatggattcagcatgtccaacatggtaattcacttcagtttaatgtctcctttgctcttgccaaaaaattagcacacttttcccacattccagtgatgttgtgaactatgccaacaaaatccaaggntcctgcctggtgaatnacctatgccaagaaccctggtnagnnatcngtgcngggtatttgccctantttcncatgggatccatctttaacacccctgagccttggtgtacagaccaccctttcncaaaacggaatgctatgacngtagncttg

SEQ ID NO: 2149 - DNA, 373 bp, Homo sapien
  misc_feature (1)...(373): n = A,T,C or G
ggcacgagcggcacgagaaccaaaggacggaagattaggaggcataananagaaaaggaggagaaaaaacgaaagaagccagtttcccaatcccttgagtttccaacaagatacagtccttacagaccttatcgatgtgttcaccagggatgctttgctgcctttacgatacagccaaaatttgnttctccattaccaggctgtacacaaatcagntctaccctgcattttcagcagaggtcgaagaggaaagtgaagctggtaaagaaagtnaagaaactgnaacttnaaccaactttnaaagaatttcgatgtcnggtaagtgactggntctcggaattttccaagccattacctgggcctaatacaacac

SEQ ID NO: 2150 - DNA, 530 bp, Homo sapien
  misc_feature (1)...(530): n = A,T,C or G
cccaatccagtagctgttaaaccttgtgaagcactggagcctgacatggacactatgtgaagccctatggncacctgaaggagcttgacagccagctaaatgaaccccgtgaatacattcaaattctggagcgaagaagagctttctcccgctggctatcctgtactgccacacctcagattgaagaggaagtctccttaacccaaaaaaacagccctgtggaggctgtattcagctacctcacaggcaaaaggatcagtgaggcctgctctctggcccagcagtcaggggatcatcgtcttgctcttcttttatctcagtttgtgggtagccagtcagtccgggagctgctcaccatgcagttggtggactggcatcagctccaagcagactccttcatccangaatgagagactgcgcatcttttgctctgttggctggaaaaacggtgtggcantctcagaaaagaagcaaataaacgtgtgctnccagtttgaattggaaagctncctggctatcatcntttggan

SEQ ID NO: 2151 - DNA, 438 bp, Homo sapien
  misc_feature (1)...(438): n = A,T,C or G
ttaactgtggaatctcatgatatttaataaaataaaaacagacacttggggaagtagccttgtccagaggaaggagtaaaggatagtttcccatcagatttcctggctccgcttcaatttgacaatactttaacacccagcaagatttttgcttggctctattggccacatatacctgaaatgcttcttcatacatgctgagcgccctagaaatggaggctgttggtggaagcaaataccaaagatggatagccagggagcgtttccaatccaactgggagcacacgtttatttgcttcttttctgagagctgccacaccggttttccagccaacagagcaaagatgcgcagtctctcatcctggatgaaggagtctgcntggagctgatgccaggtccaccnactgcatggtgagcangctcccggactgactggct

SEQ ID NO: 2152 - DNA, 534 bp, Homo sapien
  misc_feature (1)...(534): n = A,T,C or G
ctccnttgaagatttcctgtctcagagtcccagagaggtagaaaggaggaatttctgctggacttcatctgggcagaggaaggatggaatgaaggtagaaaaggcagaattacagctgagcngcggacaacaaagagttcttctcgtgggaaaagttttgtcttagagcaaggatggaaaatggggacaacaaaggaaaagcaaagtgtgacccttgngtttggacagcccagagnccagctccccagtataagccatacaggccagggacccacaggagagtggattagagcacaagtctggcctcactgagtggacaagagctgatgggcctcatcagggtgacattcaccccagggcagcctgaccactcttggcccctcaggcattatcccatttggaattgtgaatgtggtggcaaagttggcagangaccccacctgggaaccttttttccctcagttagttggggaactagcacctaggtacccacatgggtatttatatctgaaccagacagacgcttgattcagc

SEQ ID NO: 2153 - DNA, 561 bp, Homo sapien
  misc_feature (1)...(561): n = A,T,C or G
gtggataaatatattagcaaataaatatatttcttaacatagtgcctgattcaagcgtctgtctggttcagatataaatacccatgtgggtacctaggtgctagtctccccactaactgagggaaaaaggttcccaggtggggtcctctgcccactttgccaccacattcacattccaaatgggataatgcctgaggggccaagagtggtcaggctgccctggggtgaatgtcaccctgatgaggcccatcagctcttgtccactcagtgaggccagacttgtgctctaatccactctcctgtgggtccctggcctgtatggcttatactggggagctgggcctctgggctgtcccaaacccaaagggtncacactttgcttttccnttgttgtccccattttccatccttgctctaagacaaaacttttcccagagaagaactctttgttgtcccgctcagctgtaattctgcctttnctaccttcattccatccttcctctgcccagatgangtccagccgaaattcctcctttctacntctctggggactcttgagan

SEQ ID NO: 2154 - DNA, 415 bp, Homo sapien
  misc_feature (1)...(415): n = A,T,C or G
aaatgtggcttttgtcaagcacttagatggatataaatgcagcaacttgttttaaaaaaatgcacaatttacttcccaaaaaagttgttacttgccttttcaagttgttgacaaacacacatttgatattctcttatatgttatagtaatgtaacgtataaactcaagcctttttattctttgtgattaaatcctgttttaaaatgtcacaaaacaggaaccagcattctaattagatttactatatcaagatatggttcaaataggactacctagagttcattgaacactaaaactatgaaaccattacntttttatattaaaaagaccatgggatttaaccttatgganaatccccaatgccgggatagtaatttttggtttaccttttttnacccnactggaattttttgga

SEQ ID NO: 2155 - DNA, 400 bp, Homo sapien
  misc_feature (1)...(400): n = A,T,C or G
ggacaggttctattggaaattcctcttagaagattcttaaagtaagtggagagaggctgagtggaaatttagagctgggaatcctacagagagtgttcaaagccagggatggattntggctctcttgggctggggggggacatttgtgccctggaatactccncttcttggcattcaaaagtgagccctgttgggaactcttcacatgactgaaaacttgtattctttttttctagttcaagcaaatatattcngacatcttacactatcactctattactacttaagaaaaacanaaaccaagactgaagccgattgtctnaaaanttctcattnccgctctttgntgaccaaaaatattgtccccaggnaaaactggtgttggggtcactgtngtcac

SEQ ID NO: 2156 - DNA, 188 bp, Homo sapien
  misc_feature (1)...(188): n = A,T,C or G
caaatacaggtaaatctttgaattggcctactagagacttttcctttgtagcctccccatggacgtanaaataacagatagaggaggctggaggatccaaagtggtgaataaggccgggcaccgtggctcatgactgtaatcccagcctttgggaggccaagaagggcaaatcacctgaggccaggaa

SEQ ID NO: 2157 - DNA, 384 bp, Homo sapien
  misc_feature (1)...(384): n = A,T,C or G
ttgagacagagtttcactcttgttatccaggctggggtgcaatggtgcgatatctcggctcactgcaaccactgcctcccaggttcaagcgattctcctgcctcagcctgccaagtagctggattacaggcacgtgccatcacgcccagctaatttttgtatttttggtagagacggggtttccccaccgttgaccaggctggtctcgaactcctcacctcaagtgatccacccgcctcggcctcccaaagtgctgggattacaggccgtgacnacccgcgactggcctacacagcttttaattgcttgatttatactttattaaagagaggaagcacaatgagcagtgntactaaaatataactnatatggcatgtgaaagtg

SEQ ID NO: 2158 - DNA, 107 bp, Homo sapien
  misc_feature (1)...(107): n = A,T,C or G
atcacttgaanccaggaggcggaggttgcagtgagctgagattgcacgactgtactccagcctgagcgaatagtgcgagactcagtctcaaaataaataaatacata

SEQ ID NO: 2159 - DNA, 593 bp, Homo sapien
  misc_feature (1)...(593): n = A,T,C or G
ttttaccttgtagagttctttttaacagaatcctaaaaataagaattatttagtatgtcaagagttaaaaaaaatcactactcatttaatgtctaatctaaaatacaacaggctaacatcctagctcagggatcagcaaaccttttttgtggctttgtgggccacgtacagtctctgtctcattcttttgtttttgcatgtgtatttatgtttataaactctttaaaaatgtaagaaacagccagatttgagccatagtggtaggtcgccaactcctggacactgttttggtaaactaaattatggcagtataatgtgtcatctatcaaatctaggaattaaaggaaaaaagcctagtaatagaatgactactataggcacaataatagatcactactgaatagccagaaataggacagtgatgcatttcggtaaatgtgagaccaataccctgtgataataaggactgaatattgtggtgggcngaattagttttaaaagggactgatttcngattccaaggacgttatagtgaagatcctaagatttttggggaggaaccccctttgggggaagtttgaaaagggcntata

SEQ ID NO: 2160 - DNA, 344 bp, Homo sapien
  misc_feature (1)...(344): n = A,T,C or G
ttttaaatagagacaaggtttcaccatgttggccaggctggtcgtgaactcctgatctcaagtgatccgcctgcctcaacctcccaaagtgctgagattacaggtgtgagccactgaacaggccagaaattattagttctttttctaactttctctctataggtgtttcctccccaaaaatcttatgattcttcactataacgtcctttgaatcagaaatcagtcccttttaaaactaattcagcccaacacaatattcagtccttatttatcacaaggtatttgtctcacatttaccgaaatgcatcactgncctatttctggntattcagtagtgatctatt

SEQ ID NO: 2161 - DNA, 243 bp, Homo sapien
  misc_feature (1)...(243): n = A,T,C or G
aagtccgacagtnaggaaaagtcagacagtgagaaaaaggaagatgaggaggggaaagtaggaccaggaaatcatggaacagaaggctcggggggagaacggcattcagacacggacagtgacaggagggaagatgatcgatcccagcacagtagtggaaatggaaatgattttgaaatgataacaaaagaggaactggaacngcaaacagatggggattgtgaagaggatnaggaagaggaa

SEQ ID NO: 2162 - DNA, 493 bp, Homo sapien
  misc_feature (1)...(493): n = A,T,C or G
gggttcacacacaaacattcaggaagcagcactggtgtagacccactttgatcccgtaaagtgtcctgagtgtccctcttcacatggccacttcttttgccaggttctttggttccctgcttgggatacaccagtcatcagcctcagagctcatctgataatgtttgaaggctgacttgttaaaaactggaagtttttcctaatagacctcagaagacaaagcccttttaagtagaatgatagcnatctggttcccataatccctgattaaaggagtaagaagattcaggatctcccttggaaaaggtacttttggcataccaggaccgaggaaattttggccaaggccggtaaaacccaaaaacccaggcccaaaaagggaaggcaatttcccgggggaatttaatcccatccaccaggggccgtttggggttgcagttgggaagttaatggtataaactaaaagaaggccnggtcaattaaattctcaggg

SEQ ID NO: 2163 - DNA, 347 bp, Homo sapien
  misc_feature (1)...(347): n = A,T,C or G
ttcatacttaattttttattttgaaattccctattccctctatacaagaacctttgctgaaacagtttccacaaaggcagcagtgaattttcagaacatttacattttttccccctcagcaaaaagataaatcacagtgtaaattatgttgttctgctgtcatctttggctggggttagaccagaagttggtgactagcaaaccaatatagccaaatggtttgctaagtgctcccttagggcccttttaagcctataaancctccagcaagggaatgtctggcatttttattctccttttaaagggnacccacccagggggggggaaatgnaccaggcntttaaact

SEQ ID NO: 2164 - DNA, 337 bp, Homo sapien
  misc_feature (1)...(337): n = A,T,C or G
tttttttttttttattttacataatatttataataaactttcttatcacagttcctcctcagaacacactctacagaatgtcgactgaaaagcttccaaaataattgaacacaagatatgaatcagcaacagaataagctcaagggaagagacatgggcacaggcaggcaaaacgtgatcaccacagctccgttcctgcagtgacacttaacatactcagcatcttcatgaattctgaataatttactgatcgtaaagtctaaaagtatcaatttcaggtgagcagttttaaatcagganatagtcaatagttaatccatgactcttcagggtaatt

SEQ ID NO: 2165 - DNA, 200 bp, Homo sapien
gggtcacccagctttcccttaaactgatgggagagcaaaggagactggtgtttggtattctgcagccccaggctcagctggaccacagtgggcagggaatgaatgggctctggaagtactgcacagatgactgacagagaagaacaaatgaataaacaggtactgtaagaatccggaataaatagactcaccatgaagtt

SEQ ID NO: 2166 - DNA, 428 bp, Homo sapien
  misc_feature (1)...(428): n = A,T,C or G
tccattttcattgtatttttagcattgccttctgtgtatgacaaattctactgctttgggtgttatatggtgacataaatgatcttattaaaaaattggagtttaaaaagtacattggtttaaaatactaagtaaataatagtccaggtggttcttggatgtggcaggacctggagggaggcactgggcaagtgctgcccttccagagggctccagggagtcttgggcgtgaccagctggaggcacgtggtagaccaggcatcttcacaaagcccgctgctgatcagctttggcagccaacgtgcaaatccgaagccaggtttgagaaagtggtcatcatttctctgtgacgttggcttttcctcagggacatggacctgtgcagagacaggcagcttctcctttggccgtctgtctccttccgggcn

SEQ ID NO: 2167 - DNA, 390 bp, Homo sapien
  misc_feature (1)...(390): n = A,T,C or G
tttttttttttttttttttttttttttttttttgtatttgcaggacaagtacaactgaaccaacaaatttatttagttagtgctgataaagacagcagccttgagagacaagcagtaattacctggtctacttaatgatgccctttgttatattttacaggcaaaaagaatgattcctcagcagtcattgtgaaattttgtgggccacaagtattgtgcacacatgatccttgatttagagtcaacctgatgtccattatagctgtggaaaggcagcaggcagttgtgtcgctcttcacaataaggaacacatcttgctttcagcangtgagaggaacaaaagcattgatgtaaatgtgccnccaaagtgagaactgaaaaccattaacc

SEQ ID NO: 2168 - DNA, 427 bp, Homo sapien
gaataacaagttggtttattaagcatgtaagaattgtatctaaaatagaagcaaataagtcctgagaaatggccagagagattcttctttgagtaacattctgtaagagtattacttggttgttcagataattttttcatcttcctattgattcttggctgtgttctgaataattgactttgcaagataactgatcatggaacaaatgcaatattaatctacacatgatacaatattatgctgaatagggtgtcaaagggagagctttcttgcaaaatatttcatgagaaagagattgcagaattgctgccgggtgagccatcctgttatacataatagatcagttaaggaagagctccaggtgaatggggaccactataaaccaaactgtagaactgaatcatccaagggtaggagacagaggtgt

SEQ ID NO: 2169 - DNA, 414 bp, Homo sapien
gccacaatcaatgtctctccttgctttgtttgagcctcttgattgcctgctgtatccttgaaattaatgataaatctcggcagtatgtaggttatctgatatgtgaatgtttgatctgcaatctaatcctttgtattagctcaacagaaaaaggaagaaaaaatgaatataaaattttcaaaaagcctatcaaccaacttgaactaattgatatttatagaatactacacccaacaactgaagagggcacataatcttcagggggacatgagaagctcaccaagataaaccatatagtgagccataaaataagtttagaatttaagccatagaatttaaaagggttgaaagtacacaggtttgttctctgatcacaataagcttaaattagaaatccataactgtagtagcctc

SEQ ID NO: 2170 - DNA, 431 bp, Homo sapien
tttttgagggaacatcatgtctttatttgattaatacattcttcaatatcggcaacttaaggcagaggccacgtgtcaaacttctttgtatgtttctagcacctttcacaatgcatggttcatggcaagtacaacaaatgattgaattcgattaaatgtaggaaaatgacaagattaccttttccaatatgtcgcctagtgttttcaattgtcgaattacgattaacatttgacaacaaacccaagcagaatctacttttgttatttgaaggatctgtgaatccatctactaacacactagtagaagatgcatgaaaagcttctccaacacgattgtttaattcatagtagactattgaacaccaatgtttaggctcttcataggcaacaggctgaacatccctgctgggatatactgggcataatccgga

SEQ ID NO: 2171 - DNA, 439 bp, Homo sapien
  misc_feature (1)...(439): n = A,T,C or G
tttgtcagttttttgcaaagctgttgactcttcttccacctcatcttctccttcccctctttttttatcagctttctgatctctgatctcagccacttttgcagtgggtctagatattcttggagatcttcttaaagtacgacccacatttgttttctcctcttccttttctgtcttctcttgcttgttttctggttctagaactttggggggagaatcgggcttctttatccgacttgatatcctgattgttaatttgatgccctctntctggcctttcagaggttatctctgtantttcngaggcagtggtttcttcntcaggaaccaacttatattggaattttgcttnttttgnaaagaacccctttgtcncagaagggcncctctaatgccagaggtctggggcattggnccagaatttaatncattttctacc

SEQ ID NO: 2172 - DNA, 455 bp, Homo sapien
  misc_feature (1)...(455): n = A,T,C or G
aagccgcctcgnangccgcaatgcagagaagaggagaagcagcttgaggcatcattagatgcactgctgagtcaagtggcctgatctgaagaactctctggggagtttcatttgcaagttggagaacgagtatggccggctgaccntggccatctgtcctggacagctttgccttgctttctggacagctgaacactctgaacaaggtcttgaagcatgaaaaaacacccgctgttccgtaaccaggtcatcattcctctggttgttgtctccaagaccgaagatgaaagatctcatgccggcagacttgaaaggacgggtgcctgttttcangcccattgaggtaagtccctgaccatcttgagaaaccaagccttgacccctgaaagttggaagaacaggagaagcaactgacgacagnatgctgcccgcattggtgcagatgcagcccagaa

SEQ ID NO: 2173 - DNA, 432 bp, Homo sapien
  misc_feature (1)...(432): n = A,T,C or G
agaccttgcgctcagatcttctctggtgaatgaagaggcgaggaatcaagtgactgatctggaagaaatatctcgcagcactgcagctaacatcacagaacttaagtgtgttttgtgtgtgtgcccacacgtagacaaatgtgtacggtgcacacacacagtgcatcattttttaagggcagattatatatatatatgagatgtattaattcagtggttaccatttgtttgcaggaaaaagaaatgtatgggtgaaaaaatttatggttgataaatccagccaaggagattaaaaggggtttggataaattctgggtataaatgctcagactaaaaaaaagaaatggcagtttttgcacagtgctatggtcttgcactagttttttgtttcncatctgaaaaaaaaaaaggtnaaataaaagggagaaatgt

SEQ ID NO: 2174 - DNA, 389 bp, Homo sapien
  misc_feature (1)...(389): n = A,T,C or G
tgcatgttcccaagaacttaattatagaagtttttctgtaatgaatatgacagagaacccaactctacacaactgatctatatttatgttcctactgaggcatggtagtcctccttccccacacttgcctgcccatgaaatcgaaatatttggcaggattaattctcaaaagataaaaacactctaattgaagaaaagtatcaattcaaatcatatcttttaagaagaaatatnttctttactttcctgcttaaatttgaaatagtagcagttgaaaattgtggattggaactaattactgattaanacaaagtacacctatgagttttaatagaagcagtaagagtaatgtgtaaatgacttttcnttgttcatgggaaccattgtgg

SEQ ID NO: 2175 - DNA, 437 bp, Homo sapien
  misc_feature (1)...(437): n = A,T,C or G
agaaaggtaaaacaaagactttcccagggaacacacactcacctgaattgaaggcatggcagaaaaaattgttttctagttccaattcagtttcatgcagctagtaatggtaatttgccacaaggaaggcctatgttagagaagagcaactgctttcttgatctccagggtctgtaacactaaaaaggacagcacatgctcatcacttattagatggagtcatcctgttaggttagaaggtatacttcacaccatcctgggcattatgctaagttgantaccgtacttangtaagaaataacagatgtcatgcatgctgtggctgaatgtatctncttccttgtttatttggccattcagtcctgacattgattcatgtatttattgagcctgcattaaatgcccaagtgatatattagtttgctggggatacagng

SEQ ID NO: 2176 - DNA, 452 bp, Homo sapien
  misc_feature (1)...(452): n = A,T,C or G
tacagagaggaanatgtgtgtaaatgcgcatgtctggactaagagcaagttcttaggcatgtcaataggcgtgacaatggttggagaaggtatccttagtctgttggagcatggagaagagtacacattttctctaccctgtgcatatgctcggtcaattttgacctgttccttgggtagaactgggtggcaaagtcagtgtcaactgtgcaaaaactggatattcagccagcatcacttttcataccaagccattttatggtggcaaactgcatccgggttacagctgaagtaaagcacaacatcaccaacacttgtggtatgcagagtgcaaggggaatggaatagtgttccttgagttccacattattagncaatggagagaccaagtaatgtggacttgactaaaatttggcagttgaccgaagaaaaaagaggttgaaaccccctgg

SEQ ID NO: 2177 - DNA, 443 bp, Homo sapien
  misc_feature (1)...(443): n = A,T,C or G
aagataacatantgtgatttttgtggttaggagagttgctgtcatgattgttttttcttcagcctcctctgacttttcttttggggcttcagattttatgattacatcttgtccccctagaacatcccccttcctcccatactgcttttaaacagatgcccaagaaggcaagcaggaatgcctcttgtgggggagggcagggagaaataactagttcaaaccaactatctatctatgctttgcaaaagactaaggcgtattataggaagagggctagaaancctaaactgattccttctcagttttctcatttttaaaacagcccagtattcctttggnatccctcaaggggcccttgngaatnctccggttattgagacccctgtgggcnaacttgtactgtacctccctctcaagcccaagaagggntgtgggaaaattta

SEQ ID NO: 2178 - DNA, 412 bp, Homo sapien
  misc_feature (1)...(412): n = A,T,C or G
taatttatgcccaatacatgctttactgactcagaggaacaattcctggacatataattgggtaatgcaaatttttatccactggtcatgatttgtcttaaaatgtttacttgcctccctaaaatattttggctgtgtaggtttggtgtttgtccctagaggattcttcaacagaaagtgatttattctttactgttttgtgaggtaatatggtttagaacatatgtataagctaaaaacagtattttactccagatcaagtagttatccgtgtctatcagctataagaaaaaatccaactgccagccaagnacttttaaaaactttaagctggtgtattatagaaccggttnttggtggtagcattgggaaaaantggtnccattttgttaagtccattgtgaaatgttcc

SEQ ID NO: 2179 - DNA, 461 bp, Homo sapien
  misc_feature (1)...(461): n = A,T,C or G
ttcttataaagaaacattttaattctattcccctttatgtaataaaggcttcttgaaaaacatgaaaggtttggggagcaaatgcttaggaagttttctgacattaaaccaccttgttcgttcgttcattcattcattcattcattcattcatttttgagacggagnnctcactctgtcacccaggctggagtgcagtggcgtgatctcagctcactgcaacctccatctcccaggttcaagcaattctcctgcctcagcctcctcaccttgttctttaaaaataatcatattctatgaatatgtgtctgctggtatagcagaaagagaaggattaatcaataaagtcctagaaggtgaactcggagggaaccncaaattttatggaagactcnacagtttaaggacaaagcctaaaancatttataatggggtgatgnttaaaacaggaacaacagnctg

SEQ ID NO: 2180 - DNA, 447 bp, Homo sapien
  misc_feature (1)...(447): n = A,T,C or G
tgattctggaaatattttaattaggttccactttaaaaaaaaagtagcttccttatgacctccacagtgagtacattaactacattttcacaaacagaaaacttacatacattcaactgtttacaagacatgtctccatataacacatttacattcatgtgaaatctatgaacttctttaattgcatatatttatgactcttacatctggtaccttttaaaacagctaacatatagtatgcntatttccnataagttaattaatatatgactatttaaggtgagaagagtctcatttgaagaattacaatagntatattcataccatgggaaatccatagtttttctaaacataaatttcaagctaaagctttagcaatttaagttatttaactaccaatgcatgnaattcttatcagattgtcccatttgggttacagtttaaggc

SEQ ID NO: 2181 - DNA, 437 bp, Homo sapien
cttctttccttctgggattccagctaaatgggttattttagcggttaccctaggaatcgcaataaacatacttcatacactcagaagcgaatgtgcatcttgatcctcttccagggcagcatggcgggggggcctttgagcagtttccctcccttcattcctcttcgtactgtgcagccacattctaaaatgttgtaccccacgttattcttgtttattcagctttaatttaggtgcacagtatccgttattctcagatcttccctctggggtcagtttcctcctgcctgaggtatatccttttgtgcaggtctgctggtgccaaagtaagctttttgtttgcctgaaaatgccttgatttcaccttcattctttaaagatggtctccctgggtgtataattctaggctggcagtgcatctttcaactcacggaaga

SEQ ID NO: 2182 - DNA, 453 bp, Homo sapien
tttatttctctctcacataacagtacaaaagtaagtggataacctagggtggagagacagctctgctccagggaacccagactagccagtcagttctgctgtcttcatcaattggcgtccatctctggatccaaggctgctgctttaattcttgtcatttcccagccaaagagaaaaaagaaaagagggcatccaggacaaatggctttttctttaagaagatgacccaaaaagttgcccgcatctcttcctttcacatcccaacggcccaaacttactgggcccaatctaccggcatctacctgggaaatacagttgcacttgtgtaagtcatgggctagcttaaacttcaggcaggactagaaattttatttcttttaaatgaagctgcttctgacagctttggtatatgccttttgagttactaaatacaattcaacagaaataagatgg

SEQ ID NO: 2183 - DNA, 451 bp, Homo sapien
tttttgtttttctaacatacccttttattataacagaaacagtaaatgtgcattgtagaaatggagcggtttcaagttacattttcatcacccagaaattgtgactgttaacaccagtatgcatactgtctaagtatttgtctgtacatgtatttacaatttcaaaatactgagatcatactgtatttctgcaatctgcttttcattaatgatattaccgaatatccagcccatatccatttattccccaactaacccataaatgacttacagtttatttgcttaaactagtagccaattcaggaccacatatcatcagattatgatatttagtaagtttcttttttttctaatacagttatttagttgtttattcttagcatgcctccaacatattgactgttaaagggcaatcagttctccccggcagtgattgcagcaattgaaagtt

SEQ ID NO: 2184 - DNA, 452 bp, Homo sapien
  misc_feature (1)...(452): n = A,T,C or G
ctttcaagtacatataatgtgaagagatccattcattcacttatcaaatattttgttttgtgtagaatgggttgttttatcacagctttattgagatataacataaaattcactctcttaaagtatacaattcagtggtttttaacatattcataaaattacataaataccaccaattttagaatattttcattcattcccaaaagaaatcccatatcattaccaatcactccccaatgcctccaaccccagcccttgataaccactaatctactttctgcttctctagatttgcctgttctgaacatttcatgtaaaaggaaccatacaatatgtggcctttagtgtctgacttctttaatttagcataatgttttnaaggtacgtccacattttagcatgtatcagaacttcattcctggttatgggcagaatagtattccattgtatga

SEQ ID NO: 2185 - DNA, 469 bp, Homo sapien
ccggggatctgagccttgtcgtgtatggactagcactattaaacttcaattatgaccaagaaaggatacactggcccctacaatttgtataaatattgaacatgtctatatattagcatttttatttaatgacaaagcaaattaagtttttttatctcttttttttaaaacaacatactgtgaactttgtaaggaaatatttatttgtatttttatgttttgaatagggcaaataatcgaatgaggaatggaagttttaacatagtatatctatatgcttttccccataggaagaaattgactcttgcagtttttggatgctctgacttgtgcaatttcaatacacaggagattatgtaatgtaatatttttcataagcggttactatcaattgaaagttcaagccatgctttaggcaagagcaggcagcctcacatctttatttttgttacatccaaggtgaagaggg

SEQ ID NO: 2186 - DNA, 454 bp, Homo sapien
  misc_feature (1)...(454): n = A,T,C or G
tttttttttacaattctccgcagattttattaattataactttttttttcagacgtcctgccatcttctcattcagacttttcttagcaaaggtagtccatggcaagtaatgaattcccagtaactaggtctgtaacagaagtaaattcngtttttatgtttataaactcaaaaagtaacatgaagtgcaaacacctttagttccttcccctcggtaaccttcttttgatgaaccagtgtgcagcaaaccaggatgagttggatttgggtgggatccacacagtcattttcaggcagatgagacttcctaagttctatgtatagattcatattatcagttattttatgcattcatttctcctctgtcttcatgtctctcccttggcaaagttacttggaactggtgtacttggtgacggccttggtgccctccganacggcgtgcttggccagn

SEQ ID NO: 2187 - DNA, 461 bp, Homo sapien
  misc_feature (1)...(461): n = A,T,C or G
tttacacaatagacatttattcacttcaacatcacaatttcacacgaagttggaggaagcccttccctaacaaaacaagcattcgcattaggggaaggaggctgacctgctctagggatgaaatacatctaccaagaatatagataaaaacaaaaacaaaacagatggtagagccaaaaaacagagacattaaaggaaatgaaaaaccgttataccaagtaatgtttataaatccagatcatnagtgaacgtaggttacaaaaatggaagttgtaagtattgttattcttgtacttttcacacaaacaggatttttagaaaagcttaaggtcagggagtgctagagagtttctggtatggcangcaagaattcttccttttggaacaagaccggaaaaacctcaggggcaaagngaaaggtatatcctttaaaaactgntttcatagttaatctcgtgcng

SEQ ID NO: 2188 - DNA, 368 bp, Homo sapien
aaaggtcagggctgttttgtgcactaatgttctagagaaatttcaagctcagagttaactcgtacagtgcagggaggggccttgtcagtaattatctgatcaataaattaaaagattgcattatgggccaggcgtggttgctcatgcctgtaatcccagcactttaggaggctgaggtgggaggatcacttgagctcagaagtttaagaccagcctgggcaacatggcgaaaccctgtctctactataaacacacacacacatacacacatacacacacgcacacacacacacacaattaaaaaattagctaggtatggtggtatgcgcctgtggtcccagctacttgggaggctgaggcagaaggat

SEQ ID NO: 2189 - DNA, 360 bp, Homo sapien
  misc_feature (1)...(360): n = A,T,C or G
atgctaaagntaggaaaaatgatgggttcttctgctctgagagctgttctctcttcttttagacttttctaggctgttagcaaggaattggtgaagggaagcctttctttgttcaggtctccctttcagaccctggtgggttagccaagttcataggacgtttacatattagtcctccacgttaaaaactagcttgtgttttgaaggttgctgaatagatgtcactaagtagtagaccaaaaagctcaccctaatgattgttttacagaatggaatatattaaaccatgacccttttaaaaagatgcagtcaagtggtttatatgacatttcacttattgcttattataatatttaattc

SEQ ID NO: 2190 - DNA, 376 bp, Homo sapien
  misc_feature (1)...(376): n = A,T,C or G
gataatagcatattntgttttattaaaaatgtgtaanctttttttctttttgcctcttgacatagttacatattttcccctgtatttgttaaaggaaaaataagttgggggagaggtctgctgtgttcttttttttttttttttaactaaaaaagtttttttagagacaggatcttgtttcgttgctcaggctggagggcagttacacactcatagctcactgcagccttgaagcttctggcttcaagcgatcctccctgcttacgcctcctgaaagtantgttattacagacatgatcccngcatgcccagccccactgtgttcttaaactggatgtacnggagtaaaaatgaacccttgttttgaaaaaaaaaa

SEQ ID NO: 2191 - DNA, 369 bp, Homo sapien
  misc_feature (1)...(369): n = A,T,C or G
aaaatctcgtattggcagatcttgacaggctggacctgcaagatgtggcttgaattttaaccatttattacataatctctagtgatcatgcatctagttatcataagaaataatttaaaaggttttgttgctgaaanagtaagtggtgcagtaaaatacttaagttattcaaagaatgttatctttcttgcaagagtaatttaagcacatgggaaagattctagactttttgtttcttgcaacaacagtgccctctgctgctagaaacctttttctacttactatcatttttattgtggcttgagctcagtcaatctggtgcagatgaggctggacaactactaaccaataanatcaggagtttgtaac

SEQ ID NO: 2192 - DNA, 364 bp, Homo sapien
taaaattacccatttcaagaggaaaaaactgttcaatgaaaaaaccactcaattatgactcatataagaaatactggtttaaccaggagatatttggggagcaaaattttaaggaatttcaaattgctaaatctaatacaaatatctgacaataagatacagatctaaaagaatggttcttaagaactattgtttactgggaataaactaagctctatgaagaattccgtaagcattacatgttccagtaagtttagcaacttagagccaagactggtggccacctccatttatttccccactgctcctccactgacatccttccttagcagaaacttcatgaaaaagtttttgctgacacaga

SEQ ID NO: 2193 - DNA, 339 bp, Homo sapien
  misc_feature (1)...(339): n = A,T,C or G
acaaaactggnggaatcacattacctgactttaaataatactacagagctgttgtaaccaaaacagcatggtactggcataaaagcagacacacagaccaatggaacagtacagacaacccagaaacaaatccacacacaaacagtggaccccatttggtgaccaagggtgcaaggattatgcactcgggaaaacacagtcttttctccacaagcacaagcaaccaaagcaaaaatggacaaatgggattacgtcaagtttaaaagcttctacacagcaaaagttctatcaaccaagtgaatagacacccccaaaggaatgggagaaaatattttgcaa

SEQ ID NO: 2194 - DNA, 375 bp, Homo sapien
  misc_feature (1)...(375): n = A,T,C or G
tgcactacagcctgggtgacagagtgagactcagtttcggaaaaaaaaaaaaatctttaccttctgaaatcagtttatcagtttataaaaagttgaagaggcatttgcattttcaaatttacagacaccaatgccaaactatattgtgcccacttgtcaatgcttctcttttaacataacactgaaaatatgtggcagaagaattagtcaaaaaataaaaaacccattgaaattgaagacaagtaaaatgtttgtttgtagatcataaaatcttacatataanaatacataaacagtacattaaaacctatctaataaatacactcagtaaattaccaaatataaactcancttatnagttatcattcctattaa

SEQ ID NO: 2195 - DNA, 373 bp, Homo sapien
cataacctaagagaggaatttataggcttcctgccttatgaagccgatgcagaaattttggctgtgaaatttcacactatgataactgagaagtggggattaaatatggagtattgtcgtggccaggcttacattgtctctagtggattttcttccaaaatgaaagttgttgcttctagacttttagagaaatatccccaagctatctacacactctgctcttcctgtgccttaaatatgtggttggcaaaatcagtacctgttatgggagtatctgttgcattaggaacaattgaggaagtttgttcttttttccatccgatcaccacaactgcttttagaacttgacaacgtaatttctgttctttttttc

SEQ ID NO: 2196 - DNA, 376 bp, Homo sapien
  misc_feature (1)...(376): n = A,T,C or G
aaaattacccatttcaagaggaaaaaactgttcaatgaaaaaaccactcaattatgactcatataaganatactggtttaaccaggagatatttggggagcaaaattttaaggaatttcaaattgctaaatctaatacaaatatctgacaataagatacagatctaaaagaatggttcttaagaacctattgtttactgggaataaactaagctctatgaagaattcgtaagcattacatgttccagtaagtttagcaacttagagccaagactggtggccacctccatttatttccccactgctcctccactgacatccttcttagcagaaacttcatgaaaaagtttttgctgacacagaacaaacctgaanag

SEQ ID NO: 2197 - DNA, 375 bp, Homo sapien
  misc_feature (1)...(375): n = A,T,C or G
aggaaataaaattggaacgaagaaaggttaggagagtagggaaggaacaggactgcaaaaatccttctccaccgcacagactgggaacccctcctggcctgggggaagagtttgttacctaccttactatttaaagagccttcactggttctgcatcacccgcccctggaccttcttagttgtttctctagcgctganctatctcctaactttggacctattatcagaaggtgacaagtactggctctttattcattaagctttttttttttgaaccccattctttccttctctgaaagtggtgctataagttttagaatcttttaaatacattccctgggccaacaagacccacacacttagcccattgaaaaa

SEQ ID NO: 2198 - DNA, 360 bp, Homo sapien
  misc_feature (1)...(360): n = A,T,C or G
tttaactttaattctctttcaaagctaaattccacactaccacattaaaaaaattagaaagtagccacgtatggtgntcaatgtctataatcccagcactttgggaggttgaggtgggaggattgcttgaacccaagaggtcaaggctgcagtgagccatgttcacaccgctgcactcaagcttgggtgacagaacaagaccccgtctcaaaaaaaattttttttttaataaaacaaaatttgtttgaaaacttttaaaaattcaaatgatttttacaagttttaaataagctctccccaaaccttgctttatgccttcttattgcttttatgatatatatatgcttggctaactatatt

SEQ ID NO: 2199 - DNA, 353 bp, Homo sapien
  misc_feature (1)...(353): n = A,T,C or G
ttttgagtgtgttctcatgtcattaattactgatacaagttgatacatgcaattgttgggaggaaagattcctcagaaggcacaaagagctgtatttgtgtatattccatttcaaaaaagagaaacgtggtattcatccttgctgatggattaggaggtatgagaatagattggaagctgaaggttctccacgtctgacntgcacccagattggtgggctgttgttcttatagatataatttaaaggaaggcttgtacattccccaggtatctcacatgatgctattgctcaagagtctaaaccgatattggcagaatttggaagcaaatgtacctggagcgcaggtattttt

SEQ ID NO: 2200 - DNA, 372 bp, Homo sapien
  misc_feature (1)...(372): n = A,T,C or G
aacatgagtntattttctaaaagtatccagaataagtaaaattatagaaataagaaaatgttacacaactttgctgttcatacccttaccttcttactacttttggtttggaggagggtatcaccactagaaagtgtgcctccttaagatttcttaaaggaaagttagtttcagtatttcacagcaagttggactacaaaatctagagttgatctgctttttaaaccttcatttaaaagcaaacttggaagaaatttgaaactgatgtttttaatatatgtctgtgttgcctaggttttctttttttaaagaggtatgtaattaanacctttgtaaaatttgccaactaatattagtgcctgacttccccca

SEQ ID NO: 2201 - DNA, 353 bp, Homo sapien
ataactaccatgattgggttgtcattgcccctctttatgtacaagtaaacagccctccattgttcttgctttccttttacttcctcccattcttcctcttttcttccttccctcctcactttctctcctctccaccaccttcttcattttctcttcttgtatgttaggaacaacaggttaggacctcttggctattatgaaatcttccatgtacttaacaagtgtgattcaattcaaggcatagaaaaagagatgaaagcctccgttttgtccacagatatatgttctgtaatgtttttgtttttaaataaagagtgtaatttgtctccctgtttttcttaatttgagagaac

SEQ ID NO: 2202 - DNA, 240 bp, Homo sapien
  misc_feature (1)...(240): n = A,T,C or G
gtggcacatgaaatttctcagatcactaatgatcttgcacagattattattcctaaagataactcatctctcttgaaaaggttggcatgtatagctgcatttttttgtggactcctcatcttatcatccattcaagataaatcaaaacattaggttcccaaaaattctaaaaaaccctaaactcttcaggctacctttgtgtgtctctagaagagaaaagcatctanctgggagatataa

SEQ ID NO: 2203 - DNA, 372 bp, Homo sapien
ccattttcctaacccagcagagactgttaatggccccttaccctgggtgaagcacttacccttggaacagaactctaaaaagtatgcaaaatcttccttgtacagggtggtgagccgcctgccagtggaggacagcacccctcagcaccacccaccctcattcagagcacaccgtgagcccccgtcggccattctgtggtgttttaatattgcgatggtttatgggacgttttaagtgttgttcttgtgtttgttttcctttgactttctgagtttttcacatgcattaacttgcggtatttttctgttaaaatgttaaccgtccttcccctagcaaatttaaaaacagaaagaaaatgttgtaccagtttt

SEQ ID NO: 2204 - DNA, 413 bp, Homo sapien
gtcttgctctgtcactcaggctggagtgcagtggaatggtcacagcttactgcaccctcaacttccctgggttcaagcaatccttctgcctcagcctcccaagtagctgggaccacaggcgcataccaccatacctagctaattttttaattgtgtgtgtgtgtgtgcgtgtgtgtatgtgtgtatgtgtgtgtgtgtttatagtagagacagggtttcgccatgttgcccaggctggtcttaaacttctgagctcaagtgatcctcccacctcagcctcctaaagtgctgggattacaggcatgagcaaccacgcctggcccataatgcaatcttttaatttattgatcagataattactgacaaggcccctccctgcactgtacgagttaactctgagcttgaaatttctc

SEQ ID NO: 2205 - DNA, 421 bp, Homo sapien
  misc_feature (1)...(421): n = A,T,C or G
catggctctcatctttaattacatatgctgtacacatatataatgacatctttataacatccaaatttgagatacaaatctcagaatagtaataaataccatccaaagacttaataggcaaaatcatcttataggaacaacttacaggagtagtanagtcaatttcatcaaaacatttttttcagaattaaatattataataagcaataagtgaaatgtcatataaaccactgactgcatcttttaaaagggtcatggtttaatatattccattctgtaaaacaatcattagggtgagctttttggtctactacttagtgacatctattcagcaaccttcnaaacacaagctagtttttaagtggaggactaatatgtaaacgtcctatgaacttggctaacccaccagggtctgaaaggg

SEQ ID NO: 2206 - DNA, 352 bp, Homo sapien
  misc_feature (1)...(352): n = A,T,C or G
ttttttttttcaaaacaaggttcatttttactcagtacatccagtttaagaacacagtggggctgggcatgcgggatcatgtctgtaataacagtacttcaggaggcgtacnggaaggatcgcttgaagccagaagcttcaaggctgcagtgagctatgagtgtgtaactgccctccagcctgagcaacgaaacaagatcctgtctctaaaaaaacttttttagttaaaaaaaaaaaaaaaagaacncagcaggacctctcccccaacttattttncctttaacaaatacaggggaaaatatgtaactatgtcaagaggcaaaaagaaaaaaaggttacacatttttaataa

SEQ ID NO: 2207 - DNA, 299 bp, Homo sapien
  misc_feature (1)...(299): n = A,T,C or G
tantaaaanannanaaaaacccacattttttntnatnggnnnnngnnggnaggagntngttcnaaaagngantccangggcctgnggnatnngaggggagtgggtcngctccannanangccancnncggggncagtgnagctcagagcccnggtggcgtaactacngggcntgcncagacggtcactcnaaggaagatgtccctgnggccnangccnnggcgntggcaaagggcnnnngcacctcgggnttgccgcagtctgcgaangntggcatccttcaggggntnnncccggctg

SEQ ID NO: 2208 - DNA, 421 bp, Homo sapien
  misc_feature (1)...(421): n = A,T,C or G
ttttttttcagattctaacaagaatacttttattatacacgtatcatacacacaacaattatttggggaacatttacaggcagagagttcaattccaaatctccatttcacccacacacactgtactgcacactcaccttagggttcagcccaacaggaacgagacaaagttattgctttctgaacagagagtttcaattaaatagaatcttccaagccaagaacagagcccagcatcctcttaattcttaataccctgtatatatatgaataaaaccttatgatgtgttatagattaccccatcaccattaaaagttaatattanaattggatcccatgtctcaaaaaagtcgtaagaagtgcaccagtatttacngaccccattanattacgcataaataaaatctggtacactcaacg

SEQ ID NO: 2209 - DNA, 425 bp, Homo sapien
tttatgatctgacatttgttttattaaccattagaaaagatttgaaaaaacgaattccattttaatagtgagacaacacaatagagctaatcatggaatattaatgttttgctattcgggaattactaagggggaaatttgcaggaaactttaaggcaagaatattgcaaataagttgccaaaaatatatgcttatagccatagcaaaatgaagatttagcatgcttgtctttgctcccaaatatttttaaatgcagctttattaaactataatgtttttaaaattaatacttgtgcttatataaaattcagtgatttaagtacatgatactcatttggtcacattttctgctattactgttcggcttcccaagaatttcattcaatcagcaagtttagttcacacaaacgttaaggcacagagt

SEQ ID NO: 2210 - DNA, 423 bp, Homo sapien
  misc_feature (1)...(423): n = A,T,C or G
atgtaatttgttagtttatggagttccatgcgctcaaaagcttgtgatgctcgaacccggaatggtaactggtacaacattttctttctgtttttaaatttgctaggggaaggacggttaacattttaacagaaaaataccgcaagttaatgcatgtgaaaaactcagaaagtcaaaggaaaacaaacacaagaacaacacttaaaacgtcccataaaccatngcaatattaaaacaccacagaatggccgacgggggctcacggtgtgctctgaatgagggtgggtggtgctgaggggtgctgtcctccactggcaggcggctcaccaccctgtacaaggaagattttgcatactttttagagttctgttccaagggtaagtgcttcacccagggtaagggggccattaatagtctctgctg

SEQ ID NO: 2211 - DNA, 496 bp, Homo sapien
tagttattaaaatacatttaatgcttggtattgtgaacatgcagacgaaagaaaataagattacaaaatgaaataagagctagaattaaaagccgatgtataggaaatgttctcaactgtgcaagtgattaacagccagatgttcccctacgattccaaacatgagtccccagtgccaagttccagccccaactctgctggagtctcagagaaaatgtatagtaacaaaagcagccaagacttgtgtggcgtccgtcttatttcttcttgagtttttgtcccgtggatgtgaatcactaagaacacatgcattcctcaagttttaagaagataaataaggtggaaaaaaataaatcttagggatttgcttcaattcttatttaagcttcatggaatgcaaacataggaggctaaagcagaaataagtattgcttcagtgatcatgagtccagccagcttagtaaacaaaacaggggttaccttcctaaccttctaa

SEQ ID NO: 2212 - DNA, 503 bp, Homo sapien
  misc_feature (1)...(503): n = A,T,C or G
aatgatttgtatattttattttgactttacatgcggtgttaaaaacccaaagtacatattatttacacatccacaatacaagtttacaaggtatctattcatgttaaagtactctataaaacagtatagagacacttcacttgagggttactttttatggcgtaccattaaaaaagatacaatctgcgtttacctttgcacaaatggataaagcatttaaaaattaaattaacaggatagagactagatttaatgttagaaatttcaacataaatactgattgaactcacattacaaactacaaggaagcacaatgttacaaaatgttatctggggtcacatagagttactgttctgttttacacacgctgggattaatattgggtaaggtgaattcnaacacgtttgttggttggtggactgagtagtgtttatcattgggttggtttaatttattattaatccggtaatattttaggttgccaagcngaagtgtttccaga

SEQ ID NO: 2213 - DNA, 450 bp, Homo sapien
  misc_feature (1)...(450): n = A,T,C or G
ttctgttctcataaaactttatttatggatactggaatttaagttttacattacttacatcacatgctacaaaatctactacttcttttntttttctttcccaaccatttaaaaatgtaaaagccattcttagcaggctacaccaaacaggtggtgggccagatttggcatcaaggcacangtctgctgagccctgtcatttcggccactcttacactcgagtgtagataagacaggccccaatgcttaatacttcgttcatttgctctttgctttacccatccacagcaaagacctggatactcttcaccaaaaaatgtacaactaagaagctttatcaacattttctaaatgttaggagtagtattaagatctgtcagacaagtatgccaggtcacagtttaaaggatattgatatnatgccatattgtgcattaaataaaaacanga

SEQ ID NO: 2214 - DNA, 497 bp, Homo sapien
  misc_feature (1)...(497): n = A,T,C or G
ttggtcaaaaacctttttcatctatggaaattatcttgtgctgtatctctagatatattcatataaattatattaatggttttacaatatttgaccattcttgctttccctggaataagtcacatttcatataacgaattatttgttcaagtgcttctgggaatgtttcaccgatattcatacctaagattcgtcagctgtttttgtttcctgcagtctttataaagttttgatattagtgttactcttttttgtagaggaaagaataatttttttaaatttttccttgttctggggctattttaaaatgctggaattcactgttctttaaaaatgtggtagaattttcctagaaaacttccaaggccagaggtttcagagtattaataattggcacatttctctaattcatttgttgaaatcagattatttagagtttntatatcccttgggggtcnggttttggtgaattatacgttacctaggaaattacatat

SEQ ID NO: 2215 - DNA, 501 bp, Homo sapien
  misc_feature (1)...(501): n = A,T,C or G
tttctattgcaagaactctaagttttattgtgtaatgttgaatcttgaaagtaatttttaaattcatgctgatagacaactgaaaggattattcacactgttggttctgaaaaaaaatttatcatacattcattcaacagtaaccagccagccatttaaagccgatctctgtattaccatgtattaaagcaaactgcagactactactcagggcatgaacactgaaaacctaaaaaggcatttttatatgatcatagaaatctcttgagcagatacaagaactgttaacagcagctgcattagcaagtagattccaaggtatggtccaaccatggtatatttgtaaataaaattgtatttgttatggtactctcttgtactggttcanattcttgacttttaatcttcacatcccatgcatgttttatcccctagtttcatggatgacactgaagcnccagtgattaatgagttgcccacataaccntatgctaatcccaa

SEQ ID NO: 2216 - DNA, 336 bp, Homo sapien
  misc_feature (1)...(336): n = A,T,C or G
tccaggattaacgtgctttcttcatatctgctcattaaacaaaaaaattatcacgcataggtctctgaaagttaacagtaacatttcatactaccacagggttgtgatatgcaaatttaaaatattttaaacagaaacctttacaaaataatcctattacataagcaatatttgcatagaattatacaagtacnattatacaatatttaagcagcagcaacatatgctganatttnngactaatgaagcttggttgtggcaaggagcncaatgcacnaatacggagaggcccnactgtggcctccacactctggggcaggagtggagaagccccag

SEQ ID NO: 2217 - DNA, 501 bp, Homo sapien
  misc_feature (1)...(501): n = A,T,C or G
tttctctctctttggtacagaatatagaatcctgacctcccaagaaagttaatttactcagtcagtaaatctggagatctctgcatgtagcatttttattttacatatttatttattaggccccttctggttccaaacaggatttggcacactgtnnttgattttccgcttccttccaactctgcaggaaacaacaaaagccccactaagacctcaaaaggagaaatcctcttgacccagtttcacgaatttttcgacactgtcgtttattgaaggccatcttgtggcaaccccagtgtccatgggggaggagcatacccagagaagagtgtaaaaacaactccatctgttacaggacaggggtcccaatccagactccaagagagggttcttggatctcgcgcaagaaaagaattcaggacaaatctgcagtgcaaagtgaaagccagtttctaagaaagtaaaggantggagaacagctctccatgacagggcggcccg

SEQ ID NO: 2218 - DNA, 454 bp, Homo sapien
  misc_feature (1)...(454): n = A,T,C or G
agcgtaattcatttttatgctacacattaaaatggtgccttcttacagtcactttggaaaactgtttgacagtaaatactaaaactgaaaatatacacaccctacaacctggcaattccattcttaggtttatactcaatggaaatgtatacactcaccaaaagacatgtataagaatgttctacacagtactattcataatagctcagaattgaaaaattctcaaaagactattaatgggagaatgaataacttttggatgtaatgaaaaatggataaacaaacggaagactatacagcaatgagaatgaatgaactacaaatacatgcnacaatnagaatgggatctcactttggcagggttgaataacggcctcccaaagatagccagcgtatgaatcccctggaacctggtgaatgtcncctatatggccaaagaggttctgcncctgtg

SEQ ID NO: 2219 - DNA, 443 bp, Homo sapien
  misc_feature (1)...(443): n = A,T,C or G
gggctttgataatgtgattattctttattcagaattgaaattttcataaggataatcaagtttttggcacacaaactgttattgtgatttaatgtaatttttttgagagagtcgtttgttattttttaagtaccacttttcctccaacaaggagtagtcatagcaattcagaaaagtagggaaggtgcaaggtgtgaggaatttccattctagcatgggttgtaactatcaaaattacaaaattgattttatactccacatgaaaaatgataataagtgaagaacaattttccagtaatttttcttngcaaaatagaaaacaaaataatcnataacagaaaattgtgaaaataaaaaccccataccacatgtagagaataaggggtataggcnctaaatatgnttccttaaagcctccngaacccctagggccgaagtgatgc

SEQ ID NO: 2220 - DNA, 482 bp, Homo sapien
  misc_feature (1)...(482): n = A,T,C or G
gtttatatttgctagggctgctataatanagtaccacaaatggaggcttcaacaacagcagttctattgtctcacagctctggaggctagaaattcaaaatcaaggtgtcggcaggattggttcttctagagagccatgacagaaggatctgttccaggcccctctccttggcttccctgtgtctccgcatatcaggttccaaatttcccctttttataagcatcgtatacctcactaaagacccttaacttcaaatgaggttacattctgaggtactaggggttaggacttcccatatatgatttggatgggtagatgggtcacaactggacccataacagttcctatgtaccccatgcccagtttccactggtaaataacatcttacattagtatggtacatttgtcccaattaatgaaccagtatgaaactttattnttactaaagtatcatccctggtatggcnctaagaanctttng

SEQ ID NO: 2221 - DNA, 459 bp, Homo sapien
  misc_feature (1)...(459): n = A,T,C or G
tttagtgtaaattggcaaattttatttaaacctaatgaatccatgtaagactggactgtactgtctcgattatggagtctcattataacagcatccttaggggttacattgtggcactacctaaaaggtaaaagtgctgcaataagggctctgcaggcaattccatcacaaaaccccatggaataggatcacctcccaccaatcttttgctaagcactactctctggtaaagagtacagaagtttcaatgttttgatttttttttttccaggttggcatgatacaaatggcagcacacaaaaacaatgttaaaaaataaaccaaataaaaggctgtacacnagaactttatgtttattgcaaacaaacnaaccaaaaaaaaagggaaagagagggaaaggggaaaatggtcngaagcnccacnttttagggtaagaattttaaagcntccttacantct

SEQ ID NO: 2222 - DNA, 123 bp, Homo sapien
aaattctgtgacaaatttttggtcaagttgtttccattaaaaagtactgattttaaaaactaataacttaaaactgccacacgcaaaaaagaaaaccaaagtggtccacaaaacattctcctt

SEQ ID NO: 2223 - DNA, 272 bp, Homo sapien
tatattgagatatttctaaaagtagaatacacccttgaatggatttatttaaccactcctctagttggtgaatatttaagatgtttccatttttctgttgtgctaccatggaacccttctagacatacactttcttttaatgaaaattttacacatgaaatatatatggattaacatatatatttataagcctgtttgataacatccaagtatccatcacctaggtttggtatatgttgaacttttgacacatttgcttcagatttttttac

SEQ ID NO: 2224 - DNA, 308 bp, Homo sapien
  misc_feature (1)...(308): n = A,T,C or G
ttacaaaaaaatcaagtttttatttcaaatatttgaatctaatagatcattatttaggtttatactctgtgaatatatatatgatattgtatttaattaatatctgagtaatctcaattaccattttctaggaaggatagagtgtaagagctaaacatttcatgtagaaatattaactttcaaaagttataataccagagttttagagtgaaggagtatttaanatgtgtctttctttgggagagaatcattttgttctttactaacaataatttgaaaattggtaatttaatatcttgtgaatntga

SEQ ID NO: 2225 - DNA, 483 bp, Homo sapien
  misc_feature (1)...(483): n = A,T,C or G
tcgcgaggtgcccctgcccgggcccgcctacctggaccaggcggtggcttgccctatcagtttgaggcgctgggctccttcactgcggacccggacgcctccgggttggtcctgcgttcggacctgtaccccgtttacgtgggcgagacagcgggtacgcggngcttcgcgccccggtcgcttgggacctcatccccgtggtggtggttcgggatttggggggcgagtctgcgggctctgtggggttctctgccccggttgcgtgggacctcatccgcgagctcccgtggtggtggttcgnggatttggggggcgagacancgggcactgcgaagcttngccgccccggtcgcgtgggacctcatccccngtggttggtggttcgggatttggggggcgaacaacgggcactncaagcttcgcgccccggtcgcttgggantaaaanctggttggtggttgttaattaangggggggcaaaag

SEQ ID NO: 2226 - DNA, 330 bp, Homo sapien
  misc_feature (1)...(330): n = A,T,C or G
gagaggttgtgcaaaactactgtatttacaaaaatggcacaaaagtgaattcaacagttaatgcacatgcatacttcattcacatcttcaacaacaaaaggtattctaactctacagaactgaatattagcntcnacggnagnngntaancnctnggngncncataggttacaccagaatgggcaaatattgccaaggtaaaattctactgttaaagctgaaacaggtttaaggccattcaagttcaagcacagagatacaaatctttcagagccccatctagttgtgtttgaaatatgtgacctttcttctaacttgtggtcttaaact

SEQ ID NO: 2227 - DNA, 515 bp, Homo sapien
  misc_feature (1)...(515): n = A,T,C or G
tgatttcagatcatttcctttaatgaagaaaaactgtgatatggatacaaagttttaatgttcaggaaagattggccttgtccttaagaaaattatattgattagaatttctctcaaatgaatttaaagtgacattcacttggattaagtagtaataaaaaaaaggtgatattttctagtgattttgtttttatctcaagtagtttatcactgattgaccttcatgtgtgtaacttgaaaacaaaatatgtgcaagtgttgcactggtttgaagattttggcagtaaaagttacctaatcagttgtcagtactgtgtctggnaaccagtcctgggaagtgtgatgatgtgcctttnaaaatagcngaaaagaaatttggtttgtacttggttcctacctttgtccctggttttggtggtataggtatggtgtccngaattgggttccctcccggtggggttcctgggtcncactgaccttcaagaatgaagccacggacccctgccggtgagtgt

SEQ ID NO: 2228 - DNA, 108 bp, Homo sapien
ttttttttttttttttttttttttttttttgaaatactgaagtatttattggtcttagggtgttctcctttgaagagcccctcactgtcaccttcccgagaataccct

SEQ ID NO: 2229 - DNA, 435 bp, Homo sapien
  misc_feature (1)...(435): n = A,T,C or G
attctgaaattgaatactttatcatacaagaactataaccatgttattattctgagcacattatttcaattccaggtctaaattaatcagcaaaatcaccattctaaaacattaacatagagcagaaacgtaaagcactttggtctgtataattagattattaaacaaatcgaaagaatctctttccctaatgcttcacctcatgatgtaaagttgaaaacacaacttaggaacacatttctgaggagcaattcccaacatttgtttctgtatacaactcaaagcagcactgagtaaattcacccaaagnacaattttnaaaaacaacattttgnaaacncaaagcatctttctactttctttcattgttaagtcacaaaacttactacgattcagtctagagctccgaaaatgggcnatggtgaatttggggac

SEQ ID NO: 2230 - DNA, 398 bp, Homo sapien
  misc_feature (1)...(398): n = A,T,C or G
tttttactcttatgttatgaatatttatttttttctccttaaaaatgtacaaaaaataaaataactgtatttatagtttatagattccccctctcccatttacaaaactattaagttacatttaccttttttttttaaaacatgagagcaaattgtacatatatcaatctcccttgcttgtctttaagaaagggccgttcatagcatttggcacaaaccctctatttctgttgcatttgcatgattttaaataagaaggaaaataaacatttgatttatttcatgcttcctaagtttctgggcagggacatgcctnactcttttaggaaaccaattccaagatgacatcnggactgcatttttctgttggtccgaactttctaaacaaacactcataa

SEQ ID NO: 2231 - DNA, 473 bp, Homo sapien
  misc_feature (1)...(473): n = A,T,C or G
tggaatgaatggcagaagacaacagattcactctttttaaaaagttactttacatatatgtacaatatataaagccatatttctaatttaaaaaatagcaaaatgtaaataacagaacagctgtgttttacagaaacaaatccagtgtgtatgtgttatttaaacccacggtaattatattaattggttcgttttaaagtgtattttaggtatttcttaaaacggactcagaatttagggattaggaacccctgagttttaatttggctttttgtcatagttctaaaatgtcaatttcatggaaattactaaatgaggttgtttagaaaaatgggttcnttttcttccaggttggcagcattttcagatctggcaaaggacagaattttttttaaagccaagagataataaaattctcattcattttcngatgaggggaatatcnggtcngggtagccttttccttggttccc

SEQ ID NO: 2232 - DNA, 439 bp, Homo sapien
  misc_feature (1)...(439): n = A,T,C or G
ttgagatggagtctcactctgtcgcccaggttggagtgcaatggcacaatctcgcctcactacaacctccacctcccgagttcaagcgattctcccacctcagcctccccagtagctgggattagaggcacccgccatcatgtctggctaatttcttttgtatttttgtagagacggggttttgccatgttggccaggctggtctcaaactcctgacctcaggtgatccgcccacctatccctcccaaagtgctgggattacaggcgtganaacttgcgcccagcctgactttggataatcttaatggttagacatccttgcttttttaatattcaacacaagaaatctataacctttatctgtacaaaggntccaaagagttcactaattctacctatgctcttttataagaaagatttttttttgaaccattaaaaa

SEQ ID NO: 2233 - DNA, 476 bp, Homo sapien
  misc_feature (1)...(476): n = A,T,C or G
tcttgtctatttacatgcccttgcatgaaacccctcttaaactgggatctgtgttctttttgttctggaacataccttattttttcaattacatcttccaaaagatattccacaaccggaaaggtaaaaccaggtatatgtatcattggacagttaccaaaatattctgaaaacttttctgcattcaatgttgcactcatcaatattactttcaagtcagatcgaaaattgagaaggtctttaacaacagtcattaaaacatctgactgcagatttctttcatggatttcatcaagtacgatatgactaacactggacaaatacgggtctgactggagccactgaaggatgattcctgttgtacagtataagatagaaccctgtttccttgggcaaccgactctggagacgaatttggatatccagtactattaccactgccacaagattcntgccccnttcctgcagctactctt

SEQ ID NO: 2234 - DNA, 413 bp, Homo sapien
  misc_feature (1)...(413): n = A,T,C or G
tgtttggaagcgctatttataactagccagtattccatctggaaggaggtaagaaaacatggtttttttaatacacttaacatgcttacagttttaaagctctgaaaattagctggataataacattgtaaactgttcattttcttagcaaactggaacttaaaagagtaatgattttctatcttcctttttgcttttaaactgaggtgacttttcatctctgaaacttttgagtgttcaccttctcgaagtcaaattgatactatataccattttctggattttttcttcattcttgaggatgttggccttcacagcacagatcttgtcttggctgggtctttgatcagctgctccagctccgngaagctcagcctttaaagggctccagggcanagtctgggatccnctgg

SEQ ID NO: 2235 - DNA, 357 bp, Homo sapien
  misc_feature (1)...(357): n = A,T,C or G
gacagcttaaaacaataaacaatttattatctcacaaaatttctcagtgtcaggaatccaggagcagcttatttgtcaagatatcagctggggctgcagtcatctgaagacaggactgggactgaagactaagatggctcactgacttggcggttagtagaaggtctcagttcttaaccacacggaacttcataaggctgctgacgacacataaactgtctttcatgacagcaagttgcccaagaacatagagagtaaccacatggaaagccacaaagtctttgttaaagacctagccttggaaatggggaaccttctacccatattccgattgggttntacaggcaaccctgntcc

SEQ ID NO: 2236 - DNA, 472 bp, Homo sapien
tcttgtctatttacatgcccttgcatgaaacccctcttaaactgggatctgtgttctttttgttctggaacataccttattttttcaattacatcttccaaaagatattccacaaccggaaaggtaaaaccaggtatatgtatcattggacagttaccaaaatattctgaaaacttttctgcattcaatgttgcactcatcaatattactttcaagtcagatcgaaaattgagaaggtctttaacaacagtcattaaaacatctgactgcagatttctttcatggatttcatcaagtacgatatgactaacactggacaaatacgggtctgactggagccactgaaggatgattcctgttgtacagtataagatagaaccctgtttccttgggcaaccgactctgggagacgaatttgatatccagtactattaccactgccacaagattctgccctttctgcagctactct

SEQ ID NO: 2237 - DNA, 402 bp, Homo sapien
  misc_feature (1)...(402): n = A,T,C or G
accagcaatacaaatctctttttattgggacttcataatctttttcaattgaagaggatttcctttgtcacccagcagggtcctggaacttcttggctggaattcagatatccagagttctggttacctacaacatctattctttacgtagtagcttacaagcatcaaaggccaccctcacctgatgcttggccggatctatgccctccaaaatagtcttcatgtcctccngcttgtctaaatcagcccctgcttgaagtaaaacatctgcnacatccgtatgtccattttcacaagcataggttaaggctgggtctcctgttggctgttgtaagcatgcacattagcggccagaagccagcaaattattttaaccnaatttccaggtgtccctnctgagat

SEQ ID NO: 2238 - DNA, 265 bp, Homo sapien
gaaaacccaccacaccaccacaaaatggcctttagtgtatgaaatgcacatggaggggatgtagttgcatttttgctaaaaaaaaaaaaaaacctttaaaaattgttggatgtgtacaaaagtcttactgccttattatgtgtatgggattctaaagtggcattccacttggatttcctgtgctacctatccaaattccaagtaactacttcagtgtcattgcctttgttacctaaccaaccttcactgaaaggcaaatttagtt

SEQ ID NO: 2239 - DNA, 475 bp, Homo sapien
  misc_feature (1)...(475): n = A,T,C or G
tccctttagaaaactttattcttaagaagaaggcacaacatactttttcttttataaaaacacacaggtcaatgttttttaaaaacacagcataattgtacaaggggaaacattttgttagtataatcttaccaataatgtaagagaggaaagactgccatactgaaatacattttgctgctgccaaagacggtcctattgtgaagaaatgagaaaaaaatagcaagcgccagggccaattaagcatccctctccccgtttttctgaatacaacacagtgatcctcaccgtaacccctacacatgttaatggattgttagngtntcaaattattttcaatgtgctttcttgttgtataaacctttacctgnnactttctatttaaggggcaaaaagggaatgtgagtgtaaaaccctgcncagtgtggtgcctgttggactttggggcaattcaacaaacaagcctgctntgttt

SEQ ID NO: 2240 - DNA, 489 bp, Homo sapien
  misc_feature (1)...(489): n = A,T,C or G
ggcacgagggantctctttttgtcacgccagtatgaatctctgcccgcaacacatatcaggggaaagtgcagtgttgcccttctgaatgagacagaatcagtattgtcatatcttgataaggaggataccttcttctactcattggtctatgaccccntcattgaaaacactattagctgacaaaggtgaaatcagagtgggacctagatatcaagcagacattccagaaatgctgttagaaggagaatcagatgagagggaacaatcaaaattggaagttaaagtttgggatccaaatagcccacttacggatcgacngattgaccagtttttagttgtagcacgtgctgttgggacattcgccagagccctggatttgcagcagttctgtgaggcagcctagtttgcatatgagtgctgctgcagcttcccgggacatcaccttgtttcacgctatggatacattgtatagacncagcctatgnttt

SEQ ID NO: 2241 - DNA, 396 bp, Homo sapien
  misc_feature (1)...(396): n = A,T,C or G
ggcacgagcaagttttaatccatanataaaaaaaaatgggagattgttttcaggaattcagggatganaagaaagaataatttccattaagtagaattccagttgtctttctgtttctaanacacagaacttacaagagccacaggagccaattatagcacctgacagantacttctcctcttcctcaccattcgggtgcctctagacacnttgacttacgatcgttattcccccaattcatcatatttngtctgttatcaccagagatgcctgaactcagttaagcgagcaattgctaagttgtcttgaggagcatgaggaattcaggagcagaaggtcaggatagcatgagatagtctcaatgtggccaaccaaaaggacanaactgacaggaa

SEQ ID NO: 2242 - DNA, 496 bp, Homo sapien
  misc_feature (1)...(496): n = A,T,C or G
agaaagaaaanaagattgtagctagggggagagtaggtgaaaagatgaacaacatgaccgggaagatttcctaatctcaccacagcctggctctaccttaagtctttaataaaagcttgactgaaggtaccaaggtgtgctgaagtggaagcaaagttctccaaagtccagcatggtagacatcagtggtggtaacaaggacagaccccaaggcaaggtgaacctcaaaaatggaacctcaagtctatgcagtccagctgccctccccaccaagaaagtccttgttccagcccaacatcagtgcctctgagtttgtttacctagaaaccaaggaagaatttccttgtaaaaattttagacagagtagtnccctggctttctcctcntgcaggaagggatggattctnccattccataccatctttccccaaaatgggcccagaaatactttaattcaactatgtgnaaattaagattgtttttgggtttgngggca

SEQ ID NO: 2243 - DNA, 494 bp, Homo sapien
aacataagacctttttaccggtgaaaggtaacacagaaaaatcaaacatgctggagtttaaattatgtccagatatcttactaaagaatacaaactctgtggaagaacggaaggatgtaaagcctcatcctaggaaggagcaagcccctctgcaagtttcaggaataaaaagtacaaaagaagactggttaaaatttgttgctacaaagaaaaggacacagaaagacagccaagagagagataatgttaattcaagactctcgaagagaagcttcagtgcagatggatttgagatgctacaaaacccagtaaaagattcaaaagaaatgtttcaaacctacaaacagatgtacctggagaagagaagcagaagccttggtagcagtcctgtaaaataattacaagatgtggttttgtaattgccactgggaaatttctttccttttctgttccaaatatttcgctgaactaatgagaatgccatgataagattc

SEQ ID NO: 2244 - DNA, 498 bp, Homo sapien
  misc_feature (1)...(498): n = A,T,C or G
ggcacgagcaanttttaatccataataaaaaaaaatgggagattgttttcaggaattcagggatgaaaagaaagaataatttccattaagtagaattccagttgtctttctgtttctaaaacacagaacttacaagagccacaggagccaattatagcacctgacagaatacttctcctcttcctcaccttcgggtgcctctagacacttgacttacgatcgttattcccccaattcatcatattttgtttgttatcaccagagatgcctgaactcagttaagcgagcaattgctagttgtcttgaggagcatgaggaattcaggagcagaaggtcaggatagcatgagatagtctcaatgtggccaaccaaaaggacaaaactgacaggaatgcacattcgattttcaagccctccagagcttgaacaacaactttaggagtaaataaaagcctaaaatatattttaaccatccagagatggtgttgaatccttcaa

SEQ ID NO: 2245 - DNA, 423 bp, Homo sapien
  misc_feature (1)...(423): n = A,T,C or G
accaagagcttttcaggttgcccctaagctttgtgcaattttttctggttccccaaagtgtatttttctctaagtcgagggctatgcattaatacaaatggaaatgttacctttgattttcttataaaggagtttaaataggatttttaaataatgtagtaacactcctgatacaactctggttataagtgaattgagcattaatgtttcttttgtataaattcctgtcctgaaatattttattcatgaaaataaggtaagcaaaaaccaactccatttggccaggatttggtggtgctgagatngccantcacgggttaaccccaangtgttttaatggatngaggaacccngcctttaccggaaaaanggtatggaaatnttaantggccnccagnttcccttggagccccatttgggctg

SEQ ID NO: 2246 - DNA, 213 bp, Homo sapien
  misc_feature (1)...(213): n = A,T,C or G
atgtccaaaccagtgcataccttcattgtaaccttgtcatgctccataacaactttgaatttatncttgtgggtcccagctatatcataacaattttgtaacaagaaatatgtttngtttcttatatntcaaagtgataatatgcctagtccacagtagtcacttcttaagtagacagataaacaaaaataacattanacaagaaaaccattt

SEQ ID NO: 2247 - DNA, 387 bp, Homo sapien
  misc_feature (1)...(387): n = A,T,C or G
ttttttttaaatcacccattactttttaagattagcaaagagctttacaaccaacccacacctgcttcctgctgcaataaagtgctgcacataaattgccattttaatgaccacaaaataagagcttttaaataagtataaagttagcctcctagcaggttacatctaccaggcgttaacaaaatggaatacagaattactaataacatggaggataccacgattagccagaagatcggcaaaacacaatggaaacttgtcaggggcataaactgaaccataggactaaacagcacctttttgttgcgtcattatatgtcaaagaggttgtggctaaatctttcaaacntacagtctacccattcnctaaaaangggtacattttct

SEQ ID NO: 2248 - DNA, 477 bp, Homo sapien
  misc_feature (1)...(477): n = A,T,C or G
tggagtaaatacatttattgatacccatttcatatatagttcaatgaaataatctataaatataaaaagcatttttcttttggatatcaccatggtccatgtaaatactcaagtcagaatcatctgcaggaagcactccaagtcacactgttagctttacagacctgaatatacatattgcattaaacagtggcacttatgtactcaagtggtccagtggctttggaatatatgtctactgggcatgtggaatagaaataatgtgttaggtttaaatcaatggaaagggtatcaaccatcaacaaaagcaacaattatgaattcatatcctaggcaaagaaagtaccacagttgacacttggtgtcaggaatactggagacaaagtatgtaaaacaatgcctgttgcagcaccacgtgggcactcccaactccccagtgggacagtccccccatgccttangggcaccccgtggtcc

SEQ ID NO: 2249 - DNA, 413 bp, Homo sapien
  misc_feature (1)...(413): n = A,T,C or G
tgttttttgattttgctttaatgattttaattagtatccaacatcaattcttaatctgtatacaacagttctggagtgacctggataacaatttgtttgctcagacaccttaagtactccccaaatagaatgtataaaagtactaatttagattggttttgtgtaatctgtgaataaataatattttacagcagttctctgggtaatgagagtcactctgtacagatagtaggtatgtacttaaatatttatacatttccctctgagctagtaagtcattgaccctgaagcnggaatgaggcnggtttgcaccttggaaaacttaatccgttcccatgggtaacacagagactcttgcctaccacttcttcccacatctttgntatatttaaagccagaaattgttatttacc

SEQ ID NO: 2250 - DNA, 390 bp, Homo sapien
  misc_feature (1)...(390): n = A,T,C or G
tagagatggagccccactctgttgtccaagaaggtcctgaaaaactggccttaagccatcttcccaccttggcctcccaaattgctgggacagaagtgagctattgtatctgacctataacgtacttcaagaaaagaaattttaagaatgatttatttattaaaagaaaatcggtcagtgaggaatgaactctatttatgtctaaagcttaaaatatattactatgtgtagtctgcatagaaactctgttgcatgaacaatgagcaaactgaggcagagtttagataacctgcctgaaattcaattaaatgatggaagcagaaatccaacccaagactcctgggagttccaaagttttttaagaacttcccttttcagagcacantaact

SEQ ID NO: 2251 - DNA, 484 bp, Homo sapien
  misc_feature (1)...(484): n = A,T,C or G
ctgtatccccagtagaatgactactggctattttttgttttgttttgttttttttacttttcgtggaaacatggtctcactatgttgcccaggtggggntccaactcctgagctcaagcgatcctcccaccttggcctcccaaagtgcaggaattatgggtgtgagccattgcgcccggccatacttcagttttgaatttaaattgtcatcttacagagatatgatctttgagcatctatgggtctctccctccaaacacagcatgccgtttattccttcatagtgcttattccaatttacaatcatttgcttgtttacttgttcattatttgttttttctactggactgtaagagatgagggggagccatacatgcttgttcatcactggtatccccagcaactaatatatcacttgggcatttaatgcaggctcaataaatacatgaatccatgtcaggactgaatggccaaataaacaagg

SEQ ID NO: 2252 - DNA, 155 bp, Homo sapien
  misc_feature (1)...(155): n = A,T,C or G
tttgggtatagaaaaatttatacaccataaacatctgtatatgtacaccatttatcatatatacgtattgtgacaaccatatgtattaataaaccttcaaaaggtaagcacctatattttcttgtaattaacaattttagttttgngcaatgtag

SEQ ID NO: 2253 - DNA, 147 bp, Homo sapien
  misc_feature (1)...(147): n = A,T,C or G
tgggtatagaaaaatttatacaccataaacatctgtatatgtacaccatttatcatatatacgtattgtgacaaccatatgtattaataaaccttcaaaaggtaagcacctatattttcttgtaattaacaattttagtttngtgca

SEQ ID NO: 2254 - DNA, 112 bp, Homo sapien
  misc_feature (1)...(112): n = A,T,C or G
tttttttttttactgacaaatatgaatagaatcatttattttaatttttaacagaggtaaaataaagcatacttatccaaagggataacacataatacnggatattaaccta

SEQ ID NO: 2255 - DNA, 399 bp, Homo sapien
  misc_feature (1)...(399): n = A,T,C or G
tgcagagtgtcaggccatgttttatggatgagtatgagaagactgaggaagaattacaaaagcagtatgacacttatctggagaaatttcaaaatctgacttatctggaacaacagcttgaagaccatcataggatggagcaagaaaggtttgaggaagctaaaaacactctctgcctgatacagaacaagctcaaggaggaagagaagcgccntgctcaagagtggaagtaaccgatgactcggacatagacatccaggaggacgatgaatccggacagtgagttggaagaaaggcggctgcccaaagccaccagacagccatggagatgcctcatgcaaggaagacctggcaaacgcattgtgggcacgatgccaggttggagactccgatgacaat

SEQ ID NO: 2256 - DNA, 403 bp, Homo sapien
ttcaactggatttcttttgacaatactgttggtacctattacttgggggaggacatgttgcggaagaccagatcatttttatacagaatgtgaaatactgatacagttattcttttttttaaagaacattgttttataaagaacggtgatttccagtgatctctggaagcgctaaagctaaaatttctgttcttgaaacactttcagctttgcaactaaaatattacagattaataataaattaaaccaaccaatgataaacactactcagtccaccaacaacaaactgtgtttgaattcaccttaccaatattaatcccagcgtgtgtaaaacagaacagtaactctatggtgaccccagataacattttgtaacattgtggcttccttgtagtttgtaatg

SEQ ID NO: 2257 - DNA, 377 bp, Homo sapien
  misc_feature (1)...(377): n = A,T,C or G
tcaactttataaagataaaatatcctcaggggtggagaagtgtcgttttcataacttgctgaatttcaggcattttgttctacatgaggactcatatatttaagccttttgtgtaataagaaagtataaagtcacttccagtgttggctgtgtgacagaatcttgtatttgggccaaggtgtttccatttctcaatcagtgcagtgatacaatgtactccagagggacaagggtggacccccctgaagtcaactggagcaagaaggaaggaaggcagactgatggcgattccctctcaccccgggactcctccccctttcaaggaaagtgaacctttaaagtaaaggccctcatctcctttattgcagnttcaaatc

SEQ ID NO: 2258 - DNA, 282 bp, Homo sapien
  misc_feature (1)...(282): n = A,T,C or G
agaactggtnaaatttttaaaaatgcgaaggaggggaaaagaaattaggaagttgaaaatgtttgttgattattttactaaaattcctggaaatcaagtaatatcattaaagcagatcaaaaaaacctgatagaagtacaaacatagtttacaaaaggttaacaactaaattataangatagccaatagaataaatatgtcacctttcacacatatcagangtatacttaaaacaaagggaagtacacngacaacataatgaaagactgttaagggaacata

SEQ ID NO: 2259 - DNA, 384 bp, Homo sapien
  misc_feature (1)...(384): n = A,T,C or G
tcacagagtagctgtgagttcttggtaatgtgaaaaaggccttgtttttcagaaattcctgggtttcctgttaaaaaatcttaaagcccaaccttaggaatatagtgccccaaaaggcggatncttcttccattatcttattttctttgatactttatttaattagatgtttataaagaaatgggtttatttttccagcataaacctcagaatttaaggaaagaaaatgatgtctgttgttatagttcattgttttgcctactcagcagaagtgatgactcttaaaaattggctttgaccanagttctcttgttttcaggganagaacataaaagctttttgaactacagcctttttaaaagagggatgggaggatattacagt

SEQ ID NO: 2260 - DNA, 422 bp, Homo sapien
  misc_feature (1)...(422): n = A,T,C or G
ttgagctgcaggacgtggaatgcgaggagaggccccggggaagcagctccaactgagggtgattaaaatctgaagcaaagaggccaaagattggaaaccccccacccccacctctttccagaactgcttgnagagaactggttggagttatggaaaagatgccctgtgccaggacagcagttcattgttactgtaaccgattgtattattttgttaaatatttctataaatatttaagagatgtacacatgtgtaatataggaaggaaggatgtaaagtggtatgatctggggcttctccactccctgcccccagaagttgttggaaggcccacagttggggcctcttccggtaattttggtgcatttggggctccgtgnccacaaacccaagcttcattaagtcttaaaatttcagcataa

SEQ ID NO: 2261 - DNA, 405 bp, Homo sapien
  misc_feature (1)...(405): n = A,T,C or G
aaggatcaacatagctagtaagttacagactcaaaacttggatgaatggtaagttctgtaccctttatatatcatgatgttacatcccagaagacccaagcctcacaaatctgtagaaattcggtttatccacttactaatcatatccttcttaatgctctgtctcacatatggagaatgtgcttttagagacatgagtaaagattctgcttggaggctcaagcactaaatgtgtattacatgcttgcttggtttctggaaccccttaaccacacagtatagttggagtggtgttgatactgggacctctgtaagtttgttgtgtgtagttttctgcagctttgcacctcctaagggccccaaangtctcagtngaaggttcatcntacatggnggtgggggaan

SEQ ID NO: 2262 - DNA, 359 bp, Homo sapien
  misc_feature (1)...(359): n = A,T,C or G
tcatntctagccatacaattgatgaattgtgtacaacntttgttagtaccaaaataatctgttatatgaacagaccttctaaaatnacgtctgtatatnttatatatagatacatatntganagaaggcttttattgaacagcttatcttccacttgcaaggtttatggaaacagcagtatttgaaaatatatanaaagtgggagaattccttgctgttagaagaatgtggccattattttgatnttttgaatgagatatntaatcnaagtactgctgaactgtgagtgcagtattctaaacatttcagctaggaataccactgatttaagaaacanaactgtttgtcnctggtttctg

SEQ ID NO: 2263 - DNA, 335 bp, Homo sapien
  misc_feature (1)...(335): n = A,T,C or G
tcggcagattatcagattagtaagtgtttaaaaggcatcagtttttaaaactgcatataccacacacacacaaaacagtacacaaataaaggttttcacaaattaaacaaactcacatactagtcttcagatcaaaacacagagcattatgtgtaccccagaagccctcctctttccccatcttaacactgtcttctttcttgctgaaagttactatcctgacttctaaaatcatagattagttttgcctgttttttattttantgtaaatgtaatcatacataatacactttttttcattccatcatttttgtgaatattttagtttcttggtt

SEQ ID NO: 2264 - DNA, 172 bp, Homo sapien
  misc_feature (1)...(172): n = A,T,C or G
aattcttaaccttatatgttgtgcttctgaccattttctcttttcctctcatttccttttttttttgtttgtttgtttgcaataaacataagttcttgtgtacagccttttatttggtttattttttaacattgtttttgtgtgctgccatttgtatcatgccaaccntgga

SEQ ID NO: 2265 - DNA, 328 bp, Homo sapien
  misc_feature (1)...(328): n = A,T,C or G
cgnctttcagagaataacaacttcctctgggaaggaaaaaggggccaggaaaagatacaaaggtggccttaattataactataaaaccacctttttcttttgtttttgagactatcataanatagcataaaaccttctttttaaagaagtanaaaaatcctgaagcaaatgtgtcaaaagttcaacatataccaaacctaggtgatggatacttggatgttatcaaacaggcttataaatatatatgttaatccatatatatttcatgtgtaaaattttcattaaaagaaagtgtatgtctagaaggggttccatggtagcacaacag

SEQ ID NO: 2266 - DNA, 408 bp, Homo sapien
  misc_feature (1)...(408): n = A,T,C or G
accactggggttccgttcgtgtccctaaacagctcccgggtcatgaggttgccgccagccgcggcaacgggccaaaatccccactcggtgaggttccggccccccacttgagctttctccaaactcatatacacgcttgatgtcgtacaccccggggctgatgtaaatcgcttggtttgactccccgctcggcaccgcgttgctccgggcgacttcgctaaccagcccagtttgggtgggactgggagctgtactgcccgtgcccactacagcgtactgggacggccccaacaagcccataggacggaatgagggcatcgtagaactggattgaggattaggttgtgttgctccccttcggcgctccggaacccaaacccgtccccttccccanggccaacccgggcg

SEQ ID NO: 2267 - DNA, 426 bp, Homo sapien
  misc_feature (1)...(426): n = A,T,C or G
aacactcaccgnaaggtccgtggcttcattcttgaagtcagtgagaccaagaacccaccggaaggaaccaattctggacacaatactatacaacaaaacnaggacaaagtaagaacaagtacaanacaatttcttttcagctattttaaaagcacatcatcacactttccaagactggtttccagacacagtacctgacaacctgattaggtaacttttacctgccaaaatcttcaaaccagtgcaacactttgcacatatttngttttcnagttacaccacatggnnggtcaatcaggtgattaanctactttgaagattanaaaccaaagatcacttagaaaaatatcacctttttttttattactactttaatccaagtgaatgtcactttaaattcatttgagagaaattctaatcaatata

SEQ ID NO: 2268 - DNA, 100 bp, Homo sapien
ttcagtatttattggtcttagggtattctcgggaaggtgacagtgaggggctcttcaaaggagaacaccctaagaccaataaatacttcagtatttcaaa

SEQ ID NO: 2269 - DNA, 424 bp, Homo sapien
ttttaggaaagaagggaatttattgctgtaaccagatacaggcagaaggctggagataattccaccaggccaacttaaagtgttaacaattgtcttagtgtttatataggttgggattatgcgcctgtgtgcagtgtagcattcgcctaagtctactggtaactaattttgtttcaactagaaggtcagaggcaaaaatgctttctaagtcggattaagctgtgagcggcccagtacctacaaggcctgtctgctgtggtaccagagtgattatttctatcttatctgctttacagcttggtccggagagctgccttagactctccaatgaatctattcgaacagctgcctctgttaccttgactgtctcagatttcggttgacccgagacgggtccctgggcactagggaatgaaaagactgg

SEQ ID NO: 2270 - DNA, 477 bp, Homo sapien
  misc_feature (1)...(477): n = A,T,C or G
tttaaaattatttttattacttttagactttttctcaaaataattattcaaggaaatatttcttaagtggcccaataaaactgtagagccaatagtcagttacaccatattcaaggacaaggatagtcagctatagataggaactgtctaaaccacgagaactgatctctgatactgaagtacccagaagtggctatattatcactgacttgaaacagatcttagtcacccatgtagcatttaattcaatgtttggttctttgcctcatttctttcttaggtcacaatctatagtctttatagaatttgtctacatttcttctaatagaattaatttgggttgtaggtaacttttggaaaataaatgtaaatgggtgaaatcggccatgtgggtttggtgcattttaatgggtgggagagggtccngggaagaaggagggggagaccactatcngggaccggataggataaaaatgg

SEQ ID NO: 2271 - DNA, 464 bp, Homo sapien
  misc_feature (1)...(464): n = A,T,C or G
tttttttttttttttatcatgaaatagtattgcatttattttaaactgatggtccccaacttacttaaaaatcgtagaggcttaacggtttttcagctttacaacagtgcacaagtgatatgcattcagtagaaattatactttgagtacccatacaatcattgtttttcactttcacaacagtattcagtaaataacatgagctattcaacacttcattataaaataggctttgtgttaaatggttttgcccaactgcaggctaaatgttctgagaacatttaaggtaggcttggctaagttatgatttcaggtaagagatattaaatgcattttcaatatgatattttcaaattataatgggtttactgggacctacccacatcataagttgaggagcgtcngtatttaatatggggaaattatttttaattttcccgaacaancggaaaagggtccccatt

SEQ ID NO: 2272 - DNA, 458 bp, Homo sapien
  misc_feature (1)...(458): n = A,T,C or G
atagtagaatattttaatgcttcactttctgtaataaagattttaaaaagacaaaatattggtaaagaaaccggacttgaagggagtataaaacaattattaataacagaggcataaagaacactcaacaacataatgataaacagccttctcaatacctcatacgaaattctccttgatagaaaacctggtaaaccaaaaaagaagtcttaacaaattatttaaaactaaatttttatggattactttctatgaccaaaatgaaatgagtatagaacagtaagaagaaaaaactgaaaaattcacaaatacatagaaattaaaacaatacactcttgagcatgcttgttgaaatgttaaaataattaatcttgtgaagatgtccatcctgctcaatggtgatttacagatttaatggcnatggttggtccaatttcncatggcatttttggaggaaa

SEQ ID NO: 2273 - DNA, 417 bp, Homo sapien
caaaccaaaaacaatctttattttcacatagttgaattaagtatttctggggccagtgtgggggaaagatggtatggaatgggagaatccatccttcctgcaagaggagaaagccagggactactctgtctatatttttacaaggaaattcttcctttgtttctagtaaacaaactcagaggcactgatgttgggctggaacaaggactttctggtggggagggcagctggactgcatagacttgaggttccatttttgaggttcaccttgccttggggtctgtccttggttaccaccactgatgtctaccatgctggactttggagaactttgcttccacttcagcacaccttggtaccttcagtcaagcttttattaaagacttaaggtagagccaggctgtggtgagattagga

SEQ ID NO: 2274 - DNA, 437 bp, Homo sapien
  misc_feature (1)...(437): n = A,T,C or G
ttttttagaatttatgtttttatatttttccacaaatatcattatcacttctgtaattttcagtgtggtcatcattaactcaatacagtcattcattttattgacttgtgatttttctggtgtcatttggaactttatatgattcctgaagaaattccatttttagtcaaaataatcttctatatcaatatttggatctagcagatcttctccatatgatgaaagattcatttggtttaagattaggttttcaaatgtttcttctaaatcggtttcaccaattaagacagctcccatcattcgtccattttgcatgacgactttgatgtattctcgtcctttggtacatctcagcattaattcatgatctgaacctaagccctgtgcattgtattttcccagcaggtacaacccttataggttaaaaaattttggng

SEQ ID NO: 2275 - DNA, 414 bp, Homo sapien
  misc_feature (1)...(414): n = A,T,C or G
catttaagacagttttaatgtaattctaaaagtactccaatattgttaacctgtggttttatacttacctagtttgtacatttacttaagtttgctcatttagtctaatgctggaattaatctgaattcaatttaatttggcttttcccatatataagatataaaaatgtgaaaatcataggaattatatgtcttacaaagtattgcacttgagttcactgcaataatgtatcatgatttcatttacctgaggacaatcctgattcactaggtaagaccagctatatcatgcttcagagaaatcaaatgcttttgaaaatatatttatgttttaatttagaattacacattttgtgaataattcnttaaatgcatctcctaaacttggtttaggtcccaagaagtttcnaccca

SEQ ID NO: 2276 - DNA, 371 bp, Homo sapien
  misc_feature (1)...(371): n = A,T,C or G
tcagccaatcacaaaaaacagactttattgaagtatttagcactaaaccccacacaattccagctctgtagctgaggacacagccacttggcaatggcaccaggtgttatacaagaccaataagttaatgtaaaggacgcttaggtgtggagggccagtgctcagccgtctcctggctcagaacaaggcactctgggctccagttaggacactgagaggccagggaaaccaacatgccctggagaaaggggcttagagacaaaccggaaaagcacagcatccaagcagggtattcacgcatggggggcagagtaggcccaaaagttgggggttgcctgatgcggtaagagcacagttgagagnaattncca

SEQ ID NO: 2277 - DNA, 428 bp, Homo sapien
  misc_feature (1)...(428): n = A,T,C or G
aataatagagacangtctttcattccatagtgccaggacccgtctcggnaaacgaaatctgagacagtcaaggtaacagaggcagctgttcgaatagattcattggagagtctaaggcagctctccggaccaagctgtaaancagataagatagaaataatcactctggtaccacagcagacaggccttgtaggtactgggccgctcacagcttaatcccgacttagaaagcatttttgcctctgaccttctagttgaaacaaaattaagttaccagtagacttaggcgaatntacactgcacacaggcgcataatcccaacctatataaacactaagacaattgttaacactttaagttggcctggtggaattatctccagccttctgcctgtatctggttacagcaataaattcccttctttccta

SEQ ID NO: 2278 - DNA, 443 bp, Homo sapien
ctttatgcatcatctaaagcagctgctgaaatgttttgtacagtcttactgggaacaatataagtttccagttgtcatcacaagaagcagtaatgtttatggaccacatcaatatccagaaaaggttattccaaaatttatatctttgctacagcacaacaggaaatgttgcattcatgggtcagggcttcaaacaagaaacttcctttatgctactgatgttgtagaagcatttctcactgtcctcaaaaaagggaaaccaggtgaaatttataacatcggaaccaattttgaaatgtcagttgtccagcttgccaaagaactaatacaactgatcaaagagaccaattcagagtctgaaatggaaaattgggttgattatgtaatgatagacccaccaatgacatgagatacccaatgaagtcagaaaaaatacatggctt

SEQ ID NO: 2279 - DNA, 456 bp, Homo sapien
  misc_feature (1)...(456): n = A,T,C or G
aaaaacattaacccaagatgtagaggctactgctagtcgtcattcctagaatctgatattttactctgtatttgaaatgaatgattaatgtcctaggaaattagctttanaagatgtccaggtgccacatcaaaaaagtgcaataattattgacagttttttagattaggcatattattggaaaacaactttataaagagtgaacattgtatactcctagtaaaacagcatcactttaaaaatattcatttatgaaatcctgttaccctataagttgaagtcctgaagtagtgaaccaagggactcctaattnccaatactccttaaatatcnggctaatttaagatcccctaaaagggcataattantgggaaatttaggnaattcccntaagcntgtatataatattgccaccaggaaaggtaaatttgaagattangggacctacctcctgcc

SEQ ID NO: 2280 - DNA, 436 bp, Homo sapien
  misc_feature (1)...(436): n = A,T,C or G
ggcacgaggagagccggaaagatggtggttaccagatctgcacgggctaaggcagcatccaagccgcgtcgntgaaagttccgggcaaaagagttttgctgctaatgggattcaagcgcatccagaaagtagtactggatctgatgcccgaactactgctgaatcacagaccactgggaagcaaagtttaatccctagaactcctaaagctagaaagaggaagagcagaactacaggctcactaccaaaggggactgaaccatctacggatggagagacctctgaggcagagtcaaattattctgtgtctgagcactatgataccattttaagggtaactaggagaaggcagatcttaattgcatgctccccagtgtccagtgttaggaaaaagccgaaagtaactccaacaaaggagtcttacactgaagaaata

SEQ ID NO: 2281 - DNA, 441 bp, Homo sapien
  misc_feature (1)...(441): n = A,T,C or G
tctttctaaaatggaacttgttaaaaagtgttcaaacactatccctaatgcctgcgnaganatttatatacgatccattcattggggctcaaagtatcttttagacttttaaggacaatttacagcaaatgaaatttatgatgctgtgacaagaaatttaaagaatcaaaacgatggtttgaaaaggaaacctatgatacatgcaggagaagcaaaacccaagtgatttgtgagaaatatagaaattatttaaattactttatagtaattattaaacactaatttttgtactgtcattgaaggtgttttatagagaaatctgagaaatcacattcacaaattagaagtcaaacatggccaggcacagtggctcacacctgtaatcttcaggatttcaagaccagcctagccaacatgacgaaaccccatctctactgaaaa

SEQ ID NO: 2282 - DNA, 341 bp, Homo sapien
aacaattaagcaataccaacaagatggcttcccagagactgaacttcgtacatttatatcagaatgcaaagatctacccaactctggaaaatacagattagaagatgaccctccagtatctttattctgctgttgtaaaaagtagctatcaggtttatctgtactttagaggaaaatataatgtgtagctgagttggaacacctgtggatattctgagatcagatgtagtatgtttgaagactgttattttgagctaattgagacctataattcaccaataacctgtttatatttttaaaagccatatttaatgtctttgcaactttatgctgggattgtt

SEQ ID NO: 2283 - DNA, 446 bp, Homo sapien
tcatccttcccatcatgttttccagcctttataggatttcaaaagaacattggaatccggctattgtggcgttggtgtacaatgtgttgaaggcatttatggaaatgaacagcaccatgtttgacgagctgacagccacatacaagtcagatcgtcagcgtgagaaaaagaaagaaaaggagccgtgaagaattgtggaaaaaattggaggatctggagttaaagagaggtcttagaccgtgatggaataattccaacttaacaaaaacaatgacaacaacattactaaccctgtggaagtcacaccgtttatgtagtaagaagatggagcaacagttttctgtattgtgcaactttacagtagatttcaccttgtttcattattacagcagcactgtatatacctgtctctaagtaaggaaaaaccaaataggacttccatccaa

SEQ ID NO: 2284 - DNA, 442 bp, Homo sapien
  misc_feature (1)...(442): n = A,T,C or G
tagggatgtggccatagaattctctctggaggagtggcaatgctggacactgcacaacggaatttatataggaaagtgatgtttgagaactacagaaacctggtcttcctgggtattgctgtctctaagcctcaccntgataacctgtttggagcaaggaaaagagccctggaataggaagagacaggagatggtagccaaacccccagagtcttactgtgttgctcaggctgatcttgaactcctggtctcaagttatcttacctgccttgncctccctaaagatgtgggattacagaaataatccactttgccaggctactatgtancctttcatgtagaactgtgctagtcataatgaatcataacactgtcaccttttattttgaaaagtccttatttttatctgttttttaaagtacactaatcttgaatcaagtat

SEQ ID NO: 2285 - DNA, 442 bp, Homo sapien
  misc_feature (1)...(442): n = A,T,C or G
ggcacgagctggnttgattccggcattcctgggtcttcctacacttgctccgtaatgagaattcagagaagcagccagaaggagacttaaacatggaaagatactccactgatgagtttagaagtgattagggcaagctagttgacctgcactttatcaaaggttggggttaaaggaaggtggttttgagaactatgtgtttggtctatttccaaaaacctgagggggagaaaatactttgcttttgccttaacacatcatctggtcacgttagaaaagtgaccccatcaaactgagcctttgatgtcacattctgacacaagatgcaagtctgtgcaaaacccaccaaaatgctcctatccaacaattatttttattttctccctgctctgtattgaccagaaaacaatgattttataatatttaacccaccaaaaagtcc

SEQ ID NO: 2286 - DNA, 406 bp, Homo sapien
  misc_feature (1)...(406): n = A,T,C or G
acaagcacctcggnngancaatgtgagtgaccctacttcaggactggatttccaactcacttcccctgaagtttcccagactgataaaggaaaaacagaaaagagggaaacactaagccagatttcagatgatctgcttatacccggtcttgggcggcattcatcgacttttgttccttgggagaaagaagggaaagaagccaaagagacttcagaagatattggactgctccatgaagtagtgtcattatgtcatatgacatctgacttccaacaaagcttgaacatttcagacaaaaacacaaatggaaaccaaacttaaatcttgcatccaagcttctatggagacattttgagattcaatgcaatctgtataataaacngaattgtttgtaggaatgggcaa

SEQ ID NO: 2287 - DNA, 410 bp, Homo sapien
tttgctgagaaagaatgagggaaggagttggcatttgttgaaagtatagtctttttctcttttttttttaattgcaacttttactttagatttaggaggtcgtgcgcaggtttgttacatgggtatattgtgtgatgctgagcttgggatgcgaatgatcctgtcacccaggtagtgagtatagcacccagtgaaactgtagtctcatgccaggcactgtgctagcccactctggctcatttaatcctctcctaagaagagaggagacacagcgtccccatttgacagatgcagaaagaggttcccacaggtgtgccttgattctgtcctaaaaccgtttcccggaagcttttcctggtgtgggcgcttctaacctaatcctcaatcgattccagaactattactctgtt

SEQ ID NO: 2288 - DNA, 402 bp, Homo sapien
gagagtaggtgaaaagatgaacaacatgaccgggaagatttcctaatctcaccacagcctggctctaccttaagtctttaataaaagcttgactgaaggtaccaaggtgtgctgaagtggaagcaaagttctccaaagtccagcatggtagacatcagtggtggtaacaaggacagaccccaaggcaaggtgaacctcaaaaatggaacctcaagtctatgcagtccagctgccctccccaccagaaagtccttgttccagcccaacatcagtgcctctgaagtttgtttactagaaacaaaggaagaatttccttgtaaaaatatagacagagtagtccctggctttctcctcttgcaggaaggatggattctcccattccataccatctttcccccgcac

SEQ ID NO: 2289 - DNA, 335 bp, Homo sapien
  misc_feature (1)...(335): n = A,T,C or G
ggtccataatgaaataaaaattttgtatactgttaattctgtaaacagatgcatgttcaaaagatctatgatggtcttgtaatcttaatctaatatatttnagatattttaattttttccctcttggggaacacatttngtatagtgtagaaaatncntccatgacattttcatataaggttatataacttttcatacataaacatgaaatttgttgtagaaaattctttaaaccaaacatttaaatctanggacttcaatttaatttgttccttgaatctatttttntgtggcccttaaaaaatatccaaaagacccattgctaatatngcaat

SEQ ID NO: 2290 - DNA, 411 bp, Homo sapien
aaaaatcagaggctaaaattgcacataaaagaaccagatatacaactgaaggaaggaaaaaggaagctagaagcaaatctaaagcagataatgtaggaagtgcattgggaccagattggcatgaaggcttgaatcttaaaggaacaaaagagcaatactcacagcatcctcaccagaagtaaactccatctcagataactacgttctttgctcatccatgagaaacaacaactcatcttttcaaattttatcatgagattgcagcaatgtagtctcatcttcaggattcatttctaattacagttcttttgttatttccaccatatctgcctttctccattgaaatcttgaatccctcaaagtcatccatgaagttttctcataagattcaccttgaaactatgtgtgaag

SEQ ID NO: 2291 - DNA, 411 bp, Homo sapien
  misc_feature (1)...(411): n = A,T,C or G
gagagtctcactttggaatcagaattggaatcacattctgtttatcaagccataatgtaaggacagaataatacaatattaagtccaaatccaacctcctgtcagtggagcagttatgttttatactctacagattttacaaataatgaggctgttccttgaaaatgtgttgttgctgtgtcctggaggagacatgagttccgagatgacccaatctgcctttgaatctggaggaaataggcagaaacaaaatgactgtagaacttattctctgtaggccaaatttcatttcagccacttctgcaggatccctactgccaacctggaatggagacttttatctacttctctctctctgaagatgtcaaatcgtggtttagatcaaatatatttcaagctatnagagcngga

SEQ ID NO: 2292 - DNA, 412 bp, Homo sapien
ggcacgagaaaaggacagaggctgttccctatggcagaaggcaaccacagaaaaaagccacttaaggtgttggaatccctgggcaaagatttcctcactggtgttttggataacttggtggaacaaaatgtactgaactggaaggaagaggaaaaaaagaaatattacgatgctaaaacctgaagacaaagttcgggtcatggcagactctatgcaagagaagcaacgtatggcaggacaaatgcttcttcaaaccttttttaacatagaccaaatatcccccaataaaaaagctcatccgaatatggaggctggaccacctgagtcaggagaatctacagatgccctcaagctttgtcctcatgaagaattcctgagactatgtaaagaaagagctgaagagatctatccc

SEQ ID NO: 2293 - DNA, 410 bp, Homo sapien
  misc_feature (1)...(410): n = A,T,C or G
gaaaagagagattagatcttaaggcacttgatggcctccaaaaatcctgactttggaacatcaaatgcatatgtgcacttttatctttgttctgagtcactgcagtccccaaagtcatatgccaatgttcacactgaaatacatgtattgtacaccaaactggaaggcaattttcctatgaaaatcaaagccggtatattcattggtatgctctatacagatatcttaataaaaattttatagtgtgaacagtgcacagagttaaggcataaaaatgtatcattctttataaaaatctactgaaaatgtgtaatcattgaagacagttcttttaagcatgattttaaaatagcaactgaaattcaatcattttaaacanatgatgggtaggtatccattagttatggccn

SEQ ID NO: 2294 - DNA, 414 bp, Homo sapien
gacaaacctaaatatcagatagaaagtccttgtatcatttctatttgaaaattgaagattttattgcctcttttcttatgtactgcaccatcttacatcagaggaccagggcttgttttgacagggattattataattgcagcataatttgtattagacccatgtaacaagcctgtctacttcatggaaattgcagtgggttgcccagtcattccagttaatcagacactcatcgtgtgggaagcccggcattgagtttggtgctttgatgcaccgtctgagacagtgtgatgtggttaagcataggaattgtgagcctctgagtggataaccttacctatctctcatttacaggtatgtgaaacaagaagttctgggtcctttcatcataagggagaagcttcagaaagttcc

SEQ ID NO: 2295 - DNA, 410 bp, Homo sapien
agggacattcatcaaagggccaatgatgaccttgcagatgctgggctagaaaaactccatcttagcttttatctgactagtatctatgaccattcaatatttgaagcctttagtaaggtggtgcagaaactcattccacaactgccgaccttggaaaacctattaaatatctttatatcaaattcaggtattgaaaaagcttttctctttgatgttgtcagcaaaatctacattgcaacagacagttcccctgtggatatgcaatcttatgaactttgctgtgacatgatccgatgttgtaattgatgtgtcttgtatatatgggttaaaggaagatggaagtggaagtgcttatgacaaagaatctatggcaattatcaagctgaataaatacaactgtcctttattta

SEQ ID NO: 2296 - DNA, 276 bp, Homo sapien
  misc_feature (1)...(276): n = A,T,C or G
ncaccttggtatagagattncaacataggaattagaggggaatacatacatccagacttattgcagatgggattatgtaatactttgtncctgtttggcttatttcttagcacaanatctnnctggtatgtgcatgtttctgcaaatggcaagattttcttcctttttaaggctgagtaataattcattgcatgtatagaccacatttnctttatgcattcattattagtgagagttcttattacaaatggcgaagtggtttttaatattgattta

SEQ ID NO: 2297 - DNA, 416 bp, Homo sapien
  misc_feature (1)...(416): n = A,T,C or G
tctacttggaaagaaaacgatgtagccgattgcacaagggtncaagggaagacccaggatggcccatcaaaggaacctgggggaggatgcaggaggctgaagggatgcacctggcatttctctcacatgtgcatcttaccgcatcagcaacccccaactttttgggcctactctgccccccatgcgtgaataccctgcttggatgctgtgcttttccggtttgtctctaagcccctttctccagggcatgttggtttccctggcctctcagtgtcctaactggagcccagagtgccttgttctgagccaggagacggctgagcactggccctccacacctaaagcgtcctttacattaacttattggtcttgtataacacctggtgccattgccaagtggctgtgtcctcagctac

SEQ ID NO: 2298 - DNA, 325 bp, Homo sapien
  misc_feature (1)...(325): n = A,T,C or G
tcaccttgggatatagatttcaacataggaattagaggggaatacatacatccagactattgcagatgggattatgtaatactttgttcctgtttggcttatttcttagcacaatatctttctggtatgtgcatgtttctgcaaatggcaagattttcttcctttttaaggctgagtaataattcattgcatgtatagaccacattttctttatgcattcattattagtgagagttcttattacaaatggcgaagtggtttttaatattgatttaatttttgttattaaaaacgtttttngagtggttnggttccttttttngga

SEQ ID NO: 2299 - DNA, 527 bp, Homo sapien
  misc_feature (1)...(527): n = A,T,C or G
tggttaagacgganttgcntctgtcgcccaggctgcagtgngtctcagctcataccattgtcctgcctcagcctccacattcttaaccattatgctggagacagttcttgtcctttccaactgttgtttatgttcctgaataaatttgagaaacattttgcacagctctggggttaaaaagaaaaattagcattctgattggaattggcatgtatatatacataattacttcaggaggaaataacactttcaccagttttctaactcaaagagtttataattaagcttaattaagcatactgtttcccccctgctatagtgggacttaaggatggtgatcatgtcctgtccatactgcagggagtggtcaacaaaggctggtttaatgaacagtctctaccctcaactaagcccctgcttcattaagtgaacccataaaaatacctgtgggtccttgtggtcaaccataccacccactctcccgacactactctgctctcaagggccctgacctcgtggccgaatcc

SEQ ID NO: 2300 - DNA, 479 bp, Homo sapien
  misc_feature (1)...(479): n = A,T,C or G
tttttttttttttttttttcatctctgtttctttataaactggagcgtgaaaggaggagggggacaaataagataaagccatgagctaaacacccagcaggccctactccttattctctgtgtgggtggcagcattagtcagaaagtcactcctctgctgtgatggtcatgacatatttgaacttgtagatctttaaggatttccttatttattctgccaggtctatggtaggtgcttgtttgttttcttggtggaatgattcatcaatgcttcctgagaggctcaaacaggatcactggccagattccaaagagaaacttcacttttggcctatatctcaggtaaagtgttcntgtatacaaactgaaaaggatgtgaagataggaaccaaggccagttaaaatatgccaccatgcatgaaattgtgtggtaataccnatgataggtgggtaccctctttcgnaagttccccagtgac

SEQ ID NO: 2301 - DNA, 524 bp, Homo sapien
  misc_feature (1)...(524): n = A,T,C or G
ttgtaggaaatgtatatttaatcattctcttgaacgatcagaactctaaaatcagttttctataacaacatgtaatacagtcaccgtggctccaaggtccaggaaggcagtggttaacacatgaagagtgtgggaagggggctggaaacaaagtattcttttccttcaaagcttcattcctcaaggcctcaattcaagcagtcattgtccttgctttcaaaagtctgtgtgtgcttcatggaaggtatatgtttgttgccttaatttgaattgtggccaggaagggtctggagatctaaattcagagtaagaaaacctgagctagaactcaggcatttctcttacagaacttggcttgcagggtagaatgaagggaaagaaactttagaagctcaacaagctgaagataatcccatcaggcatttcccataggccttgtcaactctgttcactgagagatgttatcctggtgcccgatagagttctgggctctctgtgctgangcagcagccnaagagacagaa

SEQ ID NO: 2302 - DNA, 379 bp, Homo sapien
  misc_feature (1)...(379): n = A,T,C or G
tcatttgaagttgaattatttcattaacatgtaaactcacatgtacaattttactttttgtcatatatttaaatattttcttatctgcagagctatctcaggatatgaaatcntaacatgctagcaactagtaatttaacattaaaacacttccctaaattattccatggaaaagtgcatttacaatataaacatgtcatatatgaagctacaaatcataatctcactggagtggatataaaatttcaaattcagtccaaatgagtcaaagaaaaaagtgctaacagagcaaatctggaaacaagttcatggggattgggtaatgagtcatcgaaacgaaatcttttgggaaacccatgctgctatcctctggggatat

SEQ ID NO: 2303 - DNA, 416 bp, Homo sapien
ttactgagtgaagaaacacacaaattttatttagaaaatgaatgaccatgtttgcaataaactcccaaaatatccgccataagatggccataatattctgatgatcaaggagcacacatatacaaaagttattggattactgcaattctcagaggcacaaaacctgacatggtgtgatatagtatataatcagtcacgggggggaaaagaacattaagtctttaaaaaggcttaggaagacataaacagtaaatctttgtttttctaccttcctttggacagtgttatatttcactttcttctttgcaaaatgtttccaaattcatttgctcaggatttatttaagataataacttaaaaccactaacagttggtttatgctatatgcatatcatgcatggttcctactgggttcc

SEQ ID NO: 2304 - DNA, 386 bp, Homo sapien
ttttttgagacagagtctcactctgtcgcccaggctggagtgcagtggcatgctgatggcccactgcagcctcaacctcctgggcccaagcgatcctcccacctcagtctcccaagcagctggaactacaggcatgtgccaccaggcctgactgatttttaaattttttttgtagagatggggttttgccatgttacccagactggtctcaaatgcctgggctcaagtgatctgccagcgtcggcctcccaaagtgctgtgatgacaggcatgagccactgtgccaggcctgtatttgagacttcgtttgaaactttagaaggtggttaatatctctaaaggctccatatgtgcttgaggaaaaaaaaaaaaacctagtcgttcgg

SEQ ID NO: 2305 - DNA, 146 bp, Homo sapien
  misc_feature (1)...(146): n = A,T,C or G
tttttttttttttttttttttttttttttttttttttttttcanatncccaaatcattnaananatcttttcattccccaaaaaattaaaaggaaaaacaaaattagaagaatgcaattacttttnctttacaaacctanatattt

SEQ ID NO: 2306 - DNA, 389 bp, Homo sapien
ttttgagacagggtctcttgctctgtcacctagcctggagcacagtgacacaatcttggctcattgcaacctccacctcccaggctcaagtgatcctcccacctcagcctcccaagctgggactacaggcatgcgccaccgtgcccagccaattttattttttgtagagacaatgtctcactatgttgcccaggctggtctctaacccctgggttcatgtgatcctcccacctaagcctcccaaagtattgaaattacaggcatgagccatcatgctgggctaaaatatcttctcttttgtttgctgatccacagcgttggttttatttcttattagtttatattacgtggtgtcagaagtgggatacagagcagttccctcttctcgt

SEQ ID NO: 2307 - DNA, 248 bp, Homo sapien
  misc_feature (1)...(248): n = A,T,C or G
ttttttgagcaccaccacgcctgagtaattttttattttgtgcagagacaggatccagaactcctgggctcaagtgatcctcccactttggtctcccaatgtgctagaattanagccctgagccacggccccatgacccgtttttaccagtgtatattttctactggaaaatgagacttttagggatgaatgtggacttgtctgttgaaacttgtaaatttgcttaaaaaaaaaaaangatctccaag

SEQ ID NO: 2308 - DNA, 594 bp, Homo sapien
  misc_feature (1)...(594): n = A,T,C or G
gagattggggctgccatgagccatggtcttggcactgtactccaacctgggtaacagggcaagaccctatctcaaaaaaaaaaaaaagtcgccagcaacaagcacgtagttagtgttcctgctaaatgagcataggttatccaaaccttgggaacagggagttatggaaacgtgcctatgacttcatcttggggtgtgtcctatgaagatcctttctggtctccacagtaggccagagttgggggctctggagctgtttccccaagtgcatccacaagctggatctgagttttgtcactctaaaattaaacaagaaaaaaagtgggaaaagggcatcccccattaggtttcaatactttgcacttctactaagcttgatagggcaggagtgcaatctacaattattttaaagtgaatttcctccattcaccattcttaatcttttctttgaataagaaaaagtatctagcaaggatattactgtgcctgaggctagcaattataggatagattctctaaaatatgtatctgcttttggttttttttcntagtgaataataccagtcttcaagaaaccaggtgaagacctatggc

SEQ ID NO: 2309 - DNA, 598 bp, Homo sapien
  misc_feature (1)...(598): n = A,T,C or G
tttagtttagattgtcaatttaatgttgaacaaagttgcttgaaattttcagatgaaataactttaggtaagcttaagaaaagtttgattgcattttgtttataatcttgtacttctattttcattctgatttagtaggctgcacactttttaaaaaaaaatttcaggtggattgtggccattccttttcctcttaagtcttatttgattgttcttccagaacaaatattaacatttgcagtcctgcatctggatcaagcagtttggttagagaaatttaaacctttaaatcacaaaacagctcattttcaattgtcatagctgacactgaatctatgcctaatggtgtaagcaatgtggatattggaatgtctctgagtttttatattaataaatttactagctaaataagtgatgtaatctctgtcgatgtcgagatgaagagtgagtaaaaacccntaaaagtctcctaaaactaaactatctggaattcttggnaaaataattctgtgagatgggacttggaaagttttccggaattcctgnaatcaattaacagtgcatgaagtctgacatccgcatcnccttcgtanaaaac

SEQ ID NO: 2310 - DNA, 603 bp, Homo sapien
  misc_feature (1)...(603): n = A,T,C or G
tagatggagtctcacttggtcatctaagctggaatgcagtggtgcagtgctggctcactcagcaacctcggcctctgggtaagcaattgtcctgcctcagccgcccgagtaactaggataacgggtgcccaccaccacacacagctaattttgtatttttagtagagacagggtttcaccatgttagccaggctggtcttgatttcctgaccttgtgatctgcctgcctcagccttccaaagtgctgggattacaggcgtgaacctccgggaccggcctagtctttattcttaggatttttttttagagatgaggtttcacaatgttgcccatgctagtatcaaactcccaggctccagcgattctcccacctcagcctcccaagtatctgggactacaggtgcaggccaccatgccaagcaaagtgatgttactcttacccacagaggccaggttcatgtagttctccagcatcaaatctctgtagaggtatttcgagttgtgtccagtaaagccactcctctggggtgaactccacagncacatcatcaaagtcangaatcnaagtcatcaacacagcnggttgagccatgaaattcncca

SEQ ID NO: 2311 - DNA, 298 bp, Homo sapien
  misc_feature (1)...(298): n = A,T,C or G
ttttttgaatagactttaattgagagcaaagtgaaaaatgcaggttacaattttaagtgttatcatcaatatcttgtaagatcaacacccagtgatgcatctagtacttatacagtcctaattttagttgtcaaagagcaaatcattatcagacatatatttacacagtaatttcaagcaacggtaaataataaattccctcccttaaaaaacnaaacncnacacaacacacacacacacacacacacacacacacacacgaccatctttaaacaatggatttcctcncccagtaagt

SEQ ID NO: 2312 - DNA, 279 bp, Homo sapien
  misc_feature (1)...(279): n = A,T,C or G
cataatccacacaaaataaaaagctgtgaggttttgtttaatccttttgatgacatnattccaagggaaattaaaaggctgaaaaaagagaaaccagaggaggaagtaaagaaattgaaacccaaaggcacaaaaaattttagtttactttcatttggagaggaagctgaggaagaagaggaggaagtaaatcgagttagtcagagcatgangggcaaaagcannagtagtcatgacttgcttaaggatgatccacatctcagttcctgttccagttgt

SEQ ID NO: 2313 - DNA, 355 bp, Homo sapien
tcctcaagcacatatggagcctttagagatattaaccaccttctaaagtttcaaacgaagtctcaaatacaggcctggcacagtggctcatgcctgtcatcacagcactttgggaggccgacgctggcagatcacttgagcccaggcatttgagaccagtctgggtaacatggcaaaaccccatctctacaaaaaaaatttaaaaatcagtcaggcctggtggcacatgcctgtagttccagctgcttgggagactgaggtgggaggatcgcttgggcccaggaggttgaggctgcagtgggccatcagcatgccactgcactccagcctgggcgaacagagtgagactctgtta

SEQ ID NO: 2314 - DNA, 403 bp, Homo sapien
  misc_feature (1)...(403): n = A,T,C or G
acatctgcccctttggtgtttctacttgcttatgattgagattttacnagcccttcaaactccgttttaaaggaatttattgtaaaacattaactttaataaattagtgttttcacagatcagatcattatacttggaacttctaaatcatgcaatttctgaataaggacataaggctagattcatttttcttaatagagaaaaaggaaatttctgatttatcacttttctagttgataagtaggattcaaaacgtttgatatgtaagtntttagtatagagactaatggtantgtaaagttctggtattattggtgattaatccattacaggaanttcaggaactgatcagaagtgagattctttttccacatctggttaatgtagtgaagttgaccacccc

SEQ ID NO: 2315 - DNA, 413 bp, Homo sapien
  misc_feature (1)...(413): n = A,T,C or G
agagggaacctgctctgtatcccacttctgacaccacgtaatataaactaataagaaataaaaccaacgctgtggatcagcaaacaaaagagaagatattttagcccagcatgatggctcatgcntgtantttcaatactttgggaggcttaggtgggaggatcacatgaacccangggttagagaccagcctgggcaacatagtgagacattgncntctacaaaaaataaaattggctgggcacggtgggcgcatgctggtaagtcccagctttggggaggctgaggtgggaggatcactttgatcctggggaggtnggaaggttngcaaattgaagccaangatttgtgtcacttgttgctcccagggctanggttgaccagaggcaaagagtanccctggtcctcaaaaa

SEQ ID NO: 2316 - DNA, 393 bp, Homo sapien
  misc_feature (1)...(393): n = A,T,C or G
tgaatcatgctggattttgaagaattcttaagaagccatgtaaagggggctctctggccttgaaatagtgatgttttttatacagaaaggagaatgcagaatggtcagactatcatgcactgttaaatttgatttcaagaaattacaggaaaactttccaaagttccatctcacagaaattatttttacaaagaattccaagataagtttagttttatggaagacttttatgtggtttttactcactcttcatctcagacatccgacagatgattacatcacttatttagctagtaaatttattaatataaaaactcagagacattccantatccaccattgcttacaccattaggcatagattcagtgtcagctatgacaattgaaaatgng

SEQ ID NO: 2317 - DNA, 385 bp, Homo sapien
tgtcgtttacaggggggtatcacggtcgaacgttattgacgatgtcgctgacaagcaaagtcatgccatataaaaaaggatttggtccgtttgctcctgaagtgtataaatttccgtatccatactattaccgtgcaaacgagcaaactatagatgaagtagataaccaactcattgaatcattgaaacagtttttcgttgcggaagtagcccctgatcacggtagcagcaatcaaaattgaaccagtacaaggagaagggggatttgtccgttccgtcggcgaaatttatgcaagccgattccgtcgcatttgtgatgaatacggcatcgtccatgattgctgatgaaattcaaacaggttttgcgcgaacaggacgcctgttt

SEQ ID NO: 2318 - DNA, 223 bp, Homo sapien
  misc_feature (1)...(223): n = A,T,C or G
agaaacctgcagcagagataatggtgaaagtttaggcacattttcactaaaagtgggaacagaaaatggaggcctgttttttattgctaccaccatagatctggagatcttcgccagtaacaagaaaaattaagttgtaaatattggaaaggaacagacaaaaatagatgacatggtcatctacaactaatattaagactccctgtggtattgattgagcnga

SEQ ID NO: 2319 - DNA, 374 bp, Homo sapien
ctgtttaaggcatatgctgtaggaggtcaaccttgattgtttagacacaagagctcctgagacattaaaccctggagtagatcatgggagacttgagaaccacgtataagtgagtataaggttcccctttcctcattctccagtgaatattggtggaagtgttcattggctcaaaccagcatgtgtttgatgacttaggattcagtgacgtttgatgatgtggctgtggagttcaccccagaggagtgggctttactggacacaactcagaaatacctctacagagatgtgatgctggagaactacatgaacctggcctctgtgggtaagagtaacatcactttgcttggcatggtggcctgcacctgtagtcc

SEQ ID NO: 2320 - DNA, 395 bp, Homo sapien
  misc_feature (1)...(395): n = A,T,C or G
agagcatcaagngcaataaaaaagacttcaaaaaaggttacaagagcattctctttctccaaaactccaaaaagagctcttcgaagggctcttatgacatcccacggctcagtggagggaagaagtccttccagcaatgataagcatgtaatgagtcgtctttctagcacatcatcattagcaggtatcccttctccctcccttgtcagccttccttccttctttgaaaggagaagtcatacgttaagtagatctacaactcatttgatatgaagcgttaccaaaatcttaaattatagaaatgtatagacacctcatactcaaataagaaactggacttaaatggtacttgtantttagcacttggtgaaagctggaaggaagataaataacac

SEQ ID NO: 2321 - DNA, 310 bp, Homo sapien
tcaggtttgatgtaagcatgggcttacatcccccaggtacatacttttacttattgtgggataacctggcactagtaggcaggtaaagtcacaaatttggtgtcttttcaccttttgactgttgacttaatagctcctctcactctgcctggagatacttcctgcctcagatgaggagccagaagaaacagagcccgacttgaatgaactcagctcagagttctaaggaccagcattctgggggccattttctctacaggcaaatggaattgcttttccataacatccaaattgtaatgtggttgctgct

SEQ ID NO: 2322 - DNA, 344 bp, Homo sapien
tcagggcccttgagagcagagtagtgtcgggagagtgggtggtatggttgacacaaagacccacaggtatttttatgggttcacttaatgaagcaggggcttagttgagggtagagactgttcattaaaccagcctttgttgaccactccctgcagtatggacaggacatgatcaccatccttaagtcccactatagcaggggggaaacagtatgcttaattaagcttaattataaactctttgagttagaaaactggtgaaagtgttatttcctcctgaagtaattatgtatatatacatgccaattccaatcagaatgctaatttttctttttaaccccaga

SEQ ID NO: 2323 - DNA, 323 bp, Homo sapien
tcagtttaatagtaaccacagtttaccttaaggtaaaagagccaatattccatcaggtcatgtatggaatgttggtctttacattagtacttcgatctatttatattgttacatgggtttatccatggcttagaggactgggttatacatcattgggtatatttttattgggatttttattttggaatatagataacatattttgtgagtcactgaggaactttcgaaagaaggtaccacctatcataggtattaccacacaatttcatgcatggtggcatattttaactggccttggttcctatcttcacatccttttcagt

SEQ ID NO: 2324 - DNA, 345 bp, Homo sapien
ctagtggataaaggccagggatgctgctcaacctcctaccatgtacaggacgtctccccattacaactacccaatccgaagtgtcaactgtgtcaggactaagaaaccctggttttgagtagaaaagggcctggaaagaggggagccaacaaatctgtctgcttcctcacattagtcattggcaaataagcattctgtctctttggctgctgctcagcacagagagccagaactctatcgggcaccaggataacatctctcagtgaacagagttgacaaggcctatgggaaatgcctgatgggattatcttcagcttgttgagcttctaagtttctttcccttca

SEQ ID NO: 2325 - DNA, 284 bp, Homo sapien
  misc_feature (1)...(284): n = A,T,C or G
tgatatttgcaaccgcagtggttnaatgggctgaccacactgcccctctcctcctcggcctcagtgcagttggttgccatggatcaggagaatggcccggctgcnggtnaccaagcttccttggcaggagtccaatgcacagggtcactctgcaggaggttctcactctccttcccaatagcatggctctgctgctgcagaaagagccatggaaggaacagacccagaagttcattgactggctattcagcatcatggaaagccctaaagaagccctctcagca

SEQ ID NO: 2326 - DNA, 235 bp, Homo sapien
  misc_feature (1)...(235): n = A,T,C or G
gnatcgagacangtaagcannancatggaggtttgaanatnccgcatttgnantggnnnaatnccnaattntgcattgctngcgtcataatattganangcgnnntacangttncncctttatgcatnnatgtagggatataataatgttaacatggacatgatcttctnnnnnnttctnctntgagtgctgtctccatgtnagatgtatctgancaggttgnccacangtagct

SEQ ID NO: 2327 - DNA, 348 bp, Homo sapien
  misc_feature (1)...(348): n = A,T,C or G
ttagacaatgtntatcaaaatctactggccaagaatatgctgcaaaatttctaaaaaagagaagaagaggacaggattgtcgggcagaaattttacacgagattgctgtgcttgaattggcaaagtcttgtccccgtgttattaatcttcatgaggtctatgaaaatacaagtgaaatcattttgatattggaatatgctgcaggtggagaaattttcagcctgtgtttacctgagttggctgaaatggtttctgaaaatgatgttatcagactcattaaacaaatacttgaaggagtttattatctacatccagaataacattgtacaccttgatttaaagccacca

SEQ ID NO: 2328 - DNA, 350 bp, Homo sapien
  misc_feature (1)...(350): n = A,T,C or G
gtttctaagaaangttttggaaggaaaaatgacctgaaatcagtgcgtactgcaaagtacagccaataatttttgttctttgttttcacccccaccctcactggaattctcaccaaaaatagtttgatacttaaaaaacagaagtaaataccttttctcaatattgttttggctatgcaaatatttgttttgcttaatgtcctccatttacacttctcagcaaatgtagttgcaaacaaatgctttctttttatttttcccttggtttgaggtatgtaaatagccaaaaatgtacattgaatttcacattgtaaaagttttattttatcccttgtatgatattactcaaa

SEQ ID NO: 2329 - DNA, 352 bp, Homo sapien
  misc_feature (1)...(352): n = A,T,C or G
aagtactcattantaatattaataggcgcttgaccccacaggctgtcaaaattcgagcagatattgaagtggcttgttatggttatgaaggcattgatgctgtaaaagaagccctaagagcaggtttgaattgttcctacagaaaacatgcccattaagattaatctaatagctcctcctcggtatgtaatgactacgacaaccctggagagaacagaaggcctttctgtcctcagtcaagctatggctgttatcaaagagaagattgaggaaaagaggggtgtgttcaatgttcaaatggagcccaaagtggtcacagatacagatgagactggaacttgccgaggcagat

SEQ ID NO: 2330 - DNA, 351 bp, Homo sapien
  misc_feature (1)...(351): n = A,T,C or G
aaaaaaggaaatnaaagcagcagcaagggaagaagcaaaaaatatcaagctgctagaaaccactgaggaagataaacagaaaaactttctatttttacgactttgggataggaatatggacatagcaatgggctggaagggtgcccaggccatgcagtttggacaacctttggtttttgacatggcttacgaaaattatatgaaacgaaaagaattgcagaatactgtttcccagcttttagaaagtgaaggatgnaacagaagaaatgttgatcctttccntatttatttctgcaatctaaaaatagatggtgctttgccaggaagagttagttaaacggtatcnagaaa

SEQ ID NO: 2331 - DNA, 211 bp, Homo sapien
  misc_feature (1)...(211): n = A,T,C or G
tttttttttttttttttttttttttggagggacaaggtttatttaacaggttaaaaattaaattatacactcaaatttacttgtttggataatcacctacagcaaaatcacatttcngnaaaaatcaccttaaataaaggnctccaccacatggcccattttttccaaacgacagcaaagaatttggnaaaacgaaaggctgcacaggggg

SEQ ID NO: 2332 - DNA, 192 bp, Homo sapien
tggaaaagactgtgatgccttacattagcacaacaccagctaagctcaggaacccttgcacaagtgaacagaactgcaccagcccatttagctacaaaaatgtgctcagtcttactaataaaggagaagtatttaatgaacttgttggaaaacagcgcatatctggaaatttggattctccagaaggtggtt

SEQ ID NO: 2333 - DNA, 209 bp, Homo sapien
atgttcttactgtctttaatagtttcctaacactgccacagaagatatctgcttatatctcactgtctaaagttcagtcacatggccacaatctcaaggaaggctggggtactttaatctttattgagggcagtcatgtgcccagctaaaaccaggggttctattactaagaaagatacagctgccccccaccccgaaacaattcaggg

SEQ ID NO: 2334 - DNA, 210 bp, Homo sapien
  misc_feature (1)...(210): n = A,T,C or G
tttcatgagaattattacttatattttacattttggtctaanatttttttctgacaagtatcaatgaaagcagaagaaaatccactccaatacttagttttcaagacacaatcctaaatatttaaaccccttgtagctggcctataatatatatanattagatgttatatacagtagacttaccangtcaatagtttaagcaatcggggg

SEQ ID NO: 2335 - DNA, 136 bp, Homo sapien
caaccaaaatactgtcttagacgaacaaactgatgttgtagatgaaaaatctacaaaacgtgtgcgcaaaactaagcctaaagcgactgacggtggttctactgcaagcttatttggtattgaaccttatcagggg

SEQ ID NO: 2336 - DNA, 383 bp, Homo sapien
taccatttaaaaaaacaatttatataaatagattcgtatacaaagaagaaacacatatacagagtaccccaattaccagtatggtggaccctaccccttcttttctgcattgggaaacagaacagagaacagaaaaaatcattccatcttgctcttaactctttccacctatgtgctcagtttttcaagtagaatttctattcctttgctggtgcttttggttttttccaatgtaggaatcaagcttttcagtgcagctttgactttgtttgcaacttccaggtcacaactctggaggaggctagaaagaataatgggcaacctcgatttacactagcccaggacttcaggttcttcataccaacatgctctacaagtgttta

SEQ ID NO: 2337 - DNA, 381 bp, Homo sapien
  misc_feature (1)...(381): n = A,T,C or G
gtcagcttttggacacacactttattgcacttgatttttttatacatccatttcctaaacaagatatgtttattcatctttttaatcctcatggctcagcacagggcctgacatacataggcattcaaccaatatttgatctccaaagcatgaccattcatgcatccataatcctttttctatagtataaagatggctgacattcaggcccccatgtatattttaaggaatatataattcccaataagctcttctttttaaaggtgattaacagttctaagtgttcaatttcaaaatcnaaatgacatcntatcaggggtgtcattaaaagncaaatgccaaaccatatttgcctacacaccactggncttttccctttcc

SEQ ID NO: 2338 - DNA, 353 bp, Homo sapien
  misc_feature (1)...(353): n = A,T,C or G
ggctggagtgcagtggtgcaatctcggctcactgcaagctccgcctcctgggttcacaccattctcctgcctcagcctcctgagtagctgggactacaggtgcccgccaccatgccgggctaattttttttatatttttagtagagacagggtttcaccattcacaggatggtctcgatctcctgaccttgtgatctgcctgcctcagcttcccaaagtgctgggattacaggcgtgacacncacgcccagcctatggtaaatatattttgaactacaaaggtgctgttggggtactttaaagaaaaactatttttactagtttatctgaatggtctgtggactttatttaga

SEQ ID NO: 2339 - DNA, 376 bp, Homo sapien
tttttacatttactgatggaaaggtgaaatggtagatcgaagccagacattaaaactgttttaaattctcacttacttggacatagaatatcagcagtctcaaagtcattcacccggcagataggcaaaaatgagtcccttgaagatgaagtacaaaaagactattgaaaagtattttgcacattaaatgctaagctataggatataaacatcttattttcagaaagagatttctggatatatttcttaaggtcagtggacgaagccagaattctactataatgtataaccctatagcactgaaatctattttttcctgtatattaatcatgtagtcatgcaatactaaagtatagttacagattctaataaatag

SEQ ID NO: 2340 - DNA, 376 bp, Homo sapien
  misc_feature (1)...(376): n = A,T,C or G
tttgctttacgtataattctttttattttcatgcaaaataaaggcacacttaataacacccttncaattttgacttacaggatttaaattcaaccccttataacaatgacttaatatctaatgttacattcatgttcagaatgcacaaagtnagccaacaaatgcagcaaacctcanaacaaggtgctacaaagctgcttctacatngcaagacagacaagtgtctgatggagtaatttaattgaacatacttttacagacatacagctaacctaaagnaagacagacagatttaggaaagcagctacatctgccagaggaaggaaacagcatgttacngacagttaattntacatagancntttgacaaacacca

SEQ ID NO: 2341 - DNA, 377 bp, Homo sapien
gtatattcctattagccaaatggctttattagtaaatagtaatacattgtaatattgtaatagtaattacaaaagtaatattgaaatagtaattacaaacctgggaaattaaggactaacagatctttaaactcatgtcaacgacttctccaagaaactattcaagacacagcagcccaaaagataaagacacctgttttctcaccctcttctttgcttttgttttctttacgagacagttcctccacccatatgtcatcagtatgagcatttatgagaaacatgctatcaatatttgatgtctaattctctttccatatccaactaaaatgaatcaattaatctggcattcttccccaccaaggaaatacaaggtg

SEQ ID NO: 2342 - DNA, 380 bp, Homo sapien
  misc_feature (1)...(380): n = A,T,C or G
aaattcatccaccttactcaattccagaccatttctatattgaagctcctgctttagaggttttacaatacaaaaggaaaaggtatatttgagcagcatcaaattcatttctcacacatccatttagcataaataacatgataaaacaaatagtcaagaaattccaagttagacttttttaaggtaaaaattacctcaagcaggtatagatccattaatcttcagattttaaagaacgaattattgtcaacctttcaccaaacaattaggaaagtagtttcagaacattaaatgcctttaaaaatttttatcaacantggaagaaaaatctccaaaaaaggaacaatatnatttatatcctataaacacatcnggagagt

SEQ ID NO: 2343 - DNA, 371 bp, Homo sapien
  misc_feature (1)...(371): n = A,T,C or G
tttgctttacgtataattctttttattttcatgcaaaataaaggcacacttaataacaccctttcaattttgacttacaggatttaaattcaaccccttataacaatgacttaatatctaatgttacattcatgttcagaatgcacaaagtgagcaacaaatgcagcaaacctcaaaacaaggtgctacaaagctgcttctacattgcaagacagacaagtgtctgatggagtaatttaattgaacatacttttacagacatacagctaacctaaagaaagacagacagatttaggaaagcagctacatcntgcagaggaaggaaacagcatgttacagacagttaattatacatagaacatttgacaaac

SEQ ID NO: 2344 - DNA, 203 bp, Homo sapien
  misc_feature (1)...(203): n = A,T,C or G
agntnaaatgcnttttatttttanaggnngtanatgacatgntntnctgananncanngcgtccacnccnnatnnntcncanncntaanaaatgaagagctcnngatganatcagtcccatgngtcttaagtcctngtgttgngtgtnngacnngnannagccnnntatgntgacaggtgacnagatccnanatanttgccac

SEQ ID NO: 2345 - DNA, 370 bp, Homo sapien
  misc_feature (1)...(370): n = A,T,C or G
actttgcattcacctctgggtttataggcagaacccactgcaactgatggctttcaagactaggttactgatgactctctgttacccactaaagcacatttgaacataaagagtatagggaaaacacctagctttgacaaaaggaaacctttgacaaaaggaaacattttatcatatttacttttaaaaaataaatactagatatggctgaaatcccctttattcaagaggtagccattatctaaaacttgaatgttttgcattcctaatgtatcacttaaacaatataatttttcatgtttaaaagcaccataaatggnatactgtatatnacctgcttcagcttccnttttctttgtcaatcntatgt

SEQ ID NO: 2346 - DNA, 373 bp, Homo sapien
  misc_feature (1)...(373): n = A,T,C or G
tttttttgctaagaccactctgccgcccttttcaagatgttcactcttgcaccatttacagtaaatagcaagacattggtcaattaaaggcacaaccacaaaacagaattctaggtgatcatcaaaacaggagatctacatatgcaatcttagatgtatgtccatgattattatgtaaaaaaccaagttgcagaaaataggctgtcatttttcattaaaaaatcatttgcagagtgtatatttttatgtccataggaaaacagttactcagctgtaaatagtaattgagaaatattctacctgcagcccnggctcttgataaaaactattctcttaccaaaagtatccttaataccatttgctgccttgtcca

SEQ ID NO: 2347 - DNA, 375 bp, Homo sapien
  misc_feature (1)...(375): n = A,T,C or G
gtaggaatggggttttgccatgttgtgacagtgtctttcatcccatgtgtgtttccacaatgagagcttgatactctttccatcaagagctggggtctatggcaccctcctctcaaatctgtgcagtttggtgacttgcatacaaccaacagaattcagctgaagtgaagttgcggaactcccaaaatgagctagaaaaggccatgcagcttctgcctgggtcttcagcggccatataaagtttgactaccttgaggcagccatgctgtggggaagcccaaagctggccagtgcagagactatatggtggggnggaggccctgagaccacagagagatgcccacttgtccagcacccccagccgccctgtggcaa

SEQ ID NO: 2348 - DNA, 323 bp, Homo sapien
taatgtcatttctgtctttataacttgatcaagaatgattggaaggcaaacaggtttacaaatcaattctgtgacttttaaaaagttgacaatgttgtcagatttaaaccagtgtggctagtaaaaagcagctcactcaatgtgggtggctcccctattcctttacgctccccctatccctaccccacaagcctttcgattataaaatactaccaatcttgttataagattactgtggaagtagtcaagtactccccgggccttctgagctggtggaatattttatttcagactgaaaacagagagcactctccttgggaagg

SEQ ID NO: 2349 - DNA, 356 bp, Homo sapien
tccaagtaaagctccagtgactaatatgtataaatgttaaatgatattaaatatgaacatcagaattactttgaaggctactattaatatgcagacttacttttaatcatttgaatatctgaactcatttacctcatttcttgccaattactcacttgggtatttactgcgtaatctggaacatttagctaaaatatacacttttggcttaaaaattattgctgtcaattccaataataattcttagcttataaccaaagagcagtgtttaaaaggagagcttctatacaaaacctattcctggcgttacttttcatacaatttttgttctgttttacctggaaataatttaccaa

SEQ ID NO: 2350 - DNA, 319 bp, Homo sapien
  misc_feature (1)...(319): n = A,T,C or G
ttttttttttttttttttttttttttttttttttttttgacttcctaaattttttattttaaaaatgcccagtttatttatttgctttgcctaagatagctgcattcattattacagggtcaggggacttgtaaaaacaaatatcaattattataaataatcncagaaaacaaataaactggaaaataaacagcggttactaatttaaggttttaacccttaccccaaccacccaaaaaaagtagccatttttaaaataangattaagagttggnggaatttaagggaaatgccatccnggtaatgttaccnaaatact

SEQ ID NO: 2351 - DNA, 355 bp, Homo sapien
agaagagcaaggtcaagaaaacccagcagaccacgatcctattcatgatcaaagctggtatttagaccgatcattaagaaaacgtcttcatcaagagtatggagttcaaggctgggctattgtacagtttcttggggatgtggtgtttatcccggcagagctccacatcaggttcataacttatatagctgcatcaaagtggctgaagattttgtttctccagagcatgttaaacactgcttctggcttactcaggaattccgatatctgtcacagactcataccaatcacgaagataaattacaggtgaagaatgttatctaccatgcagtgaaagatgcagttgctatgctga

SEQ ID NO: 2352 - DNA, 332 bp, Homo sapien
  misc_feature (1)...(332): n = A,T,C or G
tgcttgtagctgctccccgaactcgccgtcttcctgtcggcggccggcactgtagattaacaggaaacttccaagatggaaactttgtctttccccagatataatgtagctgagattgtgattcatattcgcaataagatcttaacaggagctgatggtaaaaacctcaccaagaatgatctttatccaaatccaaagcctgaagtcttgcacatgatctacatgagagccttacaaatagtatatggaattccgactggaacatttttacatgatgccagtgaactctgaagtcatgtatccacatttaatggaaggcttcttaccattcn

SEQ ID NO: 2353 - DNA, 360 bp, Homo sapien
agatgttgagtggtggtagatggttcagattaatgttgaaggattttcatattgcatttgccttactcagtttttaatcaagtactatgataagaaaatagatgtggtgattatattcatgggtgaaaaccagcctaaagatagcaattaatgccagaaaaggggatgtagaaatctagtgaaatggtgacagccctgatcttaggttcctgtaacaaaacaacacaaattaagtacaaagtaggagataacaggtacctccatgcagtatgtgcaagacctattgtcaacattaatagaaaaggtttctggaatgagggaaatgatcagtccattttagtcagattatagttgaagtgc

SEQ ID NO: 2354 - DNA, 357 bp, Homo sapien
  misc_feature (1)...(357): n = A,T,C or G
ttctctgttctcagggaggagagtgaaagtgtgctgacactcaagggcctgactcccacagggatgttgcctagtggagtgttagctggaggacggcagaccctgcaaagtggtaatgatgttatgcaacttgctgtgcctcagatgnactggggcacacctcactcttttgctaacaattcacataatgcatgcagggaattccttctgtttnttagttcctgtctcagcagctgacctagacagggtactgtattagctagtgtctcattaatacctgatcagggcagaaaactgatagaatgggtattcctttcaattgaaaataatggtcagttcctcagcttttcatgaaat

SEQ ID NO: 2355 - DNA, 361 bp, Homo sapien
  misc_feature (1)...(361): n = A,T,C or G
tcagaaagtgagnagtcccaggactcatccgacagcataggctcctcacagaaagcccacgggatcctagcacggcgcccatcttacagaaaaattttgaaagacttatcttctgaagatacacggggcagaaaaggagacggagaaaattctggagtttctgctgctgtcacttctatgtctgttccaactcccatctatcagactagcagcggacagtacattgccattgccccaaatggagccttacagttggcaagtccaggcacagatggagtacagggacttcagacattaaccatgacaaattcaggcagtactcagcaaggtacaactattcttcagtatgcacagacctctg

SEQ ID NO: 2356 - DNA, 344 bp, Homo sapien
  misc_feature (1)...(344): n = A,T,C or G
ttgatgaagatntacctggaagcggcagagttaggtgaaatttcagacatacacaccaaattgttgagactttccagttctcagggaacaatagaaaccagtcttcaggatatcgacagcagattatctccaggtggatcactggcagacgcatgggcacatcaagaaggcactcatccgaaagacagaaatgtagaaaaactacaagtcctgttaaattgcatgacagagatttactatcagttcaaaaaagacaaagcagaacgtagattagcttataatgaagaacaaatccacaaatttgataagcaaaaactgtattaccatgccacaaaagctatgac

SEQ ID NO: 2357 - DNA, 358 bp, Homo sapien
gcatgaataagttcaagcttaatatagaaaagctctgcaaaactgaacaggacctcgcacttggaactgatgcagaaggacagaaggtgaaagattccatgcgagtactccttccagttctactcaacaaaaatcatgataattgtgataaaataagagcaattctactttatatcttcagtattaatggaactacggaagaaaatttggacaggttgatccagaatgtaaagatagaaaatgagagtgacatgattccgtaactggagttaccttggtgttcccattgttccccaatctcaacaaggcaaaccgttaagaaaggatcggtctgcagaagaaacttttcagctctctc

SEQ ID NO: 2358 - DNA, 329 bp, Homo sapien
  misc_feature (1)...(329): n = A,T,C or G
tcgtctgncnaanacatgcatgttacatacatcccatgtgcactttgaggtggagacacaacgtttaaatgcagaggcacccctatgcacagtctccatggaccagctagaagcagtccacagtccatggtttctttccaggaagaaatgctggtcagttgcgttgagaccataaaaggggaagggagctctgctgcagaatgaggtggttggttgaaatcagcagtggagcaagtctttcaaaagtgctggtttctgttcaactcttaggaaagagagtctaatggtggcaaaggagtgggtataatgattgagtgaccttacctctc

SEQ ID NO: 2359 - DNA, 320 bp, Homo sapien
  misc_feature (1)...(320): n = A,T,C or G
ttcaaatgaaatctattgatttctagtaatcatatttgaatcaatgttaaagcatatatagtcttatatgtaaactagattctnaagattatttgaacctttgagatgaagtttacactcaactaaaatcattccattgattttattgattaacatcaatcagtatgtttaaagttattctaagaagcaatagtttatttttaaaaaccttgtacagcaaaataacttaaaacccctttgtgatatcatcttaccagtttatttggtaaaaacaaacagttatttggtatttgtcagaattcttcagtgcctgctattac

SEQ ID NO: 2360 - DNA, 357 bp, Homo sapien
ttctctgttctcagggaggagagtgaaagtgtgctgacactcaagggcctgactcccacagggatgttgcctagtggagtgttagctggaggacggcagaccctgcaaagtggtaatgatgttatgcaacttgctgtgcctcagatggactggggcacacctcactcttttgctaacaattcacataatgcatgcagggaattccttctgttttttagttcctgtctcagcagctgacctagacagggtactgtattagctagtgtctcattaatacctgatcagggcagaaaactgatagaatgggtattcctttcaattgaaaataatggtcagttcctcagcttttcatgaaat

SEQ ID NO: 2361 - DNA, 360 bp, Homo sapien
  misc_feature (1)...(360): n = A,T,C or G
tatatagctgancgagcatttgtactctgcagtgcagtgtcagattttgatttcattgttactattgttgttcttaaaaatgtcctatcttttacaagagcctttgggaaaaacctccaggggcaaacctcntgatgtcttctttgcggccggtagcttgactgcagtactgcattcactcaacgaagtgantggaaaatattgaagtttatcatgaattttggtttgaggaagccacaaatttggcaaccaaacttgatattcaaatgaaactccctgggaaattccgcagagctcaccagggtaacttggaatctcagctaacctctgagagttactataaagaaacccctaagtgtc

SEQ ID NO: 2362 - DNA, 361 bp, Homo sapien
atttaaaagaatttccattacaaagtaaaactgaaaggatgaaagaaaaaaattttcaacttagaacttctacaagaggaaagtttttcatggatacaaattctttggttatatttttgcaaatattccagtctgtggcttgtgttttaatagtatttttcaaagaacagaaattttaatatttatggagtccaacttatcaattttattcttttatgattcattatttatgggttctaagaagtctttgttaaccccagatcacaaaggtaatttcctggtaagaaattgtatagttttaggttttacacttaggtcaatgaccccatttcaagtaaactttttatgatatgagatatgg

SEQ ID NO: 2363 - DNA, 281 bp, Homo sapien
  misc_feature (1)...(281): n = A,T,C or G
tntgctgaatccaaagatatataaataaaatatatatattttataaagatcagaatgatataaaggagatacatgtttcttcctttaaaaaataaacggaagttacattgttaatgttcatattatgatgccacttttctaaantgcatctggattgaaaggtgtaaatatcaataacagtgctacttagttatcagtatttaatatctgaggtgagttgggggtatctatattaggggtagggtattacngaaggtaattggcttgatgtcctagaagtt

SEQ ID NO: 2364 - DNA, 347 bp, Homo sapien
  misc_feature (1)...(347): n = A,T,C or G
tatatagctggatnagcatttgtactctgcagtgcagtgtcagattttgatttcattgttactattgttgttcttaaaaatgtcctatcttttacaagagcctttgggaaaaacctccaggggcaaacnccctgatgtcttctttgcggccggtagcttgactgcagtactgcattcactcaacgaagtantggaaaatattgaagtttatcatgaattttggtttgaggaagccacaaatttggcaaccaaacttgatattcaaatgnaactccctgggaaattccgcagnggtcacccaggggtaacttggaatctnagctaacnctctgagagttactatnaag

SEQ ID NO: 2365 - DNA, 360 bp, Homo sapien
  misc_feature (1)...(360): n = A,T,C or G
tttggttttgnnttgcctctacatagttagaaatcaacaaaaaagtttcattattcaaacataaagtttagacagcataaagctatcaaaatcatacatgattataaagtaacagtatttggatccttcatagcatacttattggtaaccttcaatatacaaaacactatttcattacatctaaggttcacctttttcttcctaacactttaagaattgtacctggctgggtgtaagtagctcacggctgtaatcccaacactttgtgaggccaaggcaagtggatcacctgaggtcaggagttcgagaccagcttggccaacatgccgaaaccctgtctctactaaaaatacaaatatt

SEQ ID NO: 2366 - DNA, 363 bp, Homo sapien
caaagaaaaatattcaactaaagaaggagatccaaaagcttgaaacggagttacaagaggctaccaaagaattccagattaaagaggatattcctgaaacaaagatgaaattcttatcagttgaaactcctgagaatgacagccagttgtcaaatatctcctgttcgtttcaagtgagctcgaaagttccttatgagatacaaaaaggacaagcacttatcacctttgaaaaagaagaagttgctcaaaatgtggtaagcatgagtaaacatcatgtacagataaaagatgtaaatctggaggttacggccaagccagttccattaaattcaggagtcagattccaggtttatgtagaagttt

SEQ ID NO: 2367 - DNA, 340 bp, Homo sapien
ttgctgaatccaaagatatataaataaaatatatatattttataaagatcagaatgatataaaggagatacatgtttcttcctttaaaaaataaacggaagttacattgttaatgttcatattatgatgccacttttctaaactgcatctggattgaaaggtgtaaatatcaataacagtgctacttagttatcagtatttaatatctgaggtgagttgggggtatctatattaggggtagggtattacagaagataattggcttgatgtcctagaagttctttgatccagaggtggggtgcagctgaaagtaaaccgaatggattgccagttacatgta

SEQ ID NO: 2368 - DNA, 361 bp, Homo sapien
  misc_feature (1)...(361): n = A,T,C or G
aaatgtggtcttagcagtcagccaaagataaacaaccatatgaacagaaagcagctaagctaaaggagaaatatgaaaaggatattgctgcatatcgtgccaaggnaaaagtgaagcaggaaagaagggccctggcaggccaacagntcaaagaagaagaacgaaccagaagatgaggngggagagagaggaaaaggaaggagggaaggaaggaaggagagaaagaaaagaaaggaaggaagaaagaaaganagaaaagaaagaaagagaattttcacagatttagttccaagcaacagatgctacctcaggggcagaaagggaatttattgagaggatttggggtcactcacagaatccc

SEQ ID NO: 2369 - DNA, 510 bp, Homo sapien
  misc_feature (1)...(510): n = A,T,C or G
aaatctgtatcattttatttaacattcattctttaagttacagttaacacaatctgcttctaatccaagaaatcctagtataatctgaaatacatgcatatacatttaataagacctacatttctaaataaattacatgcatgatatacaataaagaatactaatatgagaattcaggacatttatttttctgcatggaaatttaactactgtataacacacgcacatacaaaacaaacccacaaagcaacagtgtgtaataggtagtgagagacacacaaaataagcatatttaaaacgccnacaaacagccttttttttttaggcaacaaaataccgtccagtccttgacatcttctcatactcacctagcaccacagatgccagggacctaacagtaaacatgtacaatctcatgcttaacacctaaagcatgcactgaattgaatttggatggtgggatcnattcnacctaagtatgccatacataccttttcctaccaataattt

SEQ ID NO: 2370 - DNA, 514 bp, Homo sapien
  misc_feature (1)...(514): n = A,T,C or G
ttttttactcctggcaagctgtgagcttgttgacttttatttgacctcttctccatcacatcaaaagtgcaatgtgaataatacttattaatgagtatattttattgatttcatcatttgttaatatcagattttgactaattcaacatgaccttaagttatggtgccaaaagaaaacacatccagataatgtaatccttaaatctttggcattactgtaaaaggaatttaacaacaacagtgggctactttttttttttggtttttttttggtagggttaaaatggtaataggcaaaaatagtctcaaacaatacctcccggaatagctgatcttctacaggtgacataaacagacatgtgaagagtgcntgatggaagtataagtcnttactgatttcngggtgatttataccagatttaataagagccattgcttcgggtatgcgttcacaagccattaggtatcnggcacgtagttccaagaacagtggattttcngaacctaaataatt

SEQ ID NO: 2371 - DNA, 439 bp, Homo sapien
  misc_feature (1)...(439): n = A,T,C or G
tggctgagtttttatgcaattttaaaaaacagctgcctttcctagtctttatggactggcttcttatggggaaagtccttcaccaaccagcttttttcaatatatgccagcttcctcatcagcaccatttagcaggtgagagatatcattccctctggcacctctccaaaatgctggaatatttgaagcatgtacttcactcttctctctcacttctgacgaagaaacaagttggatgtcttttcccaatggtgctgagtcatcccagtctctgtctttggtactgctggccctctggngccatagcaatctgtttctgttctcttttgctnttgttggcacccagaaatctaacctgtgctgtttccattagtgctccaggcaagacagaaacccatcccttgggtgggccctnagaaaagtcagaatgttggactta

SEQ ID NO: 2372 - DNA, 614 bp, Homo sapien
  misc_feature (1)...(614): n = A,T,C or G
tttttaaagagaaatgtaaaactcagtttaatttcaagtttgtatagagaatgtatgccacagtttgtattttataaacacaacctatcttattataaatacaaaataagaaaaagtgatacgttagctgttatgaagggtgaaaacattatataaacttcaaaaggctgctttctgcatctgcatctatgtaatttcatggttctctaccaatttcatttacagaaataatctctatagtcaaattattgttcactttcatgccccaacatgggaagtggtaggtgaatatctggaggaatacaatttattgtctgctcctccactcagaagtagccctgtgtctgtccagtctacnctcagaactttgtcttcatgagcagccagatcatagagaggagccttacaacttcttggtatcccacagcttaacaatgttatctaaagatcctgaaatcagctgctgttcatggggtaggagaccattttactgatgtcacccaaccagtatgtgacgttaggggacagcgacaccaagaaccatctttagttcggggatcccacagtctggatatggccnatctgtggcttccagatgctaaacggttacaagg

SEQ ID NO: 2373 - DNA, 447 bp, Homo sapien
  misc_feature (1)...(447): n = A,T,C or G
ttttttttatgtcagaatttctgtgttttactttgctgagtcaaggagtattgtttgtgcagttatttttgttgttgttaaaatacacataacacataatttactattttaattattaatgtacagttttgtggcattaaatattttcacattgttgtgcaaccatcatcatcattcatctctggaacttttttatcttccctaactgaaactttgtgctcattacaaatgaatcttctttttcatctgcccccagcccctggaagtcaccattatactttatttctatgaatttgcttactctaggacactcatataagttgcatatcatgtaacatttgtccttttgtgactggcttatttcacttagcataatgtctttaagtttcatccatgttgtagcatgtgtcaaaatttctttcccttttggtgggnaaataaaattcc

SEQ ID NO: 2374 - DNA, 577 bp, Homo sapien
  misc_feature (1)...(577): n = A,T,C or G
attggtgcatcctatttttaggttgctttcattattttattttttatacagatacatacacattgctagaatcaaagcaaaaatattaatgggcaggtactacagaactaaagtgaaacaaaacaaaacaacgaacaactganaaacaatagctataaactttcaaggccaaaagataagatttaagggcaatacctgttgaagaaggaaaaggagtataaagttccnagagaggtatttataatgcaaatctaatgccagctttttagtaataaaaaagagaagtgctttactatacactgactagcacataatacttaatttgggaaagaaaaattaatgacgttccctgggcccagcagcagatatggtgtgtccctttgccggcaaccagncacaacacccgggacaggaaaaccccaaatcccagggctnaaggtattcccccgagtaatgggttgaaggtttccggnttttaacaggctagggtttatcccaggtgctacactcctgtncaatgttatggcccgcccggnattttacagctataccaganctaattaggcaaggtcctatt

SEQ ID NO: 2375 - DNA, 558 bp, Homo sapien
  misc_feature (1)...(558): n = A,T,C or G
agttctccttgcagaggactggcgccgggacgcgaagagcaacgggcgctgcacaaagcgggcgctgtcggtggtggagtgcgcatgtacgcgaggccttctcgtggttggcgtgctgcagcgacaggcggcaacagcacctgcacgaacacccgccgaaactgctgcgaggacaccgtgtacaggagcgggttgatgaccgagctgaggtagaaaaacgtctccgagaaggggaggaggatcatgtacgccccggaagtaggacctcgtccagtcgtgcttgggtttggccgcagcattgattcctccgaatctggttgggcatccagcatacggccaatgtcacaacaatcagccctgggcagacacgagcaggaanggagagacagagaaaagaaaaacacagcatgagaacacagtaaatgaataaaccataaaatatttagccctctgttctgtgcntactggncaggaaatggtaccatttttcagtgtttgacttnacagcttcttttgccacaagcaagagaganttaacattgtttcaanccgggggat

SEQ ID NO: 2376 - DNA, 548 bp, Homo sapien
  misc_feature (1)...(548): n = A,T,C or G
tgtagagaggggagtcttgtatgttcccaggctggtctctaactcctggcctcaagcgatcctcctgtctttgcccgccaagtgctgggattaccagcatgagccccctcactgggccaatttatagcttcttaaaagattagatcactgatttcatacctttcttcgcttctgctataagcattaaaaagtacagttgacccttgagcaacatgagtttgagctgcacaggcccactcgtacagggttttcctccacatctgccgcccctgacacagcaagactgacccctcttcctcctgctctgcctagacaacaggaagatgatgcggatgaaaacccttgtgatgatccacttccacttagtgagtagtaaaaatattttcccttccctatggattttcttagtaacattttcatttggccttatagcctacctttattctaacagtacagtatataatacncataacatacaagatctgtggtaactgactantaatgggnagggttcagttaatagtaggaatgggcagttaagcctttgg

SEQ ID NO: 2377 - DNA, 172 bp, Homo sapien
  misc_feature (1)...(172): n = A,T,C or G
tgggcttaactttacctccttgaaaatgacatggacttgggtggatggttctccaatngattcnnagatatncttcataaagggaccagctaaagaaaacagctgtgctgccattaaggaaagcanaattttctctgaaacctgcagcagtgttttcaaatggatttgtcag

SEQ ID NO: 2378 - DNA, 385 bp, Homo sapien
gtgatacaggagaaatgaaagaatctaagagcagccagcaatccagacgggtaaggggtcacagggtggaggcagtaggagtcacaggccaaatctgagagttgcagcggaggagtcccttgtgagtcttctgatgcctgaggatgagagaggaagaagaaggcaagagaggtgactccatcaattatagttgtgcctttaattttaaaaaggacaaatgagcaaatctgggtcttggtagtaatgtttgagttctggctttagacatggtgaattaccctgcaaatgatgaactaaaggggtagtattctgaagatctaaaataggcattggggagtccctcttgagccttttcctggctccaggaggttgcccgataaaattt

SEQ ID NO: 2379 - DNA, 435 bp, Homo sapien
  misc_feature (1)...(435): n = A,T,C or G
ggaattgacctgcctgcctcttttaatgggcttgttgacttggtgagctctgcatttcaccgggactctccaggggaactttgcattacaccagagcacagcttccaaatgttggaggtgactgaatgaagttttacccgtttatttggtttaccttggtagaagtacctgacagaatgaccctgcagtgattgaaacaagttgcttccatgtttccctaaagtacttccaattcaataacaggccttgtacaggggctcacgctgtcatcccagcactttgggaggccaaggtgggcagatcacaaggtcaggagtttgagaccagcctggccaacatggtgaaaccccgtttctactaaaaatacaaaaattagctgggccttntggggcatgctaataatcctagctgctcaggaggctgaggcaggagaan

SEQ ID NO: 2380 - DNA, 404 bp, Homo sapien
  misc_feature (1)...(404): n = A,T,C or G
gtacantctaaccaagactgtgtcaacaatattgctgaatcaatggttttgtccagtttattggctcttctacattcattgccatcaagtcgtcagcttgttctggaaactctttatgctttgacatcgagtacaaaaataatcaaagaagcaatggcaaagggtgctttgatctatttactggatatgttctgcaattcaacacatccacaggttcgagcccaaacagcagaactttttgccaaaatgacagcagataaactgataggtccaaaggttcgaattaccgttaatgaaatttctaccaagcgttttcatgggatgctatgagagacaatcctgaagctgctgtacatattttttgaaggaactcatgaaaatcctgaatttaantttgggaatgg

SEQ ID NO: 2381 - DNA, 437 bp, Homo sapien
aaaatatttctgggattacaatgaatgtaagcccaaattgtggaattgccagtaacctggatggggaaaagcatttcccatagcactccatgtaatatgagtgctctgtgagatgttcatcagtgttttatagaaatggtgttgctgggaaaccaagtttgcacctggaaacttacaatgcactttagcgcagtaagggcttggcatccggtagtgaaaaactgtctaacccagcattgcccaaactattttgacaccaggacctttttctcctttgggatacttatgaacctctcactaatgtcctgtggagaacattttgggaaacactatgttagatagttctttaaggagacaaaacggtaatgaacagatagcactgggggccagaattatgcatgcattttgtaacgtccagtgtggcgttgaatagatgt

SEQ ID NO: 2382 - DNA, 401 bp, Homo sapien
  misc_feature (1)...(401): n = A,T,C or G
tcatggacaaggaaaaatgctgtaggtaggctgaggctgttaagtaaaatgtcttgctattctttctcttctcttcttcagttatgttacagaagcaagggtattgcttctacatgggcaaatttgtctatgccctgaaagaaaccaagagtgaaactcaacntgggaaagcatcagtttcactttattgtcactagcttcccaattttgccgggaaatttcttaatttaaaggtaataaccaagctgacattttactgtagccaaatcctacagagggtttcaaaatgagtgggtgaaaaaatatacaagcttaacatgcttatacttatttaacatgaagtgaaaatccattagcatagttcaggtatgtgcatggtatgtgcacgcacatggggcagt

SEQ ID NO: 2383 - DNA, 227 bp, Homo sapien
  misc_feature (1)...(227): n = A,T,C or G
atactctagccaagattgactgtattagatgaaatgtgaggatcttgttcaatcggaaacccccgttacctcctcttttctttctctttctttttttttttttacttaaacattttatgatgattagatggaagtggtcttcggnaacttaatgttgggtccagtcctcaactgtcatactactttatacatcacatactaaccttcttcaagatgggtgggggtgg

SEQ ID NO: 2384 - DNA, 443 bp, Homo sapien
  misc_feature (1)...(443): n = A,T,C or G
aaaaagataccaaggaaaaacataaagacacacatggcaaagacaaagaaaggaaagcgtctctcgaccaagggaaagagaagaaggagaaggctttccctgggatcatctcagaagacttctctgaaaaaaaagatgacaagaaaggcaaagagaaaagcctggtacatcgcagacatcttcacagatgagagtgaggacgacagagacagcctgcatggggagcgggttcaagatgggagaggccagcgacttgccgaggacggacggcctccaggagaaggaggaaggacgggaggctatgcctcngacaagacacaggaagtcttctgacaagcagcaccctgagaggcagaaggacaaggagcccagagacaggagaaaggaccgaggggcttgccgacgccggggagagaccaaaaagagaaagtctttgaaaagcc

SEQ ID NO: 2385 - DNA, 434 bp, Homo sapien
  misc_feature (1)...(434): n = A,T,C or G
aatacgagcattacatttactggaacatcacagtcataagatcatgactatgctaaataaaataaaaaagacaanattaaagacagctacaagagcacacactagctacacgagatcagcaagctgtttcctaaaggcactatacttatatgtaaattatacatatgtaaacacacacgagaaaaaaaaagtttgatggatttatgtncaaatagaaaatttccactgaggaaaaaattanctttaatgttttagcctttttattattgttagaaatggcaagncatggttatccattttaaatatttgtaagggaattattttgattggtttgggctccctgcaactttcaagaagccagcaacctagtatctacaagagcctttncatggggtagnagttggcttatgccaggatttccatccnggaggagg

SEQ ID NO: 2386 - DNA, 446 bp, Homo sapien
  misc_feature (1)...(446): n = A,T,C or G
tgaatctgacttagaagtggtgtcatctcagcaacctactaccaactgccagtcatcatgtactgaaggcgaagttacaacctgaggaaaattaggaaaaaagagctcaacctaaatgaaattcatcaatctctgttattttgtcattaattatcttcttagacttaaaattgaacttgagataaataaggaagaattgagtagatttgatttgcctggagtcttttggaggcatgagaattttctaatcttgacattttgtttgcctgttctagacaggccctgtgggtcttgacccttcagtaagttaagataaatttttaaaagaaccgtagccaaagatggaacctttgtaatttatgttgattttaataaaatcntaatttaaaaaaatggaaatggggaagaattgtccaggaaatttaggatagccactccagtataan

SEQ ID NO: 2387 - DNA, 411 bp, Homo sapien
  misc_feature (1)...(411): n = A,T,C or G
aaaacctttttatcttaaaattccttgccactgttttggaaaaagaaaaggagagtcgttgttgcaggagatagtatttaaaattatgtgtgcatctatatatgatatggtaatttcctcctcataaaataagcaagtattatctcaaaccttgaaacctagacgcattttattccagatcaggtagaggaatatggattgggagaaatatttagaattaaaagaaaattttttttcctcagctccgactatgtctgaaagttttaatgattcccaattctggcccagtgtagggctagtcatagagttcatttctggggattcacaaacatagtagactcaaggttattccaaagcccttcacacaatggtgaaaatatcagtacacnggtctctggggaaagacactgg

SEQ ID NO: 2388 - DNA, 450 bp, Homo sapien
  misc_feature (1)...(450): n = A,T,C or G
agggttgaaaatgtgtttgctgccttgctcctagcagacagaaactggattaaaacaattttttttttcctcttcagaacttgtcaggcatggctcagagcttgaagattaggagaaacacattcttattaattcttcacctgttatgtatgaaggaatcattccagtgctagaaaatttagccctttaaaacgtcttagagccttttatctgcagaacatcgatatgtatatcattctacagaataatccagtattgctgattttaaaggcagagaagttctcaaagttaattcacctatgttattttgtgtacaagttgttattgttgaacatacttcaaaaataatgtgccatgtgggtgagttaattttacccaagagtaactttacctcctggtggtttaaaaaagtaagttaataatggtaatngtaatccttccatcccaaan

SEQ ID NO: 2389 - DNA, 431 bp, Homo sapien
  misc_feature (1)...(431): n = A,T,C or G
ctttcatcctaagtgctggagtagacaagactacaattatttgggacgcacatactggtgaagccaagcaacagtttccttttcattcagcaccagcattggatgttgattggcaganaacaacacctttgcttcttgtagtacagatatgtgcattcatgtctgtaaattaggacaagacagacctattaaaacattccaaggacataccgaatgaagtaaatgctatcaaatgggacccaactggcaatctcttggcctcctgttctgacngacatgactttaaagatatggagtatgaaacaagacaattgtgtccatgatttgcaagcacataatagagaaatttatactatcanatggagtcccacaggcccagggacttaatnatcccaaatgcccanccttatgttagcaagtgcatcccttga

SEQ ID NO: 2390 - DNA, 457 bp, Homo sapien
  misc_feature (1)...(457): n = A,T,C or G
ctttaggaccactggacttttccacaaaaggacagagtataaatgtccatactccaaacagtcaaaaagttgattcacaaaaggctgcaacaaagcaagtcaacaaggcacacaataggttaatcgaaaaaaaagtccacagtgagagaagcgctgagtcctgtgcaacatggaaagtgcagaaagaggagaaacctgattggattgatgaacaatgaagcagctcaggaaagcacaaggagaagacagaaatatcaagagtctcaagaacctttgaatgaagtaaacagtttcccacaaaaaatcagctatacacaattcccaaactcattttatgagcctcatccaagattttaccagtccagatatattccaagaagtcaagatctccatcttgggtattaaatacaccttccacagttcagcaccggggattcccagactttggaaagtttcn

SEQ ID NO: 2391 - DNA, 513 bp, Homo sapien
  misc_feature (1)...(513): n = A,T,C or G
atagcctccttctcctcatttttaaactgcatacattactttcaaaataggtatagatattctgtcccgccttttgagctattagcctgttcctgtttccctttgtcacctaagcaaggctttttctgagaaggtagtgaatggtttcaaatgttgcatactataagaataatcattgggtaactgttgtttagaccaacacttagaaatactatatttgtgccttttcatttttaattttaatgtgtgttgatatttggagcacaaataatgaaggtgccataatatggcttgccaattgttacctccttgaatagtcatgtgtcattgtcttgaattggtaattggagaaccttgcatgaaatatgtgatcgtgtgtgtgtgtgtgtatgcgcgtgtgtgtcngtgtgtttgtgtacataccngtaattgcctggggcctgtgtggnggtatgttaccaaagagtgaattcntggaaatagaaatcnggtaaatgttgnaagttcngggta

SEQ ID NO: 2392 - DNA, 502 bp, Homo sapien
  misc_feature (1)...(502): n = A,T,C or G
gcaactccacatgataaaaaaataaaaacagcccaaccgagtttcggaattaagtattcttctagtaagtgattcaaacttgtaatatttgccacaggactgacttatttatttactagctagaagctccttaagttcacttgtttatcagggcatatacagaagggtttgttaaaacctccgatgttaacctttacaacctttcctgaccctggtgcatgaattctcaagtactgtatttcactgtgttggtgtgtctgatggaaatttccgaggtggtcccacaaaaatattttatgtagtgtgccttcaaagagaaccatttatttctcttcacttatcgtcccacaaagtcacatttggtggtggtcagccaagtcgcatctgggtccagttttactcttggtcccaattttaaagagaaatngggaatgagtttgcccggtgagacccataccattgcaatgattanctgggcncttaaagtccagtgntggcnggt

SEQ ID NO: 2393 - DNA, 475 bp, Homo sapien
  misc_feature (1)...(475): n = A,T,C or G
ttgggcatggtcaagtttttacccagaactcttcttatagtcaccacgaaaatacacatacaggagtgaagttctgtgaacgtaatcaatgtggaaaagtcctcagcctcaaacactcactcagtcaaaatgtgaaatttcccattggagagaaagcaaacacatgtactgaatttgggaagatcttcacccagaggtcacatttctttgctcctcaaaaaattcatactgtggaaaaacctcatgagcttagcaaatgtgtaaatgtttttacacagaagccactactcagtatatatctgagagttcatagagatgaaaaactctacatatggtactaaaatgtgggaaagggccttcatcccagaaattcagaattaattatgcatgagaaaactcntactagagagaaccctattaaatgcaatgaatggtgggaaatcatttttccaggtgtcatctctacttcaggcat

SEQ ID NO: 2394 - DNA, 543 bp, Homo sapien
  misc_feature (1)...(543): n = A,T,C or G
tttttttttttttttttttnttccagtatgaattgtctgatgtttattgaaatttgacctatcagtgaaggctttcccacattctgcacatatatatggtttctcccctgtgtgaattcgttgatgtactttgagatgtggtttcttggagaaggatttctcacagtcaggacatttataaggcttctctgtagtatgaattcnctgatgtgtaatcaactctgacttctggatgaaggccctcccacaatcagcacaaacatagggtttctctccagtgtgaatggtctggtgtttattgaaatttgacctgtcggtgaaggccttcccanattcagcacatatataagacttttctccagtatgagacttctggtgagtattgagatttgacctgttggtgaaagccttcccaaattcagtgcataaataggggtttcncccccggaagaaatcccctaangcatctgggagttgtgacctagaagggaaagatttcccaaagtcactgcattcaaaanggcttccncccagtaggaatcc

SEQ ID NO: 2395 - DNA, 445 bp, Homo sapien
  misc_feature (1)...(445): n = A,T,C or G
cttcatcgaataataggtaccagtgtattaaaaatgtgtattttttgcagccccttgaaccagagtaggttcagagaaactcccaaagtttgtactttagacacatcaagcttgattggtaacttccctccttttttggggaacatgtttgtgtcctattaacttaattggatagatttttaaatatttcttatttttggcacacggaaagggtagttcgagtacagaactttgatttttggtgtagatgcagagggaatgatgggtaaatttcctaggtttatgtgaatttagggggtgtatgcattttgaaacaatctactaacagatggtgctgaaatctattaccctacatgttttctagttgttcagcattatgttaatgaagcctccatataaggagtgnttccctgggcacagttggtaaagttgactgccaaccttc

SEQ ID NO: 2396 - DNA, 352 bp, Homo sapien
  misc_feature (1)...(352): n = A,T,C or G
nttaatgtgaactaacatggttttaatgtgacagattaggattcagccttttaatcttaaagaaaatattgagcagtaagaagataaagtatgtaatcttagactaaaaagacatagacccatgttacttggaacatattttaacatattaatgaactgaaagaagaaaaaaaatttttttttaaattttgtttctgttatttactttttagactaagaaatcaacaaatatttcttgagcactgttttggtgtcactcttattttcctttttccaaccatataactgaatattttcacaaataaactcctactaaggaaaatgctatttaagtagttaaatctaattagaa

SEQ ID NO: 2397 - DNA, 352 bp, Homo sapien
  misc_feature (1)...(352): n = A,T,C or G
tttagaccctccacctaattgcagtgctggtcccaaaggcgataacatctatgaatggagatcaaccattctagggcctccaggatccgtgtatgagggtggtgtattctttctcgatatcacttttacaccagaatatcccttcaagcctccaaaggttacatttcggacaagaatctatcattgtaatattaacagtcaaggtgttatttgcttggacatattgaaagataattggagtccagcactaaccatttctaaagtcctcctttctatctgctcacttcttacagactgtaatcctgccgaccccttggtgggaagtattgccactcagtatatgaccaacagn

SEQ ID NO: 2398 - DNA, 374 bp, Homo sapien
attcggcacgagcatgaaacatgctcattttacctaacagtaaacaagtatgttttgatatatatctgttaatatgcttatagtggtaagaaatggacttgaggtcccaggagatttcattttattcaccctggtcagatacaataaaggctatgagtataaatacataacttcctaaccaggtgtagggcatgttcatgaatatcaaatcttttgatgctggacccaagagaggaaaagttgtagctaaatgttgatttacttataactagacgtctatgtgagaaaatatatgtatacatatatatgatatgcagaagtcactttttttatcaggctttattctcccttaccaaagccacagtttaactggt

SEQ ID NO: 2399 - DNA, 352 bp, Homo sapien
  misc_feature (1)...(352): n = A,T,C or G
agcgagtgacacaaataaacccctggacccccttgttccctcagctctaagggccgcgatgttgtacctagaagactatctggaaatgattgagcagcttcctatggatctgcgggaccntttcacggaaatgcgcgagatggacctgcaggtgcagaatnaattggatcaactagaacaaagagtcagtgaattctttatgaatgcaaagaaaaataaacctgagtggagggaagagcaaatggcatccatcaaaaaagactactataaagctttggaagatgcagatgagaaggttcagttggcaaaccagatatatgacttggtagatcgacacttgagaaagctggat

SEQ ID NO: 2400 - DNA, 355 bp, Homo sapien
  misc_feature (1)...(355): n = A,T,C or G
gcaaancaagtacaacctcacttgaaataattaagaaccattttactttacctgtccctaaggccagcaaatctccattcagctcatggcttttagggtaacggactggggaaaagagaagcatggaatgtaagtccaacattctgacttttctgagggccacccaagggatgggtttctgtcttgcctggagcactaatggaaacagcacaggttagatttctgggtgccaacanaagcaanagagaacagaaacagattgctatggcaccagagggccagcaagtaccaaagacagagactgggatgactcagcancattgggaaaagacatncaacttgtttcttcgtcaga

SEQ ID NO: 2401 - DNA, 357 bp, Homo sapien
atataagctactctcagaattgataactcataccactctttttaaaaatcaactaaccagaattcagtttttattcacagttcttatctttagctcagggcgtaatataaaagcactaggtttaaaacttacttggtcagcagcaatccacttctaggtacatgtccaaaggaactgaagaaagcatctcaatgtgtgaatgcctacctgtgttcattgcagcattattcagaagagccaagaggtggaagcaaagtaaatgtccattgacagatgaattggtaaacaaaatgcattatatacatacaatgcaatatcatttagccttaaaaacaaaattctgccatatgctacaac

SEQ ID NO: 2402 - DNA, 364 bp, Homo sapien
ttgatgccagtaaacctaatccaaatgatgtggagtttgataatctgtatttggatatgaatggaatcatccatccctgtactcatcctgaagacaaaccagcaccaaaaaatgaagatgaaatgatggttgcaatttttgagtacattgacagactttttcagtattgtaagaccaagaagactttctcctacatggcaatagatggagtggcaccacgtgtaaaatgaaccagcagcgttcaaggaggttcagggcatcaaaagaaggaatggaagcagcagtccgagaagcagcgagtcagggaagaaatattggcaaaaggtggctttcttccctccagaagaaataaaagaaaagattt

SEQ ID NO: 2403 - DNA, 342 bp, Homo sapien
ttatgcagcaagttcttaatattatttcccttctgtggaaactctctaaacaacaggatgaaacccataaattggagtcatggcttcgaaagaactaccttattgattttaaacaccattttatgagtcgttttccatatgtcttaaaagaaataaccaagcacaaaaggaaagagccaaataaaagcatcaagcattgcacagttctctccaataacatagatcatctcttactgaatttaacactgtctgatatcatggtctccctggcaaatgcgtcaactttgcagaaggattgcagttggatagaaatgataaggaaatttgtaacagagacccttg

SEQ ID NO: 2404 - DNA, 371 bp, Homo sapien
tgggacatacggatgttgtaaaagatgtggcctgggtgaaaaaagatagtttgtcctgcttattattgagtgcttctatggatcagactattctcttatgggagtggaatgtagagagaaacaaagtgaaagccctacactgctgtagaggtcatgctggaagtgtagattctatagctgttgatggctcaggaacctaaattttgcagtggcctccctgggataagatgctaaagatcctggtctacagtccctacagatgaagaagatgaaatggaggagtccacaaaatccgaccaagaaagaaaccagaagaccagaacagttgggacttaaccaaggactccccatagtgaccctctcttggccac

SEQ ID NO: 2405 - DNA, 360 bp, Homo sapien
  misc_feature (1)...(360): n = A,T,C or G
ccagtacgaatgtgggaattactcaggagcagcagaatatctttatttttttagagtgctggttccanaacagatagaaatgctttaagttcactctggggaaagctggcctctgaaatcttaatgcagaattgggatgcagccatggaagaccttacacggttaaaagagaccatagataataattctgtgagttctccacttcagtctcttcagcagagaacatggctcattcactggtctctgtttgttttcttcaatcaccccaaaggtccgcgataatattattgacctcttcctttatcagccacaatatcttaatgcaattcagacaatgtgtccacacattcttcngctatt

SEQ ID NO: 2406 - DNA, 359 bp, Homo sapien
  misc_feature (1)...(359): n = A,T,C or G
aaaacttcatgctaaaattcatatagaattttaagggacctggaaatagccaaaataacattgaaaaagaagaataaagttagtggcgtcactggggtttttatgttgttgttcttttttttttttttaatttcaaaacttactacaaagtcacagtagtcaaaactgtgtggtactgacataaagatagacatacgaaccaaagaaatagaatagacagtcccaaaataaaccctcacatgtatggtcaaataattttcaacaacgttgccaagaccatccgagtgaggaaaagacagtcttttcaacaaatgatgttgggaaaacctgaacagtcacatgcaagaaaaaccaaccan

SEQ ID NO: 2407 - DNA, 236 bp, Homo sapien
  misc_feature (1)...(236): n = A,T,C or G
gattttcaggtgaattttaactggtctattcttgcccttagtatctacttcaaattgaagtctacaaacaaagcagttcctttgggaggtttttagtttgagttttagcgtgtgtgtgtgtttgtgtgtgtgcgtgtgcgtgtgtgtgtgtgttggaatttcctatctgccctggatatattagcagagtttgaatgtagttttggcctttcnatttaagaccttccaataaaaat

SEQ ID NO: 2408 - DNA, 357 bp, Homo sapien
aaatttggcaatattagagaaaattaggaagactcaaaggcaagaccatttaaatggtgcagtgtctgggtcagtgcaagcttcagatagacttatgaaagagctcagggacatatacagatcacagagttataaaacagggatttattcagtggaactcataaatgacagtttatatgactggcatgttaaactgcagaaggttgaccctgatagtcctttgcacagtgatcttcagatcttaaaagaaaaagaaggcatagaatatattttgcttaacttctcttttaaggataactttccatttgatcctccatttgttcgagtggtgttacctgttctctcaggagggtatgt

SEQ ID NO: 2409 - DNA, 349 bp, Homo sapien
tttcactgtctaaagcatttaatggtctttctttaacacagccaactcccccgggtttgaaacagtgttaaattctctcttgcttgtggcaaaagaagctgtcaagtccaacactgaaaaattggtaccatttcctggccagtaagcacagaacagaggggctaaatattttatggttttattcatttactgtgttctcatgctgtgtttttcttttctctgtctctccctcctgctcgtgtctgcccagggctgattgttgtgacattggccgtatgctggatgcccaaccagattcggaggatcatgggctgcgggcaaaaccccaagcacgactgggacgaggtcc

SEQ ID NO: 2410 - DNA, 365 bp, Homo sapien
  misc_feature (1)...(365): n = A,T,C or G
agtaatatcagtaataggaaaatctggaaaattcccaaatatttggtagcatatctaaataaggcttccatcaaagaagaaattataaggaaaattaggaactattttcaatggagtgaatatgcaatatatcccacaattatttgtgggatacattatgatatgtatattgtgggatatattgtgcagttaaagcaccacnttacaggaattatgtacagttggcccttgaacaatgtgggggttaggagtgctgactctccccctgagcaaaaattcaccatataactatggagtctccaaaaagcttaactggccccatatcctacctattaactgggaagccttacccatnatagtcagtt

SEQ ID NO: 2411 - DNA, 278 bp, Homo sapien
  misc_feature (1)...(278): n = A,T,C or G
ntgtanagnattgcnananngntcacattgcatncnngtntgctgagntnnannnanngattnatcgcngtactggtnannnnctggnanatggcncnnnantnntgnngtctggtgangntgcnattgttgatatngntcntnnnnagcncatgtgtgttganancntntnanactanncaccgnntgggtcggcnnngcngtnccgntgatatnnagnnngacagttgcaggtgggtantcatccaagcacgtgnacangaaggctgctggatctg

SEQ ID NO: 2412 - DNA, 391 bp, Homo sapien
tctcagggataccaaaatctgcaggtgctcaagtcatttatataaaatattacagtatttgcatataacctttgcacatcttccatatactttaaatcatctctacattacttataataatgaatgtagtgtaaatgctatgaaaatagttactacactgtattgtttatttgtatttttattgaattgtttcggggtggggggcagctgtatctttcttagtaatagaacccctggttttagctgggcacatgactgccctcaataaagattaaagtaccccagccttccttgagattgtggccatgtgactgaactttagacagtgagatataagcagatatcctctgtggcagtgttaggaaactattaaaagacagtaagaacatta

SEQ ID NO: 2413 - DNA, 140 bp, Homo sapien
  misc_feature (1)...(140): n = A,T,C or G
tggttaancnaaacntctnaatccataannccncatgtgacatccacttccaanttggctacgaggatgangtagagttgggtctggancnctacccgggnanctggggncanagnacngggtttngaccgttactctgc

SEQ ID NO: 2414 - DNA, 336 bp, Homo sapien
  misc_feature (1)...(336): n = A,T,C or G
taaagtgatgttngtgtgttttgtacacttagggatatatatatatagctacattcacacactcacaatttaaaatatttcccctagttttttggggggataggaagaaagatttgttactgtatttttttaactacataaaaatagatcaataaatgtcagcattggcctcctgtgtacaaaccaagagcttttacagatccagaatttattngtttaanatgcaggtgaacttttttttgcgtttggtttacttgtctgtcaaatgtttccttaaacatgaaactgaataaggagaagagtatttttaacacttaaatttcttggcnaatttta

SEQ ID NO: 2415 - DNA, 457 bp, Homo sapien
  misc_feature (1)...(457): n = A,T,C or G
aacgtcactggatgcctaagaaacatgagttctgctggcgctgatgggagaaaagcgatgagaagatgtgacggactcattgactcactggtccattatgtcagaggaaccattgcagattaccagccagatgacaaggccacggagaattgtgtgtgcattcttcataacctctccntaccagctggaggcagagctcccagagaaatattcccagaatatctatattcaaaaccggaatatccagactgacaacaacaaaagtattgggatgttttggcagtcgaagcnaggaaaagtnaaaagagcaataccanggaccgtgcccgatgccggaggaaaaaagagcaacccccaagggcgtggagtggctgtggcattccattgttataaggatgtatctgtccttgatcgccaaaagtgtccgcnactacacaccagaagcatncttaggagc

SEQ ID NO: 2416 - DNA, 404 bp, Homo sapien
  misc_feature (1)...(404): n = A,T,C or G
gaaatcttgagtcttctgagaaaactgtacaagacactacgggaacagtttgcctccctcccagcctcaaccacaattcttccatgctggggctgatgtgggctagtaagactccagttcttagaggcgctgtagtattttttttttttttggctcatccttaggatacttcttttaagtgggagtctcaggcaactcaagtttagacccttactctttttgtttgttttttgaaacaggatcttgctctgtcacccaggcttgagtgcagtggtgcgatcacagcccagtgcagcctcgaccacctgtgctcaagcaatcctcccatctccatctcccaaaagtgctgggaatgacaaggcgtgaccacaagctcccagcctaagcccctnaacttgctggta

SEQ ID NO: 2417 - DNA, 475 bp, Homo sapien
  misc_feature (1)...(475): n = A,T,C or G
ttgagtgaaacagncttcaaagttatggcaagagatgagttaattctaagatggaaacaatatgaagcatatgtacaagctttggagggcaagtacacagatcttaactctaatgatgtaactggcctaagagagtctgaagaaaaactaaagcaacaacagcaggagtctgcacgcagggaaaacatccttgtaatgcgactanaaccaaggaacaagagatgcaagagtgtactactcaaatccagtacctcaagcaagtccagcagccgagcgttgcccaactgagatcaacaatggtagacccagccgntcaacttgtttttcctaaaaatgaaaggtgaactggaacagactaaagacaaactggaacaagcccaaaatgaactgagtgcctggaagtttacgcctgataggtaaacaaatcatactccccagtcaagacttccctggccagtccnctacgagaaagctg

SEQ ID NO: 2418 - DNA, 488 bp, Homo sapien
  misc_feature (1)...(488): n = A,T,C or G
ttatgtaaaggangggttgggggaggattattgaataacatgattaaccgttattttgcttctctttgatttctgccagtgttttgcagtcaatacataaagtcgcagttggacgagcctctaaacggcgcagaccaatttcgataccacaggtttcacagaaaccaatagtcatcgtttttaatcgcttcaattgattgttcgattttgcggatgagtttacgtccacggtcacgtgtacgtagttcaattgcaaactcttcttcttgtgtcgcgcggtcattcacntcaaggcaaaacgggtgtttttcgtccttgcaatggtgttgaagtgtgccggtcaacttcctgacaatcaactctgcttttccatgccaacaaaatttggcggaagtgctcaagctgancttcagacatgtaatccctcaatgnttttcggctggataagggtccnatacccaaataaagcttgcaagtaagaaccaccg

SEQ ID NO: 2419 - DNA, 455 bp, Homo sapien
  misc_feature (1)...(455): n = A,T,C or G
ccaggcaacatgatggtgtcatggaccaggctggtagcagcggagataatgagaagcagggaaattctggaggttaatccaaaagaatctgctaatgtgagataccagtgaaggaggcatcaaggatacctccaagatttttagtcttcttaacaaatatctgagtatctactatggtccaggctctgtactacagttcacatctttccatttaattcaatcaattttttcaaagtaggggttatcagcccctatctaaaagagaagttcagagagactttaaaactagcctttagncggggcatggtggctcacacctgtaatcccagcactgtgggaggccaaggcaggtggatcccttgaggtcaggagtttgagacnagactggccaacatggtgaaaccccgtctctactaacaatacaanaattagctggggtgtggttgcgcctgcat

SEQ ID NO: 2420 - DNA, 412 bp, Homo sapien
  misc_feature (1)...(412): n = A,T,C or G
ttatgtaaaggaggggttgggggaggattattgaataacatgattaaccgttattttgcttctctttgatttctgccagtgttttgcagtcaatacataaagtcgcagttggacgagcctctaaacggcgcagaccaatttcgataccacaggtttcacagaaaccatagtcatcgtttttaatcgcttcaattgattgttcgattttgcggatgagtttacgtccacggtcacgtgtacgtagttcaattgcaaactcttcnttcttgtgtcgcgcggtcattcacatccaggcaaagcggtgttttcgtcttgcatggtgttgagtgtgcggtcaacttctgacatcaactctgctttccangcccaacaaaatttggcggaagtgcccaagcctgaccttcagacatgt

SEQ ID NO: 2421 - DNA, 513 bp, Homo sapien
  misc_feature (1)...(513): n = A,T,C or G
gcattgacgagacacatttaataacatacaaagctaatttagtgcctcataaagaataaggataaatggatccctatgccctcaaaccaaaaacaatctttattttcacatagttgaattaagtatttctggggccagtgtgggggaaagatggtatggaatgggagaatccatccttcctgcaagaggagaaagccagggactactctgtctatatttttacaaggaaattcttcctttgtttctagtaaacaaactcagaggcactgatgttgggctggaacaaggactttctggtggggagggcagctggactgcataagacttgaggttccatttttgaggttcaccttgccttggggtctgtccttggttaccaccactgatgtctancatgctggactttggagaactttgcttccacttcagcacaccttggtaccttcagtcaagcttttattaaaganttaaggtagagccaggctgtggtgagattaggaaatcctcccggtc

SEQ ID NO: 2422 - DNA, 344 bp, Homo sapien
ggtctccaacccatgatcttgtgatccactcacctcggcctcctaaagtgctgggattacaggcatgagcactgcgcctggcctccttcctttttctagctacagagttgtctattgtgtggtcaagctgcccctactgatggacatttgagtggtttctagtttttttacaattacaaatgatgctgccatgaatagctttatgaatctgtcttctcttatttttgccaagaggggattgccagggaaagggtaaattcaaatgtaattttgcggcaaaagttcccctccaggtaagggcttgcaccattttgttttcccaccagacaatgtacgagaggggc

SEQ ID NO: 2423 - DNA, 180 bp, Homo sapien
gttccaacacacagtccttccctcagtgactcccttggcaaccctcatctgcacactgattgccatattgccctctattttctgtctttggtttaaaccccaagggcccagaggctttctccgatgtctaactctttgtgccttgagctcctttatgtttgggtggcatgttcctggtta

SEQ ID NO: 2424 - DNA, 489 bp, Homo sapien
  misc_feature (1)...(489): n = A,T,C or G
tttttttttttttcagaggtctagatttacatgtattaagccacacgtcaggaaattctctgataaatacatgtcattttaataatcagtactggatagtggatgnaaacatgcattagactaaaaatgccacaaatttgtttttatatccattcactataaaacttccttttttaaaatttaaagtcttgtttccnattttagaatangcaataatcgggaggatacatgatggggagccagttttcagtaaaagatgcaccatgggtccatccaagtaacttcatcagttgaatacaatttttccagttttcttttgttggtttttcctccacaagtttagttgcaaatttaaggcctctcccataccattttatttaccaatgcatgntntatatgcaaatgtcaaaccttattggtcaaagagatccggcccatttaggaagttccccaaaatgnttcnngccngagnatnccaagggggctttc

SEQ ID NO: 2425 - DNA, 479 bp, Homo sapien
  misc_feature (1)...(479): n = A,T,C or G
gttcttaggttcttagtctgtgaatctagcaataggcagtccagatttctgagtcgtactatggttttgccttgtcactgtgaggccctactaggtgtaagcattctctctgaattttaatttcctctcattaaaataggaacaaaatttgctatcctttagattaggagctgaagattcatttccctgggaatgtttcccatttagcttcaagtttcagctcaaacatcaccttctttctgactcctttcattcattcctccaggcagtaaggggctaccatagtactttgtttatgcctgtattatatgacatcactgtagttgcttgactgtttctcctactgttctgtaaacttattaatgggtgagaatctaattttactcatcttgatggcttcatgatccagcacagtgcctcacacaaagaactattgggtggggtggatggatggntggaggaatggagacagttggctt

SEQ ID NO: 2426 - DNA, 465 bp, Homo sapien
  misc_feature (1)...(465): n = A,T,C or G
gcttaaggctacttttttttctaaaactttccgttctttaaggacttctttaattctggcggctttaggttccaaactctttgttgatgattcttctaagtccacactactcctgccttgacccttggtttttgaagactttgtcttttctgctttctgttttcgtttttcttcaagtttttctctattgatttgccttcttaaaagcctctcttctttttctttggcaatggactgtcgtcgttgttctacagtaagctcatcatcagaatcactatagtattttgagtaaagatatgggtttgtggacatacgcatggccgtacactttttgtttttcccttcactagaatcactagtttgaagtttttggtttaattcnggttggtcntctcctcaacaacctgacggaaatctctccttccttccaangctaacagacggtaacaacttcctccccaagga

SEQ ID NO: 2427 - DNA, 493 bp, Homo sapien
  misc_feature (1)...(493): n = A,T,C or G
tgagacagagtctcactctgttgcccaggctggagtgctggagtgctggagtgcagtggtgccatctcagctcactatagcctccgccttccgggctcaagcgaccctcctgcctcagcctcctgagcagctggggctacaggcgtgacacgcccgcccggacgatttttgtatttatagtagagacggggtttcaccgtgttggccagggtggtctcgaactcctgacctcaggttatccacccaccttggcctcccaaagtgctggaattacaggcgtgcacncacatccggcctcagaatatcttttctagcacaaactctaaaattgttaacttaattttaccaacattggtttcactagctaataaaacagaaaaatcacttgggcataaaatgaaaaactattccctatgtcctcttttcattaacagtctaaattattctgaatcactcttagctaattacaattacatacagcttgacctcgtgc

SEQ ID NO: 2428 - DNA, 466 bp, Homo sapien
  misc_feature (1)...(466): n = A,T,C or G
tgagacagagtctcactctgttgcccaggctggagtgctggagtgctggagtgcagtggtgccatctcagctcactatagcctccgccttccgggctcaagcgaccctcctgcctcagcctcctgagcagctggggctacaggcgtgacacncccgcccggacgatttttgtatttatagtagagacggggtttcaccgtgttggccagggtggtctcgaactcctgacctcaggttatccacccaccttggcctcccaaagtgctggaattacaggcgtgncacncacatccggcctcagaatatcttttctagcacaaactctaaaattgttaacttaattttaccaacattggtttcactagctaataaaacagaaaaatcacttggcataaaatgaaaaactattccctatgtcctcttttcattaacagtctaaattattctgaatcactcttagctaatt

SEQ ID NO: 2429 - DNA, 420 bp, Homo sapien
  misc_feature (1)...(420): n = A,T,C or G
tttttttttttttttttttttttttaatgtgcaggctattcaagttcaatagtaaaagctcaaaaatgaatgttctacnccatgctgaaggagctgaaanngccttcttcatattttgcactttctggnagttccccngttttttcnaattcccnaaaattgtgtgggnggagtggagccctgcagttggggggtaacatggaccactgattttgccctttgaccctgcacaatgacctttgcatcagccaaactcattgccatgacaactctttgtactgtgtccgtgccacagatctgttggtcacattgttaatagtaaaggggacaagttggagacggtcaatttttanattttttgntgcaattttttcntcaatggttgtaagtagttttttttttttttaaaaataaaagggg

SEQ ID NO: 2430 - DNA, 505 bp, Homo sapien
ggttggagtgcaatggcgcaatctccattcactgcaacctccatctcccaggttcaagtgattctcctgcctcagcctcctgagcagctaggattataggcatgcgccagaaggccagctaatttttgtatttttagtagaaacggggtttcaccatgttggccaggctggtctcaaactcctgaccttgtgatctgcccaccttggcctcccaaagtgctgggatgacaggcgtgaccccttgtacaaggcctgttattgaattggaagtactttaggaaacatggaagcaacttgtttcaatcactgcaggtcattctgtcagtacttctaccaaggtaaaccaaataaacggtaaaacttcattcagtcacctccaacatttggaagctgtgctctgggtgtaatgcaaagttcccctggagagtcccggtgaaatgcagagctcaccaagtcaacaagcccattaaaagaagcaggcaggtcaattcccccgtgccgaatt

SEQ ID NO: 2431 - DNA, 540 bp, Homo sapien
  misc_feature (1)...(540): n = A,T,C or G
ttatgttcaatttttggtttattaaaacaaaactacattttctgtgtttcttgcaatacactaacaagcataaaaatcaatcagcatttccaagtatgttttgctcacaaaatcgcagttatttcacagtaccttatagtaattcttttcacgagtcttaacatttctttgtacaacaggcaaatagtttaataccttccatcaagacatttcagagctctagacgtttagaaataaggtcaagaatctctttcaaatgcaatcattagtttgtattaaactaaaatgccagacggaagtctcaggtttctaaaatagttttaaaaaacaggtttacagcccatagtaagtcttagaaacctcaacgatagggtcctgtcatgtctaaacactacaactatctggtgggataaaaatctgcattcaaacgtacaatnctttcttccagatccggaattaaaaccttatttaccccaattcatccanggaacccggaacgttcgggggaaaaagccngggttcatgggggctgttcnccct

SEQ ID NO: 2432 - DNA, 394 bp, Homo sapien
  misc_feature (1)...(394): n = A,T,C or G
tgagatacggagtctagctctgtcacccaggctggagtgcagtggcgcgccctcagctcaccgcaacctccgcctaccgagtagctgggattacaggcacccgccatcatgcccagctaatttttgtatttttagtagagacggggtttcaccatattggccaggttggtcttgaactcctgacctcatgtgatccgcctgcatcggcctccaaagtgctgggatcaaaggcgtgacacatngtcgtgcctgtcctttttttttttttttgagacagagtgtcactctgtcacccaggctggagtacagtggcacaatctcggctcactgcaacttccgcccccccggctcaagcaattctcctgcctcagcctcccgagtagctgggaccaca

SEQ ID NO: 2433 - DNA, 495 bp, Homo sapien
gatccataaggctttagttccttttctattttcttggaaggttctctctcggaatcatttttatctttcttttcggtagaaaacaattcaatggttttatctagctcatcttctatgtcagctttcatgttgtaagaaactccgtaagcatccgcctccaggaagtccttttcgtactggccggagtccttcctgctaccgccctccttgtaatcttcgcccttctctttcttctcggccttctctttcttggctcgctctcggtcgtggctcttcttggatgaagatgaggagtgtctgtgcctctccttctctttcagcttctcagggaggcaggcgctctccctcggcttgtcgtctccaggtggctccgtgaaagagacctccaggaaggcagtcagcccggctcctgccctcggtccgtgaagctgtcagaggagacctcgctgaatttatcgttggagtcttctctgtactcatggagaagcctcttct

SEQ ID NO: 2434 - DNA, 535 bp, Homo sapien
  misc_feature (1)...(535): n = A,T,C or G
tcttttctgtcccttaggatccagtgctgttatagtctctagtctatctgtaatttactatgtctgaaccaagaaattacttgcatgaattttaacaatataatctcattttgggtacaatttcaagaataagaaggagatatttggcactgagtggtttcccattatccataccatcacacaatgaaggtgatcacataaaattcatatcccagtttctaaaactcagagtatgattgctaaaatcagaaaactcanatattttgtacatttggcaggttaatggttatggcatacatttcaagccaaagagtcatgtctctaaatcggtgtgtctgtgacactctgaaaagaagctgggtgaataacaacttattgctcaaatatttgacaaatttcagtgtctttcccagagacagtgtactgatattttcacattgtgtgaaggctttggaatnaccctgagtcnactatggttggtgaatccccagaaatgaactccatgactagccctacaccgggccagaattgagaa

SEQ ID NO: 2435 - DNA, 407 bp, Homo sapien
  misc_feature (1)...(407): n = A,T,C or G
ttttgagcataatacccttttactgatgtgtcttacagattgacatgaccaaagtcataggttttcatttaatttccaattcccccttccacaacatgcaccaactgaatatatgctctgggagccataaaatgtaccaaacatctacctcttcaaaagantgcattaaaatattttaaagaattttttgtttaaaaggtgaaaaanatataaacaagaaactgattcactcccttacttcatgcatccataatctaaaccaaaaacgaaattttaaagcaagaacaaactactgctgcangtttttgtangtccattttctctgnacatacaaactgctcactactgaagggaaaaaangattataatcccanggtgtctgcnggattcaaagggggagaacccgg

SEQ ID NO: 2436 - DNA, 408 bp, Homo sapien
  misc_feature (1)...(408): n = A,T,C or G
ctaatacaaagcaattttattttttagagtgtccacaaactttgttaaaatatgttctctttttaaagccaattaccttaaaaatgtctggaaggaaacactgaaataagaatacaacatttcggtgaagagctggaaacttaaaaaattatcaaaaggaattttggtatcatcttcagagaaaaaataaagcaagaaatactaacatcaaaaggacaggtatgatgatgcgataataataaacatctgcgtttgtctcttcactaagagtaaactgggaaattgtaggccaaagtccagttgaactttctaagtctgtgatccccgtgctgactgtggaagtgtatttataccaagatggagatcttgacttcttgaatatatctggactggtaaaatctngatggg

SEQ ID NO: 2437 - DNA, 451 bp, Homo sapien
  misc_feature (1)...(451): n = A,T,C or G
nctcccgagactctccttgcttggaattctgcccactctgcggagttagcagtcacgacctccagcacaggatgtggtaccacagattgtcccacctacacagcaggcttcaggacttgctgaagggaggagtcatatatccggcccttccacagcccaacttcaaaagcttacttcctttagctgtccattggcaccatacagcctccaagtctctgacttgtgcttggcagcaacatgaagatcattttgagctgaaatatgctaataccgtgatgcgctttgattacgtctggcttcgagaccactgccgctcagcatcgtgctacaactctaagactcaccagcgcancttggaatacttgccagtgtggatttatgtatcaagccaaagaccattcgtctggatgngaccacantctttttcacttgggcagatggtcatgtgact

SEQ ID NO: 2438 - DNA, 369 bp, Homo sapien
  misc_feature (1)...(369): n = A,T,C or G
aaagaaagagaaagaaagaaaagaagattgtagctagggggagagtaggtgaaaagatgaacaacatgaccgggaagatttcctaatctcaccacagcctggctctaccttaagtctttaataaaagcttgactgaaggtaccaaggtgtgctgaagtggaagcaaagttctccaaagtccagcatggtagacatcagtggtggtaaccaaggacagaccccaaggcaaggtgaacctcaaaaatggaacctcaagtctatgcagtccagctgccctccccaccnaggaaagtccttgttccagcccaacatcagtgcctctgagtttgtttactngaaacaaaggaagaatttccttggtaaaaattt

SEQ ID NO: 2439 - DNA, 462 bp, Homo sapien
  misc_feature (1)...(462): n = A,T,C or G
aaaattacttgaagctggattttcatgaagttctgaatgagtgtaaatgttttttaggatactataaagagtgatgtttttcataagcaccataaaatgggttcctggaaaaactgattaccttagcatccctgtaaatataacttatggtagcagattggggaaaatgaagcagcccacttgaataattgacaaagtctgcttggagaacattctaaggtacaaatatcatggagctcctttttcctttctccactaattgcgtgatgagctattgttcctggcctggtaattccccaactcggctgtcatttgaagtggcagacttaatatgggaaagttttnataaattatgngtttgaaaaagcnttttaagatgattncggaaagtttccaaaacaacagaaaaaaaaagccagggcattttaganggaattggcgggcccttaaatgggtgaacgt

SEQ ID NO: 2440 - DNA, 272 bp, Homo sapien
  misc_feature (1)...(272): n = A,T,C or G
ctaaatacgccatttcagttgctcgaaagatcggtgcccggatatatgcattacctgatgacctcgtagaagtgaaaccaaagatggttatgacggtgtttgcatgcttaatgggaaaaggactgaacagnataanatnatcatttcatatgattttntgccacattaaacatattgtatgcctcacagtttacaggattcctgaaaatgtagtgggtgtaaaccagagattatttgtatgctcaaaantagttatatattcattaatgaat

SEQ ID NO: 2441 - DNA, 379 bp, Homo sapien
ggcacgagtgggaaaagaggcccctctcgtacattgtctggtgggaaaacaaaatggtgcaagccctacctggaggggaacttttgccgcaaaattacatttgaatttaccctttccctggcaatcccctcttggcaaaaataagagaagacagattcataaagctattcatggcagcatcatttgtaattgtaaaaaaactagaaaccactcaaatgtccatcagtaggggcagcttgaccacacaatagacaactcctgtagcctagaaaaaaggaaggaggccaggccgcagtggctcatgcctgtaatcccagcactttaggaggccgaggtgagtggatcacaagatcatgggttggagaccagcctggccaat

SEQ ID NO: 2442 - DNA, 195 bp, Homo sapien
aagaacaagcagaagaggataaccaggaacatgccacccaaacataaaggagctcaaggcacaaagagttagacatcggagaaagcctctgggcccttggggtttaaaccaaagacagaaaatagagggcaatatggcaatcagtgtgcagatgagggttgccaagggagtcactgagggaaggactgtgtgttg

SEQ ID NO: 2443 - DNA, 465 bp, Homo sapien
  misc_feature (1)...(465): n = A,T,C or G
atcaacccaagagtggggaagtaactccaagctgcccactactttgtgaactattatatgaatctgaatttgacagccaactgtggattatttttgaccagaacaaaagacagatgggttcaggcgatgcctatccacatcagtattctttgaacctggagaaaggagattatacaattcgactacagattcgccatgagcaaatcagtgatttggaacgcccttaaagaccttccatttattgtttccccatagattgtctaatacccttgagcttagatattcatgaaaatcantaagttttgcacttcctagggaagaagnaatcaagcaatttngacattaccaccccaaaatataaccagccattctttgttacttcctttacctgatgataaatacctaaaggggcaggacctggatgctatcttgcaggatncttaacattgtccaagactgaactag

SEQ ID NO: 2444 - DNA, 435 bp, Homo sapien
  misc_feature (1)...(435): n = A,T,C or G
tgtggggaaacaaattattttcaaaaacaatttacatagttataccatcctcatatcatctacactgaggtaaacagatagacaagtacaaaatctgaataacatttgctgtatttaaagacaaagatgcccttattggctcttcaaagggcaggtgaggatttacattgatccaattcttatggtcttatctactcatcctttggagccagtaataatctgtatataggatctggttaagccaactgtctccattcctccntccatccatccacccacccaataagttctttgtgtgaggcactgtgctggatcatgaagccatcaagatgagtaaaattagattctcacccattaataagtttacagaacagtaggagaaacagtcaagcaactacagtgatgtcatataatacaggcatanacaaagtncta

SEQ ID NO: 2445 - DNA, 377 bp, Homo sapien
  misc_feature (1)...(377): n = A,T,C or G
ggcacgaggaaaggagaaagaaagaaagaaaagaaggaaaagactgaaaagaaatttgatcactcaaaaaagagtgaagatacacagaaagttaaagatgaaaaacaagcaaaggaaaaagaagtagagagtttaaaaccttccttcagaaaagaacagtaataaagctaaaactgttgaagggacanaagaagatttctctttgatagattctgatgtggatggacttacagacatcacagttagctctgttcataccagtgacctttcatcttttgaagaagatacctgaggaggaagttgtaacgtctgatagcatggaangaaaggagagattacgtcagatggatgaaggagaagaaccaacagaatnagga

SEQ ID NO: 2446 - DNA, 294 bp, Homo sapien
  misc_feature (1)...(294): n = A,T,C or G
tatgccaagctaatttatagcaagatattgatcaaatatagaaagttgatattcaacctcacaagggctctcaaagtataatctttctatagccaactgctaatgcaaattaaaacatatttcattttaacatgatttcaaaatcagtttttcatactaccctttgctggaagaaactaaaaatatagcaaatgcagaaccacaaacaattcgaatggggtagaaacattgtaaatatttactctttgcaaaccctggtggtattttattttgggcttcattncaatcattgga

SEQ ID NO: 2447 - DNA, 454 bp, Homo sapien
  misc_feature (1)...(454): n = A,T,C or G
tcaagctgtatgtaattgtaattagctaagagtgattcagaataatttagactgttaatgaaaagaggacatagggaatagtttttcattttatgccaagtgatttttctgttttattagctagtgaaaccaatgttggtaaaattaagttaacaattttagagtttgtgctagaaaagatattctgaggccggatgtggtggctcacgccgtgtaattccagcactttgggaggccaaggtgggtggataacctgaggtcaggagttcgagaccaccctggccaacacggtgaaaccccgtctctacntataaatacaaaaatccgtccgggcggggtggctcacgnctgttagccccagctgctcaggaggctgaggcaggagggtcgcttgagcccggaagcgtaggctatagtgagctgagatggcaccactgcactccagcactccagc

SEQ ID NO: 2448 - DNA, 455 bp, Homo sapien
  misc_feature (1)...(455): n = A,T,C or G
ggcacgagatttttaccaaatcgttgagtaataatatgacttacctgatagatatacacattcaataaggaacatttttttttttcaataaggaacattttaacctaaaacattactttagggctgagatttccaggctatctacattgatctacctgaaaaatttctagatttccatatacaaaccgaagaagacatgagtttagagaatttttttcctttaatttttttttaacagaagggtatcagagtggaggacctagattacgctacctgtgtttgaaaatattgcgctttgcctaaccttcggtggaatgtattgtttcagcatattctatgtataanaaagtttaagatgtcttcaagaagactagagtcnttaagtcacttatagctatattttactaccaaatttgtgtataagatatatttaagtggtttagataaatttaagt

SEQ ID NO: 2449 - DNA, 491 bp, Homo sapien
  misc_feature (1)...(491): n = A,T,C or G
agcagtaggntttgttaacaacaaactggattttaaaagttctgccatgttaagtggccagcatttcatgaaggataacatttttatacagaaggcagtcaagctcaactcagagccatggaggcaagtaccttaattagttttatatagtcacaacggaaatatattttctagtgaattcttattggaagccaggtctctcctctcattagatcaaaagggacttatgtacatacaacaattgaaagtgtttgctcatgaaatcagttataaatatggtgaattttttctggaccataggaatattatttcaaagaaatattacaacttaaccactaaattagtacttgaagttgagcctttgtggtgggactttttaaaaaatgcctttttaaagcattaatggccaattgaagtattttatgactcctcattcctggcccagagggttgtctttggaacccngtttccaacccntgtgttgtgtgttc

SEQ ID NO: 2450 - DNA, 491 bp, Homo sapien
  misc_feature (1)...(491): n = A,T,C or G
tccgaggttctaagggtaagaatttctttatgaaacctgcttggaacacagttgtaaacaaatggactgatttatgatggaaggcacgtttcttgctgcagatcatggtctgaagtttgaaagccaccagccctagagggttctgaaaacttctccttcctaacacagctgaaggaaaaggggtgggtaggggcggagnacagggacatctccaggtttggacttttccaacatgatttgcagaaggcacttgattctggaaagtagacctttggcatttcgaccctcacccacactcccacacccactctgcacagatcggtggtgcatccgaggcagggctgagttagaacaggacatcctagactcggcggcagtgactattattcagaaatggcacatcaagggccggcctgcccttcatcctgcaaggggtacttgggcatgtggaggccccttctccctggtgttgcaactgggngaggagtcgg

SEQ ID NO: 2451 - DNA, 423 bp, Homo sapien
  misc_feature (1)...(423): n = A,T,C or G
tcacgagtcagngcaaaaccagacaagaaaagagaactgagatggaatactatacccatgagaagcaagagaaaggcactttgaattcaaatgcagcttatgaacaaagtcatttcttcaataaaaattataccgaagatattttcccagtgacaccaccggagttagaagaaaccatgcgagatgaaaaaataagaagacttaagcaggtgctgagagagaaaagaagcagctcttgaagaaatgcgtaagaagatgcaccnaaaataaaatctcctgtnaagacttcagtgggaatagctggtttttttaaatatacttccgcnttaattagtttaattgtaggtgtggttcntggaaagtgtcccttgaatacttaagcctggtttttttcatcagtccggntggttccacctttanggg

SEQ ID NO: 2452 - DNA, 507 bp, Homo sapien
  misc_feature (1)...(507): n = A,T,C or G
ggcacgagcacntgctctgataaaaaggaagaaaatgttttgaattcaagaatgctagactaatagaaatagcccagtctctctgggccactgctcttcagtatggggtgctctctgtccctccttagcagatggggttgtttggaggctaaaatgagctaagggaagaagctatactgtgcctccaatatcccttatgtgtaattagagtgccgatctgggctgcaggctttattcaatgattcctttcccttacttgaggctttctctgtagagctgttatttctgagcctccattctgggatttacaaaggaaacagaatgatgaagaagtaacaatcagcattttacacacacgcacacacacacacacacacactttttctaatatatgaggctagtctgcagagtccacagcccaggtgtccatttanttccacttcttcacctccaaagatttagagctccatgatctaccnaggtgaagactgccatcccagggtngag

SEQ ID NO: 2453 - DNA, 441 bp, Homo sapien
  misc_feature (1)...(441): n = A,T,C or G
gagaattaagttctaacagcagttccttgtgcttgaccaccccctcccaatgccatctttgatggtggtggtagctgttaaaaggttttgtgccctccacacacctccttaatggtcagactatttggaacctgaacaaacccatctctgaaaactgttttgcttttttttctccttcattatgaggtttatttacattcaaaattatagagagacactggagaaataggatgcctattgatttatttccaaacttagcacaggatcggttaatgcatagttgacattcatttatgattaagtttgctacagcattttaagaccaagacaataaatctgccttagaatagtcaagaatactgatgttttgagctgtggttaggtaaagaatgtaaaaaaatacactctcaaatggatnccacagaagtgtgtatcatatga

SEQ ID NO: 2454 - DNA, 505 bp, Homo sapien
  misc_feature (1)...(505): n = A,T,C or G
actggtnntccatgcaatggacaaaggagacgtttcctgtaggaccagcatctctttactcaggtttttcaatcttggaactgctgacattttgggccaagtaattctttgttgcagggactgtcctgtgcatttcaggatgtttaacangaatctttgtcctctacccattagttgcttagtcagaataatcagaaaagtccccagacattgccaaatgccccctggagttgcctggttgcctgggttgagnatcactatgcttaaagaaaggggctcttggttgtaaatcccagcacttttgggaaggccgangccggaaggattcacgaaggtcaggagattcgagancatcctggttaacacagtgaaaccccatctctacttaaaatnccaaaatttagctgggcatggtgggcaagcgtctgtagtcccagctactcgggaagcttaagcaagagaatgtgcatgaaacccgggaggtggaactttcagtgagccnaga

SEQ ID NO: 2455 - DNA, 472 bp, Homo sapien
  misc_feature (1)...(472): n = A,T,C or G
aacaactttgacctttctacaaaacttctaatagtgtgaaatgtctgaattaatgcttttcacactaggtcagcttaaaaaacttacagttcagctagcctaccccctccttcatcttcctacagcttatttgtagcctggaaagactattttggtgatagcattagaaagggtcctggaaacaaaatacaaagcatgatagagcatatgaaatctgtttctcttcattgggaatactgcatggttctgatggtcacacttgacaatgaagctaaaaacagtccagagaagaatagatgaaaatggcaaaggagaaaaagtggcttctctgacagttagattaggttagattagttagattaagattagaattcctaaataaacagaaagctnattagtgatatgagcctctacattctgaaggatttgaaccagatcattagaattccnaaacaccngaaatgaagatcct

SEQ ID NO: 2456 - DNA, 500 bp, Homo sapien
  misc_feature (1)...(500): n = A,T,C or G
cttttcttccngcactaggtcatgcaagctcaggtttctgagtgaatacagcaaaagagaaacataaagcagtgttttctttcagacagataatctgactgaatttctctcttcttttctgccttgnctgaccttgatgggtagtataaaatttccacagactattctcaaaatcaaaatgctaagatgggaaaatagtactcctttattgtctttctgttttatctcctggaattagtagaagtactcatttattgaatcagtgttatatgtataatttttttttaatctgacaactaccccagcaggcatttcccngttttatagaagaaaacactgagacctgtgaggcaccttcttgagatcatgaaactagtgagtgggataacccggatgtacacccaggcctgtctaactttctatagcccatcactttctccccggcactacattactttccngaaaaaanggcagtatgggcagtcatccgggtggtatan

SEQ ID NO: 2457 - DNA, 538 bp, Homo sapien
tttggcattttatacttaactagttgtatttatttttcatgtcatgagagtttccatataatgtgccataactgcatagacagcacgtcttcagggtgtggtttctaagcagaaaatagcaaatgtttatattgaataaaattgcatgttcctccacgcagcatcttcatcctccacgttcactgttttggaactagttgttctcctctgcacaaagcgattttatcaggctttccagagcagcttcgattccaagcagtcctaccagggttcggaagctgagaggagcagtttctatggctctgttcttgtccagctccagggctcgctgtgggactttggtgagaagatccagctttggaaaaaccttcccatcttcatctatttgtatcctccaaacaatgactaattcaaaccctggccggctggggctgcggatccccatggagcaggaggagggcccctccgagaggtacacggcatctgggtacttttccttgagatggtttaaacgtgcgcttacgatattcaaccactc

SEQ ID NO: 2458 - DNA, 525 bp, Homo sapien
  misc_feature (1)...(525): n = A,T,C or G
aatttgtgacccttacgcctggcttgaagaccccgacagtgaacagactaaggtaatttggtttctaattaaagataaggcagccttagtagctagcaccaaactctaaatgtcagtaactatagcttttcctttctggtgttctcctgtgttttctgccatgggatggtgagtatacctgttgttaccactactttttgtcaaataatttatgggaaaaagacaaaagcatggcttagtcccagagaagatcacctaagtgtttcagataatgtttatggttcatagtgacactgatgagctattttaaatgaaaatatcagaaagaaaactgatttttgccaaaagaaaaaatgaaacctagatngaaatgatgttaaaggaaaaaattgcctaaatatttttttccaagaaaaggaatcttgtatatgaaatgaatattaggtcatgaaaactgaacactgtccntaaaattgcttattgatggtccacacaacaacagtgaaaccaaaagctaagtagtgg

SEQ ID NO: 2459 - DNA, 270 bp, Homo sapien
  misc_feature (1)...(270): n = A,T,C or G
tttttttttttaagaaatattagttttatttaaccagttttcacagctgaatatttattctataaaaactttacagattgtacagtttatatatagttcaaactactgaacgnaaaggtaggtcccacagatgcaaaaatactgtaccaatcaatccaagataaaggcagatttacacactgtacagctctccgcgtggccggggaggtggtcagttctaagtataaacttcaaaactgtacnaaaataagaatttganttcgctcttca

SEQ ID NO: 2460 - DNA, 543 bp, Homo sapien
  misc_feature (1)...(543): n = A,T,C or G
ttttttggagacgganttgnttctgtcacctaggctggagtgcagtggcgtgatcttggctcactgcaacccccacctcccaggttcaagagattctcctgcctcaacctcccgaatagttggcattacaggtacgtaccaccacacccagctaatttttgtatttttagtagagatggggtttcaccatgttggtcaggctggtctcaaactcctgacctcaggtgatccgcccacgtcagcctcccaaagtgctgggattacaagcatgagccactgcacctggccctatgctttattttataggagccattagatgattaacttggcttacttgacaagagaaataccttataaacaattgctaaaatttattgtttgcttacactattatttgtttattgtttgctcacaaccacccagcaatgttggtattagtgtttcccccagtttacagatgaggggaaatgaggaatagagaggttcacaactagcccagagtcacacagtagtaactggttgaggcacaattcaaattctgtc

SEQ ID NO: 2461 - DNA, 500 bp, Homo sapien
aataggagccaatacatctctatgtgaatttaaatcacgtgttattattgtggtccttatatttgaggccttttctataaatgtggaatgttaagcatcaggaagcaaatggcagtaggtatttgagggcaggagtttactctgtgcctgtaaaaatcactccaagaaaaggcagagatgggtggcctgcccaggtcactaaggtctgggaggccaaagctactcctgtacaaatgctgcatgtggtgtggtaaagacctgaattgctgccccacttactcagagtcaccattgctttctccagaatagataatgaaaaccaaagaagatttatgtccagagacacatttagcaatagtctatagaccaagaagccccttgctcctccttcgacataactaattttgagtaatagaaaataaatctgggtcacttttttgtagctgtaaatccagccttagtaatcctgacctccattaacatagctagtatttcaaatt

SEQ ID NO: 2462 - DNA, 152 bp, Homo sapien
taaccttatccaacttcagtattattttagtagtaatgtgtataaaatccaaccactgcttgggtgaccttaggagacagcaagcctaagagatgaaaacatttacaccttttaattaaattacactgtcaccacataaaagtgtgaggttc

SEQ ID NO: 2463 - DNA, 557 bp, Homo sapien
  misc_feature (1)...(557): n = A,T,C or G
ttttttttttaagagatggggtctcactatgttgcccaggctggtctcaaactcctgagctcaagcaatcctcccaccttggcaccccaaagtgctgacactacatgcgtgaaccactgtgcccagcagatcaacacttttaaacatagtatataacatcctctgagaagagacacttgcctacatttcccctgtcctctttcacccgtctggcatgctgtcatggcctttgtgctttgtaagctctagcttcctctgctctcctcctgccagctcctggagcttttatcaacacctgaaaacagctaaaactagcacaaggacatctgggaggctaaccncattctctgtcccacccctctgaagctgggtgagttatctctccttctgtgtggttgctgtgnacagctctgagaaaattaattggacctattttactncaccatgtacccacaggactgtgaaaccaagcaagcacaacattgtaatcatggtatcttcaactgggcaggcanagagcctataccccagcaggtgctcaatatatatttttggan

SEQ ID NO: 2464 - DNA, 518 bp, Homo sapien
  misc_feature (1)...(518): n = A,T,C or G
cttcataaaatgtttcataaatcattatagcagctactacatacccaagatctgtactaggtgctacttaatttcaatttcgggccagctggggtagctcacgtctgtaatcccagcactttgggaggctgaggcggacagatctcttaagcccgggagttgaagaccagcctggccaacgtggcaaaacactgtctctactaaaactacaaaaattagctgggcctggtgacttatacctgtaatcccagctactcaggaggctaagtgcttgaacccgggagaaggaggcacaagaatccttttgaagctgggatgtggaggttacagtgagatgagattgcaccactgcacaccagcctgagtgacagagtgagactccgctaaaaaanaataattaaaaattgaatttccacaacaaccccatgagttgtccataagggaacaatacttgacaaagtaccgcccctcanccaacccccacccaaaaaattataatatattacccacctggttta

SEQ ID NO: 2465 - DNA, 362 bp, Homo sapien
ttttaactgtaacaatgttggggtttatttttgcctgcaatgacacagctaagaaataaagcaacaaaacaaaaatacacagtgtttccagagtatgtttctgaactatctgcacaaggatcacctggccgccttatcaagatgcaggtttctggagcccatcttaaaacgaactgaattataatctgaattggagtggctgacaaaggcttgggaatctacatttataaaggtacatcagtaattattttgcatggtaaaatttgagaaccctggtacaggttattatgccttacaggttagcaaggccttttacagaacctcatttgacctcaaaacaatccaatcaggtgaatcaagga

SEQ ID NO: 2466 - DNA, 232 bp, Homo sapien
  misc_feature (1)...(232): n = A,T,C or G
ntttttttttttttttttaaatgggaacaccatgcatttatttacttgtctttactccacaggtgattggaggaggcttttggtgacaaacccaaaagaaatgaatacatatgaattcttattaaatcaaaatcaaataaaattataaattttaaaatgttaagagtgaggcaagactagaacatcactagacaggctgaaacatgctgaaatggagggtttactgctttcc

SEQ ID NO: 2467 - DNA, 552 bp, Homo sapien
  misc_feature (1)...(552): n = A,T,C or G
tgagatggagtctcattctcttacccaggctggagagcagtggtgtgatctcgactcactgcaacctccacctcccaggttcaagcgattctcctgcctcagcctcccgagtagctgggattacaggcacacaccactatgcctggctaatttttgtatttttagtagagacggggttttgccaggttggccaggctggtcttgaactcctgacctcaggtgatccacccacctcggcttcccaaagtgctgggatcacaggcgtgacaaccacgcccggccaggccttcagatcttgagaataagcctaaagtgacctggatggaactcacgaaacattttcaactgtgtttgagaatgaagatgaggaaaaagtaataattgctaatgtttctactgtggcaatacatttctaaaatacagcactttatatatattaattcagggaantctcataacaaccacgtaaggtagatantatcacctgcaagtgacagttganggaaccacgtctcagangagttgagtacgtgggttaaggtgtacccntgc

SEQ ID NO: 2468 - DNA, 154 bp, Homo sapien
  misc_feature (1)...(154): n = A,T,C or G
ccgccagttgaacgcgtttaccagtaagcaatttaatcttcttctcaccatcttcngcaaaatcttccaataccnctttaacatttttcnctaatcgcctaacttcnggatttgtaagttgttgccctaaagtatttgcggtganagcaagcat

SEQ ID NO: 2469 - DNA, 289 bp, Homo sapien
  misc_feature (1)...(289): n = A,T,C or G
aagtgaggtttttcttgactataagttttcccttttggaaaaattcgctgtggatttgagtatattttctcttaagacattaaattgagactgagaatttaaaactttttgtagcaatgtattganaatagaaagcattaaagctgttttgctaagtagtgttgttgattcagaagtgntttggactatccattcatgacacgtaaatattttggttttggactccttcccattgtttcnctagataanttgaaacaacctttgggantttttagccttgcattttaaa

SEQ ID NO: 2470 - DNA, 387 bp, Homo sapien
  misc_feature (1)...(387): n = A,T,C or G
ttatcttagactattttcttttagggaaaaattttacatgtttgagatggtggagtaaaaagactgttcaacatttcttttaaaaaattatttttacattacaacaatatatttatgatgtgttcagatcaaaaatttaacttctgtgtcccagatctactttcaaagtgagattttcacttgtcagcttaaatttctgactagaactaacgtttgtgtatttttgtgcttagtccggnatacaaatttcacagtggatttttgaagtttggccntaaattggataaaatcnagtgnttaaaagttacnaaagagataaaaatggnaatttccnttttttaaaagtaaattgggtggggttaaaggtatttggaccaggaatttatc

SEQ ID NO: 2471 - DNA, 402 bp, Homo sapien
  misc_feature (1)...(402): n = A,T,C or G
ggcacgagccaaaacattgctacatgacacatggccgtatttttaaccattgcacttggttttcttattttctataagtcttaagtcttactcttagtcctaccacatgttacaatttttttattattcacttgtgcaatcttcataaatctgtatttgtggtatttttgcacagtctaattttgcatctgattgtaggaacactaattatagggcctacctccttgccatttttcaatctttaaaattcttttattcagtggaagactcaaattgaggacttctgcaaagtgctgaatattagttcactttttcntttccccttggaacctaattgacgattgatttgcccttctctgattaaccnaatacaagttatacagtctaatatagcctattaaa

SEQ ID NO: 2472 - DNA, 397 bp, Homo sapien
  misc_feature (1)...(397): n = A,T,C or G
gtttaaatgattcgtaattggtatctgagaatctcattccataggtcttttactcgtgtacagtgttgtcagattggggatatttgcttgatttttacccagattccttactaatatattttaaacaagtagggtaattattattattattttttttggtggggggtggttgagggggcggtaacttttgtcaagtatttgtttccttattgacaactcattgggttgttgtggaaattcaatttttaaattanttttttttaagccggagtcctcactcctggtcaactccaggctggtgtgcagtggtgcaatctcatctcacctggtaancctccacatccccagcttcaaaangattcctggtgncctccttctcccggggtcaagcacctta

SEQ ID NO: 2473 - DNA, 337 bp, Homo sapien
  misc_feature (1)...(337): n = A,T,C or G
natatgaactgacagcagtaactctgatacagaataatctaaattgcatcaaatggccttaattcagagtttgttaggcttatcagtatgttgnttttaattggggtgggaaagtagagggagagaaagcaagacatttattaagcacctcgtatgtgccaggcnctaatgctaagcacctttacataagttaggattaatccctgcaagaatcctataaagaatgttactagcatttacacttcccaaatgaaggtaccaaagctcaaacgcaatgttgtgaagctgtttccttcagatttaggttatgtgggatgatgtgggattgaagaggaaa

SEQ ID NO: 2474 - DNA, 377 bp, Homo sapien
ttatgagggaataatttttccttgattcacctgattggattgttttgaggtcaaatgaggttctgtaaaaggccttgctaacctgtaaggcataataacctgtaccagggttctcaaattttaccatgcaaaataattactgatgtacctttataaatgtagattcccaagcctttgtcagccactccaattcagattataattcagttcgttttaagatgggctccagaaacctgcatcttgataaggcggccaggtgatccttgtgcagatagttcagaaacatactctggaaacactgtgtatttttgttttgttgctttatttcttagctgtgtcattgcaggcaaaaataaaccccaacattgttacagtta

SEQ ID NO: 2475 - DNA, 499 bp, Homo sapien
  misc_feature (1)...(499): n = A,T,C or G
aagaagtgcaaggtcatctgcccttgtaggaaccacacaggaaggcagagtgtccaccaatgtcaaattccatcaaagaaataatattttgacaaaaaatgcaagtcacctttctaagtcccagacagcagctcaaaataaaaagcattaaacccctcaaatcttagaccaggtgaaattattgaagctgcagtaaggtcttgtgggacctgcagttagagagaagggacaactcaatttgggactgcagcagaaacccctacatcatggggttcctgggaagggaccctctcccttcagcgacgcatttacgaggccatttctaggtaaaaaggtagaatttccttggattcctgaggtttattttacacttactgcttattctttgactttatagaagccaacttcagtttgaacatcttgcaattaatttttttttggctctaagtggagaatttgnacttgtttctgaagaaaancaggggctccttatgtgagc

SEQ ID NO: 2476 - DNA, 130 bp, Homo sapien
  misc_feature (1)...(130): n = A,T,C or G
caagtggaatgactttgcggaggacagcttgagggttattcaacacaatgctttggaagaccgatccatatctgatanacagcaatgggatgcagctatttattttatggaagaggctctgcaggctcgt

SEQ ID NO: 2477 - DNA, 497 bp, Homo sapien
  misc_feature (1)...(497): n = A,T,C or G
gtacaacctaaaccacgttactcaactcctctgagacgtggtttcctcaactgtcacttgcaggtgataatatctaccttacgtggttgttatgagaattacctgaattaatatatataaagtgctgtatttagaaatgtattggcacagtagaaacattagcaattattactttttcctcatcttcattctcaaacacagttgaaaatgtttcgtgagttccatccaggtcactttaggcttattctcaagatctgaaggcctggcggngcgtggtggctcacgctggtgatcccagcactttgggaagccgaggtgggtggatcacctgaggtcaggagttcaagaccagcctggccaacctggcaaaaccccgtctctactaaaaatacaaaaattagccaggcatagtggtgtgtgcctgtaatcccagctactcgggaggctgaggcaggagaatcgcttgaacctgggangtggaggttgcagtgagtcga

SEQ ID NO: 2478 - DNA, 500 bp, Homo sapien
ttaaacgacacaagtggaatgactttgcggaggacagcttgagggttattcaacacaatgctttggaagaccgatccatatctgataaacagcaatgggatgcagctatttattttatggaagaggctctgcaggctcgtctcaaggatactgaaaatgcaattgaaaacatggtgggtccagacctggaaaaagaggtggttatacctggaagaatcggacccaagaacagtgtgttcacaatgaaaccaagaatgaattggagaagatgttgaaatgtaatgaggagcacccagcttatcttgcaagtgatgaaataaccacagtccggaagaaccttgaatcccgaggagtagaagtagatccaagcttgattaaggatacttggcatcaagtttatagaagacattttttaaaaacagctctaaaccattgtaacctttgtcgaagaggtttttattactaccaaaggcattttggtagattctgagttggaatgc

SEQ ID NO: 2479 - DNA, 305 bp, Homo sapien
tttttttttttttttttgcttagaattgggtttctagggaagaaaagcccctgcattaaaaacagcccatttaaaaaaaaaattcaaagttctgatgaattccgggaaaaaagcaaccccaaagtggtaaaagattacaaatatctactttacaatttgtcttctcaccaagataattttatacaagtttacaatcttcatcttcttatgctcttcaaaaggccttgagaattttcctttctgattaagaaaaaatagcactgcaatatttttaaagtcaattttacactgtacccctttaggat

SEQ ID NO: 2480 - DNA, 454 bp, Homo sapien
  misc_feature (1)...(454): n = A,T,C or G
ttcacggaagactagaaacatttatttatataaacccttaatcataaaccaccctcatatccatgaattgggaggaaattccttatttagaaatggccatcatctgattagtcattcagttgcagttctcttcaatgctggacacacggtttccaaggatcaaagtcttgaggagtgcnagatcaggaaatgggagaagcaaggcaaggagnagagggcatcaggagttggaatttctgaaatgtgcatttatctcacagaaggcttggcacaatgaggctggggtgantgtggttttagtgattgttctntgttgccnccttagctgcagcaatcagtngagtgaggctggagaggggcttggcaatcttcaggaantgatgcngtacagctctttagctgaacctctnntctccacatcnatctcgagacagcggttcagaaagtcccggaa

SEQ ID NO: 2481 - DNA, 342 bp, Homo sapien
ttcatgaggattgaaaagaatgcatttatcagatcaatagctgcatgccaaagtgccacaggtgtatcgatctgttcaggtaaacatccagcctagcagctacaatttcggctatcacttggttaagttgatggaagcccacagtcatccaccacaatccatatggttttttatacatatgagccaaatgggattatgataggaaccatcctccctgcatctttagtctttgatggaggtgctgatctctgcaattctccagatgtggtgttattttttatttatcatcttgacacttgatgcttggacctgcctaacataattggtgagagaactaataga

SEQ ID NO: 2482 - DNA, 181 bp, Homo sapien
  misc_feature (1)...(181): n = A,T,C or G
cctagaacaaacaccaatttgcagtagttcatcaaaaaagtttgatgtggctgtctgcttcctgtgcctctcagtttggcacctccacactctgacgggtcttctccaacctgggattggcagtcttcaccttggtagatcatggagctctaaatctttgggaggtgaagaantggaaata

SEQ ID NO: 2483 - DNA, 538 bp, Homo sapien
  misc_feature (1)...(538): n = A,T,C or G
actttaaacttccaaaaagttgcaatagtaaaagaactctgatgcatcccttacccagactcatcaatggtttacattttgctccatttgcttttgcatcatcatcctccctccctctccctctttctctctcatatgtatacacacttctgtgggatccatttgagagtgtatttttttacattcttttacctaaccacagctcaaaacatcagtattcttgactattctaaggcagatttattgtcttggtcttaaaatgctgtagaaacttaatcataaatgaatgtcaactatgcattaaccgatcctgtgctaagtttggaaataaatcaataggcatcctatttctccagtgtctctctataattttgaatgtaaatnaacctcataatgaaggagnaaaaaaagccaaacagttttcagagatgggttgttcaggttccaaatagtctgccataaggaggtgtgtggagggcccaaacctttaacagcnaccacaccatcaaagatggcatggganggggtggtcagcacn

SEQ ID NO: 2484 - DNA, 488 bp, Homo sapien
ggctggagtgcagtggcgcgatctcggctcactgcaagctccacctcccggggttcatgccattctcctgcctcagcctcccgagtagctgggactacagacgcatgccaccatgcccagctaatttttgtatttttagtagagatggggtttcactgtgttaaccaggatggtctcgatctcctgacctcgtgatcctcccgcctcggcctcccaaagtgctgggattacaacaagagcccctttcttaagcatagtgattctcaaccaggcaaccaggcaactccagggggcatttggcaatgtctggggacttttctgattattctgactaagcaactaatgggtagaggacaaagatgctgttaaacatcctgaaatgcacaggacagtccctgcaacaaagaattacttggcccaaaatgtcagcagttccaagattgaaaacctgagtaaagagatgctggtcctacagaaacgtctccttt

SEQ ID NO: 2485 - DNA, 479 bp, Homo sapien
  misc_feature (1)...(479): n = A,T,C or G
ctcctgaactcaagtgatccgcctgcctcagcctcccgaagtgctgggattacaggcataagcaccgtacctggccctaatttaggctcagtctcatgattacttatctaacatgccaactgttttacgctgaggttcacagaatgttgaatacacttccaagagactggagtatatgggctttggtgtgatataaaatataccaccagatggctgggcacaagactttgccttaggaaaaaaaaaataatatatatatatatatatatcaccaggatgactgaccatactgcccttttttctggaaagtaatgtagtgccagggagaagtgatgggctatagaagttagcaggcctgggtgtacatccaggttataccactcactagtttcatgatctcaagaaggtgcccacaggtctcagtgttttcgnctataaacagggaantgcctgctggggagttgtcagattaaaaaaat

SEQ ID NO: 2486 - DNA, 350 bp, Homo sapien
  misc_feature (1)...(350): n = A,T,C or G
aatgatccccttctgccaggatccttggacctcccagagcttcanctgcagcctttgtgtcttcttaccagcccatgtacctgacacatgaacccttggtagatactcacctgcagcacttgaagtctccatcacagggtagcccaattcagtcttcagattgaacaagaagggatcagatgccacatcgtttttgtcgtgattaatttaacttaaactaaaattttgggtatatgaaagaaggcagcaattcagaagtaaagaagatactaacgtatttcatcatggaaggtcctgtggtgatggttttccctgggaaaaccttcagctgctttatttttagtaataaa

SEQ ID NO: 2487 - DNA, 327 bp, Homo sapien
  misc_feature (1)...(327): n = A,T,C or G
agaaacgtttgatgacagacagaangattggctgccttttatcanggggcttggactccagcttggttgctgccactctgttgaagcagctgnaagaagcccaagtacagtatcctctccagacatttgcaattggcatggaagacagccccgatttactggctgctagaaaggtggcagatcatattggaagtgaacattatgaagtcctttttaactctgaggaaggcattcangctcctggattgaagtcatattttncttgggaaaccttatggacaattacaacagttcgtgcttcagtanggtatgtatnttantttccaa

SEQ ID NO: 2488 - DNA, 398 bp, Homo sapien
  misc_feature (1)...(398): n = A,T,C or G
atacagtaaaaggatttaggaagttcaacattttgggcacgcacacaaaagtgatgaacatggaggagtccaccaatggcagtctggcggctgaatttcggcacctgcaattgaaagaacagaaaaatgctggcaccagaacgaatgagggtcctctcatcgttactgaagagcttcactcccttagttttgaaacccaattgtgccagcctggtttgggtaattgacctcgagacgacctctctgcccgttgtggtgatctccaacgtcagccagctccccgagcggttgggcctccatcctttggtacaacatgctggttggcggaacccaggaatctgtccttcttcctgactccaccatgtgcacgatgggctcagctttcagaagtgctgagn

SEQ ID NO: 2489 - DNA, 399 bp, Homo sapien
ggagggaacatctttgagggtaattgttatggaaaagacatcctcagtgtgcacaaggaagcctctattggacaggaactttccaaatttaatccatgtggaaaagtcttcaccttaactccagatcttgctgcacatcttggaattctcaatgcaagacaaccatacaaatgtaaggaatgtagaaaaggctttaagtattttgcaagccttgataatcacatgggaatccacattggagagaaattctgtgaatttcaggaatgtaggagagccatcactcattcctcacacctaaagcaagtgtgtaactgttcatactggaaagaaatctaaaaagactaagaaacatgggaaatccttcactaatttttctcaactttctgcacatgtgaaaat

SEQ ID NO: 2490 - DNA, 398 bp, Homo sapien
  misc_feature (1)...(398): n = A,T,C or G
agcacagaaaggaaaaccaaggttctcatgaatctccaaccttaaatcctgaaacagtggcaataaatttatctgatgttgacttgagtaaatatatcaccactattgctggagtcatgacactaagtcaagttaaaggctttgttcgaaagaatggtgtcaatgaagccaaaatagatgagatcaagaatgacaatgtccaagacacagcagaacagaaagttcaactgcttcgtaattggcatcaacttcatggaaagaaagaagcgtatgacacattgattaaagatctcaaaaaagccaatctttgtactcttgcagagaaaattcagactatcatcctcaaggacattactagtgactcggaaaattcaancttcagaaatgaaatccaaagg

SEQ ID NO: 2491 - DNA, 166 bp, Homo sapien
  misc_feature (1)...(166): n = A,T,C or G
cctcaagngtgcaacatccnatgtgatttgccatgtntngnccagtcanagatncaggagttcaaanaggcctccaacatgaattgatcagaacanagatggcnttcatcgacaaggaagattttgcatgaatatgctttgcnttcntctagnggaagaatccnac

SEQ ID NO: 2492 - DNA, 402 bp, Homo sapien
  misc_feature (1)...(402): n = A,T,C or G
tcacagagtagctgtgaggttcttggtaatgtgaaaaaggccttgtttttcagaaattcctgggtttcctgttaaaaaatcttaaagcccaaccttaggaatatagtgccccaaaaggcggatnnttcnttccattatcttattttctttgatactttatttaattagatgtttataaagaaatgggtttatttttccagcataaacctcagaatttaaggaaagaaaatgatgtctgttgttatagttcattgttttgcctactcagcagaagtgatgactcttaaaaattggctttgaccaaaagttctcttgttttcagggaaagaacataaaagctttttgaactacagcctttttaaaaagagggatgggaggatattacagtaagaaattaggctt

SEQ ID NO: 2493 - DNA, 360 bp, Homo sapien
  misc_feature (1)...(360): n = A,T,C or G
tatnttccctcctgcagtgaattaattggatatatatcagctgacactgatagattgatatttctgatcgttattnttgtgtaataagcatggaaatgaactttatacacaccacgtgtgttgtcagagataaatattaggggttgtttttaaagcanaaagaaaaaaacaaaaaccanactattaaaatcctcctataaatnttcttttnctttacagtttttcaagcatgcaaaacagnttattgtaacttactgaaaaatattaacaattaattgtgaatacatgctgntaccagcttccttaattcctaaatacctggaaaaantttttgtttttcaacggataggattttgaggt

SEQ ID NO: 2494 - DNA, 376 bp, Homo sapien
ggtatttaaaaattctaaaatatttaataattaatattgatgggaagactgatatacaatgcaattatttattttacaaggagattctatacatcagggaggcatcttgaagtacaatacaccaggctttcatttcttctttacattatgattgtgagtttccatataagttggtacttacatggaaagggaacacaaaatccatttttatatacataaaaacaaaacacccaaagagacttgacccccaaaatgtcttgtttcacttgaaaataacatgaatgagatgaaagatgaaccagattacttggtgacgcacagaaggcgaacaagtagctcaggaaatcaaatcctgtttcaagcttggcacattaag

SEQ ID NO: 2495 - DNA, 169 bp, Homo sapien
tgccgttagcgggccgcgggaacttgggcgagcagctgccggggctgggcgcggggtgggcgagtgcatgcaggttgctgcccgagtgccgtcggaggaatgccggcgcgaagccgacgctggggggcggcggcacaggggtgccgaccgcgttcttgtccacgatgtg

SEQ ID NO: 2496 - DNA, 222 bp, Homo sapien
ggaaagtggatcaaaacactttaataaaatggcagcggctttgtgggatgtctgtggcagacaaaatcaagagccaggagcccgggatgcggagatgggcctcggtctccacatcctggcgggtgctggggccggggctagtacttgagcagccagcgtggcctgtgggtgctcagcgatgtgaagtaggaccaccaccagggcttactcccgtcggccgag

SEQ ID NO: 2497 - DNA, 371 bp, Homo sapien
cccatgcgccaggtactcctgcagctggcggtggaggtccgcatcttggacaaggcggtggcagaaaggaaaagctgcggctcacttccggccctccgctgaagcgctcggtcttcgggcggcaattggtcggcgacggcgaaaggggcagggctgcgggctcgcggaagtgccgcgtgcctgctctgcggacttttgtggtgtccccaagtaccgtggtcgcaggtgctgcctgtccgcttgcagtcgccctcccagcgcctgaccctcttccttgttcggagtaggcgcccttgcggtctggctaagtcctgccagcattaatagttggaaggcaggggtgggtgtggttctaaaggggcacaagaagt

SEQ ID NO: 2498 - DNA, 271 bp, Homo sapien
tcaatattttaaattctccttttaaaatactgtgcttactgtgaaatatatcagttggtgagccgggcgtggtgggtcacgcatgtaatcccagcactttgggaggccaaggcgggttgatcacccgaggtcaggagttcaagaccagcctggccaacatggtgaaagcctgtatctattaaaagacaaaaattagctgggcgtggtggtacatgcctgtaatcccagctacactggaggctgagtcaggagaatcacttgaacgtgggag

SEQ ID NO: 2499 - DNA, 288 bp, Homo sapien
cgggtaaatgaatatgtttatttaaatatgtatacaagcatggccctaggagcagcagatacactttcccaaaggtggttgcttcctttaagatattgcacaatagaaaataaactcttgtcaatccttaaaattagtcttcaatgctatgtattttagctatgtaacttgtactgtgtcaacagtgaaccttattagattcacggtgtcatcgaacttatagcaagataaaaatcaatcagtaggaatgtcattttaaaaagtaaaatagtgggacggttgtggtgg

SEQ ID NO: 2500 - DNA, 203 bp, Homo sapien
gggaggaagacattggctcttccatggggagtgaagctggggaaaatgtgcagagtggctcagcatgtaggtagataggctagaaaagccacagccaacagcgtgttcgaggacaggacagtcagcatgttcaggctggaggtctgagtgtaggagtattcggtcctccctggtggccttccaatgggggtccatcgagccta

SEQ ID NO: 2501 - DNA, 295 bp, Homo sapien
ctgggtgcatgttctcatattattttacctgcgttgtgtaccacagcctccccacacacccaccacagcctggtgatgggagagggccagggacatgcacactgcgaggctgcggggaggccctgggctcgcgtagaggcgagccgattgccgggaaggtggtggttaacagcacagtggcccagggttctgagcaccccactccggggcccttcccttcccggggaatcgccgttgcctgcctgctcttcctgggctgtgggcaggaatcttttggtctactcggagccctggg

SEQ ID NO: 2502 - DNA, 217 bp, Homo sapien
acactccctcagacgctttattgtttacaaaacagatggatcccataggtaaggaacacaatcattatgctgacagcagcgaacagagaggggaagaaaaaaaggtgagctttaaagtaatcgcaaatcactgcctatgcgaagaggctgcttccgggcacctgggctgtgactcaggtgctgacatgaatacatcagcaaggtctcaattcagcca

SEQ ID NO: 2503 - DNA, 395 bp, Homo sapien
agagcatatttttaatacaaaatctgtctttgtgaatagagaatagggacgtattttttaaaattgctaccaatcccaaggagcaaggagcatcgatgctttgacttttctgcagggcaggtgacttggcctagctggttttgggtggtgagtgcagtgagtgggccatgacacagtacacgccatgttcacctgtttcccaaaatgtttaggtttttcccctccagtaaatgtgactgtctctccccgttctgaagaaagccatacaacgacggtttctggtggcaatgggagcgtgttccaggcgggcccgcagcttcaggcactggctaacttagaagccaggagggggtctataggtgctgctctctcatcccgggatgtcagtgggctgc

SEQ ID NO: 2504 - DNA, 397 bp, Homo sapien
tgagatggagttttgctcttgtcacccagactggagcgcaatggcgattcgttggctcactgtaacctccacctccagggttcaagcaattctcctgccttagcctcccgagtagctggaattacaggtccctgccaccatgcccagccaatttttgtatttttagtagagatggggtttcaccatgttggccaggctggtcttgaattcctgacctcgggtgatctgcccaccttggactcccaaagggctgggattacaggcatgggctacagtgcctggcctgcttattttcatcttatgaaataatttgcatgttagaaacctggggaggcccaggaattccatatcctgaggtgctttctgccagtgactctatgattctagagcagaaggg

SEQ ID NO: 2505 - DNA, 319 bp, Homo sapien
cattcaaaagtatttattcagcacctactacacacattagacaatatgctaggcactgggaaaacaaaaagttatgtaaagacacaatatatcccctcaataagcttatggtctaacagaagtggtatcaaatacaactacaaaaaacttacatctgtgaaaagtactacacagaactacaatggactggacccaatcagagtgaggccacaaaaggtttccctaggtaagtgctacaagagttgaaatccagaagagtagaggggaagaagtgtttcaagggagaagaaagagcattacaaagtcctatacaaaagat

SEQ ID NO: 2506 - DNA, 443 bp, Homo sapien
gcgcgcgcttgtgacctaaccgcagcgtcctgtgtgcaacgtggtggggctcccggcagtctcggctctgcctaagaggcccgccctgggcgtgcgcgagccgctttgccaaggggtttccttctcactcagacgcatgatggccccaggtgtggccgcgggaccgagtggatggacgggctggacctggctcgccgtactagacgccccccacccctgggctggagtccagccatgccgctgatcctgcatccccagaccatggggcctccaaacaccttcccagctcctgtcccacgtgtccggccaggctcaggaaccgggctcagctgcactttcctcttccccgcaggctgtgaagctacgggaacaggagcagaaggaggagaagctgaggctccagcagcaggaggaccggcgcggcttgaagaggcgacttgcgg

SEQ ID NO: 2507 - DNA, 110 bp, Homo sapien
gaggagcagttcggcggggacggggcagcgacacagcagacggcggcaggtaggcggcctcggccgggcgagcaaggagtagagccactggtggcggcagagcacagggg

SEQ ID NO: 2508 - DNA, 300 bp, Homo sapien
acaaagaaagaacagcggacaaggtggccattttattttctcaaagccacactacctgctgctacacaggacataaaagtgcaaaattccaccaggaagggaaacaaaacagtcttgagacagccatgtctcagaggtgaagattggaggagattttaatatagggtgtgaattccaattcacatctcttccaacgggacctctttccgaagtcccgggaactaacattcatcaacacctctgacatcccagaggatcgcaacattcctgccaagggttattactcccatttcccagatg

SEQ ID NO: 2509 - DNA, 258 bp, Homo sapien
cctggttttagatgtttttaattttgtaaaagaaaacaagtataataaactcagctgtgggaccagaggactgttgctaagacttttaattgctctggaaggaggcagctggctgagtgccagtgtggggaggtgggtagaactcatcccctccccagcaagaagggagggtctggatggtcccttcagacagcttcatagtaggtgaggtcctgatcaacctcagttttgctgagacttgggctgggtccccaggtg

SEQ ID NO: 2510 - DNA, 126 bp, Homo sapien
gcaggtgcatttgtttctttatttaaaaaaatcatctgggggcatggtctgaggaggacacccctcccatggctttggggaggacgcaggttccaggagtcacagggcagaaacacgcggggtggg

SEQ ID NO: 2511 - DNA, 329 bp, Homo sapien
tactgttctaatttactgtattttcacagcttgttgttatatctgttacaatacatctcacaccactgtatttttttcacaatttttttggctatgaattttaaaaatcaacttgtcaaagcccattcttaaatatcttgcagcctggtgcggtggctgatgcctgtaatcccagcactttgggagggtgaggtgggcagaacagcctggccaacatggcgaaacctcatctctactaaaaatacaaaaattagctgggcatggtggggcgcacctgtaatcccagctactcgggaggctgaggcaggagaatcacttgaacccgggag

SEQ ID NO: 2512 - DNA, 200 bp, Homo sapien
tccattcacgttttttactaaagcacccacacaagtttctgtgcaatgtacaaacacaagccggccctggggtcctgcctcctctctcagacagggaggcgggaaccagacttactgatccaagccccacctgcctcccatgcaaaggccaaccccaagatcccaggcagcgacacagcatcccctctggtcccctcctg

SEQ ID NO: 2513 - DNA, 222 bp, Homo sapien
tcgatatagtagcatttatttctttttatttttatttatttacatatttttagtataaatagagagttcatctgggccaagcttgaagactgcagcccgggaacatagattcaggtttcccagaatctacactcccaagtagcctttatgtaatattactggaagaagaatggatttgaggtaagataagttatggacacgctgagtctgatatgtggtagg

SEQ ID NO: 2514 - DNA, 388 bp, Homo sapien
acctttttaaagtaacatttaaaattacttcctttaatataaaagaaacacacaagacacaaagaaagcccaataaagctgtgagtcccagtttggtagctgaggaggagtctaagaaaacaagccattcctcagtatccctgggaaagaaggggtgagaggacacagatatcaccaggccctgggtgactgcattgctggggccatgcagggcctagctctccaccaagggaaagtgctgattttccttgtcatggtcctggccttgctcccatgctcgtcctccagttttcagaagtcgtccagttccaagaatggctccttcctttagttcactaacattttcacttaggggtgaaggccgcttaccctgaagatctgggagtct

SEQ ID NO: 2515 - DNA, 341 bp, Homo sapien
gcggccgccatgttgcaaccgggaaggaaatgaatgggcagccgttaggaaagcctgccggtgactaaccctgcgctcctgcctcgatgggtggagtcgcgtgtggcggggaagtcaggtggagcgaggctagctggcccgatttctcctccgggtgatgcttttcctagattattctctggtaaatcaaagaagtgggtttatggaggtcctcttgtgtcccctcccggcagaggtgtggtggctgtggcatggtgccaagccgggagaagccgagtcattgggtagttggaaaaaggacatttccaccgcaaaatggcccctctggtggtggccccttc

SEQ ID NO: 2516 - DNA, 381 bp, Homo sapien
tcaaaatataaagaactagtagtttatttaaaaagaaatatcaatgcaaaacctactgatagtaagataaagttccttagatgtatcccaattttagtgtaatatgattaattacaacactcttttatcactgaaaattattttgaaactattctgattctttggaattctataaatattcttggagaaaattaaaaaaacataaaatatctgtgaacaactcactcatctgatgagattataaataaaagatcccctgtccctattccagatagaatattttagaaagtttcactgtttgttctgctttagtaagttataaaagtaatttatttagcttatcaaggcaaatttagagctgccttatagtgatttttgcca

SEQ ID NO: 2517 - DNA, 377 bp, Homo sapien
actttgctactgtgaatagtgctacaatgaatattcaagtgcttatgtctttttggtagaacaatttgttttcttttggatatatacctagtaatgggattgctgggtcaaatcatagttcagttttaacttctttgagaaaaccccaaactgttttcaacagcggctgaactaatttacattcccaccaacagtgtacaagcatttccttttctacacagcctaccaacatctgtcgttttttgactttttaataatagttgttctggggctgggagtggtggctcacacatgtaattccagcactttgggaggctaagacaagaggatcgcttgagctcaggaattcaaggccagcttgggcaacatgacaaaac

SEQ ID NO: 2518 - DNA, 148 bp, Homo sapien
taattaagaaaacctgagaaaaaaggaactcgcggagttaagaaggcagggaaagggcggctggttcctcactcaggagttctgagagagcagctattccagctgtaagtgtggtggggggcccctctaagttttggggggtgtggtg

SEQ ID NO: 2519 - DNA, 356 bp, Homo sapien
ggagtaaatacatttattgatacccatttcatatatagttcaatgaaataatctataaatataaaaagcatttttcttttggatatcaccatggtccatgtaaatactcaagtcagaatcatctgcaggaagcactccaagtcacactgttagctttacagacctgaatatacatattgcattaaacagtggcacttatgtactcaagtggtccagtggctttggaatatatgtctactgggcatgtggaatagaaataatgtgttaggtttaaatcaatggaaagggtatcaaccatcaacaaaagcaacaattatgaattcatatcctaggcaaagaaagtaccacagttgaca

SEQ ID NO: 2520 - DNA, 377 bp, Homo sapien
  misc_feature (1)...(377): n = A,T,C or G
actttgtgtgttgtgttttattaacaccaaaatgtgccacatcatggtttagaagaggtggagggtgcaggcaggaggctccgaagccncaggcaggcgcatcagcctctggcctctccatggactccagctggagagcctgtccgctcagcaacaccccaggcagcaccaagaataacatgcccacaagaacatcatggccaagagacgcacaggcgcatcccgcttccaggcacctttcccacctggccagaagtccctgctgtcatcccgacttgcacggtggttttggtaaccagtgggctgtgcaggagtgaaagtggggtcactttccttcctttcccagctgctggagtcggaactgctgcctttgtttt

SEQ ID NO: 2521 - DNA, 102 bp, Homo sapien
gtaggccgtttttcatcttggtccaagaagcatgaagtgtgaggactggtgtgtggggcccaggcggcgatatgtacgtgcgtgaagcccttcgcacaggct

SEQ ID NO: 2522 - DNA, 364 bp, Homo sapien
tcgatatagtagcatttatttctttttatttttatttatttacatatttttagtataaatagagagttcatctgggccaagcttgaagactgcagcccgggaacatagattcaggtttcccagaatctacactcccaagtagcctttatgtaatattactggaagaagaatggatttgaggtaagataagttatggacacgctgagtctgatatgtggtaggtttcctaggtgaagaggttctcaggatataacatcggtctggacagagaaagtgctacatgtaagagaaaaagttcataagctggacttcaccaaaataaaaaattcctcatcttcaaaaactcaattaatggctgggaaaa

SEQ ID NO: 2523 - DNA, 371 bp, Homo sapien
tgggagtataaaaataggacttttttccttatcacatcaattatcaaagaaacagtacgtaacaaaaatacaaagctctggtggatttttttgtcttttgtcccccccaccaccacttctacccaacagccccttgccagggagcccttggtgaagcctggacgctgtccctgaggtgaccccagggctcaggagaaacggtggtccaggtctctctgggggctagcagagtatgagtaggccttgccaataccaagcggtcccggagcagcttgaagaaggcatagtagttgctgaagaggatgagggccagcgagatggtctggtgccacttttcagaggacattagggagtacagctgatagacaatg

SEQ ID NO: 2524 - DNA, 278 bp, Homo sapien
ctgactggctccttgccccccaaagacccgctcccccaggctttgcattcacaagaaattactctgaggcatgaggtttccttccccaaggtgagctgcaccccagctctccagtgggaggatgggccagcaattccaaaggggtctgggcaggaccagagctccccgactttggcagcttcaacacaaacatgagcagacaggacagcattcattctgggggaaatgtgacgaggagaggagggtcacagacatcacgcctatgtgcacacgcgcgc

SEQ ID NO: 2525 - DNA, 407 bp, Homo sapien
acaattagggtcatttaactatttaattgctttttgagattattgctgaaattaggaagggagcattgaaatgggaagggggaggttagagaagacagagatttaaaagaagcaagtaccattttccaagtataaaactcgtaatattaaaagtgacatagcagtatattcacatgactacttaagtctaatgcagaaacaagacagtacagtttttgcagaggccgatgtgacatctgcatgcgacatgatactattaagtgtctctacccacctctgctacagagtagctgctatatgcacacatacacaaaaatacacaatgaaaagcctacaaaagtgttaagtcaaactaaggctcttaattgtaaattaaagtggctacagtaggtccctttgaaaaacac

SEQ ID NO: 2526 - DNA, 372 bp, Homo sapien
ggccttccaatattatgaggttattttgaggatccagggaggtaacggatgtgaagagcgtgtggtgaactgtaaataatgactatcacatttagttctcctacaatccagtgaggagtagtcacttgctcgaggtcacccagcgctggcaactgctggagctgggatttgaacccagctagcagtgtccatgctacaagagtggggccagccttggcacaggaggttgattgctgcagccagtgtttctagagttccagatatgaagtggtctcatgttctccttgggaggaggcccttggcttcccgaagtgctgggattacaggtgtgagccacagcactcagccaccagagcttttttcaaaccggag

SEQ ID NO: 2527 - DNA, 395 bp, Homo sapien
atttttgagacaaatctcactctgtcacccagtctggagggcagtggtgcaatctcagctcactgcagcctcgagcacccaggctcaagcgatcctgtatccttagtctccctcggagctgggaccactggcacgtgccaccattcctggctaatttttaaattttttgtaaaggtggggtcttgccgtgttgcccaggctggcagatctacacttttcaacttcaaattccatttctttctattactccagtggccttctcaggatgaccaataaaaccgagaccccaatgtctaccatccctaaaggagtgggtgtggcttggcgttttgggaacagcgagtgcatcttccaggaactgcctctgactctgcatcacttactttccaccatgt

SEQ ID NO: 2528 - DNA, 399 bp, Homo sapien
tgagatgagtctcgctctgtcgcccaggctggagtgcagtggcgcgacctcggctcgctgcaagctccgccccccgggttcacgccattctcccgcctcagcctccgcgcccgccaccgcgcccagccaattttttttttgtatttttagtagagacggggtttcaccgtgttagccaggatggtctcgatctcctgaccttgtgatccgtccgcctcggcctcccaaagtgctgggattacaggcgtgacgaccgcgcccggctgtctttattcttttaccattttatttgggataagtagcagcactgcctgggaagacccttgggagggagaaggaatctgttggatggaaatcttacctttgagcatcagttatatttaatgcctagtttcagcc

SEQ ID NO: 2529 - DNA, 315 bp, Homo sapien
attaatggtcttatggttgtatagaagaatgtccctctaattaggaagcacgtgctaaaatatttaggggtcaagtgtcttcatgtctgtgctttcaaatggttctagataaaatgaacatgtcagaatgctaataattgatgaatataattatggatgtcctggtgattattatacgttttttcaacgttactgtatgtttgaattttttaataataaatttggggtctgggcacagtggcggtaattccagcacttccggagaccaaggtgggaggatcacttgagtccaggagttgagcctggggaatatag

SEQ ID NO: 2530 - DNA, 345 bp, Homo sapien
gcggccgctggacatgggaaagcggaaccaccaaaaggagtgatgatcaacgatctcatgataaatctggatgctagttctcatgcctcaggacatcctactgggaacgacacaccagctcctgggatcagactttcatctacttaggacccctctttgcccagactactaaagccagtcttcactagccacgaatggctacccaaaggaaacacttggtgaaagattttaatccttacattacctgctatatctgtaaagggtatctgatcaagccaacaacagtgacggaatgcctccatacatctgcagaatcctactggatgtccacttggatgtcctgaa

SEQ ID NO: 2531 - DNA, 387 bp, Homo sapien
cccttgggagccactgttctattggctattaatgctgtcattgttatatactgcccagaggaccagctttgcaaaactgggttagttttttaaatgtagttagaattctgtcccataaaccagacagcaagtttcctcctacacagtggatatttgtggggattccctgcagctgattcctggagcccagtggcaaaccccagaattcagacagggctctgacgtcagaattcattctccactgcaggcagcgttcctgccgatactcaaacggactgttccttatctaccttgcagtatgtggggctttctggagctcacaaacaccagttcctcaagacagcctatggagagctcacatatttaactttttctaagaatgtgctg

SEQ ID NO: 2532 - DNA, 397 bp, Homo sapien
agcaactcacttctttaatttcagaatccacagaggtaagtccagcttagaccagggggctgagttctctcaaatgaaatctgtgccaatatttactccaggaaggcaagagcccagcccttcaaggctcctgagatcaggaacggctggtggttaggaggcgctctcctggccgctctagctgtgtggggcaccccctgcatatgtggggcacacgtggcctatgcacaccacccacctacaagcttgggcggctccagtgggaaagacaggagagggaagcaacatttgattgaatctgagccaagagggccagaggtcgaggaaggcacccccacagcagcctcctgagcaaacagcacctgggggctctacccagttgggacaaagggcgagg

SEQ ID NO: 2533 - DNA, 421 bp, Homo sapien
cagggcgagttatttctttaatgaaaaagcacaagcccttatgtgtcgaaatacacgctgttacactgaaaatatatgcacgacagagcaagaagcttgtgcatgatcacttcttatccgtccccttcccagcactccctcctcttcccattctctccacatgtctcaagcaccctaccgagtagggcaggccaaatgttccttgggagtaatgccaactcccgacgttgccttcaggtccaaagggcttggaaccagctcgtgaggaagttctgaatctggcactaatattcttgagtggataatagtgtatcatagaataggacggaaattgtattgagatgtgaccctgtgtcgcctgtggaaaggcatagtgagaagaactttcccacgaaagcccccttcatcgttgttcagtggt

SEQ ID NO: 2534 - DNA, 198 bp, Homo sapien
gcgaccgcctcgcgtacccggcttgcggtccacgagcgagcacgcccggggatggcagatggggtcgcgccgaggcagcggaggttctgcgggcgactggaggttggcagtgggcgggagaaagaggaaggcaggcgcggctgggcctcggcgtctggcgccgcggtaccctttgtctcggcagcctgacggccccgc

SEQ ID NO: 2535 - DNA, 395 bp, Homo sapien
gggaatgagaaaataactttatttcattgtggggagcggggcgaagggttccccgtggctttgcattggagggccactgtttctcccacagataccacacggtcttccaaggggaccaccaaggatggggtctctaggacagtcagggtggcattagctgaaatagaaccggctgagttctgagcagtacagctgtaaacccctgcgtcatctattttcacatcagtgatgaaaaacacgtcgtcatccggcatgacatgcatgcgtcgctcacgggcagcggggaaatccgtgcctccatccttctgccaggcaatctgagggtttgggtgacctgtggcagcacattcgaggcgggccacggtggtggtccggatggttatgtcgtggggcgt

SEQ ID NO: 2536 - DNA, 390 bp, Homo sapien
ggaaaaagaaaaaaaatatttaatggaatctgtgctcaaataatatgttacaacaaaaatatacagaatgtacacaatacaaaaatacttagaaacaaacattgcagtctgtgttttgttttttccacttactcaagtcctcggaggggcagttcactgttgggcactgtttttaaggcagaggagaaccgtgctttccagccagcacggggagcaacatgaatgatgccaggaaaggctttcacggcacccagggaatctgcattacgtatttgcaaattaaattggacgctgggggaagatcctggtgtggtgagcaacagctcccctaatcctctgggcaagaatggttctcatggaaatcgagagtcctattagctggcaaaagag

SEQ ID NO: 2537 - DNA, 403 bp, Homo sapien
cacgcttagaatactttatttggagggaggggcactccagagctctttgtagccaattctctggcccctgggctgactgaacccaagccattgcagccagataggagttctgtccagtctgtgcggttcgtgatgacttcaccattgctttgcatttgcacaagtccatatcgttttaccaggctctttcgcattccttcatgatcatcagggcagatctgtggattccacacaaagtgtatcctgggactaaggaaatgtgtccgctcctctggaaggctggtttctctgtcttcatattagatccacagtgaatggccctctgagatcttggaagtaccttgagagaggccaatatctggagagagatcttggccttgagatagagatcttaagagagaga

SEQ ID NO: 2538 - DNA, 296 bp, Homo sapien
aaacccaaataaataattttattaaagaagggtggattaagtaaaacagtcagtaggaataaatgaacaaaccagaccaaaaaaacccccagaactcaattatatttgtttataagagggccctgagatacaaagacactcaaaatataaaaacacaggaagagaaaagcaaacagatgaaaataatgtactctataaacactaaccgaaagaaaactaataacatgaataaccaattaaccaaccaacctaactgatacatatacctaataaatatagaatacgcagagacaatt

SEQ ID NO: 2539 - DNA, 339 bp, Homo sapien
tcatgttacacggtggtcttgagattcagccatttcaagatagttcagcagcttcttacaaagttatacacacacccaccaaatgacctagaaatcctactcctagatatttaccagagagaaataaaaacatacgtctacatgaagacctgtatttaactgtttatagcagctttattaaaaattccccaaactgtaaacaatccaaatgtccctcaacttaggaatggataaacaaactgtgtcacaaccatacaacgcaatccaactcagcattgaaaaggaacaaactgtgatacacacaacaacagcatggctgaatctcaagaccaccgtgta

SEQ ID NO: 2540 - DNA, 113 bp, Homo sapien
taataatctgtaagatgcatcatacttctggcattttcaaaaagtgaaaactgtataaaaataaatattctatgtacaaacacacacacaggccaatccaaggttagaggcat

SEQ ID NO: 2541 - DNA, 388 bp, Homo sapien
  misc_feature (1)...(388): n = A,T,C or G
tctcctcaactaaactctttatttttggtttggtttttaagtaggccatggttgctttgaggccactgtatggtggcaaactatagatgaaagagcttttattaaaaaaggcactgatgggagacactggctgcccccgaacctttgccctccctaagagcagcctctcagttcccttttgaggagccccctcacctccaccagatatgggaagacaaatggggtccctgtttctggattcccagcatggtcgggggaagatctgtgacctgggcttggccacgggggctctcagaaggcaaggcctnnggttggagggtgttggtgggggcagaaagctgagcagattcttgggagcagcccaccccatatcctagtaactcccttt

SEQ ID NO: 2542 - DNA, 252 bp, Homo sapien
ttagagcatatttttaatacaaaatctgtctttgtgaatagagaatagggacgtattttttaaaattgctaccaatcccaaggagcaaggagcatcgatgctttgacttttctgcagggcaggtgacttggcctagctggttttgggtggtgagtgcagtgagtgggccatgacacagtacacgccatgttcacctgtttcccaaaatgtttaggtttttcccctccagtaaatgtgactgtctctccccgt

SEQ ID NO: 2543 - DNA, 292 bp, Homo sapien
attatacgattccatttatttgaaatttcaagaataggcaaatatatagacagaaagtagatttggcattgcctagggtaggggcagctggggaggaggtagtagaaaatgaggaaagtgctaatgaatccagggtaattaaaatattgtaaaactgactatacagtttaaattggagaattgtatgatattaaggaaagtctgagaaactgtcacagccaagagtaataaaactgttattttaaaaacaatgtcatgtgtgccaagaatactgatgaaacatcatttaatc

SEQ ID NO: 2544 - DNA, 186 bp, Homo sapien
agacactgtctcactctgtctcaaaaaaaataaaaaaaaaattcttttaaaaatatacgaatctggctgggcacggtggctcatgcctgtagtcctagcactttgggaggctgagatgggcctgaccaacgtgcagaaaccccgtctctactaaaaatacaaaattagctgggcatggtggcgcat

SEQ ID NO: 2545 - DNA, 388 bp, Homo sapien
ttgaatacacatttgttttactggcagtccagataaacaagtatataaaggaaatagtaaatttttattttggcagaagataaactgtgcagattaaaatgcctcaatttaacctgaagaaatggttttgaatcatataaatttttaagaagaaaaataaagactgtccaaagggattctcctagcttataacacatttccagaataactctcaaaaaaaaaaattcaaaaatactcattactaccttaaaaatatgtcaataccgtatggctttatgaaataacttctaaaatttatataatttttccctatttaaaaaggaccccaagttttaaataagctgctagcagtatcattttcttcacttaaaagtgcatatcttttagg

SEQ ID NO: 2546 - DNA, 334 bp, Homo sapien
ttaacatttgaaatttttattgatttttaaatttaaaatccagttttaaccacaaaattgtttgaatcacaagtggtaatacaatgtcttcaatatttttctaaagttatttttctatataataataagacaacagcatagcatataggaagttttcattccagtggcttttttatatatttatccttcttaggaaggacaaattaaattttttaaattaaacttttaaaatataacaacatctaacagaactgtacaaaacaaagagacattttttaaacaacttgccaaacttacttatgagtgtgttttaaaaacaactttgtaaatgtct

SEQ ID NO: 2547 - DNA, 232 bp, Homo sapien
ggaggtgtccttatgagtatatttatgtgtcacacacacatgtacacactcaatgctggacgggagggaggttgagacggacaggacaggaggaggcacccaggtggcactggcacaggggaggagaggggacacagcgagtttttggccccactttggccccccaccgcctcccaacaggaggtggacctggagctggaagaacaggaaatgcttattctcttagaggaca

SEQ ID NO: 2548 - DNA, 290 bp, Homo sapien
tggttgatgatgcggcccaggtttggggagctctgggggtcgtcgccatagaaacgggtgatggtgctctgcagggcgggcagcagcctctcctgcatctcggggctgcacaggacgtagtcaggggccacgcaggtctggccggcattgaagtagcagaaccaggccacgcggttggccacggtctgggggtcgcagttgtcgtccacgtagcaggggttcttgccccccagctccagggtgacaggcgtcaggtgcttggtggcagcagtcatgacaatcttgcccac

SEQ ID NO: 2549 - DNA, 151 bp, Homo sapien
cattaaaaaaccatttatagtcatttcatgttggttggaaatcacagaaattaggcaggaaaaaaaaacccaagggaacaaatacaaacagcacagcgttccccacagttctctgctctgctctcctgcgagccggggaaggagaggggca

SEQ ID NO: 2550 - DNA, 215 bp, Homo sapien
ttttttttttttttttttttttttttttttttgcgccccagtttctttttattgatttcttttcttttctttttttaagtatggaggctcaagtataagatgtagatttttttcttaagctttacaaaaaaacaaaataaaacaaaaacctccttttgcattccatagaaattgacagaaaagcacctggccggaagagcggaacggtcggcggc

SEQ ID NO: 2551 - DNA, 488 bp, Homo sapien
gcgcccgcacagcagcccgagcgccccctttccagagctcccctccggagctgggatccaggcgcgtagatgtatcccaggatcctgggtgctgtctgggcccgctccccaccatgacctcctcggggcctggaccccggttcctgctgctgctgccgctgctgctgccccctgcggcctcagcctccgaccggccccggggcaaggaccctgtcaacccagagaagctgctggtgatcactgtggccacagctgaaaccgaggggtacctgcgtttcctgcgctctgcggagttcttcaactacactgtgcggaccctgggcctgggagaggagtggcgagggggtgatgtggctcgaacagttggtggaggacagaaggtccggtggttaaagaaggaaatggagaaatacgctgaccgggaggatatgatcatcatgtttgtggatagctacgacgtgattctggccggcagcccacagagcttg

SEQ ID NO: 2552 - DNA, 151 bp, Homo sapien
tcaaggaaaatatactatttaataatcttagagttcatttaatctcagcacaggggaagggtttcacaatgaagatgtgtagcaggcgttatcccattgttatcactgggcagaacaaagaccaatgagtagacactataagaaggcacat

SEQ ID NO: 2553 - DNA, 458 bp, Homo sapien
ttttttttttttttttttccaaggggagaatgaagccattttatttaggggaatgttaaaacaaagccatatacaatctgtaacaaatacaatacaattgtttgttccctagtcctgaataattacagtatatacaaaatctgtaaggcactggttcccccaaaagaacaaatgagtcttcttgtgaaacagacaacgaaacccctatattgccaacttttctccaaaaaatatggcattgtttttttgttttgttttacaagaggaatcacaattgctaaattaagtcacttctgatgccatttctttcatttccactgctatgtgtctgggttttctaaggcaatgtaactactgaacatgttcaagtttaaaaaactatacttctctcagtgccgttccacccacaaacaaagaagaatcagatcagaccaacaacataaaacttctaatgaatt

SEQ ID NO: 2554 - DNA, 187 bp, Homo sapien
gttgggaaggaggggtcctcccttcccgatgagaatccgttatttgtcccaactgaggggtgggtgtggggtgttaaataagatttgaaataggtggggacgctgtacagggggtccgggaagggggctgggggcaagcagcaggtcagtgcacctgatgctggtggtgcccgtggatgagcactcc

SEQ ID NO: 2555 - DNA, 460 bp, Homo sapien
ttggctttaataaaatttatttgggaatctcattgtctaatcaaagaaaaaatacacacaatcatttcacagacacaataaagataaaaaaaagtaacaccaatgcctgccttagaagtttaccagtaatttctttcatatacatacatattaacagactggtgagagtcctttttcacaattttttagatgagggtcaatgtctaaaactctctaaggaaacatatggtcacagaagatagactttatcatgacttccagcaatatcttctttctctcaacttcattgctgtttacttaggaagacagaaaagcctattttcatctgctttatctaagattctatggatcacttgagattcaaccccaagaatatgctgacaggagtgaggttctcagatgtctactataaaggtgtgaggagaagctgacactttacattgcagttttatagtcaccg

SEQ ID NO: 2556 - DNA, 424 bp, Homo sapien
cagaggaataattttttttaatcaccagtgtgcacacagtcatggagttgggtattcccagctaccagggaggctgaggtgggaggattgcttgatgccaggagttagggaatatagtgcaccgtgattggacttgcgaatagccactgcactgcggcctggacgacgtagtgataccctgactcttataaataaataaatgaataaacacaattatgactttgcggatgggagaaaaggttctctgagaacgtattacataagtatcacatgaactccaaaatacatcttaggccaggcatggtggctgtaatcccagcactttgggagggtaaggcgggcagatcacttgaggtcaggagtccgagactagcctgggcaacatagtgaaaccctgtctctactaaacatacaaaacattagc

SEQ ID NO: 2557 - DNA, 402 bp, Homo sapien
tttttcagtagagacaggttttcaccatgttggtcaggctggtcccgaactcctgacctcaagtgatccgcccgcctcagcctcccaaagtgctgggattacaggcgtgaaccaacctgcctggcctctttttttttaaatatcttttttatttcaatagcttttggagtacaagtggttttgggttacatggatgaaatgtatagtggtgaagtctgagattttactacacccatcaccaaagtagcatacattgtacccaatatatcgttttttatcccttatcttcttcctattctccccgcgtctcagtctccaaagtctattttactattctgtatgcctttgcgtacccatgacttagctcccgcttgtgagaacatatggtattcagttttgtat

SEQ ID NO: 2558 - DNA, 217 bp, Homo sapien
agccaccagaagggaaagccaaagccattgggtggggaacgtggcacggtcatgtggagcctcccctgctctcccactcaccgcacacctgacactccataatggtgtttcggatcagggacatttccttcacctggagaaggatggggaggagtcagcacttgacatctgccaccctaccccagaatcagtgccacccttcgccagcccacccaaa

SEQ ID NO: 2559 - DNA, 283 bp, Homo sapien
tagagataggttcttactatgctgccctggatggagtgcagtggctttcttaggggcaatcacagctcactgcagcctggaactcctgggctcagcctcctaagtagttgagactacaatgcacgccaccatacctggccttaccccctgtatcctggaactcactccttataagagacactgaatgtggaagtcttcgcagatattaagggcactgccaggttcctgtctttgaattattgggccaacaacagaaaggcgctcctgaggccccagatcatcc

SEQ ID NO: 2560 - DNA, 423 bp, Homo sapien
acattttgcaaaggtaaacacaagtgattctctttattcatggcagttatgtgctataaaatcacagcaaacactgaatttctgaatactaaacattcctcctaggagaaatatggggttaggttcctgtgagcctctggtcccaacattttcgttaacccattaatccataaccttgtttcatgtgtgtttctttttaagggcaacttacttaatatgtattgttgattcattaacatttaacttatggccaacagcactataactcatgcccaacagcactataactcatgcctgactgaagattatctaacatacatattttctttctttctttctttctttctttctttctttctttctttctttctttctttctttctttctttctttcttttctttccttctttctttcttctgttt

SEQ ID NO: 2561 - DNA, 220 bp, Homo sapien
tgactgttaactgctttattttcactgcccaaaagaaattctctcttttttcttccaactctaattatcaaacaaatactatattatgttttattgaaagatattttgttttaactttaccaaattctgtgcagaagtactggacgccatttccattttcccaatgaagggggatcccttttgaggagcagaaagacataaaactctgacatggcacaca

SEQ ID NO: 2562 - DNA, 394 bp, Homo sapien
gcgccgtggttggtgggggggcaggaagctgctggtggagctgcagcatccttcagtctcaggcccctgggaggggttggggaaagatccagggctgagctgtggagtgaaggggagccatttctctccaccgactgcaacctccgtgctcacagctcacggttcaccagaatccaggggcttggacggcctaggaatccacaatgctggataaaggtatcatgatgttctttgccatcataggcctggtcattctgtcctacattatctatctgctctagtggcctggagctgcggccggagcctgctggagaacagctcagaaggaaggatggagctgaatggccgagtgcctgcttgctgacgcaccggtggatttttgcttctgctgtta

SEQ ID NO: 2563 - DNA, 327 bp, Homo sapien
ttttaaaaagttaagattaaatttattaatcaactttgaagtctgaaaccgaaatgatcctttaacagcattgccaaataaacaggtcagttctacaaagctaatcataatgccaaattttgaccaaatgataaagtggctctgttaccatagtaccagagtctgtctttttgttgggtttctgtttgccataacaaccaaggattgaattacatttaagcagaagtatacaaggcttgatgaaattgaatatgagggattaagcatttttaaagtatgggttataattccttttgcaacacaagttctactgcataatttgcactg

SEQ ID NO: 2564 - DNA, 345 bp, Homo sapien
ttttttttttttttttttttttttgccaaacatgacaaatttatttgaaagtgggcattgcaatgtagaatatggtgtcatagtaaactataggtgtattcagggaggtaaaggaagataaggggtttaaaaggaaaaacgaggaggattacgtaagttgttttgaaacaattatccttggctacaaagatcagtaacaaaggggatggccagtccaaggttggacaggcagttgctggcaaatgtccttgaagcatttttttgtgtagttttgtggcctttgtgcaaggttgtggttttggcagtcttttgtgctaattctttatatcaggcaattattagtga

SEQ ID NO: 2565 - DNA, 298 bp, Homo sapien
tcatactaaagagaattttcatatttattcataaaataaatgagatatatttccagctgatctcttccaaagttctttatatggttgtttaaaaataaatcaaaacataacagatacatttgatgggtaataagcattttacattctgtaataaattttagaagatattaggggcaattctaaaaaaaaataagtttatctaggattccttcaaggtttcctattttgcttctcccatttttaagttaagaacacaacaaaaatgctttgaacaaaagcaaagacagagtagtgtagc

SEQ ID NO: 2566 - DNA, 201 bp, Homo sapien
cactggataaggcggacatctttattcaagccagcaaatgacacgccaggagcccaggtgagccggagtgcctgcccagcctggctgcagttgttggccagagctcagagctctcctgggcctggcagatggctctgctgcacttctttttgggactcagagactaaattagaaaggggtgggggtagccccaggagaacc

SEQ ID NO: 2567 - DNA, 136 bp, Homo sapien
ttgctgtgtttattttccaaacaattttattgaaatgtgccaagagtacatgggcagcacaaatgtatgaacaggaaaaaaaaaaatcacatgtacaataattttttaaaagtgaaggttaatcttgggagataac

SEQ ID NO: 2568 - DNA, 191 bp, Homo sapien
gcgaccgccagcgactgctgtcacagaagcggggcgctctccggagaagttcggcttctcggccgaggactaccgcgagctggagcgcctggcgtcagcatgagccccaccgcgccggccgccagtggaagttccccggctccttctacttcgccatcaccgtcatcactaccatcgagtacggccacgcg

SEQ ID NO: 2569 - DNA, 422 bp, Homo sapien
  misc_feature (1)...(422): n = A,T,C or G
gacttccactttttcccttacccctgtgaggcnctgggaacactaggtgggcagggtttgagccacaggacctgcacacaaacttccccacctcttggacttggggacaggatctgtgcctcaacccagaccagctttgtagggatatgttccaagaacagagaagagtcttatgggcagcggggagnaagggaagtgtgagtgtttatctccgcctcctacctcagctgggagcactgtcttccatggggcttccacttctctcctcaacctggggaagaccacagggcaattgtctcctcaggacctgccttccccaaaagctggcttcttgctccaaggagagagcattgacccacctgccagagtcttgccttttgcccaaaggagcctggtcttcagggctgcataggatgcaagtg

SEQ ID NO: 2570 - DNA, 466 bp, Homo sapien
cccgaggacttctcaccacaccctaatctaagctaccatcagcaccttttgcctgcatgactgcagttgtctcctaactgttcttcctgcagcgactctggccctccctgtattcactcgactgcaagcagaattctcctttttgttcgaagttcaattttaatcaagacaacccacctacctgcacttgcacccctagcttaaaatgctcgaatggctttttattgtccttaatgatgaaaaggaaatattttatgtgaccaaatatatttgacctatgaggtcagatatattagggccactatctaaagcatagttccaagcattaaaatagttactgtctcagattaaaacagtggctggcacatcacctcaatagaggttacctattcttgttgccacttagcctcatatgtaccatgttttacttaataccttcattgtcctttaagtattcggaatgaga

SEQ ID NO: 2571 - DNA, 445 bp, Homo sapien
ctccatctcaaaaaaaaaaaaaaaaaaaatgaaaccagtagtcaaattactatttggtaatacatttttgacatgaacttgcagctcccttggtaagtctgttgaagagtaaatgaagttttactacctcaggaaaaacatagttgtaattttatttaaatatcaaggttgctataataaaattcctttcagaatcatgagtttaatatgaaacactaagatttgaagagtttcattctggggataaatggtgaggcatttaggttaaacgtttaataaaggctaagagagaagaacattcgcaggtgtaatagtttgctttccacttggaaagaattagttttattctagaagttatattttagagccatctgaatagatgagtagctaatttatagttggaaattagggatcaggagttgggatagtgggtagacacattttc

SEQ ID NO: 2572 - DNA, 411 bp, Homo sapien
ccagctccccgtgcctcgacctcagccgcctggataaggggctggccgcactggtggtagcgtggcgcggatctggtggtcatcgagggcatgggccgtgctgtccacacaaactaccacgcagccctgcgctgcagagcctcaagctggccgtcatcaagaacgcgtggctggccgagcggctgggcggccggctcttcagcgtcatcttcaagtacgaggtccagccgagtgaggcgctgcagctgccggactcttctgcttgtcacttgtcaggaatgtgtttttaccaccacagggaaactgcgttcaaatcaacgtatttatatggtactgctgtgacgcggcacatacaccccagccgcacagatgcgtgtgacccagaggcgagaccagctttgtcctgggaga

SEQ ID NO: 2573 - DNA, 455 bp, Homo sapien
attcggcactgaggggtgttcgtgcagtccatagcgcttctcaatgtgtgtcacccggaacctgggaggggagggaacactggggtttaggaccacaactcagaggctgcttggccctcccctctgaccagggacatcctgagtttggtaggcatttccctctggcctaaggtaggggaggccttctcagattgtggggcacattgtgtagcctgacttctgccggagctcccagtccaggaggaaagagccaaggcccacgttttgggatcaggtgcctgatcactgggccccctacctcagcccccctttccctggagcacctgccccacctgcccacagagaacacagtggtctcccctgtccgggggcggctttttccttccttggagcgtccctgacggacaagtggaggcctcttgctgcggctgcaattggaggcaaggggctgcaga

SEQ ID NO: 2574 - DNA, 307 bp, Homo sapien
ttcggaacgaggcgggagacaagaaccgcctagagcgcgaggtgtacgagggcggttctcacttaccccttcctgtgcctgctggacgagcgcgagtggtgcggatcgtcctgcaggtcctgagcgctgcccgcccaaggtgagtccttcaccaccctggcccgggagctgagtgcgcgcactttcagccggcacgtggtgagaggcagcgggtcagtggccaggtgcaggcgctgcagaaccactacaggaagtacctctgcttgctggcctccgacgccgaggtgcccgagccctgcctgccgcg

SEQ ID NO: 2575 - DNA, 369 bp, Homo sapien
ttttttggatattttacaaatgtatttacttgagatctaatgcttcagtgagatttacaaagagagaagacggaagttgagccttcacattacctgaattgtgatgacatgaacacatctataaaaacttttgcttaggtcctatataaataaacattgtatatacaagtatagtgtttagattaaaagaaagaaaatccattcttttgttatatgagaaaaacatgacagattaatacaacggtggtgcggggttgacatattcaagatgaaggtgggtctcattttttaaaaaacttttttggtttgtttgtttaaaataataggagtctgcctatcaactacatgtgctgaccacacctgcagcat

SEQ ID NO: 2576 - DNA, 435 bp, Homo sapien
ttctgtggtaaatagtttcacactatgtatttctgagtccttaggatgatgatctcattttttgttccctgtgctatccacccacctgcagcaagcacaattttgttagttttattttctctttattaaatcctaatatatttactgactgcttcctagagatacataggtaaattagacagactttattctgtgtttgttttgtggattttaatttttctccactcagttaattgcatctaatcatcaacacatctgccatttatttatttatttttgccatttgcttgtctgttcgggtagttgatcttggacttcctaggctccaaatctgtgagaaagaagagaactaggcacctagtttatggtattttgttatagcagaccgaatgggccaagaaaatgttaaacaaattacttacattctgtctctgt

SEQ ID NO: 2577 - DNA, 412 bp, Homo sapien
agttcaatatgacagtggcttttattttttagttaccaaaatggtgctcagaatgaatatatacattaatgtatataaatatacatgaatttaaatacatacactgaattatttgtatgattttcctttcattagattgttgaaataattatgttctatttctctttgtatctccacaatgctttgtccatagtagttagtaagtgagataggcaacaaaagctttaagtggaggagggagtgtggggggtcttatttgtaagatttctgcactacaggataatcaataaaacacacctgccggcccactcggtcaggaggaggccacaatgcatcatcctctgttggtaatttcactgtcgtcaattattctcttcagttcctccatcacgcttttatgtacataagcctg

SEQ ID NO: 2578 - DNA, 531 bp, Homo sapien
cttgaaatcgggccgcggggggtctctcaagctggttccaacgctgaggccccacagcctcccaattccgggcagacccctgacacctgctgtctggccccttccggcctgaagctgcagccgcgccatgtccacccctccgttggccgcgtcggggtatggcgcccgggcccttcgccgggcccaggctcagcaggccgcccgggaagtcaacacggcgtcgctgtgccgcatcgggcaggagacagtgcaggacatcgtgtaccgcaccatggagatcttccagctcctgaggaacatgcagctgccaaatggtgtcacttaccacactggaacatatcaagaccggttaacaaagctacaggataatcttcgccaactttcagttctcttcaggaagctgagattggtatatgacaaatgcaatgaaaactgtggtgggatggatccattccagtcgagcaacttattccatatgtggaagaagatggctcaaagaatgatgatcgggctggccacctcgttttgcta

SEQ ID NO: 2579 - DNA, 351 bp, Homo sapien
gaagtacattaactggcaagaactacacaatggaatggtatgaacttttccaacttggcaactgtacatttccccatctccgacctgaaatggatgcccctttctggtgtaatcaaggcgctgctgcttttttgagggaattgatgatgttcactggaaggaaaatgggacattagttcaagtagcaactatatcaggtaagttgtgaaaatatagcaatatttgatcattgcatcaaaaaccaaatgaaagaaattgttatacttccattgaaacatttcagtaatgttttacttagaggtcatttgtaaaatgtacttttggaaccattaaactttgggaatttttttc

SEQ ID NO: 2580 - DNA, 428 bp, Homo sapien
cgccgcagagctagcccggggaagcccacactggcggccacggagcacgagtccctcacccccaccagctgtactgaacgtctggatggtggagaagagcagggttccgagtctgaggaagacataaccttgtgcctgcctgcccacctctctctctggtcctgttcatctctcaggctctgagacactgaccttcactgctcagttaaaggttccagggattccacatttgtctggacccatccagctgagtgaacccagggtggtggtgtatcgtggggagagtgaggagtgggttgtccaaacaccagggaaagagccctttggcgctcagacagaggagtgaagctggaaccatcagggaacatgagtgaattttggcacaaactgggctgctgtgtggtagagaaccccagccggtgagtctc

SEQ ID NO: 2581 - DNA, 490 bp, Homo sapien
ggttataggaacagagttttatttatatgatctggtactagacttcttaatataactgttacactgtccttgtctttcctactcaaagacagtatcatctgaagttgcctaataaggtcatgtgagtcaagaactttatctgtgggagctgatttgcaccattttacctttttttttttttttttttgagacggagctttgctctgtcaccaggctggagtgcagtggcgcgatctcggctcactacaacctctgcctcccgggttcgagcgattctcctgcctcggcctcccaaacttctgggattacaggcgtgacgaccgcacccagccaccattttatctctctaaagtctggtcccagtattaaacctattctttagtaaactcatattactgttctaaattgaagaaattatttattactctgtacttctagactcaaaattctttatcaaagatagtctcaaagaggtagtacaagtcctgtt

SEQ ID NO: 2582 - DNA, 468 bp, Homo sapien
gcaaaatctgccctcccgaattgaaaaagccaaagagaattgttagagggaaaagcatgtagccattgcagtctgcattgcaccagcgttgtccagagagtacacgctcagcacttagcttctactgtgtgttgtggtctggtgagtgttgttcccctgagcgctctattatttatttatttattatcaatcagtgaccctgaccacatagtgtgataggtgcagcattctccctgtgggaaagaattaaagatggttccatttcctaggctacagacaggaatggggctctaaatggttttcatagactggctgttaaaggccaaaaattttggtaaatcaatgctatattatgctcttgaactattaaaacagccataattattgtcccaagatagaatatagtcctttttcaaagatgattatacgtggctaggtgacagacattaatgactgactctggagagt

SEQ ID NO: 2583 - DNA, 420 bp, Homo sapien
ttgaatccatggtccacctgggttttaattattagatcttggtcgcccaaacaaaaatttatatatatatatataaatttgaccccaaggaagaacaagtcaaaacaaaatgccacgctctgtttgctctagaaaaagaaccatcaagtccacagagtgccggtatgacttactctccagagtcagtcattaatgtctgtcacctagccacgtataatcatctttgaaaaaggactatattctatcttgggacaataattatggctgttttaatagttcaagagcataatatagcattgatttaccaaaatttttggcctttaacagccagtctatgaaaaccatttagagccccattcctgtctgtagcctaggaaatggaaccatctttaattctttcccacagggaagaatgctgca

SEQ ID NO: 2584 - DNA, 375 bp, Homo sapien
gaagatcatactgcattataaatttctgtaactaatagtaatcaacaattgtctattttgttctacccatgcaaacagactctagcactgtccaatcctgtacccactagctacagcacaatttgacaactgaccacttgaaatgtggctactctgaatctaatttcagttaatttaagtgtaaacagccacatgcagctagtggctactgaattgcacagtgcaggtctagactcctaaagcagtgcttctttaccttggtttcataatgggatcacctgtgaagctttacaatacaccgctgcctaggccccttgccagagcaattggattttaatctgtgggccccgaacaaggacgtttaaagagctcccc

SEQ ID NO: 2585 - DNA, 474 bp, Homo sapien
tatgctatggtttagctctttatttctacaattaaaagcagtaaaaacttaaaaaagaatttttacatcaatagaacattaactacagttggatttttcaatacctatgttcctcttccctctcttgattaacctgaagttgatattctttctgtctacttttaatacatatttatgattccatagataatactgtatatattagccattccctattttatcagtgacaaaaaatttgagagaagagacacagataatacttggagttatagatccagtcatagatataaggaaagttattagaagtatctataaaatatcaacagatcaaaaacactgccctttttttcttgaaatgagggtactaattgatgggggagagggagagtataaagggaacactagagcagtgtttctctctgtattaaaatcacctggggagctctttaaacgtccttgttctgggccacagat

SEQ ID NO: 2586 - DNA, 225 bp, Homo sapien
ttttttttttttttttttttaaaaaaaaccatgaatcatttattctttggttgtatacacagacacttaagtactgtatcgctgttatgcagcggcctgtggaggccctgggggtggctgggcctgtgtcctgagccctcagccagatccagggggtgcggtgtctggtcatgtccactccaagagcagtagcaccatgtagaaggctgtgagcagggtcccctc

SEQ ID NO: 2587 - DNA, 454 bp, Homo sapien
aaccatattttcattgaatatattatcatgaacactttcagtcattaaaatctgttctgcaacatttttagtgactgcaatagatccacattttatgaataaactttgatgtttttactgtgcaatttctgtatgagtagataagggtagaaaataatataatgctatatataatgccacacaaagctacacacacgtatctaagaacttcaaaaaccacagaacttccctctcccctgttccttaaaacaaagtctgagcggaaaaaacaaacttttttcctctgctctcacaccacaataaagacagaaaacttctctgaccaaatgtgtggagttttttccccaccatcaagcaagcaatcaattttgcagcagataccagctaggtgtcctccagtttcccatgctatcccctagagatggcatttgatcccacagattgagggcccgtc

SEQ ID NO: 2588 - DNA, 464 bp, Homo sapien
ttttttctttataaattacccagtctcgggtatgtctttatagcagtgtgaagacggactaatacaatatgctaatgcaagtgggaaaactaagattgattttggaatgaaacatgcagtctcaacttaagaacacccaatttacaaaactatatatatccagacagagtcatactgaatgccatgttctcccacatcaatgtcaaatgcttagcatggccagcaaaaagctgttcctttgctgtaatgcaaccgtgtcttctgaatatggatccatattcactttccatcttatcctccatcagacacactcttcttttcctaaagcatttgcagggcaacagagggttccaggtttcagaatttaaacagtcgtatctcattgaaaataagtttaatgattattaagtttccaagctagattacagaagtctttttagcccatatcataaataaaatagttc

SEQ ID NO: 2589 - DNA, 402 bp, Homo sapien
ggagggtgggtgccgctgagtaaatgggactgctgtcgttggatggcactgcgcactctaggggtgggctctgggaggcggaggcggaggaggccgctggagatggtgctgaggacgaggaggccggtgggttggtcatgctcactaggccactgaccaagctgaagaggggctcgggccacaaggtgttgccactgttgggtgcaggctccagggaaaagcggccagtataggtgatggggggcagtcgagtggtttggctggggtaactggtctccaccagcaccttctcgttgttcagagagatgtcaggaaaagactctgcggtcaggtgctcgtagggttgctcgcccgtgtccgcctgagggttgaaggtgctgctgctggtggtgctgttgctgc

SEQ ID NO: 2590 - DNA, 326 bp, Homo sapien
ttttttttaccagtaaaatagttttatttgattttaaaatagtcatcaatgtgaaaatttctcaaagcttaagagtaacagtctagagccaaggttgggagtgggggccaggcctcacacagagcccagcttgaggcccctgagccccaccctcctttccagagggagggaggagacagctgagggggccctgaatcagtcctctccctcgtccccaaggccagctgtgccaggcccctggagggcaacagctcatgcggaggactggggggggaagcaaacaggtaggaaacggaaatgaggttaacaattacaccatcaccccc

SEQ ID NO: 2591 - DNA, 447 bp, Homo sapien
tctattaatcttttattattaagacggctgaaaaaaatgattacatattattagtgaagctcagtggaagagaagtgggtggaaaagctctaacccgagaggccgctttcacaggatgggaggatgggttacattttgcaaggtgtaccaaagggttaaagtcattttcattaaaatttaaatttcagcatgcgctcactctcccttccccgtcctttgaacgtttgactggcaaccatttcatatttcaatctcggcagaacaaattgaattagatgttgaaaccaagctcggctctgttcaccaaagcctgcgtgctctgctcacactaatcctttcctagacgctgcggacacagacgggcgctgcgagagacggccctgcacaaaagacaaaaaagaccaaggcggcaggaaaaggagaggaggaaaaacaagcgggcagagg

SEQ ID NO: 2592 - DNA, 444 bp, Homo sapien
tattttgtatttttttattgatatatcatagttgtacaaacatttggagtacatgtgatactttgatacatgtgtgtgatatacaatgatcaaatcagggtaatggggatatccatcatctaaaacatttatcttttctttatgttgggaacattgcaattcttctcttctagttattttgaaatacacaataaattattgttaactacaatttctctaacatactatccaatattagaacttactccttctatcaattgtatttttttacctatcaaccaacttctcttcatttccccccaatcctatctactttaacagtggtttttgaagatttaaatgaagcagactgcatgaaagtacctgcgtcaggattttgcacataaacagttctttggaaatactttggaatcaacgaatgaatgtacgaatttattctaactg

SEQ ID NO: 2593 - DNA, 103 bp, Homo sapien
gctcaggcacagtcaagcggaggacggcatgcggtcggagcttcatgaagcgtgggcaagccatgctgacatggtgctgactgaggcgctgtcgatcctcggc

SEQ ID NO: 2594 - DNA, 402 bp, Homo sapien
agaacaaacattttattattaaaataaacttttgtataaaagcattacagatcaaaagctgtatttacacttatcgattcaaggtccaattatgcatcaaacattgaatggcacagcaatggtttacatatgcaagtaaattggacatacaaacacttagattccacctctaccaaataccttgattaatgcaaagaggagggggaatactgacacaggaaacctgcccagaaactagactggcagagatgtcaggttaacaaactgctaaaagttacatctccaaaaaggcacttatcattgttataaaagtgcttaaaatctaaacttgaaccttgtgcctggtttataaatttacaagaaactgcaaagaaccacagactagtttttaatatcaagttt

SEQ ID NO: 2595 - DNA, 235 bp, Homo sapien
cagggcagtggaggggtgctttatttccatgctgggtcccatcggaagtatctggaccgggtacgtgcgaaacatccgcgtgccaccacgagacccggccgagccgcggcttcgcgcgccgccgcagtcatttacgcgggtagagcgagacggtctcctgcgtctactcgttgggcaggccgtcatggatgacggaacattacaagagggttcccctgctgggacctgctcttgt

SEQ ID NO: 2596 - DNA, 428 bp, Homo sapien
tttttaaatgggaacaccatgcatttatttacttgtctttactccacaggtgattggaggaggcttttggtgacaaacccaaaagaaatgaatacatatgaattcttattaaatcaaaatcaaataaaattataaattttaaaatgttaagagtgaggcaagactagaacatcactagacaggctgaaacatgctgaaatggagggtttactgctttccttgctttaaattttgctggctcacaatggcttatgtttattgcataagggggccacagggagggttgcttgctcacataaggagcccctggttttcttcagaaacaagttcaaattctccacttagagccaaaaaaaattaattgcaagatgttcaaactgaagttggcttctataaagtcaaagaataagcagtaagtgtaaaataaa

SEQ ID NO: 2597 - DNA, 326 bp, Homo sapien
tccttttactatttttattttacactataaaaaacaacaacaacaacaacaaccagtaacatactgcttttcttcacattcacacgggtcttagaaaattattgccttttcccctggagaaataactaacagacaaaaagaaaaaaaaagtagtaccacgttgcaaaatctgcaaatcccagaagtccacagcttgaagacaacctccaggggcagggaggaaaacaattgtcacaagagacataagcacacagaaggacaggcagctgaggaaaccagtttgcaccgccactgacccaggatacctagcaagtacccttctcctc

SEQ ID NO: 2598 - DNA, 387 bp, Homo sapien
ttgtgagattgcagagagggctttttttttttttttttctgtggcaggacctagggcttaaaggggaacttcctttctccaattctaggaactgggactccaaaatgagaagctggttgtctgaagtaaccctgcaggtgtggttggggaaggtctgttttcttggatgaagggattaaactgagcaaatcactagaagtatgccctgtcccctgctcagaacactggggagctcaagagtgggctgcaatgtgcacccctcaggaatagctgtgaattgcaggtctactggctttttgctttttgtcctttgctgcaaggtaccccacgtacttaaccattctcaacagtgtaaatcagtgtcattttagaatgagatactcagct

SEQ ID NO: 2599 - DNA, 211 bp, Homo sapien
ttgttttttttacaaagtacaaactttattttgtttctttacaaaggcacggtggcctcttggttttttttctccccactttcttaacaaaatataatagcttctccttgaacacgaagacctcaaaattgtaaaaaaaaaaaaaaaaaaaaaaaaaaaaaaaaaaaaaaaaaccaaaaacggaaagcaacccaaaaggaattaaaaaccc

SEQ ID NO: 2600 - DNA, 489 bp, Homo sapien
tgcgaccgccgtggcacctgctcgccctagcccactgtaggagtcgggaggccgagacaggtcagggagggtgcctggctggctggggagggccgcgtggttgtgcatgaggctggtgctgcctgcgaggccgtcctcggggtggctgcctccaaccaggcctgcgtgccgcccgcccagtgacatggggccggtgaaactgaggccagcgccccgtggccaggcagcagcgtgtgcatgtcgccggctgtgccacggcgtggctgcggacacgtggatggcctcgtccaggtggtcttctatcttactctgcaggccgtggagacccccgtcgtagctgggcgataaggcaccgggggctcctgctcgaggccactgtgacgttcctgccaggccctggggggacccacgggggtagaagggctggacgaaagttattgcttgagtgatccggggagtagatcgaggcagtgctttccgaggcatccc

SEQ ID NO: 2601 - DNA, 348 bp, Homo sapien
cagggcgagttatttctttaatgaaaaagcacaagcccttatgtgtcgaaatacacgctgttacactgaaaatatatgcacgacagagcaagaagcttgtgcatgatcacttcttatccgtccccttcccagcactccctcctcttcccattctctccacatgtctcaagcaccctaccgagtagggcaggccaaatgttccttgggagtaatgccaactcccgacgttgccttcaggtccaaagggcttggaaccagctcgtgaggaagttctgaatctggcactaatattcttgagtggataatagtgtatcatagaataggacggaaattgtattgagatgtgac

SEQ ID NO: 2602 - DNA, 355 bp, Homo sapien
caggaggatcacaaagttgtttattttcccacctataagaaaagatggatgatgcagagtgccgagaaatcccagccattcccctggtgaacatactggaggcccacacgagcctaacaggctgtgtctttaccaagggattttcctctatttcaacagaactgcaatttcccttccaagtgctccccgaggcattctgtcatgctgcttctggggataatttatcatccacgtctgtgctattctacagcagccatgtccttagaacatagaaaatctgattggccaaaaaagaaaaaaaagtgccaaaatgtcaaatttcatacaatcagggcaagaactggtcttcttttgg

SEQ ID NO: 2603 - DNA, 352 bp, Homo sapien
ttgttattccccccacccctttttttaaccttcctcatttgctacctggcctgagaatttacctcccactctgccctccacttgtccttattcctattactcttcttgctgaatagtccatttgggacttccttagtccagccttagtcatatcttcctctgaagccttccctgactaccaccaagggtcactgacactcctttgaatgccagaaggattagttgtaaacctttcacgttgacagtaactagcttgctttcatgagcttaactgtttcatgagtttacaacttgtctcaatttgattttaaactacagaggctttatgtgctaagaatgccacaggtttaca

SEQ ID NO: 2604 - DNA, 303 bp, Homo sapien
accgcggagagaaggctctttatttcctagccggtcacggctagcggggcatcctgggacttgtagtctccgctacagtagaaaggagatggatcgaaaggggaactggggcactcctgaattggattcagggagttggcgtgtgcagggtccgggatttggagtggatgggattatgaaaggtggacagaaaagaaaagtgcgatgaggcaaatgtgaagctgtatggggaggtgacaggaagagaggatatggatggaagggagaaagcagcttttcagggtggtgaggtgaggatatatt

SEQ ID NO: 2605 - DNA, 390 bp, Homo sapien
ttaagaggtggtgcttttatgagatgattaggccataagacctgcttctttgttaatgggactaagtccgttttaaaagaggcatttcctagcattagtttcttctctcttgcccttccaccttcttccatgtgaggatgcagcaagaaagctctcatcatttgtcagcatcttgaccttggacttcccagcctccagaacacggggattgctttaagagtacttgggtgtcttccagctagttttccattccaaccgtcgctccagcaaccctttgacctggattcgagcctccacgaatggacgccacttgccgagaccagctcgctcggggagactctaacccaatggagctagaggaattaaggacatacacacagaaatacagag

SEQ ID NO: 2606 - DNA, 459 bp, Homo sapien
ccttgtaccatttattaattatattattctctgtttagcaacagagagatatgtacagaagccacaaaagctctagataattacattttccaattacaagagtttcagtttttgagactatgacatcagaatatttcagaataagtcttcagtttagaaccagggttacgattctttttaaagaggattactttatatgtatttctgtgttgctttgaaggatccctgagtaatttctatgcatgtgtcacaggttttttttttcttgtccttccttcctggtgtctgactggcccccgccactgccccaagtaaccactcccgccccggagattactcgggtctaaatggcacaggtgttctccttttatcccgattacccttgaaaggatagggagaaaacattagaaatcatgtcccacatagggtcaaggctgccatgagcttaaggcaggaagt

SEQ ID NO: 2607 - DNA, 407 bp, Homo sapien
cacaaatgtcaaatgttaattttatccaaaaacacccccacagacacactcagcacacacagtgtcactacttactctcagattgctctccagactgggggaaccaattgacaaggcccccagctcccccagctatgagactacattccccataacttttcagcatgttcacttgattctccaaccttaacagacttgtgatattactttaatggcaaacaaggctctgctgtcccacgcgcttactttgccacatggcacagtatctgtgtcacagacgcactcttcacaaggacaggtccaggcctgtgtcagtcactgcttcatcccagcacctagcacagggcctgactcatggtgagctgtggacaaacgcacatgcaattaacgacttgttcctgcctcag

SEQ ID NO: 2608 - DNA, 286 bp, Homo sapien
gaaccaaagcggaggtgcaggtcatgtagttaggtgctgtgtgttggtgcaaaacaaagtcaagggctcatatgtcccagatttagtatttagagcttctgttcctgaggagtcacagccaaggttggtttattctgcattctcttggacggggcctggggacaccgtggcgcttctatgggatggcaagtgttgacagggtgctcttcctctcctaccccaggatcaggttcattccccattgttgtcagaaaggtcagttgtctggggtacaaatattaaactg

SEQ ID NO: 2609 - DNA, 199 bp, Homo sapien
ggctatagagcatttattgcaaacaaaattgaggtaaaagaagctgacccagaacccacgcccgtccaggctggggaagtctctactcgccccacaccaggccccgagcaccgcgggcccgaagcagcccccagaggacagacgggccctgcgcactgaggtagctgcatcttaagcccccatgagtacaactgcccag

SEQ ID NO: 2610 - DNA, 360 bp, Homo sapien
tgcgaccgccaagaacagactcacccataggaagcaaggtatagggttagaccactagggtcgggctgccttatggggcttagttttgggtatattctaggatgtgattcctgagtgtgggaagtgtagggtggggttagattgaaggagatttagtgctcactctcagggaacggtggcagtgtggcggttcaccccgttcttggtgttaggtggggaaaagttggacttcaatgaggcctttccatcagcctgcaagggtggggacaggaagggagagaggtgcatttgacgagtcgggcttgttggctgatggcactgcagagtttggacatcccaggataccaggagtccagaggc

SEQ ID NO: 2611 - DNA, 272 bp, Homo sapien
caagaactctgtctttaatggcttcattggtagcgtatgatgattcggactcggaggctgagacagagcatgcaggaagttttaatgctaccggccagcagaaagacacttctggtgtggccagaccacctgggcaggattttgcatctggtacactggatgtgcccagagcaggggcacagccacgaaagcatggctcctgtgaagacccagggggctatcgccttccattggctcagcttgggagaagcgatcggggatcttgccccagc

SEQ ID NO: 2612 - DNA, 244 bp, Homo sapien
gcagagcagtgagcctacatctgccactcagccgaggggaccctgctcacagccttctacatggtgctactgctcttggagtggacatgaccagacaccgcaccccctggatctggctgagggctcaggacacaggcccagccacccccagggcctccacaggccgctgcataacagcgatacagtacttaagtgtctgtgtatacaaccaaagaataaatgattcatggttttttttaaaaaa

SEQ ID NO: 2613 - DNA, 489 bp, Homo sapien
tacctgaagagggtagagggtataggagctccctgtcccttcccacatgccttgctctatccatttcttcatctctatcctttgtactgtcctttataataaaccagtgaacctaagtgtttccctgagttctgtgagctttactagcaaattaaactcaaggaggggtcatgggaaccctgatttataggtttggtcagaagcacaggtaaaaccacctggggtttgaacttggcactggaagtgggcagcagtcttgtgggactgggccctcaatctgtgggatcaaatgccatctctaggggatagcatgggaaactggaggacacctagctggtatctgctgcaaaattgattgcttgcttgatggtggggaaaaaactccacacatttggtcagagaagttttctgtctttattgtggtgtgagagcaaggaaaaaagtttgtttttccgctcagactttgtttaaggacagggagagggagtc

SEQ ID NO: 2614 - DNA, 543 bp, Homo sapien
atatttcagatataagatttcagttctcagtgagtctaagtgacagaaggaatggagaccctcttgggcctgcttatcctttggctgcagctgcaatgggtgagcagcaaacaggaggtgacgcagattcctgcagctctgagtgtcccagaaggagaaaacttggttctcaactgcagtttcactgatagcgctatttacaacctccagtggtttaggcaggaccctgggaaaggtctcacatctctgttgcttattcagtcaagtcagagagagcaaacaagtggaagacttaatgcctcgctggataaatcatcaggacgtagtactttatacattgcagcttctcagcctggtgactcagccacctacctctgtgctgtgagggacaatgacatgcgctttggagcagggaccagactgacagtaaaaccaaatatccagaaccctgaccctgccgtgtaccagctgagagactctaaatccagtgacaagtctgtctgcctattcaccgattttgattctcaacaaatgtgtcacaag

SEQ ID NO: 2615 - DNA, 128 bp, Homo sapien
tgggagcggccggggtttgtggtcccccccccaccacaaacacagcacttcggctcctctaacctgtgccacaggtgaccaccaataaaatcctctgctgagaagtgaaaaaaaaaaaaaaaaaaacc

SEQ ID NO: 2616 - DNA, 471 bp, Homo sapien
  misc_feature (1)...(471): n = A,T,C or G
caggctctgtctcctaggctttaagcccatgcatcaggtggaagacaatttccagcggcctctgcccagcttgtttttcctcctctccttttcctgccgccttggtcttttttgtcttttgtgcagggccgtctctcgcagcgcccgtctgtgctccgcagcgtctaggaaaggattagtgtgagcagacacgcaggctttggtgaacagagccgagcttggtttcaacatctaattcaatttgttctgccgagattgaaatatgaaatggttgccagtcaaacgttcaaaggacggggaagggagagtgncgcatctgaaatttaaattttaatgaaaatgactttaaccctttggtacaccttgcaaaatgtaacccatcctcccatcctgtgaaagcggcctctcgggttagagcttttccacccacttctcttccactgagcttcactaataatatgtaatcatttt

SEQ ID NO: 2617 - DNA, 255 bp, Homo sapien
ccactcggcacatgggccacctgcccctgctggaggggcaccagtgtgtgagccgccctactcccttcacctggccctctgttcctgccccagccccttccccagacccctctccagtctcctgcaccccttagccctccctgctttgcctggcccgttgaagttccagggagcttgcccgggtctcctcgggggagcagatgagggccctgccctcgccccactgacttcctccaataaagtcatgtctgcccc

SEQ ID NO: 2618 - DNA, 431 bp, Homo sapien
tgtgaatttcccaaatcaacaatcatctcctaatgtttcccagttcctgtcacctgttggcgaggttgatttctaaaacttaaatgagtctacctgttttgcatttaatttcagtgttccgatttctttttttttttttttttttttgagacggagtctcactctgtcacccaggctggagttgcagtgagccaagttcgtgccactccactccagcctgggtgacagagcaagactctgtctcgaaaaagaaaaaaaaccatgaaggatgagtactagagtcagtaatagaagtagttcagcattatttaactacaacacaatgctgcaaatatttcacagtaattatcaaaatttaatgggctctaatttaaaatgttatttaataagtatagattttaattgagaattatctttgagtagatgtaatc

SEQ ID NO: 2619 - DNA, 403 bp, Homo sapien
actaacaacatttgtatccctggggagcttggtagaaatatagacctaggagaacccctgccccaccccaacctacagaatcagaatcttcctttgggtaggatcccaggtgatctacatgcacaataaggtttgagaaatacccccactctttgctcattaaacctgcagactctgttcaggtgtgcttcccccaagccacactcctccggggcttggctcggagcatgctgggtgcagacatcggtaacctcttagcttaatgtaccaaaattgcatgcataaagatctgtatcaagactgtcagattctcaggggcagaagcaagtcttatcctctgcaaatcctgcatgtctgcctggcactgaatagttcccggcaattttgaaccaattaatcatca

SEQ ID NO: 2620 - DNA, 397 bp, Homo sapien
aggctcagcaactgagcaaatatgtgcctgtgagtttgccagtagagctgtgaagaaacagctgcagagaacatttgaccttcctggcattcttgtctgcatgtgtgtgagttattttagaggtgtgctttcttgagccctcataaggaagtactggtgctaggttttgcaagattttgtatacactttgctccttgccctagggtcagagtggtggtttctgactacatttctagagtcagagcttgatcaccacaactcaattatttcggcatcttttcacctatgctgtgatttgtttttttttttcttctcaaaaattctgttcattggttccactcagcatcaagaagacagggacaaacaactcaagtgtcttaacagctgctggagtggg

SEQ ID NO: 2621 - DNA, 441 bp, Homo sapien
attcggaacgaggctcaagatgagcctgaggacattcgcaagtggaatgtgacgtccctggagaccctgaaggctttgcttgaagtcaacaaagggcacgaaatgagtcctcaggtggccaccctgatcgaccgctttgtgaagggaaggggccagctagacaaagacaccctagacaccctgaccgccttctaccctgggtacctgtgctccctcagccccgaggagctgagctccgtgccccccagcagcatctgggcggtcaggcccaggacctggacacgtgtgacccaaggcagctggacgtcctctatcccaaggcccgccttgctttccagaacatgaacgggtccgaatacttcgtgaagatccagtccttcctgggtggggcccccacggaggatttgaaggcgctcagtcagcagaatgtgagcatggact

SEQ ID NO: 2622 - DNA, 387 bp, Homo sapien
ggggaatgaccagggatgctgaacatcctgcagtgcacaagtcagcccaatcacccacataacagataattatccagccccaataccaagattgccaagggtaaggaggcctgccaggactttctctcccttgagtacaagcttccttgaactgagggacaccctgaaggaaaagtgtggtcccaccccagtcatctctcccttccctggagctccatctgtatgcctgtagtgcttaggcctgtaacctggggtccaggaacccaccttcccatgagactgcatgcagaagtgatgatatgtgcacacatgacttcattacagggcattggatattgatattcatcaggtcagctggggcccaagacactactcttctgccaacag

SEQ ID NO: 2623 - DNA, 391 bp, Homo sapien
gcgaagagagggctgaacccgtccgctgcccgggcggtggagccccacggcgaggcgctgcccggcggtggagactcgcgttccctccagcccctgggcgagaactttctcgccccccctcctcgctcccccgcagtcggactccctccccagccggccagtcctcccggatgagaaggcgccgcggagacagcccgggcgggggcctaccttccccagggcaggcatcatgtcggcggcgcaggtgtcctcgtcccggaggcaatcttgatacctgtgcgacctgcccgatgccctgggcatgatctgggacttctcggaacccgtatgccgcggttgcgtcaactacgagggcgctgatcgcatcgaattcgtgatcgagacagcgcgc

SEQ ID NO: 2624 - DNA, 275 bp, Homo sapien
gcatgagttcatatttaaagtgatccaggccaatgcatggctattgctgtaaatcttgatgtttatttctgccttgtaaagttctatcacggcctacctggaatttaaaattcagtagacaaattaattggtcctctgcacaacttttttaataagtagattattttacaaagaaatttgaacaaatttaattgaatcttttgtttagcttgcctctaagaacttttcttaataaagctcccaaaacttctcagcagataaatctcccttaagta

SEQ ID NO: 2625 - DNA, 477 bp, Homo sapien
gggtattttttgtggagacggggcttcgccatgttgcccaggttggtctcaaactcctgagctccaaggatctgcccaccttagcgtcacagagtgctggcattacaggctgagtcactgtacccggcctacatatgagaacttaactgcccggcctagttattgtttttttaactctaaaagttaagtctaccctgccttcttctttttttttttttttccacgacagagtcttgctcaggctggagtgcagtggcatgatctcggctcactgcaacctctgcctcccaggttcaagcaattctctgcctctgcctcccaagtagctgggattacaggtgactgccaccacacccagctaatatttgtatttttagtagggattgggtttcaccatcttggccagaggttggtcttgaactcctgacctcgtgatccacccgcctcggcctcccaaagtgctgggattacaggcgt

SEQ ID NO: 2626 - DNA, 386 bp, Homo sapien
tgccatgggttcttcactgaccttggactttggcatgattcttagtcatacttgaacttgtctcattccacctcttctcagagcaactcttcctttgggaaaagagttcttcagatcatagaccaaaaaagtcataccttcgaggtggtagcagtagattccaggaggagaagggtacttgctaggtatcctgggtcagtggcggtgaaactggtttcctcagctgcctgtccttctgtgtgcttatgtctcttgtgacaattgttttcctccctgcccctggaggttgtcttcaagctgtggacttctgggatttgcagattttgcaacgtggtactactttttttttctttttgtctgttagttatttctccaggggaaaaggc

SEQ ID NO: 2627 - DNA, 399 bp, Homo sapien
tgcctctgagtagtagactcttcaattctggaatttggttgccgaagactctaaaggagagactcactcagtaattcagtgactttagaagcaagctgagtatctcattctaaaatgacactgatttacactgttgagaatggttaagtacgtggggtaccttgcagcaaaggacaaaaagcaaaaagccagtagacctgcaattcacagctattcctgaggggtgcacattgcagcccactcttgagctccccagtgttctgagcaggggacagggcatacttctagtgatttgctcagtttaatcccttcatccaagaaaacagaccttccccaaccacacctgcagggttacttcagacaaccagcttctcattttggagtcccagttcctagaat

SEQ ID NO: 2628 - DNA, 462 bp, Homo sapien
aggcggagactgcggcgggaatgttgagctgcggcacgggacaaggagcgctcggtgcgcatgatgctggaggagcaggtgcgctcgctggaggcccacatgtacccggaaaagctcaaggtgattgcgccgaggtgcagctgcagcagcacgaggaacaggtgaggctgctgaccaggagaagctggagcgggaacagcagcacctgcggacccagcttctgccccctccggcccccacccaccaccccacggtgatcgtgccagcaccgcctcctcctccctcccaccacatcaatgtcgtcaccatgggcccctcctcggtcatcaactctgtttccacatcccggcaaaatctggacaccatcgtgcaggcaatccagcacatcgagggcacccaggaaaagcaggagctggaggaggagcagcggcagctgtcatcgtgaacctgtccgcagctgcc

SEQ ID NO: 2629 - DNA, 422 bp, Homo sapien
  misc_feature (1)...(422): n = A,T,C or G
tatggtgactgacatagcactgcagaagctggcccagaaattatagatgttcaagcatgtcagacacatctgccgatcccagcaggatgcaggctaatcatgctctgtcgacacctcaatgcagcatctgtagagagcataataatgaactgctctgcaaaccgagtgtacctgctcacatcgtcgtcttgcgagggagcacactgaccactcgaccatgggatggcagtggagttgacaagctgtgaggaagttgtctctcaagaaaaaaccatgatctccaagttgacatatgtcatggatgtagtgcagactcactcctatacagtgggaccaggatgatgatagtcctgcatagagtatctgggggacanttttcgttgagcggaattcaagttttatcaggaggtctggtacctggg

SEQ ID NO: 2630 - DNA, 487 bp, Homo sapien
agctgcatggagcagaggtgaacggtgggctcccatctgcatcctccttctcctcagcccccggagccacgtacggcggcgtctccagccacacgccgcctgtcagcggggccgacagcctcctgggctcccgagggaccacagctggcagctccggggatgccctcggcaaagcactggcctcgatctactccccggatcactcaagcaataacttctcgtccagcccttctaccgcccgtggctccccccagggcctggcaggaacgtcacagtggcctcgagcaggagcccccggtgccttatcgcccagctacgacgggggtctccacggcctgcagagtaagatagaagaccaccttggacgaggccatccacgtgctccgcagccacgccgtgggcacagctggcgacatgcacacgctgctgcctggccacggggcgctgcctcaggtttcaccggcccatgtcactgggcgggcggcac

SEQ ID NO: 2631 - DNA, 346 bp, Homo sapien
gggatttcttggaagaaagtgcactcatggagggtctgtccacttggctcactccaacagtttgaatttggaattctgcttttcttcatgaagcacagtctcataagcccacacctacggtctgagttctgaactctcagcaggcctgatagaccacgtccctacacatattcacatttggaaatcattctcagtcacagtgcatcaagtccagatcacagcggcgggctttgctctcacagtctgtggcatatgtctctcctgggatccacacagccgaccactgaacaacgatgaagggggctttcgtgggaaagttcttctcactatgcctttccacaggcga

SEQ ID NO: 2632 - DNA, 359 bp, Homo sapien
gttgggacggcgggctccagcccagccccagccccgtactgcgggtggcgtgggccggccgtgtgccgacgtccccattcacagctcatgactctgcttccacagggcttcttagactatcctgctagttatcttcattcccacaagaccaccagggcggaattaatccgactgaatcagtcaccaactttattgaacaatcccaactttttctttcccttcagcgctgcgccctgcgtagtctacaggaggctcttcagtctttggcaccagtgtatcttttagctccatctcccaacactccccctcatcttgcgctctgggcaccatcatctgtttcctaacaaccggtccttttt

SEQ ID NO: 2633 - DNA, 426 bp, Homo sapien
ggcgattatagagatagttaatgtcggccgtataagaaacattattaaagttactcttcggtcctttccgttcttgataaacaattcctgcgccttcctctcgaattctattttccattcctcaagtcactttaatggctcttcaatacaacaaatatttactgagtgcttactaagtgccaggcactgggctcagcgctgtgagggatgagaaagaagtggtaccttccttccaggagattgtagtctagactacaaactgccttcctctgccaggacaagtttgtcgtctgctctgagctatcaagccccttaggagacctaggacccagctgggtccgatcccgtttggagtagctgcttcagactagcctaggaagcacctaattcttgtgggcaaaggagccatggaagatagagctggtg

SEQ ID NO: 2634 - DNA, 259 bp, Homo sapien
cacatttagagaccgtgtaattgaaatggagagaaaatcttccaggactctcatggagagctgatgttttcatgaggattcctgatccaatattgaccagaagttaactgcatggactgaactaacagacaattgaaataatcttttatgactctttgtttaaaacatttgctgattttgtttttcagagtcaagaaaccttttttatcttttaagctatttacagcttttaacatttgagtaaagtatatatatatat

SEQ ID NO: 2635 - DNA, 223 bp, Homo sapien
ctgccttcctgttccctggagtgtagtatacatgtgctaacttcagtatgtcctcagcgtgacctccctgtcgttatgtaaaatacccattggttctgtaaacggaaaatatgactcaacccacactgtctgcccctgattggctgctacagcactaaaaccctgcacctgtgctggttacacgaatagcgtcacgctgacattgcttaacccccgggttgcc

SEQ ID NO: 2636 - DNA, 432 bp, Homo sapien
ccaatagacaagaattggccctcaagaccttacttattcttggattctactcacaaggagctaaaaaggattttccacttgtggaaggtgtaaaaaatacagggaccaattcacagaccagcagaaacttatttatgaagagaaactagaagccagtgaactcttcaaagacaagaaggctttatacccatctagtgttgggcaaccattccaaggggcttacctggaaatcaacaagaaccccaagtataagaaactcaaagatgccattgaagaaaagatcatcattgctgaagtcgtgaacaaaattaaccgtgctaatgggaagagtacatctcggattttcctcttaacaaacaataatctccttcgttgctgaccaaaagtctggacaaatcaagtcagaggttccactggtggatgtgaccaagg

SEQ ID NO: 2637 - DNA, 257 bp, Homo sapien
gtgtgccccacctgaagccggggctccccctgcctgcctctctctcctcctcccctctgggaattgggcagccctgggcagttgtactcatgggggcttaagatgcagctacctcagtgcgcagggcccgtctgtcctctgggggctgcttcgggcccgcggtgctcggggcctggtgtggggcgagtagagacttccccagcctggacgggcgtgggttctgggtcagcttcttttacctcaattttgtttgcaat

SEQ ID NO: 2638 - DNA, 162 bp, Homo sapien
  misc_feature (1)...(162): n = A,T,C or G
tcggtncagcatatagcgntgctcaatggccatgctgcccatgcatgaatatgtcaacaggggcgtgctgtcacagctatgtggcttcaagcatagtcatggtccacgatcatgncatcacagcagccatccagcataaggcaccaagtgcgtaggcatcat

SEQ ID NO: 2639 - DNA, 231 bp, Homo sapien
attcggcacaaggcaagctgaaaacccaaactagccctgctcttcataacatgacaagcagcccccatctgatacctaaaccgaccaagtcacagccctccaactcaccctctgcctgcccagacctcaccacatccttgctggactcaaacctcaaccgcactaaatcaaccaaatcccaagtctaaactaatctgaaacttttaaagtaacccagtccttaaacctaac

SEQ ID NO: 2640 - DNA, 157 bp, Homo sapien
tgcattggctgccctgtgcccaggagacctgatccaggccatcaatggtgagagcacagagctcatgacacacctggaggcacagaaccgcatcaagggctgccacgatcacctgatactgtctgtgagcaggcctgagggtaggagctggcccagt

SEQ ID NO: 2641 - DNA, 151 bp, Homo sapien
gagtcgtgcaggacgtggagcgctgcctccgggacacgggtgtgcagggcgtcatgagcgcagagggcaacctgcacaaccccgccctgttcgagggccggagcctgccggtgtgggagctggccgaggagtatctggacatcgtgcggga

SEQ ID NO: 2642 - DNA, 507 bp, Homo sapien
ttttccattgaactggatgcatttcatttagccaatccagtaatttatttatattaatctatacataatatgtttcctcagcataggagctatgattcattaattaaaagtggagtcaaaacgctaaatgcaatgtttgttgtgtattttcattacacaaacttaatttgtcttgttaaataagtacagtggatcttggagtgggatttcttggtaaattatcttgcacttgaatgtctcatgattacatatgaaatcgctttgacatatctttagacagaaaaaagtagctgagtgagggggaaattatagagctgtgtgactttagggagtaggttgaaccaggtgattacctaaaattccttccagttcaaaggcagataaatctgtaaattattttaccctatctacccattcttaagaagccttactccaaataattaagttaggccttatcggtctgcaatagaacctaatccaataaggtcacgttatgcctaggatttt

SEQ ID NO: 2643 - DNA, 474 bp, Homo sapien
ctgaagttacctgccctggtttgcctggcacatagctggtggatcccaaacctgccgcagccctcatactccttggtagccactaaactctgtgcctctttaagcataagtgtttacttttttgtagaaatgattttcttgcccttctctaaatataaggaaactgaggcaagggtctctggctcccaaggcaggcctggttgcctctcccatcttggcgagctggaccaggtggatgtagcctgaggttttgtgggcatggctctcaccctcccagccttggtccctcccaggtacacagcaacttcagaatggcagccacatggggcccatggtagtcagggaggcatcgtcatggccatcagtcccagtgaggataccaagctgcagatgttcatgtggagccgcatcatcttcagcctgggctttgtcattagtggccactacaaggactttgccagggatgtggcacct

SEQ ID NO: 2644 - DNA, 250 bp, Homo sapien
ggacccttgtgtgggaacaggtgctccccaaacaccctgctgctggctgccaggcaggccctctggaagggaaggggcaggactcatcaggacctccctggacccctgcagggcaggagcttgggcccgagccaacagtttggctctgctgcccccaagggacgaggaagcctcttgggcctcttcccttcctggacaaggccccctgcctttgcctcacataaactgtacagtattttcattaaaagcc

SEQ ID NO: 2645 - DNA, 316 bp, Homo sapien
ccttccctaattcacttcctgtactccttatgtatttatattcttgttttaattagtaacatattataaaaatattgatcactccagtgcaaagtagtgacataacatcttttaaaaggacattgtactaagtgatggctttgctttccatttttgtatgcagatttgaagagatttcctgggtgtggagtgtgactttccaaaaccagcttttccttgagctgtatttgttgcagcaatgtttaggagattgacttttgcacaactgctttttgccactgtccttggaattgctggaggagtatatatttttcaa

SEQ ID NO: 2646 - DNA, 379 bp, Homo sapien
gtcagttttcttctccctctgaattggttcttgctttttgaatatatctgctccagcctgaactgcctgaattgtcttacccagagttgtagagtccacccatttacgttctgctgtattcattcactgtatagaagagttatttaaaacctgaacgtgtaaggcaaaaagttgagtggcatgctctttcaatgtcacactggagaagtatttaacaagtccacccaaggatcatttaattttctagaagaatgtatctgtgtttgactttgctatttagatactgtgaagttacatgttaattgtattttcatttctggtaagagagataactccaaaggttatgattttattagcctgcaggacattaaccagtttc

SEQ ID NO: 2647 - DNA, 361 bp, Homo sapien
gaaaatattttttcacatgtcagaggttttattcagctcgttagcttatgatggagccattagctgggaaagctgattcttgcaagagcactcgaggaaaagggctttatataatccaccaggaaaaaatattttcaaaatgaaaaaagttaaaattagattgctaggttacggatgaaactggttaatgtcctgcaggctaataaaatcataacctttggagttatctctcttaccagaaatgaaaatacaattaacatgtaacttcacagtatctaaatagcaaagtcaaacacagatacattcttctagaaaattaaatgatccttgggtggacttgttaaatacttctccagtgtga

SEQ ID NO: 2648 - DNA, 252 bp, Homo sapien
ggggtggacaacggcacatgcgtgctgtgccctctccaacgccccccccagatgctccccggcctggaacctgtaacctgcagtgcttcaacggtggcagctgtttcctcaatgcacggaggcagcccaagtgccgctgccaaccccgctacacgggtgacaagtgtgaactggaccagtgctgggagcctgtcgcaatgggggcacctgtgctgcctccccctctggcatgcccacgtgccggtgccccac

SEQ ID NO: 2649 - DNA, 343 bp, Homo sapien
gcgctgggtgttggaggtggtggaggagcgcaccacgctgagcggtcctcgctcgaagcccgcctccccaaagctctccccggagccccagacaccctccctagccccagcgaagtgcagtgcaccagcagtgcagtgaccccagtcccacccgcgatccctcttgggctcgggcaccaagcctcaagtggggctgaccgcccggtgccctgctgaagctgtgccccagcaggcctgaccaaaaaaggagtgtccagtcccgcacccccgggaccatagccaagggggtcatcggcccgcgctgtacagcctccgtatacatatgtacacatataaataaagt

SEQ ID NO: 2650 - DNA, 293 bp, Homo sapien
ttttttcgcagcacggacgcactttatttatatgtgtacatatgtatacggaggctgtacagcgcggggccgatgacccccttggctatggtcccgggggtgcgggactggacactccttttttggtcaggcctgctgggggcacagcttcagcagggcaccgggaggtcagccccacttgaggcttggtgcccgagcccaagagggatgcgggtgggactggggtcactgcactgctgggtgcactgcacttcgctggggctagggagggtgtctggggctccggggagagc

SEQ ID NO: 2651 - DNA, 444 bp, Homo sapien
attcgggacgaggagagtttgtttctttttgcctttactttctggtgcttttttcttcacttgtagctccacatgttgcaaaataaagtctcatggctgctgtctgtggttattttctaggaaattaaaattttcattttgtggggagggagagattagtattactgattcaggtaatttctacacttaaattgcatagacaacttcactttttgaaactccaccatcctttaaagaaaaagattttctgtttatttccaactttgcttaagaaaaacaactttttttctttcttgcttccatttgtagatgaattcttaatttacagattagctgtggttcacttgcaagtgcattgaaggtaatcagtgatgctaaacttgtagtaacttatcaaaggattccatcagttttactttgaatattacgagggatttaggagag

SEQ ID NO: 2652 - DNA, 404 bp, Homo sapien
tttttttttgggcagcagaatcaggtttattggagggatttgacattgctgaatcgggacactggatagagcagctggacaggagttggtggcagtcctggaaccctggatcttaagaaatagagaaactttccattcttggagtgcataatggctctcttaataaactctacaacagattgacagcggtcctcaaacttgggatgacaccacaggctgaaggttcctctgtagtgctccattctagtgtggtgggtgataccctgtgatcggaaactgaggctcaggatgtaacgaggatcagaactgtctcgtaccaggaaagaaccatctggtttccctttcagcttcatctctgcatcttcccaattcattggcccccaataccaaccacacttctccaa

SEQ ID NO: 2653 - DNA, 438 bp, Homo sapien
attcggaacgaggggtttttgtatgggacgtataaatacttgattatatacgacagattttaatgtctttaaagacttcctgctgtattaacatattgtaatggagtcttttaaatactaggttgaatttaattgaagtcacacacatcttgaagtggtaactgcatagtaaatactaccaagagtttttttcacgtgggagtatcctaaaactctgccatgggtgtaaatgttttacattaatttcataattggacagaccctgcatttagcgaaaacattttgttttgaaagtgtgttctttttgtcgcactgttactgcgtaacacttctcaacattctgtaagttaaattattttaaaataactatggtgaattcatgtttatttttttactttgaaaattgtagtactcaggtggtatttaatgggaaaggat

SEQ ID NO: 2654 - DNA, 238 bp, Homo sapien
atcaaaagtttgttttattttcaatacaagataaataccatgcttgttactagtgcagtttaaggccgacaatggccatatatcaaactgccgaacagtcacctaaatgctaaagaaaggaaagacaaagtaaacattaaacacaaaattgcaattacaaacattttaataaaatggaatgagctttttaattgaagctaatatgaagtctaattctcatggacagcaaaaaaaaaaa

SEQ ID NO: 2655 - DNA, 424 bp, Homo sapien
agaaaattcagctttaatggccccagcccttctgtctgagtctagtagtccagggcacagatgagggccacaccacgctttatccagtgtcgctggggctgatgggtggggatctccacagcaatgacatagttggtagagtgtcctgtggttgatagtgttccagcacgagtcagtgtcttgtagatggggcacaggtaaaagtcctggtcctgggccttgcggttgggtgttggcaagagccagataacggccatctctgtgtacagctccttgggctgagactcagccagctggaaggcctctggatcccagcggcaccttccaggaataatccatggatatagcaccctacttggggtctttgtgttaactctgatggtgcctcaaacatcaccttgaaatcaaaggagatggtgtcaat

SEQ ID NO: 2656 - DNA, 416 bp, Homo sapien
tttttttttttttggtcgtcttggtgtattttatttctatttgcaactgtactatagggctggccatatagtatttgataagtgaacaaatgagtgaatggatgaatgatgagtgaatgaatgaatgaatgaatgaatgaagtcttctttgacgtcccctgtccacagtgatcttctgagaacctctgcagcatttcctttgtgtagcctcctttggtccttagcaacaacgttgtagcaattagttgtttgaatgtgtactcagcttaagttctcgactgcagggtaagcaatttgccagtctagagccaggtggggagacattgcttgggaatcagatcgacctggttccaatcccagagctaccacctattacttgtggcctcaggtaattatctctctgtaaagctccattt

SEQ ID NO: 2657 - DNA, 435 bp, Homo sapien
aaggcaatgtttgtttacagtaaaagaatgcgagggacccttgacacaggaggaatctaggctctcaccctgaccttcctcggtggacagggctataacttaaggttaaagcagggcctcaaagcgaatgaagtgtgtgatgtcacgagtcttgtgccaaaatgcatgtttcttgaagagttcacactcgctcacacacacacacacacgtacagcacgcacacgcagaggacgcttcggggttgtacaaaatctgaggcagccctgtgcgaatgcaaccccatgcacttggggtgtaaaaagcctgttccacagctgttccttctctcgggcccctctcacaggttagttagcgctgtccactctgtgcagtagaaagcactgagaacccaacgtgggccgggtgctctctagtcgcagatgcaggtggtgggc

SEQ ID NO: 2658 - DNA, 450 bp, Homo sapien
gaaagtaacaatatcattttattgcagggtggcataggtagttgtacttattaaatacatgacaaataggtaccagcagatgagttagatgtagggatacagatggaaataaacttccatggtccccattcatcaaatttattgtcctctgagaaagacatgagttcatctgatcattacagaggagatgagtgttttgaaggagaagcagagggttttgtggatgtgattagcaggtggacctaaccagcacagtgggtcagggagggattttctcaggaaataacattcaggctggagtctgaatcttgagctctgaagcaggtgtcaggacattcagagcaaagtggattatatttgcaaaacttcacatgctaaaagatgagagaagtccagtcagtagcaagttgttctttggaggtcctcagaatatgtcacagcttcttgatt

SEQ ID NO: 2659 - DNA, 446 bp, Homo sapien
tcaatatattcatttatttgacaattatttattcatttgacaattattcaatgtttactgcataagcaaaaaactgaataagacggttttctgcttttataaaacttacagttaagtagaagggacactgcataagaagtaacatgggagaaggctcaagtgttgacaactgtgatgaagagagatggaggtccagaaggaaattcaactgtggcgagaggcaactaaaaggttcctgcagtccaggagtcagcaacctatggctcattaagctattcaggatagagacagctgtggctcatatggctagtgagacaacttccaacagagtttagtcaacaatgataagaagaacagtttcactacaggaagagctactgcgcaactgcctggcagtcagccaggctttggctgaccaggaggtatctctggccatcattaaataa

SEQ ID NO: 2660 - DNA, 257 bp, Homo sapien
ttattttttttttttttttttttaattctctctctttggctccctccttccgcgcgagtctctggagaagccgcagcgcgagttgccgccgctgctgcccggggccggcttgccttgcgccatggactggcagccagacgagcagggcctgcagcaggtcctgcagctgctcaaagactcacagtcgccccacacagccactcagcgcatcgtgcaggataaactcaaacaactcaatcagtttcctgacttcaaca

SEQ ID NO: 2661 - DNA, 414 bp, Homo sapien
gagagccctgcccagccgcccaggagccggccccgagtgaggacagaaaccccttccccgtcaagctccggtccacctccctctcgctcaaatacagggatggcgcctctcaggaggtgaagggtgtgaagaggtacagtgccgaggtccggttagaaaggtcgctgaccgtgctcccgaaggaggagaagtgtcccctcgggacggcccccgcccttcgaggcaccagggcccccagcgaccaaggaaaggggaaggcccggccccccgagccgctcagctccaagccgcccctgccccggaagccgcttctgcagagcttcacgctcccgcaccagcccgcgccccccgacgccggcccgggagagcgggaacccaggaaggagcccaggacggcggagaaaaggccgctgc

SEQ ID NO: 2662 - DNA, 219 bp, Homo sapien
ccaagttaaagagtgagtcaggcttgtctgggggtgggtggggggcattctaggcctgcttcctctgcggatcccatggggttttgctcgccctgagggggtgcgccggatcttgctttcctttctgagggtggcgtcatgtgcccattcactcagcagctacttggcaaggcccgttggtgccagactctggatgggcactgccactcacctctgcta

SEQ ID NO: 2663 - DNA, 286 bp, Homo sapien
cccgagtgaggacagaaaccccttccccgtcaagctccggtccacctccctctcgctcaaatacagggatggcgcctctcaggaggtgaagggtgtgaagaggtacagtgccgaggtccggttagaaaggtcgctgaccgtgctcccgaagaggcagaagtgtcccctcgggaggtcccccgcccttcgaggcaccagggcccccagcgaccaaggaaaggggaaggcccggccccccgagccgctcagctccaagccgcccctgccccggaagccgcttctgcag

SEQ ID NO: 2664 - DNA, 171 bp, Homo sapien
ttttaagattctattaatttattcttacaacaaataaccagtgggtttattctatgggctaggtattcatttagatgctaggggtacagtagtgaacaaaacagataaagcagtcctgctcttgtgaatgcatctgacaatacatttgacaattcaaatctctctctctcg

SEQ ID NO: 2665 - DNA, 356 bp, Homo sapien
tattttttttatttttattttttttgtagagacggggttttactatgttgcccaggcaggtcttgatctgggctcaagtgatgctcctgtctcagcctcccaaactactgggattacaggttgtaggtgtgagccatggtgcccggccgccacactgtcttggctacagttgggtttataataaaccctgaatcgaggtgatgtgcattttccaactcttctttttaaagattcttgtggctgtttatgtccttggtgtttccatatatgttttacaatcagtgtctcaatttctaccaaaaaaacatgccttctggaatttcaatagcaattcccttgaacgcatttttgaatac

SEQ ID NO: 2666 - DNA, 162 bp, Homo sapien
tacattaaatcagctaagttaactgtttaaccataagttcaacactcctttttttttcttttttgcattccatctgttatgcaaaaaccccaatttttgattgatatgaaatgaaaacatagaaataacaggcatgccataccatcaagagaccaaccacta

SEQ ID NO: 2667 - DNA, 178 bp, Homo sapien
caaatttctttttttattctaaataaaaaccacactttgtgctgaacaatggaatataaaagaatcagatgtacaatgattttagacatctactatttggggaaaaaagtttacaaaatatacaaaactttacagcaatagatagtaaacacttaaatattaggaggtcagtacttat

SEQ ID NO: 2668 - DNA, 324 bp, Homo sapien
ttttccaacaatttatcccatgtaatgaaattgctaagcctatatatttatagacacatacatacacatatatatatacacacacttacaaatatgtattatatatacagctctatgtataaacactcacatagagggagtgtatagcttttaattgggccgtcttctcaaaataattaagccagttttaatgaaatactgtttaaggctgctggcaagcaaagaagccatctttagcagagcattaataaactgagtcattcgcacaagggaatggctagctgtatcagtcacattcatggtgctaataaaagagctcagttc

SEQ ID NO: 2669 - DNA, 295 bp, Homo sapien
aagattgaaaccaagtttactgtttcttgaacagaataggaagaaaatattttaaatggctgagctggtcattagactattactcatttatcttaaaggcagaaacttgtcaacccaactacgtgaaacagagaagcatgatttgcttaagcaggcgacattagagttaggcctctccactgaagcttcccgaccgtcagcacgtggcagacaggatgcgcccatcattccgcaagggagaaccggagaggccctgggagagtcctctggctggtcctctctcgtgccgaatttc

SEQ ID NO: 2670 - DNA, 98 bp, Homo sapien
ggtgttgaagccgatggtgggcaccgtgttcacgaactcgttgaacttgagccggtagagcaccgtggtcttgccggccgagtccaagcccaacatga

SEQ ID NO: 2671 - DNA, 379 bp, Homo sapien
ccaagagttaatttattaatagctagtaaaatataatttacataaagccattaaataaaatactgtgtatcattttgactggtgatataagcccactgaagtgtgctaaaaaatagttaacatttattgacttcagtaacatttgagtgtttacatcatgcacaatgcccaaagctttacatgcattttctcattcaaacctcaaaatcttaggtggtaggtgctgctataactctcattttacaactacagaagcaggcttagaggatttaaataacttatttgtggccacttagctagtaaatagcagaatcaaggattctgactgactgtgtaatgtaatcactaagctatgaaataaatgtaggttatgtaagct

SEQ ID NO: 2672 - DNA, 388 bp, Homo sapien
tgaaaggcagaggggctccaggtctgttccagctcccctcactgcacatggtgaagctcgtccctccctccctcccttcccgctttcccagagctaatacacaggtgctattattcagaaaaaaactggtcagctctagccaacagtgaggtttcttttcttctgccctaactattgtgtagcctcttatgctgaaatcggcttctgctggcttctccggctttcagagccctgaaacaaagagaaacaggatctgtccctacccagcacagcaaatggttgtagtaattgccaaagccctcataaagccctccggcttgaggagagagtgtatagtcatgggttctgcctctgtgcccttgctggccgcttctcctctgccttcttt

SEQ ID NO: 2673 - DNA, 131 bp, Homo sapien
tgattttttctccgctctgtgacccttttacgttacgctccatttggggtctgagtatgcagtggtctccccatttggtcccctggactgtctttgttgattctaacttgtaaataaagaaaatattattc

SEQ ID NO: 2674 - DNA, 390 bp, Homo sapien
ccaaccctcacccacatgagcatcacccgtctgcatgagcagaagctggtgcagcatgtggtgttcagaactgtgacgggctccactgaggagtgggctgccgcgcacggccatctccgagctccacgggaacatgtacattgaagtctgtacctcctgcgttcccaacagggagtacgtgcgggtgttcgatgtgacggagcgcactgccctccacagacaccagacaggccggacctgccacaagtgtgggacccagctgcgggacaccattgtgcactttggggagagggggacgttggggcagcctctgaactgggaagcggcgaccgaggctgccagcagagcagacaccatcctgtgtctagggtccagcctgaaggttctaaa

SEQ ID NO: 2675 - DNA, 372 bp, Homo sapien
gggctcattgccatcctggctctcgctgtccttctcctggcagctgggctagcggcccaccttggcacaggcaacccaggaagggtgtgggtgggaggcggcctctccctccagcctgggctttctggggctggagtgcccttctgtccgggttgtgtctgctcccctcgtcctgccctggaatccagggaggaagctgcccagatcctcagaaggggagacactgttgccaccattgtctcaaaattcttgaagctcagcctgttctcagcagtagagaaatcactaggactactttttaccaaaagagaagcagtctgggccagatgccctgccaggaaagggacatggacccacgtgcttgaggcctgg

SEQ ID NO: 2676 - DNA, 364 bp, Homo sapien
ggacgcgaccgccagatccacttaggaccccgtcgttctgcgaacggccacgtctgagtcccggggcctcctcgtgctgcagatgtcgccttaggacctcggccaggataccctctgccatgctcttgtgctgcccgtgatcaccgactggcccttgtaagcaccttcgcagcaggaagcccagagctgcgcctgccctttctgaaggctgtggaagaggttggagtgggcgcatcttagcttgccccatccccatttgaggtctgtcggagctgcccttcagtgtgagcatccacaatgggtaccccagcctcgggtggtcagtgagccacccccttgggcaggccccgattgaggcccgggg

SEQ ID NO: 2677 - DNA, 361 bp, Homo sapien
cagctcatcagtgtatttcatgtgtagcccaagacaactcttcttcttccaatgtggcccagggaagccacaaggattggacactcctcatctaagccttgggctcacacacttcggtgtaacagtctggaagccctcaagtcagaggtaccccatgtaaaaatcctggctctactgttagcagccgttcttcctcaaatgaaaatgcagagaacacctaccacacctggtgataattaccaagatatgtatggaaaagggcttagcacaaagtaggcacaaaacactattccttcaccctcagttcttgctccagcctaccctccacactgctcctggagaggtgtggttacccattctg

SEQ ID NO: 2678 - DNA, 384 bp, Homo sapien
gagggctggaaggtgtacgcgggcaccagcaacctgcaccagttgcctgaggagcctccattgccgagatcatcatcaacagcaattacaccgatgaggaggacgactatgacatcgccctcatgcggctgtccaagcccctgaccctgtccggtgagggaatctgcactccccgctctcctgccccccagccccagcaccctctgcagccctcgcacttgtcagcatctgtcaactcatatccgggccccaaagcttctgcagggcagaagtcaaagactcttaaagatccttacatggaacacttctgttttataattagggaaactgaagcccaagggttataaataagtttgctccaaatgacacatctcacattacaaa

SEQ ID NO: 2679 - DNA, 375 bp, Homo sapien
gtcaaggtgaccaaggccctgggtcagtgcgtccactctgtgtgagcgcgacggagtctgatctggctgatgggaccctcgactcctgtccgcactgcttcctgagtacctccgacggttggaagaccaggccactgcatatgtgtgtgagaatcaagcctgctcagtgcccatcactgatccctgcgaattacgaaaactactacatccatgactgccccaacccccttggggtggggctagaaggtgaagcatcccaacttgacgtagagactcaggcccatgcagggccgtagtagaaccttgtggccatccctggagcaccctgccactcaggttgaccctcggccaatacgtcacttgcccccccttggg

SEQ ID NO: 2680 - DNA, 376 bp, Homo sapien
gtaaaggggtctaggatcttgtcctgagggcagagctgtgggaaggtcttggggtttctgatatccctgaactgactctttctcccatgcttccctttgccaactccagccacccaccctctgcacacacctcaggccttcaggatttgtctctctgccccaagcgcagtttgattttcactgaaggagataggttaagagcatgggctctgggttcttagccctgctgcttacttgctgtgtactgaacctccctaagcctcagtttcctgtctttgtaatgaggacgatcccagtgcctgccccaggggttgaagtgaggactcaagaacgcagtgcatgcggtggattcagagcagtgcctggcacgcagctg

SEQ ID NO: 2681 - DNA, 385 bp, Homo sapien
gtcttgtagaaatctgagaaaagccctgcttatgtgtgaagcctgcagagtgcaacaatatccttttactgcagatcaagaaatccctgagacagattgggaggtgtatctgagggagactgcaaatgctattgtcagtcagcaaactccacaaaggctccttgaagttcgtggaaggctgtatgagcttctaactcattgtattcctcctgagataataatgaaggcatgtaaggaggaatcaagaagctgtgacatattctgaggacctccaaagaacaacttgctactgactggacttctctcatcttttagcatgtgaagttttgcaaatataatccactttgctctgaatgtcctgacacctgcttcagagctcaagatt

SEQ ID NO: 2682 - DNA, 392 bp, Homo sapien
attttcatcagaccttctttctacatattattcatgaagcataatgttgcatttctccaaattttatgcctgaaagggtagtgttgcttcctaaggtatcatgttgtctttgtgctttgtccatctcttccgtggcgaactttatatctgttcctaaaacagttaatcctgtgaaataaatattgaacataatccagaagaatctctctgtttcccttggggaatgccatatttaattcaccagcagtaatcctttaataactggcagagcactttattcttctggtgagctccctgaatatttatttttctgattataaattttctatattagtagcattttttaattattacttcttcactatagagcatttacttttagtctctagatg

SEQ ID NO: 2683 - DNA, 202 bp, Homo sapien
gaaaaaaagtattttttcagctctctcactcaattacaattacacagaaggtttctgtgacacatttgtgggagttcaccccacacagcaaacaggcagtcaattctggagagaggtcaccaggtgggtgtcctctaacccaattcaattccaacattgtgtactcggagatagtgtcagatcccacaggttgagggctctg

SEQ ID NO: 2684 - DNA, 112 bp, Homo sapien
ctcttctgaacttctctctgtgtttcactctgggattgcgatcaatcttctttctcctaggagtaagtcccctatttttggcaatttgataggtaatagctctctttgcatt

SEQ ID NO: 2685 - DNA, 209 bp, Homo sapien
cacacaacatgaacaccagcacacgcgcgagcgtacacaccagaacacgacacacatccacacgctagccagaacacacacacacactgacacggcagaacgcaacacgaacacagaacgcgacacagcggagccacgagatacgaacgacacaagacaacacaacacacacgcaaacgccagcacaagcgacaccgacacagagcaca

SEQ ID NO: 2686 - DNA, 134 bp, Homo sapien
tgcccttggccgtgcagttgctcagcttgatcttctcggtgttgaagccgatggtgggcaccgtgttcacgaactcgttgaacttgagccggtagagcaccgtggtcttgccggccgagtccaagcccaacatg

SEQ ID NO: 2687 - DNA, 126 bp, Homo sapien
cttagcaaaattttaattatacattacagttgtattaattgtaggtcctacactgtacaatagatctctaggacttattcatttttcttaactgaaactttgtaaaagcgaaggcatccactgctc

SEQ ID NO: 2688 - DNA, 342 bp, Homo sapien
caatcaataccatagtttaatagctcaaagacacaagatgctaaatattgagactccagtgcaagactgagctcctaatcaaagtcagtgagtcagcaatatttcctgggcatttaccacaggcagtctagttggcactgcgggaaattacaaaatctaaacggtctccaaatcacaaacctccaattgtaaaaatgcacatagatgtcacatccttccactgcagatgcaagggacatttttggacaaacccttgacctttagataatcgacagacttggaagaagggaagaaattactaagcaggactgtgttaacactcctggcccttgcccatcaagg

SEQ ID NO: 2689 - DNA, 398 bp, Homo sapien
ctccttaatatctagcttttatttttagcttttaattgtttataagagaggaaccactggaaagagtttaaaatccttgttccattttcaggttgggaagtgtacgtgtgtgggggtgggtattaaacaagacttgagcattaagcatttcccctcctgagcccagctcctctcctcacttgttgactaagccctgcttcactgagcattttctttttttctgcccacaacctgagtgccccatggaggtgaaggacatagcctgagtctgtgccatcagtcagtagaacaaatgggcttgctctgcctaacatcgggccatctcggattccacctcttttataggaatgagtgatgaagagaggtgggttccgctttgccgctgtattaatacacat

SEQ ID NO: 2690 - DNA, 111 bp, Homo sapien
ggttcacccattcttttagagacaacagacacgcaattctgacgaggactcctgttactaaaagacacagcctctgatacaagagagatatccctttgactaaagcattac

SEQ ID NO: 2691 - DNA, 315 bp, Homo sapien
ttagcagtaaaaagatgtttataatttagcttttgtccattaaaagcacatcaagtttatccatacagtatcattttcctatttggcaatgtgcacttttctgagtataatcctgggaactatacaattcagcgtgaatgtaaaggatagggaaccaatgatatgggaaacatcaacagcttgtaatctgaaaattaagtcaaagttgagtccaacatgtcgtgtgattaagtctagaaaacatgctaaaattgggtagttataaagaacaggcagtttcaaaaggaaaaggaatgctggctttgagtatattga

SEQ ID NO: 2692 - DNA, 399 bp, Homo sapien
agaatcataaatgtaattttggagataatgtttaccttgagtaggaagacacttggaccatattaaatttgaaagtcttctgttccagaccaaaatggggtaggctaattccctgtcatccaagcaactaaaaggtaaaaaccttataactttaaaataaaaaaggttatttttttcccctataaaagacaggcagtatgagttaatacattaaaattattttgtacatccctgctccaaacaaccacaaaaatggtactttttaaatgcctgcccatcctctcctggaagggggtttttccaagattcggggtgactgattcatcccacagccccaggcagcagtttatcctggaactgtcctctgttctcccatcactgctgagccctgagaattgt

SEQ ID NO: 2693 - DNA, 204 bp, Homo sapien
atgtttttctaaaattcagtgtatttatttggccatatggatgctccttgtgttcttggtcacatattaaagaaactggcactttggctgcaagaacaaataaaaaatatcataaatccaactggtctttgatttgggtctaggttaataactaaagaaccattcagcaataatggcttgaaacatttatatatcctatgaaac

SEQ ID NO: 2694 - DNA, 372 bp, Homo sapien
caggaggatcacaaagttgtttattttcccacctataagaaaagatggatgatgcagagtgccgagaaatcccagccattcccctggtgaacatactggaggcccacacgagcctaacaggctgtgtctttaccaagggattttcctctatttcaacagaactgcaatttcccttccaagtgctccccgaggcattctgtcatgctgcttctggggataatttatcatccacgtctgtgctattctacagcagccatgtccttagaacatagaaaatctgattggccaaaaaaaaaaaaaaagtgccaaaatgtcaaatttcatacaatcagggcaagaactggtcttcttttggcatttggactggctgcc

SEQ ID NO: 2695 - DNA, 389 bp, Homo sapien
aacattcagcaaatatttattaagcacttataattggcacgactttttttttaaaaaaagaccatcatgttcttacatgaggctcacaaactaatgtgttgacacttcagtaaagtctatagtcacaaaaattttggattgactattatgggatactaaaatatgcataagtatgaatggctactttagtgtttagccatcattagttcttatttttagtgttacacactgtaggagttactgcaaaatgagacattggaggattaaataatatcagatactcacattttaaacagtcctacatagcaatagtgaaacaactcttaccaatagctagaaatacaattttacttaaggatttacaatacttttttttggggggggggaag

SEQ ID NO: 2696 - DNA, 406 bp, Homo sapien
tcacagtcaagaatcataaagtttactgtttcttttccatcatttggcacatatccaaggcacattagaaaattagaaatcataaattactttgtagaaaaataatccctcccttccttctgtacatacacaagtatttccaagaacatggacaaaaccatttccctatcacaaggtcatttgaaaacggactcaggacaaacccatatacgtgtagctctaggccaataacataaaaataacagtataatctatagaaatttataaaaaggaataaatggcaataaattctaaccgaaagtaactctgacctggtttgtgctgttaagttttgaatttgaatcaaaagactaagaaaagatgtgccaaatctactctctaatccagtaaccatcccgtcaggtgt

SEQ ID NO: 2697 - DNA, 512 bp, Homo sapien
gttaccaaatacaaaatatcaagtcctctgctgaagaagactgaggtcccatcgtttcctgtgttgcaggtcacttcttcaccaggtggctgactgcatcattgtgaggcagagcatgctgtgcaagtgtcataagtcatcccactttcaactctcaggaacactcgcagccagtaccacgctgtcctcgccatccaatattgatagccaccccagttcctgccagccagcctggacacataaccataggatccctctggtcatgggtcaccatgccttttcttaaactgcgcttctagtgacatggccttaaacgatggggtccccaaatgtacagtgctcctcgatggcaaggttgtatctggcgcccttcccatccttataggtgctggtcacgatcctcagccagcctctctcgccccatggttcacaccatgaattccggacaatccagtactcagtctcatcactgatgcccacccagccacggaaacgacatggtttatatatgt

SEQ ID NO: 2698 - DNA, 465 bp, Homo sapien
gctgtacttttccacttgtatgagggacctagagaagtcaaattcgtagagacagaacgtagaacagtggttgccaggggctggggaggtggaaggaatagggagttagtgctcaatggatacagacatttgtacatattatttgggggtagggcaaagtgaagagaaaagaaggttcaagttccagactggggatgagacaaggtgcttcaccccttcctcggttttattcttactcaatgcaggatagaaaatgtttcaaagactcacaggaatatctgtgggaatgctgatagtgtttctggtgagaacccaaaaaagagacactaaaaaaaattaactggccaggcacggtggctcacaccacccagcactttgggaggccacagtgggaggaccgcttgagcctaggagtttgaaccagcctgagcataaaccaaacccgtctctacaaacaataaaaaa

SEQ ID NO: 2699 - DNA, 281 bp, Homo sapien
atggacctctgccgttcctgcttccggagcaggagcaggaacgcagaggccatgcaggaaggagcagaggcggggaggggcaggtgagcgcccccaggagcagccgggccgggcgggcttggactccgccgcccctctggcctcgtcgcgctggccagccgggcgtggggccgagctgccttcttctccatgcagcgagcctgcagcgtccggccgggcctggtccccggcagcccccagcgcgggctccggcgtcataggtttcgctgggggtggggtta

SEQ ID NO: 2700 - DNA, 269 bp, Homo sapien
actaaccccacccccagggaaggctaggagcgccggagccgcctgggggtgccggggaccaggcccggcggacgctgcaggctcgctgcatggagaagaaggcagctcggccccacgcccggcgctggccagccggacgaggcccagagggctgggggagtccaagcccgcccggcccggctgctcctggggggcgctttcctgcccctcccctcctctgctccttcctgcatggacctctgccgttcctgctcctgctccggaagcag

SEQ ID NO: 2701 - DNA, 433 bp, Homo sapien
ccaagcggctggcatccatggccacgctgctggcccgggctggcgtctcttgctgtgaactggctgaggaggacttcctggcggtctccccctcggatccacgctaccatgaggtccactacatcctgctggatccttcctgcagtggctcgggtatgccgagcagacagctggaggagcccggggcaggcacacctagcccggtgcgtctgcatgccctggcagggttccagcagcgagccctgtgccacgcactcactttcccttccctgcagcggctcgtctactccacgtgctccctctgccaggaggagaatgaagacgtggtgcgagatgcgctgcagcagaacccgggcgccttcagcgtagctcccgccctgcctgcctggccccaccgaggcctgagcacgttcccgggtgccgagcactgcct

SEQ ID NO: 2702 - DNA, 307 bp, Homo sapien
aagaagccacctcaagtccttctcgatggccaacgcgtgaatgccaggatgatgcacggcggttcctactccctcaccaccagctccacccacaaaaggagcagcctccgcaaagtgaagctcgtccgccccccccagagcccccccaaaaactgcaccagaaacagctgcaaaatttcttaaggaaggcactgaaagaaacacggcggaatctctccaggagaagctcggcgttacccccggcagctggtggatgcatctcagatcccggttcctctcggcgaatgtgcttgcgaatgtgtgcgac

SEQ ID NO: 2703 - DNA, 399 bp, Homo sapien
aatgcaagtagtttatttgggaggtgaaggaaacaggaaaagggaagtagaaaaaacagacagggaggtaatttaaccaaaacatggagcattatcaagcaggctaccatgaccatggtgaatacctggaccttaatgccaaagggaactctggaagccaatggagagcatgtgctcagcattacggccctgacgggtgagggagctggggtatttatgcaccaactcacatcatcatccagtgaaagagagggtttttaattctcaggcacttcctacccacccatgcttagacagagtggattctgcccaccagagaagaccctcaggtagagaggtgccagggttggtgacaaagagcatgaaggccagcggtgagatagaagggatatgtgcagg

SEQ ID NO: 2704 - DNA, 249 bp, Homo sapien
tcaataaataaacccttatttattataaggaattggcttacacaataatggaggccgagaagctccaagtctgctgtccgaagtctgagaaccaggagcactgatggtgtcagtcccagttcaagggcaggagaagatgggtgtcccagcgccacagtcaggcagaaaattcaagcttcctccacctatttgatttgggtccttagaagactggatcaagcccatccacactggggactgcacatctgc

SEQ ID NO: 2705 - DNA, 189 bp, Homo sapien
gcgcacgccgaaccttctggtacaagctgttcccgtgcagaggatctgggggccctgcaaaagctgcagaacagaaaaggcaagtcgggggcagggctgagcctggcaccgctgctccctgtggacacggtgcctgggcccactccagggtggcaagttcctgccaccaaggcccttctgtcacagcca

SEQ ID NO: 2706 - DNA, 178 bp, Homo sapien
ggcttgggaattctcccccctgtttccatggctcttccccttgttgcagcctgaagatcaccccgggtttgtgaacacaataccccactgagacaaggttgctgtagttctccagattcacatctctatacagagccctctgactagggtccaggtgctgccactcctcctgggtgaa

SEQ ID NO: 2707 - DNA, 498 bp, Homo sapien
tttttttatagacaatagaaatttatttctcacaggtatggaggctggtaagtccaagatcaaggcactggcagattccgtgtctggtgaggactgctctctgcttccaagatggtgtgttgttgctgagtcctccagagggaacgaagactgtgtcctcatgtggcggaagggatggaaggaaacaaaaccactccctcaagcccttttagaaggaccgtgaccccatctataagagctgtgccctcacgacttaatcacatcctaaagttcccacctcttgttaagtttcaacacatgaattttggggaagacagggataaggaaagaacatggtgattaatgctgtccccctggactgattttcaagctttctatggcaagagtttataggcaaaaacaaaatccgtccattgcatgtttgatagtgccatgaacctctcttttgttgcactcatcacagttgtacattaatctatataattacttaatgctcat

SEQ ID NO: 2708 - DNA, 197 bp, Homo sapien
acgtacctgtgtaacaccatgtgcgatctcccaggattacaccgactagcaagtgctcaaggccctgcatggccctgttgtacagctgctccttcacgtcgtcggatgtcaacttcaaccgattgggcacacagcgtcgatagagtgaagccgattgggaccagatctcgcagggagcatgcatgggaccatgcatg

SEQ ID NO: 2709 - DNA, 357 bp, Homo sapien
  misc_feature (1)...(357): n = A,T,C or G
cagtatttaatgccattttattcacatgctcccatgttctccctccctcccattgtagccttgctgcccaggggagggatatgtcttcctttatgcatctgggaaaccaggaacagaccctgcgcaggagagtcagagggggaagagttagaatgggtcagtggctggaacaaagttctggttaaggaggaaattagtgccacccacggtgagaagcagagaaggcacttgcatcctatgcagccctgaagaccaggctcctttgggcaaaaggcaagactctggcaggtgggtcaatgctctctccttggagcaagaagccagcttttnggggaaggcaggtcctgaggcaggcac

SEQ ID NO: 2710 - DNA, 363 bp, Homo sapien
ctaaaattaaaagctcgagttgatttttatcaactcatttcttggtttttgtccttcttttaacattattattatttcctagttatctcacacaagaaaattcatttttgtaaaatgcttatctgacatggaagattttgctgttttcatatacaaagaataagtagacactgcatgaacataacaaatacggggaagtcagtaaatagctaacggctaaggattttcttttttacaagtagaggctagctgtaattaagactatgtatcatgtataaaagacttctcttaagaataagacctgtctagtagagaaggctgtatgactatgagaataattataactcatgcataaggattcac

SEQ ID NO: 2711 - DNA, 410 bp, Homo sapien
tctcttttaaaaactctatttggtgcgtgcccacggtgctgcgtcccgtcagacatacctgtatagatctctctatttatatatatatatatataaaaggttctttagcagttaaatagattccaatatgaacgtctcccaggacaaagctgcgtctcgcctctgggtcacacgcatctgtgcggctggggtgtatgtgccgcgtcacagcagtaccatataaatacgttgatttgaacgcagtttccctggggtggtaaaaacacattcctgacaagtgacaagcagaagagtccggcagctgcagcgcctcactcggctgggacctcgtacttgaagatgacgctgaagagccggccgcccagccgctcggccagccacgcgttcttgatgacggccagcttgaggct

SEQ ID NO: 2712 - DNA, 321 bp, Homo sapien
tcatcttaagtattgagtttattagataaagacaagaaaaaatggggcttggggaaattggggcttctggggttttaaggagcatgctgaaagaacgtaagaaacaaaacatgaagggaaatggaaatgttaccctcactcccctcctccctgctgtccagtgtggatgccacctccagcctgcaggacggagccccctcccatcatcacacagtgcacctgggctctgcagccccttgcctccattgcagccgcagcaagaggcctccacttgtccgtcaggacgctccaaggaaggaaaaagccgcccccggacagggg

SEQ ID NO: 2713 - DNA, 402 bp, Homo sapien
gtgatggcctcccaggtgctctatctgaccccaggtgtgctgggggagcctgcacatatcccttctatctcaccgctggccttcatgctctttgtcaccaaccctggcacctctctacctgagggtcttctctggtgggcagaatccactctgtctaagcatgggtgggtaggaagtgcctgagaattaaaaaccctctctttcactggatgatgatgtgagttggtgcataaataccccagctccctcacccgtcaggccgtaatgctgagcacatgctctccattggcttccagagttccctttggcattaaggtccaggtattcaccatggtcatggtagcctgcttgataatgctccatgttttggttaaattacctccctgtctgttttttctactt

SEQ ID NO: 2714 - DNA, 497 bp, Homo sapien
ccctgtctctaaaaaatagtgaagtccaagatgtattaagcaaaaaaaaagtaaatcacagaactaaaaatatagtgtgatatatttttagtttatacctaattgtttcactttatatattttccacagtgtttgaattttttgccaatgagcaattattacttttgtaattaaaaagtcataacaatgagaagagagcctgatatcttttaaaaattagggcctcctgatgaagctgcacctgaaatggctcttcagagtctccgctttgtacatcctggaatccattttcttcacctagaggtgaccagatttataaaaactgactgattgaccaaactgaccaaagactgatttataagatgtcaatgttttgatttacactgtgatattgaaagaggctctgtggcttatgtctgtaatctcagcgctttgtgatgctgaggcaggagaattgcttgaggccaagagtttgagaccagcctgggtaacaaagt

SEQ ID NO: 2715 - DNA, 456 bp, Homo sapien
  misc_feature (1)...(456): n = A,T,C or G
cacagctccccttcccagaccccgcagcacgcctctccccaccttcttgggactgctgtgaacatgcctcctcctgccctccgccccgtccccccatagcgtttccctccaggtgttgttgagggcatttggcttcctctgctgcatccccttccagctccctcccctgctcagaatctgataccaaagagacagggcccgggcctaggcagagagcgaccagcaggctcctcagccctctcttgccaaaaagcacaagatgttgaggcgagcagggcaggcccccggggagggcantgcagttttctatgaatctatttttcttcagactgaggccttttggtagtcggagcccccgcagtcgtcagcctccctgacgtctgccaccagcgcccccactcctcctcctttctttgctgtttgcaatcacacgtggtgacctcacacacctctgcc

SEQ ID NO: 2716 - DNA, 483 bp, Homo sapien
tgtcatgcccagtccacctcgtgctcctgcagaacctgctgacctgtggagagccgcccacctgctccccggaccagtttgcatgtgccacaggggagatcgactgtatccccggggcctggcgctgtgacggctttcccgagtgcgatgaccagagcgacgaggagggctgccccgtgtgctccgccgcccagttcccctgcgcgcggggtcagtgtgtggacctgcgcctgcgtgcgacggcgaggcagactgtcaggaccgctcagacgaggcggactgtgacgccatctgcctgcccaaccagttccggtgtgcgagcggccagtgtgtcctcatcaaacagcagtgcgactccttccccgactgtatcgacggctccgacgagctcatgtgtgaaatcaccaagccgccctcagacgacagcccggcccacagcagtgccatcgggcccgtcattggcatcatctctctctcttcgtc

SEQ ID NO: 2717 - DNA, 175 bp, Homo sapien
tgtgacagaagggccttggtggcaggaacttgccaccctggagtgggcccagggcaccgtgctccaggtggacagcggtccaggctcagccctgcccccgacttgccttttctgttctgcagcttttgcagggcccccagatcctctgcacgggaacagcttgtaccagaaggtt

SEQ ID NO: 2718 - DNA, 453 bp, Homo sapien
gaaatcaactcattttttaggttatgccttcagtaatctttgcaacctcaatattgtgtaatggttactttaaaatactgtagttttctttgtgcctaagtataaacataagtacattttgttgttttgtttgcaatagtggtttaaatattttcccaaaatatccaaatttaaaaattctacaactttagaatttaataaatttattctaaaatatttatatattttttcatttaagaatggatcggcttaaaaagactgcttctcatttacttactggctataccatctgtatactaataaaaaacaagatttgatttggaaggactgactcaaactaacgaaaatatgaaacctgtctttctgctttggagatatttacctaatcatgttctgcagtagaataatttagttcttttgtctttttttggagatgaggtcttgctgtgttgc

SEQ ID NO: 2719 - DNA, 472 bp, Homo sapien
agctcttttctgcttaaggtgacatctttgaacactttaacacaaagttgactcttctcgtaatggttttcatcagcgcatctgcccttatactcttcaccaaacacacttgagaactgtaacttcgtcaagcactttctgtcctgaagcttttaccagtatctgctgtcttttgtaattatgcatcctagctaaggcacagaagactgaatgaatgcaaggattcattaactctttgaatttgttaaatactaacagttaaccattagaagtggttcaatgatgtaagagtcacactgcttcaactttttctttgttgtagtttttaaattgtcgatttttagctatttgacagattaaaagcaaaataatcatgccatatttagtcctggagttcaagtctaaatgttgatgtgaaaaattattgtagtaaacttttaatatggcaaagcaaccttaagctctattttag

SEQ ID NO: 2720 - DNA, 431 bp, Homo sapien
ttcggcacgaggtgtaaatataaatctgtagttctcagtaatattcttgaaaatggtaaatgatcaaatactttggagaccattggtctaaaattactctataacccatttccttggctttttttctcaagacagcaccaggccatctcctgtgctgtctgccattttgttgatgtgtgcagtgtgttggaggccctcacctttgcttgtatcatggccctatgcttatgaagaacgtaatagagtgtttttcataattcaaccaacagctgtacttcctcagttaagctcaaaacagagccaactttgctcctaatgttagtctactgtgtttgtactttcaccttagtacttgtaacatattaccacacatattttcttaccactctgtgtgttctttgaacacaggaagatttttattaatcttagta

SEQ ID NO: 2721 - DNA, 463 bp, Homo sapien
gtaattcagagttattaactctttctacctcctcactcccctcaaagttataacatctcccatcgacatcagctcagaatggcagtgatgcttatggtttgtgggggtgcaggtgagctgctggatgcactttagatggcctagtatgccaggccgtcctttcatcctctactctcgtctttctttttcgacctcatgttgaggattactggtctagttgaaaaaagaattcatacacataagaccatgtatataatagagggaggtatgcctttaaaaacaaaattatatggtaaagactgatgtgtcaacagggatagacaacatagagaaggctagaactgtttctggaaaaaaacccagaaacaatggatttcaaacttcttagcatccgataaaagaaagtagcaattattcaaatgagaaacacttctgtctgttatgtacatattatgaaagtatg

SEQ ID NO: 2722 - DNA, 427 bp, Homo sapien
tcactgtacattgagacacagcactactgcacaccaaagtatgcaatacccaaaggaaactgtgtgatttctcctgacaaatgatgggagcctttctttatgagatactctgaaaaggagattttgaggccattctaatcccttgtttacattattagcttcctactaatataaaaataatggaaatcttttttgataaaaatattaagactggaggatttttaaccccttgtacagtattgcagcaaactctttaaatttggttgaattcgtccagcaaactttctggggttcatatattgcactaaatttgttgaacctgtggtaggcacatctcttaggataaatgcaaccaatacagtccacagattaaactttttaaatgtgtttcattatgaaaagacaaaatgtcatcaaagtgacagat

SEQ ID NO: 2723 - DNA, 391 bp, Homo sapien
aaaatttttcagttattacccaagaaacactcttcctatgtctgattaattgacgtacccttttcattagtttgacttgcaggttatctaaatggacacccataggaacagcaattgcactgcagaaggtcttggcttttgccttttggtgactggtctaacaaacaaattttacattttatcaaaataattcctatgtcattgttactaacttttgatttgcttagaaaaaaactgagactttaaaaattgttttaaattaagattatcacatccatgtaactttctgtattttgctcttaaagtctttgtgccattaagtttcaaggctttgactcctgggtctaaaaaagacaccaagtcctgctaaatcttaaacactgacaccagt

SEQ ID NO: 2724 - DNA, 409 bp, Homo sapien
agaacccaccccaccccccagtgcagacttcggggtctccaccccaggccagcagccccactggctacagcaagccaacaggtcacagaagccaacgaggggactgtttctcttccactcctatcctcttttcttgatcttttttttgcattttccttcatttctttaacaaggagagcaaagctgttttagcagaggctggggctgaggtccccatggggtttgggtgcaggggcatggcaccctttcctgtcgggaagggagaggggaactactcccccagcctgccctccgccccgccccagccggcggactgtgctgtttccgacgcccccactcccagtgttttctgacctcctgcctgagtttggggtatttatagactattaattttctgactgagccaata

SEQ ID NO: 2725 - DNA, 388 bp, Homo sapien
tggaaaaatgaaaacaaaacaaaacccaaaatccttgagctctaccctctgggacccctccctgcccaccctcccacaaaaaaatttacagcgctacagttataacacgtgatgttcacatctgaaaccattaactttcaacacataaagggggggagttgaggacctggggttcacctacgagaacaacggtgggggacaggcagagcaggacaagaccgacaggtggggtgaggaagggtccagacatctccattatcattaaaaaataaaaagtgagtggggaaaaaaatccaaaaactaccccattgaaatggccccagtaggggatttgtccctcccctcatggagacagacacccctagggcaggggcactgagaggcaggg

SEQ ID NO: 2726 - DNA, 303 bp, Homo sapien
tacgtttctgatgccttggggatttattttaaatttcatgagatgttgttggcactgtcatgtcaaagggcacggacacacaccatgtggtgcaaatgtcatacagcagggtttgtgggcgacgaccagcagaggcagggctggaagcaggagctgccccgctgagctgctgccgggctgcacgctccgcgccagcgttcacccgcacgctttaactctgtgacagtgactgggcaggcgacatctggtggccctggaactttgcaaggggaaggctctgaagctcacttagtggctgtcagg

SEQ ID NO: 2727 - DNA, 367 bp, Homo sapien
catcggcggagggaacttctggggctcctgctggggccacttcctgggctgctccctcgggcctgtagggggaggtggccttctgacccctttacacgtcccctgggtggacctccctgctgcaggcaccatacctgcgatggtgtacagggctgtgatgccgagcgtgaggatggtggagaggtagaagttccagcccaggcagatgtgcacaaacagagcccccgcgtacaggtccagctgcggagggagagagccttgtgtgggactgttattcccagggctccagcaagccactccgctgggtgacctcgggcaaggccgtctcgtgggcctttcggtggccctgtggataaggaggggagac

SEQ ID NO: 2728 - DNA, 367 bp, Homo sapien
  misc_feature (1)...(367): n = A,T,C or G
gggaaaggcattggccattttggactttattagcaacagtaatgtcccctgacatccgcacaagcttgtagctccacggccaggtcttcccccaacctcacaatggccccgtgatgcaggcaggcaggcgagtgggggtctcccctccttatccacaggccaccgaggcccagagagggctttgccganggtcacccagggagtggcttgctggagccctgggaataacagtcccacacaaggctctctccctccgcagctggacctgtacgcgggggctctgtttgtgcacatctgcctgggctggaacttctacctctccaccatcctcacgctcggcatcacagccctgtacaccatcgcaggt

SEQ ID NO: 2729 - DNA, 315 bp, Homo sapien
ggcacgctttgcccgcgtgaaactgacaagaaacattgccgcagtggcttgacttcatcatctaagtatctatttacttggcactcacccacccactccttttcctctgccagtctctcccctacctccttgacgcctcccactctccctccctggctctggcagagggaggaagatgaaagagaaagccgctgccgctgtgatggacaccacattgatagatgctctgacagtggggagaggcgggaatctgggactgagaaaaaaaggaaaaggggaaaatataacagacattgctcaactatttagagagaa

SEQ ID NO: 2730 - DNA, 394 bp, Homo sapien
taatttttgaggttgtattcggattggtgtcttcaagggtccctttcagttcgcagtccaaggtgccagggactaccccgtcctccctccctcttctggctttgctctcctgagtccttttgccttctcttcccccttcttggattatcttttcattctcgatgaggttcccacacactgcggtgtgtgtctctgaaaacccactggagacctagcacaactctccgtacatcccgtggtgagaacagaatgaaagatatattgtttaaaaagcaataattaaaatctagtcttcagttccttcttcctcgtcatattttttctccgtaagcctagagattttattttcactagtgtgttcccttgtctccaaagagcgtgtgtgtgatattat

SEQ ID NO: 2731 - DNA, 399 bp, Homo sapien
taacagcagatggctctttgtccatctgacaagcttctttgtcctctgtgtcttctggctcgttcttagacttctgctcatcatcactgatatactcactatcgctactatctgacttctcagaatcctccgaatcgctgtgctctacggccgtatagacatcttccgagatttcatttatgcctaattgtgctttgcaactctctatggtcttgtcaagattcagctggaacctgctacgaatctggcgcttgggagagatgagaggaacaggggtggactgttgctggaccgactcgctcagctccttcaaatccatctcagctttgcttcgatccaggttaagattcaggatgctgccggtggtggaggttttgtccgttttcgtcgtgataggag

SEQ ID NO: 2732 - DNA, 362 bp, Homo sapien
aactaggagcctgtcctccatgttttataagtattgacattacacagtgttaacaatgcatccacagagcttggctgaagaggaaataaaaacagaacaggaggtggtagagggcatggatatctctactcgctccaaagatggagtctcactttgtcacccaggctggagtgcagtggcactatctcagctcactgcacccctctgcttcctggttcaagcgattctcctgcctcagcctcctgagtagctgggactagagatcctggctctgcagagagaacagcccagaaaagaaagttccccagccctccacattcttccaatggccactcgccgcaggacacatcaacaagccccat

SEQ ID NO: 2733 - DNA, 297 bp, Homo sapien
agtaaaccacagcaaagtttattcatgtgccagggacataaagatacattaattgtttgtttttctaggctgccagtataagcttttcaaaatgtttaaagtaaataaaaccaataatacagctagataccacattgcaaagaaccctaatgctatttatcagctttaaaatactttcaactgaaatcaattacattttaatatacacatattatacagaaattacctatagctcttttaaaaatcctatgacattaacatgaaactttattagaatttaagattctatatgcagac

SEQ ID NO: 2734 - DNA, 369 bp, Homo sapien
gcaggtaatcttattttcctaagggtagtttcatgatgacagtgtcaaaaaattactgtggataaagaaaaaattgtctcaatgaaatagaatttttcactgaacacagaaaccatctcaatagttgctgctccctggtttccaggccacgcaacagacatcaaaccaggaagccaaactttcatggacctgtgttaagaaaaacacacatacatgggcatactactttttccagaaaaacggaattaggcagagaaggaagtgtgggtgtacaactgatccacaagctattgggaaatcaatagctaaaaaatgtcaacaccctggcttccttttatcaggaactccaggaggctgaaggaatgtgag

SEQ ID NO: 2735 - DNA, 367 bp, Homo sapien
agttttccagtgttttctctccatttttattttcatcttcacagcagaatttttttttccacaaggggaatctgagaagtacaatgctttctttgttttaacaaggcctggggaaattccactggcctcagtggctgatgatctggtcagggttcgagagaggacaacagcttcttggatattcctgttggtaaggccttcagggaatggctgggtgaacagccaagggagaaagggaagggatggtttctatcattggattgaactgtaaaggagctgcagggtgacagatattggctgggaactttgagctcttccttggaggagggagggtgatcaggtcaaggaggtaggaacttagagaacg

SEQ ID NO: 2736 - DNA, 397 bp, Homo sapien
cttacttgtggtgtgggaaatttaacatggccaactcctaagcactaaaaaccagcagcaccaacactcagggactgtgaccttcacaacccacccagtgacttccaaatgctccttaggagaacagcacagctcagctgggtcactggtttgactgcttgctggcttgcaaccaacacaaagctccagattctgcatctgggagcctgatggcaggtgggtgggggatgggaaaggggctctagtgagtgtggccaaaacgagctcttcttcactgtccagagcttctctcttcaacgatccagccccagaacaacccagggtgcccgtgcccgcagcagagtgcagctggctgagcctcagcctcacagggctgctcctcaactgtgctccacaa

SEQ ID NO: 2737 - DNA, 236 bp, Homo sapien
ggaagttatgaaagaggcttttaatgaaaatactgtacagtttatgtgaggcaaaggcagggggccttgtccaggaagggaagaggcccaagaggcttcctgtccccttggggcaggcagagccaaatgcttgggctcgggccaagctgcctgccctgcagggtccagggaggtcctgatgagtcctgccccttcccttccagagggcctgcctggcagccagcagcagggtgttt

SEQ ID NO: 2738 - DNA, 147 bp, Homo sapien
gatgtgacaaacagcatttattccagactccagtgtccacagatgatggggtggggcggaggtagggcgggggcaggagtgggaccaggggcggggtgaggggggggaatccagtgtcagactctgcagcaagacgtcaggtggggg

SEQ ID NO: 2739 - DNA, 479 bp, Homo sapien
gtctcggtcccttcaacatacgttgagtggagtctggtcagggtagtgtcctaagtatgtttctttcagaaaatagcttgaagaaaatgtcagagtaacatttgtttgtccattaaaagcaataaactctcaaaagtaggatttctggagttgaaaagtaaatgaaatgaaaatatcactagacgagctcacagcagaattgagcaggcagaagagtcagacaacttgtgaacacaggtcacctgagatcatctcgcttgaggaacagaaagaatgagtaaaaaaaattaacagaaatctgtgaccccctcaagcacaccgacaccaccccatacagtggcattccagaaggagagcagaaacgatgggtgagaaacagcctgaccatctcagtggatcagaaacacggatcttacatccagggagctcggtgaactccagacaggtgaactcggagaagagctgcgcttagacaagtg

SEQ ID NO: 2740 - DNA, 347 bp, Homo sapien
tgttaccaatcgtgaagtgggagtaggtggggcagcagttcctcccggaagacattggcgaggacgtccagtgcagccgctgagcacttcctcaaattccagtcggacagagcatcatcatcatcgtcatctccgcgtcctcggagccatcaggcgctcagcctcgtggggcagtgtgaccgtgcgtgacttgtggaagcgtggcttgatgtcctgctcactgtcggggacagcctcatcctcctccacagcccccgttgagcagggatgatgtcaatttccgagtacttcatcccagttcaccaagatggggatcaactggaccagatgggaggccaggacttcct

SEQ ID NO: 2741 - DNA, 313 bp, Homo sapien
ccgctcgctgcaggcgcgcgtggagtggactttccagcgcgcgggggtgacagcccacacccaggtgctggcagaggagcgcaccgagccaccgcccggggactactgctgcgaggctgcggcgccgggactcgggcgtgtacttgtgcgccgccgtcgagcagggctttacgcaaccgctgcgtcgcctgtcgctgcacgtgttgagtgctacgcaggccgaacgactggcgcgggccgaggaggctgcgccgccgcgccgccgggccccgaaactctggtaccgggactttctgcagctggtggagccggg

SEQ ID NO: 2742 - DNA, 319 bp, Homo sapien
taagatatttatatgttatcttcagatgattcttcctgttcttgacaattgtttttattattgagtctgtccagataagttatttataatgggcattactgaatttttaaaatgccgattacacccaaatattgtgcacatttaatgttctggagatagatggcctatctgatgatgatgctcacttaagggacatgtatgtggccttgcctagccctttggtgataagtacttcctctaggaaatgtacgataggtagaattgtggttccctaaagacaagtacataaaggtgaccctgatgaaaccttgaagttctg

SEQ ID NO: 2743 - DNA, 240 bp, Homo sapien
ccaggaagtactggcagtttcttcaaccctctttagcagaggtgaggggcagtgcagtccagagtctggcaccaacgggccttgccaagtagctgctgagtgaatgggcacatgacgccaccctcagaaaggaaagcaagatccggcgcaccccctcagggcgagcaaaaccccatgggatccgcagaggaagcaggcctagaatgccccccacccacccccagacaagcctgactcact

SEQ ID NO: 2744 - DNA, 148 bp, Homo sapien
gaattctgactccttccaattcccctgcaacaaagtttgtaccaggagcatttggcgagtgtccagcaagatgtgcccgtggatgtggatctccccaggccctgcccttcccgcaccctcggcgggctcttaccagctcccctgcgca

SEQ ID NO: 2745 - DNA, 440 bp, Homo sapien
gaagagcaggaagaaacagcatgtcttccttgcctttttgtactaatagtaacaaaaggccaaggaaaaagactgtaaatgaccatagggttgttaaatagacccatcttgaaagtgtagcacctttattttctttgtatcttcattctccctcctttacggctttctagcatgcaggtgtctagtgcacagaaccacaccctggatcttagtgagcaagcatgctaacctgcttctcagacttgatacaccagaacagggatttccctgcaagtgtctccctcatgctgaagtgaactagctgaatatgctcttaaagaaagtagtcagaaaagaaaaaaaagattatcttctccaaaatttgagaccaagtagctgtaaaaaacataataaacccagatgaaaaccaggcttcgttttcttgaaatgattttcttcat

SEQ ID NO: 2746 - DNA, 445 bp, Homo sapien
cagggctggtccctcgtcggcagcccgtgcagcagggaaggccgtggaggcgtcgcgggacgagggctgaggccctgtgcaggacctcgatggcaccgcacactcacgccccacacacggatgggacctgggctcagcagctaccagcagctcacatgtggggtgtggggacctcgccgtcccatgtcccaagcagccaacgctggcacgggtgagcatctgtgactctgggaatacccgtgccagcaggcacgttatcccgaaccaacttaactgcctatcaacaggaagctcatacatcaccgcggcccgtctctccctgtgacgtgcagcctcagcctcctgcgttcaagtgatccttcccccccgcagtttcctaaagtgttgggattacatgcgtaagcaccatgccaggcctcatgtctatttttaaaaatcaagttct

SEQ ID NO: 2747 - DNA, 133 bp, Homo sapien
agttctgaaggaagaaggcaatgagcttgtaaagaagggaaaccataagaaagctattgagaagtacagtgaaagcctcttgtgtattaacctggaatctgccacgtacagcaacagagcactctgctatttg

SEQ ID NO: 2748 - DNA, 276 bp, Homo sapien
cagccctcagctgggactacaggtgcgtgccactgcacctggctgaagctcatcattccttggttgtaatgttcccattactcaacttgatggtctgtctttccttaaagcccagatccaacctgggatgagtgttcatttcaagagatcctttggccatctcagatacctgttttatccatttaaggtgctttttcagaagttatcaaagtcaaaggcatcaccctcatctgtgaagccaatgccgatgaaagcactatacctgctcagtgtcat

SEQ ID NO: 2749 - DNA, 432 bp, Homo sapien
aattcggcacgatggtttaatcatgatgacagcactatcaagtcattgtcgttactatcccattccacagagggggggaatgttgggcagtaggaactttctaaatgtgtcctacctagctcatactggtagtgataaggcgtgaatttgaacccaaacaatctgactctagaacccatgctgttagcgactgctttagcggtactacgcgcttctcaccgctgtactacttgcttctgctcatctgattatgatgcggcgtctgtgaagtataacggggtagttctcagcatgccaaaattaacctgcagctttacctaacaaacatttggacttactttgctttcttgagatattccccccttgggcatttcgttggcagtagtctcattttctaatctgaaatcaggagaagaggaagaaaaacttgca

SEQ ID NO: 2750 - DNA, 251 bp, Homo sapien
gggcctgtaccgcgtacgtcgtgaatgagggtctcaggagactgttctcgggtgcaaccatggcatccagccgaggggccttagtcactgtgggccagctgtcctgctacgaccaggccaagcagctggtccttagcaccgggtacctctctgacaacatcttcactcactttgtcgccagctttattgcaggtggatgttgcaaggtcccgtggcaagcccttgaatttgttaaggattcgcttgttgac

SEQ ID NO: 2751 - DNA, 467 bp, Homo sapien
gggatcctttgagggcaagcagacccttcttccagctcggactgtgaactccactgcagccgtaagactgtctgtgacagtgagcccgagatgactgggctctgtgctccctcccggccctccaatccttggcctgccacagagaactgagctcttttattagcaccatgaatgtgactgatacagctagccattcccttgtgcgaatgactcagtttattaatgctctgctaaagatggcttctttgcttgccagcagccttaaacagtatttcattaaaactggcttaattattttgagaagacggcccaattaaaagctatacactccctctatgtgagtgtttatacatagagctgtatatataatacatatttgtaagtgtgtgtatatatatatgtgtatgtatgtgtctataaatatataggcttagcaatttcattacatgggataaattgttggaaaa

SEQ ID NO: 2752 - DNA, 170 bp, Homo sapien
ctaacatctcggccttccagtccctgcatatcgtcatgttgggcttggactcggccggcaagaccacggtgctctaccggctcaagttcaacgagttcgtgaacacggtgcccaccatcggcttcaacaccgagaagatcaagctgagcaacggcacggccaagggcatc

SEQ ID NO: 2753 - DNA, 406 bp, Homo sapien
ggcgaaacgattgagacaccagctggacgtcacgcgccggagcatgtctgggagtcagagcgaggtggctccatccccgcagagtccgcggacgcccgagatgggacgggacttgcggcccgggtcccgcgtgctcctgctcctgcttctgctcctgctggtgtacctgactcagccaggcaatggcaacgagggcagcgtcactggaagttgttattgtggtaaaagaatttcttccgactccccgccatcggttcagttcatgaatcgtctccggaaacacctgagagcttaccatcggtgtctatactacacgaggttccaggctcctttcctggagcgtgtgtgggggcaacaaggacccatgggttcaggaattgatgagctgtcttgatctcaaagaatg

SEQ ID NO: 2754 - DNA, 389 bp, Homo sapien
tgactactttctttaagagcatattcagctagttcacttcagcatgagggagacacttgcagggaaatccctgttctggtgtatcaagtctgagaagcaggttagcatgcttgctcactaagatccagggtgtggttctgtgcactagacacctgcatgctagaaagccgtaaaggagggagaatgaagatacaaagaaaataaaggtgctacactttcaagatgggtctatttaacaaccctatggtcatttacagtctttttccttggccttttgttactattagtacaaaaaggcaaggaagacatgctgtttcttcctgctcttcacctctctagccttattaatatctttaaattcagtcaattgcaactcaaaactttctacc

SEQ ID NO: 2755 - DNA, 248 bp, Homo sapien
ttttttgagacagagcctggcctgtgcccaggctggagtgcagtggtgtgatctcggctcactgcaagctctacctcccaggttcacaccattctcctgcctcagccttctgagtagctgggaccacaggcgcctgccaccacgcccggctaattttttatattttttttagtagagacggggtttcatcgtgttagccaggagatctagaccatcctggctaacacgatgaaaccccgtctctacta

SEQ ID NO: 2756 - DNA, 140 bp, Homo sapien
ccaatctgaagtgggaggggccctggggactggtaatgctttagtcaaagggatatctctcttgtatcagaggctgtgtcttttagtaacaggagtcctcgtcagaattgcgtgtctgttgtctctaaaagaatgggtga

SEQ ID NO: 2757 - DNA, 403 bp, Homo sapien
cctcgcgtaagaactggcctcagaactcagagccaataaaaatcaggaaggttggtggattcttcctgactctagaatcttcataccccgaactcttgggaaaactttaatcagtcacctacagtctaccacccatttaggaggagcaaagctacctcagctcctccggacgcgttttaagatcccccatcttcaaagcctaacagatcaagcagctctccggtgcacaacctgcgcccagttccagagagaaggactccctcctgcttggaagagacctcacaccgtcatcacgatgccaacggtctgaaggtggatggcattcctgcgtggattcatcactcccgcatcaaaaaggccaacggagcccaactagaaacatgggtccccagggctgggtcag

SEQ ID NO: 2758 - DNA, 426 bp, Homo sapien
gtctcgagagaagcagtgtaaaattgtgtgtctaacatttataacagttggcaactgcagttgagtaatcttaatagtgattctgttaatttgactgagttctattttattgctgctctacgtttttatttgctcagggcaattttaagttgtggttatgggtcactgatttttatctccagcccacagaactaccattaaacagaaataagaaagcaagcggctttgggtccgttttagtctgaatatattattacgtgccttgggctttaaaaactgctatgtagagttagcagtttttaagatgaaaatcactagacagctcattggaataagggcttctccaaagaactctgtagggttatatctattgttactatttcattttattaagatatactgtatatttacatgtcttcatggttt

SEQ ID NO: 2759 - DNA, 382 bp, Homo sapien
actcaccccaaaaggcagaaaagcaacacagtcactgctgtggtcatttgtaatgtaaagatcagttatatatatatatttgtaatgagagcaagtatatactcattatagaatcaatttaagaagtttaaaataacccagagtagaatttctatatctagtcttggtttttttcatgaatatttgcaagtaattaccattaaattcacacatgaaagattaatctgaaagatcagagaccatgttattcctgaccacgatagaactgctcctgtggtttgggacaagtaataaaacaactgcttgagttttgtttgtaaaatacataattaatatttgacctacctcaaaatgtattgaggatctgtgaaatgctaagtgc

SEQ ID NO: 2760 - DNA, 172 bp, Homo sapien
ccccaggtgctcccacatcagccgctagggcacctgtctcaccttgctctcccagcaggtgtctagtgattatatcccccacctgaccagttgaagaaggcaggaaacaaagggtgtcaatctccactcgcgctctaccctggacagcaggatggtgatgcgagtaatgtgg

SEQ ID NO: 2761 - DNA, 461 bp, Homo sapien
aattcggcactaggggtctcagggtcaggtcgcggctggtcactgtgcaggcgcttgggtgacgcgacgatctcagcggatctggtcaccttcgtctccccgccatggagacctcagcactcaagcagcaggagcagcccgcgggacctaagatcaggaacctgccctgggttgaaaaataccggccacagaccctgaatgatctcatttctcatcaggacattctgagtaccattcagaagtttatcaatgaagaccgactgccacacttgcttctctacggtcccccagggacaggcaagacatctaccatcctagcctgtgcgaaacagctatataaagacaaagaatttggctccatggtcttggagctgaatgcttcagatgaccgaggaatagacatcattcgaggaccgatcctgagctttgctagcacaaggacaatatttaagaaaggcttt

SEQ ID NO: 2762 - DNA, 185 bp, Homo sapien
aagctgagtctccagatcccatatagaaccgaccaggtgccgaccacacatgtagatactgggtatcatcctaagcagaaagtagagaatggtagaaagtagtaggtataagtctactatctaaggacagggatcagaatttacattccataagtcattgagatgtagatccattctattagagt

SEQ ID NO: 2763 - DNA, 418 bp, Homo sapien
tgtgggattattttactaaatcttacttatgtttggagatctcttttaacttaaagttacatggtctgtttcttgtttattttacctctattctttaggttgaaattttatataaagtaagatactggtatcttagtatttcctgttcatgcttagtagtttattacttcacttgagggtacttgacaatatgaacaaaaagtaaatttttatttgcataattttaagcttttgaaattaaattatctattcttccccccccccaaaaaaaagtattgtaaatccttaagtaaaattgtatttctagctattggtaagagttgtttcactattgctatgtaggactgtttaaaatgtgagtatctgatattatttaatcctccaatgtctcattttgcagtaactcctacagtgtgta

SEQ ID NO: 2764 - DNA, 349 bp, Homo sapien
gactgacacagactggccctggacacagacggatgctgcggagacacacggtagaggatgcggtcgtgtcccagggcccggagcatgctggccccctctccactccccaagaggttagtgcttcccggtcctaacaggaatgaggagttgttgaacccactgctaggaagcaaggatgcaacaagatgatgctgagcgtgaacacatctgagaactaaatgtgcttccatgagactggcttgagaagtcttcagcaccaagttcctgaaagcttttctgtggcaggaaagaatgcaacaaaaaagttaaccaccaccatctctctcctcttcaaagctaatgaatacaa

SEQ ID NO: 2765 - DNA, 176 bp, Homo sapien
aggacagccaaggactctcccgggcctctccggttctcccttgcggaatgatgggcgcatcctgtctgccacgtgctgacggtcgggaagcttcagtggagaggcctaactctaatgtcgcctgcttaagcaaatcatgcttctctgtttcacgtagttgggttgacaagtttctg

SEQ ID NO: 2766 - DNA, 170 bp, Homo sapien
ctaacatctcggccttccagtccctgcatatcgtcatgttgggcttggactcggccggcaagaccacggtgctctaccggctcaagttcaacgagttcgtgaacacggtgcccaccatcggcttcaacaccgagaagatcaagctgagcaacggcacggcctaagggcat

SEQ ID NO: 2767 - DNA, 239 bp, Homo sapien
attcggcactgatgggagcttgctcgttacaaccccagtcccctgacagaggagtccttcctcaatgtccagcaatgctttgccaatgtctccgtgacagaaagatttgctcattcagttgttattaagaagatccttcagagcaacgattgcatagaagcagccttctgatctgaggacccctgcagatcagatattggccctcctgccttccttggggctccccgcgttcctggcct

SEQ ID NO: 2768 - DNA, 173 bp, Homo sapien
tgaaaggcattgtgggtctgtcttgaaagtgtttacaaaaaaaaaaaagtctagtgtcgactggtgtttccctcgtgatgtttacagcttgctgtttgctgcccagccataacccactcagtgacagacgaacacagctaaggcctcgctgccagccttctgacggcgggcga

SEQ ID NO: 2769 - DNA, 230 bp, Homo sapien
agacattttaataccatatcaaaacaccttgactaatgaagaaagcttttctcccaagctttgaacatttttttaaacattttataagtttttttttgtattttaatatataaatacagaaacctatcttgcatgggctgatgcacgtgtgaacatcaatggctaaaatgttctcaaacatagtgcctgaaaacaggggtagctgtacatatttcttagtaagtcttttt

SEQ ID NO: 2770 - DNA, 219 bp, Homo sapien
cattaattcacaagatagttagaaattctgcctcaagcaaagtaccacattttgaatgttttcttagattttgattgcaagtagatatcagcattttttaaatgaaaagctatattatcttctcccttcaaggcagcctaaggatgttctttcccagaatcactccaacccttcttgccagaattcataaaagtacaaaattggagaatagatgatatc

SEQ ID NO: 2771 - DNA, 292 bp, Homo sapien
ccatacggaaatttgtttattgttcataaatatcataatgttcatttcaaaaattgtcatcatcttaatggctatcttacacttttttcttttggagggttgtcaggcatccatccattttcctttttaagaagaacgttatgtgtattaggctactaaacccaatttttacattatttttagtgatcaaaggtttcttatacaagtgactcacagtactgaattatgtcaatctctcatttgaggaaggaaatgcagttcaagttagcattgaaattgcttggctgtagag

SEQ ID NO: 2772 - DNA, 341 bp, Homo sapien
aacactttggattgtcagtgctgaagtgaaaagaatgtgctgtacattcggcaaatagaaaatacatgaaattcttccaaattagcatcagacattctggtagaaaaaagccagttgaatgttatgtgtgttttctaaggtatgactgaaatgtttttaggaaatgtcaatcacttgactagcctttaaaaaaaaaaaagaaaggtcagccttttatgactgttttgaacatcagaactcttaatccatgtcagagtcatgtgttagaggaaggatacttaaaagcatggaaggactcttaaatgtatgtatgtaattctgtgattttattgttcatcact

SEQ ID NO: 2773 - DNA, 157 bp, Homo sapien
ccacaaggttcatgtgggcgccgtgtaggatggtgccggcaaagtgtccctcagtaaaggctctctctgccgagaggccatggtcctccgctttgttccgatgaaagttctgaatttgcaagcagacttcccgatggaaattctacacgtgcgaaat

SEQ ID NO: 2774 - DNA, 420 bp, Homo sapien
ttttttttttttttgtgaatataatcatttatttgtctttacagtgatgatggaagaatgtacaggtgtcccctttcaataaagtataaaaatatgtttatatacagtgaagtcacaataatctttaactgggaaatttatttagaattcctgatctgttcttattaaaactgtgggggaaacaaatgttttacgtaagtgctacatttccagtagattgcacctggcatcaaaagctcagcttcatcttagggtcctgcttgatattacaaaagactaattttaagtcctaggactcaaaataaacatgattttttgaataatagatatatacatcaaaaatacatctaaaaaggcattggttagtgctattaaaaagctctatgtgctcgggtacattttttttcttacaggcaaaag

SEQ ID NO: 2775 - DNA, 345 bp, Homo sapien
tttttttttttacagttttaaaaaaaggatcggtttttaatttacaagagttctaaatgtacagaattctcctttaaaaaaatcgttatacacaataaatacagtacaaaaaaatttatcttacagtactagttttgtctccgagatttcaaaatctggcgcgggcggctggaggcaggaagaacagagggaagactagctggggagaggttcgggggagaggaagaccccagtttcttgttttgctcagatttcaaagtcgaggggtgggcgttcgaaatctctcactcacttgtgcacacacacacacacaggtcacggagctggacgtgcggatgtcacacg

SEQ ID NO: 2776 - DNA, 336 bp, Homo sapien
tttttttgagctgtaggttttattgagcagagtgaaagtacaaagcttctacagtgtggaaggggtcccaaatgggttgccactgctagcttgggtgattgccttttaaactctttaaggcgggagatacgtgaggcgggaagaatgttacaggagcaagaaacaaaggcagtaaattattttgtgacatgccttagattttgagaaaatctgaaattgcgacttatgcttactcgttttgtggccttggagctgtacagcaagaaaaagaggatcttatagaacttaacgaactatgttcataaggaattgggaggatagataaggtccgctgat

SEQ ID NO: 2777 - DNA, 236 bp, Homo sapien
gagctgcaggtgttcattggggtctctgtagtgatgaacagagccaggccaggaacgcggggagccccaaggaaggcaggagggccaatatctgatctgcaggggtcctcagatcagaaggctgcttctatgcaatcgttgctctgaaggatcttcttaataacaactgaatgagcaaatctttctgtcacggagacattggcaaagcattgctggacattgaggaaggactcctc

SEQ ID NO: 2778 - DNA, 470 bp, Homo sapien
tttcacgacaacaggtaacctttagtcagaactcaccacccactgtgttaagccttacatgacaatcaccatgaagatttacatacacatgttatatcatagtctcctcacaacatgtctaagaggtaggcacgtcattgttcccattttgcagatgaggaaactgaggttcagagagggcacttggcttgccaaagtcacacagcagggagtggcagaggaagtcaggttgggtgaccccagtaactgctctcagaggctgggtgatgaccggcttcctggcttctctggaataaacctttgccaccacttcctgcatttcagcttcagtacaggcagagaatggggataggtgggggaatgaggtgagaggggagatgtttagaggtgtggagggcggcagaggtttgaacagtgcagacaaggggagagttcagccgactggggaggaagaggatggacgatggagc

SEQ ID NO: 2779 - DNA, 467 bp, Homo sapien
catcattcagaagtttttaataaacaacttcattataaaaacctttttttgaaaatgtaattctgtaaaacattgaaaaatctactttaacaaagatatgccctgtgcattttctaatggcacttatactttacaattaaaaaccttgttttatataaagccaaaaatactccaagaggttattcactgtgtttacaaagtgctagaagatttctgtcttgtacttttctctttaaataatctggagttacaaaagagtggctccaaagccttgaccgctggtagggagggagaagcatgagaagtggtgtctcaggagttctagtgccaaaggtggagaggtgcaagtgggaacaatcagctaaggaagtcagctgacacacaaagaaatcggactggaatttttccaaacccctctatggaggcactaggttatcatggtgaacaccttttccctcgccatagac

SEQ ID NO: 2780 - DNA, 479 bp, Homo sapien
tacgtgtctgcagggggcatgttcccgtttactgagcgcgagttctcttggggtggaatggggaccacccgtgctctgctcctggccaggcggggatccccagcagggctgacactagcaagggagtggggccctcaggcacgggatggaggctaggagcagtgccagcgacggtgagaacaggtccaggtcctaggaggcagggcgtccccgagaggccatgttgcatgctgaggtctaggaccaggtagccgttggggatgccgccctgtagccccagccccagcgtgtccaggtcgtcctgccgctgccgtaggatccagtctcgcaccgggcggtcctgctacctccgccttcaggccctccacgtggggtcccagaagtttctgcacctcagccacagtcaacggcagcaccgcatccgtccgcagcttcatgaacgtggccaagtccatgctcacattctgctgactgagcgc

SEQ ID NO: 2781 - DNA, 468 bp, Homo sapien
ttgaagatttacatacacatgttatatcatagtctcctcacaacatgtctaagaggtaggcacgtcattgttcccattttgcagatgaggaaactgaggttcagagagggcacttggcttgccaaagtcacacagcagggagtggcagaggaagtcaggttgggtgaccccagtaactgctctcagaggctgggtgatgaccggcttcctggcttctctggaataaacctttgccaccacttcctgcatttcagcttcagtacaggcagagaatggggataggtgggggaatgaggtgagaggggagatgtttagaggtgtggagggcggcagaggtttgaacagtgcagacaaggggagagttcagccgactggggaggaagaggatggacgatggagcctctgggcatctggatcagcaggagcataacatctggatcagctggagcgtatgactttcctcgtgcc

SEQ ID NO: 2782 - DNA, 415 bp, Homo sapien
gtgaggaagacagggctggagatagaaacagtgaggatgatggtgtggtgatgaccttctctagtgtcaaagtttctgaggaagtggagaaaggaagagccgtgaagaaccagatagcactgtgggaccagctcttggaaggaaggatcaaactacaaaaagctctgttgaccaccaaccagcttcctcaaccagatgttttcccattgttcaaggacaaaggtggcccagaattttccagtgccctgaaaaatagtcacaaggcacttaaagcattgttgaggtcattggtaggtcttcaggaagagttgcttttccagtacccagacactagatatctagtagatgggacaaagcccaatgcgggaagtgaggagatttctagtgaagatgatgagctggtagaagagaagaa

SEQ ID NO: 2783 - DNA, 295 bp, Homo sapien
atgtttatactttattttttaaatatatataaaacctttcataccgtgacatctgaaatctaggggaaacaagtaattgaaaaatgattttgataggtcaaaaaaatacaaggcagcttaacaggagtaagaagaaaggcctatatgtaagacaccagagcaatgggagtgaagacagtgaggcttttattcaggtgtccccattaccttgctttgaaggcctggtcaacccactatgtgagtctcattttctctatgtattaaacaaaaagttacaaaaacatgacttccatgg

SEQ ID NO: 2784 - DNA, 247 bp, Homo sapien
ggggaaagaggtttaatatcccggtacaccgtggtgagaagcctgggcaaagcatctgcacagacaggtgtgtgtggttgagcccaccaggtcccactttctctcatcccagtccctccctaaggtgctgcctagaattctgcacacacattcttactcccccaaagcacagggctttcttccagattgctttttgaaggaggcgtttaaaccagaagggcaaagatgctgacacagagtttggttt

SEQ ID NO: 2785 - DNA, 283 bp, Homo sapien
  misc_feature (1)...(283): n = A,T,C or G
ggagagtggagggggctgcctcaaatgcttcttaaaaccgtgggttgntccttcatggcgtcaatccctactatgagccgtatttcatctgcctaggttccnngggtcagtgnnagctggtcagcacaagctatcagagattagccagttgtggcnncagtgatccgtgaactgtcnnttttctcagtagattctaccgattctcccctccggcttgtttgncatctcgncagccagatcttcattcccttcttgccccaactctccttggttttttggggtt

SEQ ID NO: 2786 - DNA, 140 bp, Homo sapien
ctgctgccgccgtctacacggtcccctcatttgacgggttcgcctcctagcagcgcctgggcgagtgacatctgggccggaccagctggtgctgcgcggcgcagataacaagacctctgccagaagaccatggctttgga

SEQ ID NO: 2787 - DNA, 205 bp, Homo sapien
ggacttgtcgttacaaccccagtcccctgacagaggagtccttcctcaatgtccagcaatgctttgccaatgtctccgtgacagaaagatttgctcattcagttgttattaagaagatccttcagagcaacgattgcatagaagcagccttctgatctgaggacccctgcagatcagatattggccctcctgccttccttggggc

SEQ ID NO: 2788 - DNA, 267 bp, Homo sapien
cccttgccagagtgactctggaggccccctggtctgtgacgagaccctccaaggcatctctcgtggggtgtttacccctgtggctctgccagcatccagctgtctacacccagatctgcaaatacacgtcctggatcaataaagtcatacgctccaactgatccagatgctacgctccagctgatccagatgttatgctcctgctgatccagatgcccagaggctccatcgtccatcctcttcctccccagtcggctgaactctccc

SEQ ID NO: 2789 - DNA, 343 bp, Homo sapien
ctttactgttaactcttaacagatgcagtcagcagtttctgggcacttttctcagtaggtgcctcatgctgacttctccagtagggtttcaggacaaactaccaaggaattgcctcagcctcctaccagtcctccctcacccaccttctgtctaggttcacttggtttgtcatcaggaactgagcaggtccaggactcagctttctgcttcagcctaagccagtactccttgtttgaggtaaaagccttaaaatttagctccctagctcttgattagaagcaatttggaggtaagtgtgtttttgattttagggcagggtagcttggggataccttttttaaa

SEQ ID NO: 2790 - DNA, 200 bp, Homo sapien
gtgaggacacggcctcctgttggagtcccattttctccatcagggcacgtgggcggcttcctcaagcccggaggagctcccaggcgcacaggggccgccggtaacaggggccgccggcaaaggccctttccagtcatagcactgaagttgcaacttttttcttgtaattgttttgctactaagataatttcagaagttca

SEQ ID NO: 2791 - DNA, 240 bp, Homo sapien
ctcttcctcaagatgagccctgaggacattcgcaagtggaatgtgacgtccctggagaccctgaaggctttgcttgaagtcaacaaagggcacgaaatgagtcctcaggtggccaccctgatcgaccgctttgtgaagggaaggggccagctagacaaagacaccctagacaccctgaccgacttctaccctgggtacctgtgctccctcagccccgaggagctgagctcagtgcccccc

SEQ ID NO: 2792 - DNA, 274 bp, Homo sapien
aaagtcatacgctccagctgatccagatgttatgctcctgctgatccagatgcccagaggctccatcgtccatcctcttcctccccagtcggctgaactctccccttgtctgcactgttcaaacctctgccgccctccacacctctaaacatctcccctctcacctcattccccacctatccccattctctgcctgtactgaagctgaaatgcaggaagtggtggcaaaggtttattccagagaagccaggaagccggtcatcacccagcctct

SEQ ID NO: 2793 - DNA, 323 bp, Homo sapien
ctacaaaaaatacaaaacaatgagctgggcatggtggcatgtgcctgtagtctcagctccttggggggttgaagcaggaggatttcttgagccagagaggtgaggttgcagtgcgctgtgatcatgccactgcactccagcctgggcaacagagcaagtctctgtctcaaaaaattaaaaataaaaagcattctcaccagaaaaaaaggtaacaatgttaggtgacagatatgtaaacttaattgtaatcatttcacaattgtaatcgtttcacaatgtatatatatgtcaaaacatcatattgtacaccttgatataccgtt

SEQ ID NO: 2794 - DNA, 260 bp, Homo sapien
gagccagtcagctaccactaactctggagtaaaatatgctgcatccgggcaagaatctttaagactgaaccacaaagaggtaaggctctccaaagagatggagcgacctgggttaggcagccttctgcccagagaaacactccagagactgctacaaggaggaagaacacctcactcagtcaatcgtcccaccccctaaaccagagaggagtcatagcctcaaactccatcatacccagaacgtggagaagggaccccag

SEQ ID NO: 2795 - DNA, 273 bp, Homo sapien
atataaaattgtagatgactgtggtaaatgtgtaattatgtccattatgcttcaaagttgaagttttcatctttgactccaaaatgtcagagggaggccgctctaaactaaaaataacgaaaggttgccaagtattaatactagttacctccctcttttcgtagtttttgtcatgtctgtcaacttactcgattgtgtggttgcattcagaatatttgaagtttcttacgtagacagaaataataaaaatattaactagggaaaaaaacagta

SEQ ID NO: 2796 - DNA, 332 bp, Homo sapien
taaagaaagcgtgaataagttcctttccctggtaactttgaaaagcagtcagagttgctatatagatatatgtggctcctttaaaatgctttgtgtatgtgtggtgtttaaaaaaaaaaaaatcttaccagttaactttgcagtgtctaggtttgagtgtcataaatccacgtgttcctgttgcaacaaatacccaaaaattgtgtgtgcacttcctaataccagtcttcacccatggaggaacagtgctttttagagatgctttctatttcaatgttggcatactgcctgaggggtattgcagtttgtgggtgcattccctaattttgtat

SEQ ID NO: 2797 - DNA, 343 bp, Homo sapien
ctacaactaacaaagatttgtttcaagcctgtcattaagagtctgcatcaagagatttgtcctcttgggggaccactggatcattccagatttcttgtgatttttctattgtgtaattcttggtgggctctgtagtttaataataagaaaaaggccatttcattttaaattgtgacctataattctttgtcttgggttggtaattcaggattcatttggaaagtgggtaaaaggggcttcaaaaaacggatagaacaggattttctaggagttacacatacattttatcctgtcatacctcgagataagagtggcatgttagtgaggagttctgatattaagc

SEQ ID NO: 2798 - DNA, 487 bp, Homo sapien
  misc_feature (1)...(487): n = A,T,C or G
gcccggagcacatcctggccatcctgcaggactgcccgtccctgcggccccccatcgaccacctgtgtgagctgctgccgcgcctgcaggccgctactactccatcgcctcatcctccaaggtccaccccaactctgtgcacatctgtgcggtggttgtggagtacgagaccaaggccggccgcatcaacaagggcgtggcaccaactggctgcgggccaaggagcctgccggggagaacggcggccgtgcgctggtgcccatgttcgtgcgcaagtcccagttccgcctgcccttcaaggccaccacgcctgtcatcatggtgggccccggcaccngggtggcacccttcataggcttcatccaggagcgggcctggctgcgacacagnngcaaggaggtgggggagacgctgctgtactacggctgccgcgctcagatgatgactacctgtaccgggaggagcttttcagttccacagggacggt

SEQ ID NO: 2799 - DNA, 208 bp, Homo sapien
ggaccctgagaagctattgcaatgcccctatgacaaaaaccatcaaatcagggctagcaggtttccttatcatcttatcaagtgcagaaagaatcatcctgatgttgcaagcaaattggctacttgtcccttcagtgctcgccaccaggttcctcgagctgagattagtcatcatatctcaagctgtgatgacagaagttgtattgag

SEQ ID NO: 2800 - DNA, 489 bp, Homo sapien
agggcgcgtctggcaccgggaaggtgtagatcatctagaatgacggcgattccgacgccccggtcagtcctgcgtgattggcgagggtgcatctgtcgtgagaattcccagttctgaagagagcaaggagactgatcccgcgtagtccaaggcattggctcccctgttgctcttccttgtggagctccccctgccccactccctcctgcctgcatcttcagagctgcctctgaagctcgcttggtccctagctcacactttccctgcggctgggaaggtaattgaatactcgagtttaaaaggaaagcacatccttttaaaccaaaacacacctgctgggctgtaaacagcttttagtgacattaccatctactctgaaaatctaacaaaggagtgatttgtgcagttgaaagtaggatttgcttcataaaagtcacaatttgaattcatttttgcttttaaatccagccaaccttttctgtcttaaaa

SEQ ID NO: 2801 - DNA, 500 bp, Homo sapien
tgaaaggcagaggggctccaggtcctgtttccagctcccctcactgcacatggtgaagctcgctccctccctccctcccttcccgcttttcccagagctaatacacaggtgctattattcagaaaaaaactggtcagctctagccaacagtgaggtttcttttcttctgccctaactattgtgtagcctcttatgctgaaatcggcttctgctggcttctccggctttcagagccctgaaacaaagagaaacaggatctgtccctacccagcacagcaaatggttgtagtaattgccaaagccctcataaagccctccggcttgaggagagagtgtatagtcatgggttctgcctctgtgcccttgctggccgcttctcctctgccttctttcctggaactcagggtgtggggactgagcctgtaggggacagcatgccgtcttgctgtggccactcccaagtgtgccctcttccctctttacacatcaggtgtctctgg

SEQ ID NO: 2802 - DNA, 451 bp, Homo sapien
ctctgctggagcaggacttcagagtgtttgttttcagcctgcttttaaagtgatttgaagagagcggctttgaagattatcgcggaacacctgcccattaatcttgaccctgttaaaacaataactgcctatccagatatgccacacttctgcctgctgttggcaaccctcctggactaggctgctcttgttaatcacatggatgttatataagagttcggaccgcccagcacacaaggtcagcatgctgctcctctgtcacgctctcgctatagctgttgtccagatcgttatcttctcagaaagctgggcatttgcaagaacatcaacttctataatgtgaggcctcctctcgaccctacaccatttccaaatagcttcaagtgctttacttgtgaaaacgcaggggataattataactgcaatcgatgggcagaagacaaatggtgtc

SEQ ID NO: 2803 - DNA, 463 bp, Homo sapien
tttaaaccatgaagagccgtttgacagagcatgctctgcgttgttggtttcaccagcttctgccctcacatgcacagggatttaacaacaaaaatataactacaacttcccttgtagtctcttatataagtagagtccttggtactctgccctcctgtcagtagtggcaggatctattgtcatattcgggagcttcttagagggatgaggttctttgaacacagtgaaaatttaaattagtaacttttttgcaagcagtttattgactgttattgctaagaagaagtaagaaagaaaaagcctgttggcaatcttggttatttctttaagatttctggcagtgtgggatggatgaatgaagtggaatgtgaactttgggcaagttaaatgggacagccttccatgttcatttgtctacctcttaactgaataaaaaagcctacagtttttaaaaaaaaaaaaa

SEQ ID NO: 2804 - DNA, 441 bp, Homo sapien
attatttccataacaaatgaaagtcaaaatgcagaatcaaatgtatccattattgaaatagctgatgacctttcagcatcccatagtgcactgcaggatgctcaagcaagtgaggccaagttggaagaggaaccttcagcatcttcaccacagtatgcatgtgatttcaatcttttcttggaagactcagcagacaacagacaaaatttttccagtcagtctttagagcatgttgagaaagaaaatagcttgtgtggctctgcacctaattccagagcagggtttgtgcatagcaaaacatgtctcagttgggagttttctgagaaagacgatgaaccagaagaagtagtagttaaagcaaaaatcagaagtaaagctagaaggattgtttcagatggcgaagatgaagatgattcttttaaagatacctcaagcataaat

SEQ ID NO: 2805 - DNA, 479 bp, Homo sapien
ttccaccacgttccccatgcaacgtgacgccctttattttcatggattagttacaaatgtttggtgtcatgcacttaatgtactgtgatctcatagatatttttagaggaacgctgtaaatcactacaggaagatgattgcctagctgctggagggtttcacccgcttgagaacttctttctaattcatccccaccgcacccatcccatgctcttcctaaagaaagagagaaagcccagtttggggcacatttgggaatttcagagagggagctaagcagggaaggtaactttagaattaggaattttctatgcttttctgttagtagagacttggagaagagattgctgtgttttggtttgatctttagctttatgaagattctgggcttcttcacgatctcgttagtggaggaggaaaagattacagtggggtttgggaattgctcattaagagagctgagtcttctgtggctttgc

SEQ ID NO: 2806 - DNA, 632 bp, Homo sapien
taaaactctaaatttattcaaaatgttaaaagattttgttctccctccaaaatattttacaattaaaaaaatcaaaactatatcctattttctcagccactgtacaagttgctgtttccatctcaggactagtctctggccctccaacactctgtccctccctcaatcccccacctcctttcaatattgctgttaagtttgtttataaaaccctccaccctctctccccaccccataccctgctctgctctgcccagagtggtgtctctttgcgattccaggccgttggctgcaggtgaagccgaatggatgggtacgatgtacacaagcaacacctgaggggcaagagtatgctttgtgcttctgggagaatcacttttttcttggtcaagtggaggatcgttctttttttgtcccatggacacctgttctgagccaaatatttggcttatagttgcccacagccatgtagctctgcttttttctgcacgttcctctgggcgtgggtccgtgacagatggctcttatgactgtaccatttgtttgcctgtggactgttagggacaggaaaggggcacatgactagaatggggcttgatggagcccaacttctcagagagtgggcacaaaac

SEQ ID NO: 2807 - DNA, 578 bp, Homo sapien
agcggtttctcattttaattatactgttcgtaaggttctgcttgaagtatgtttgctgaggggtttataatcgtaaaaaggtgttgcattttattctgagtttcttaagaattttataacaaagaattgttccaatttattgaatatttttcttaacctatataggtatttatgtttcatatcactctatttctacattatttggttaaaatgataaatatataaactttaatattgaattatctttgacatatttatttataaagttgaactaggccagatgcagtggctacaggcaaattacaagtccacccaggttcaaggagctggtgtcgacctcaactctcatgggagaaatatatagcaggcacactgtggaagagaatgtgtgataggagatactgttttggccatgtttgggattaccacggtctgccctctggctgtaacaattcacatcccccccatgcaaagtacagccatctcctcccccaagatcccaatgtctcatcccgttataatatcagattgaagaccaggatctcatcgtcaaactctgctacaggtgcagatgggac

SEQ ID NO: 2808 - DNA, 441 bp, Homo sapien
taaaccatgaagagccgtttgacagagcatgctctgcgttgttggtttcaccagcttctgccctcacatgcacagggatttaacaacaaaaatataactacaacttcccttgtagtctcttatataagtagagtccttggtactctgccctcctgtcagtagtggcaggatctattggcatattcgggagcttcttagagggatgaggttctttgaacacagtgaaaatttaaattagtaacttttttgcaagcagtttattgactgttattgctaagaagaagtaagaaagaaaaagcctgttggaatcttggttatttctttaagatttctggcagtgtgggatggatgaatgaagtggaatgtgaactttgggcaagttaaatgggacagccttccatgttcatttgtctacctcttaactgaataaaaaagcctaca

SEQ ID NO: 2809 - DNA, 279 bp, Homo sapien
aatgttgcagcgtaatccttcataccacctggttcttgatattctgccgcctgttcaagttcaagaataaaagcgacacaggacccaaatgcagctcccaacccactccccaggctagacatgcttgtgtccacacagcacaccaatgtgatacttccactgaccggctgcagctctgcatgaaggactcggggtctggatgccatggaatcactgtggctcttgttgcagttttgtactctatacttggtttttcaattaagcttaatggctttttta

SEQ ID NO: 2810 - DNA, 249 bp, Homo sapien
tcatgctggtctggaacagtgacattgccaacttaagacacacaaagcagattttcagaagtgtctggtcaagataacatgctggccaaccacaattcctagagttaagagaaccttaaaagattaccgctcatgctaaaagtatgtaaagatcccatgtacagtatgatagtgtactttttttaaaggactgtcaatatacaaaactttaaagattaaaaacattaaaaataaaaccatgtccattta

SEQ ID NO: 2811 - DNA, 494 bp, Homo sapien
gtcctctctgcttccttacagcacccccacctgccagagctgatcctccctaggccctgcctaaccttgagttggcccccaatccctctggctgcagaagtccccttacccccaatgagaggaggggcaggaccagatcttttgagagctgagggttgagggcattgagccaacacacagatttgtcgcctctgtccccgaagacacctgcaccctccatgcggaccaagatggggaatggaactgaggaagattataactttgtcttcaaggtggtgctgatcggcgaatcaggtgtggggaagaccaatctactttcccgattcacgcgtaatgagttcagccacgacagccgcaccaccatcggggttgagttctccacccgcactgtgatgttgggcaccgctgctgtcaaggctcagatctgggacacagctggcctggagcggtatcgagccatcaccttggcgtactatcgtggtgcagtgggggcc

SEQ ID NO: 2812 - DNA, 417 bp, Homo sapien
acaggctaaaggagggggcagtccccaccatatttgagtctttctccaagttgcgccggacaaccaagaccaaaggacacagttacccacctggccccgctgaagtcagccggctcagacgatgcaggaagcgctgctccgagggccgagggccacaactccattttctccacctccacctgctgatgtcacctgctttcctgtggaagaggcctcagcacctgccactttgccggcctccccagctgggaggctggagcctggccttagcagccccttttcagacctactgggccccttggtgccaggcagatgaagcaggctgcagcgcccagccttcaccagagcggcagcctcccctctcgaaccacggccagtctccccctcagcgtatatgctgcgcctgcccccacccgc

SEQ ID NO: 2813 - DNA, 461 bp, Homo sapien
cttcttgcccctctcctgggaagctccccgattcttcttggcccttccttcccttccacagtccctctccaccctaagcccagcgcgccgcctcccccctccttcccggcaggtgacggcggaatcccgctgtaagctgctcagctggctgaatcccggtgcaccgccaattcggcctctccttcgagtcgctgtgcctgacggtgaacactctggaccgcttcctcaccaccacgccggtgctgcagactgcttccagctgcttggggtcacctccttgctcatcgcttgcaaacaggtggaggtgcacccgccgcgcgtgaagcagcttctggccctctgctgcggcgccttctcccggcagcagctctgcaacctcgagtgcatcgtgctgcacaagctgcacttcaccctgggtgcgcccaccattagcttctctctggagcatttcacgcacgctc

SEQ ID NO: 2814 - DNA, 442 bp, Homo sapien
ttttttattaaacattaaataaaataataaatgtaaagtgcctggcagacagtatctacttggggtaagtattaatgattggctacattcaagagcaattcaaagagagaaatcactgcctctaaaaactagttgctgtacagatataatacataatatccctgaagtaatttataatactttcaactggagaaataaagaaaaaatacaagattcaacaaaatgtcaagattgggattaatggggcgattataagtttgttgaattattaaccaacaaggccagaaaatcaatgtgctgtcctaaatatggtttgttgcattactctcaaaaggttaagaagacactggcctggtgttaacagtgccttgaattgaacatattgcatttttctttatcggtatgctccgataaagaaaatgtttttatgggtatgaggagc

SEQ ID NO: 2815 - DNA, 425 bp, Homo sapien
ttgttgcctaatcttaaaaaacatctttaaagggcacccacatttctttggttaatagtataaaaaagactgcattgacatggttaagttcccaggaccctcagttgttcagagatgactggtatcattacctgcaaaagtgtcttgaccttgatggagcttatgttgataaataaagtttatattttttattctttatctttttattccatttttccatgaacttattgaagccccttcgtagatcacctattgaggttatatctggggcatgctggggtgtgcactatatcgtatttgtagtcagaatacttgatgctgtagcgctcagatttattgaatgaaattctgctataatatttgagcgaatatttgtttttcgacaatgcattttctttggatttcttacagaaaaatgtccattc

SEQ ID NO: 2816 - DNA, 412 bp, Homo sapien
gctcgagagcttggccgcaaccaggtggcgcaaacgtggaccatgctgcggatcatctactgcagccctggcctagtgcccactgcaaacctcaaccacagtgtgggcaagggtggctcctgtggcctcccgctcatgaacagtttcaacctgaaggatatggccccagggttgggcagtgagacgcggctggaccgagcaaaggagatgcacggagcgacacagttctgctcgactcctcggccacactcatcaccaatgaggataacgaggaaaccgagggcagcgacgtacctgccgactacctgctgggtgacgtggaaggtgaggaggacgagctgtacctgctggatccggaacacgcgcaccccgaggaccctgagtgcgtgctgccgcagaggcctttccgctg

SEQ ID NO: 2817 - DNA, 386 bp, Homo sapien
caactctgtgaatggactaaaaacattgtatttatatacactttaaattactgaagtgtacagaatgtaaattatatctcaataaagctgatatgtgcatacacacacacacacacacacccaacagcagaagaaaatacctaaaaggtaatgaacaaaagcattcagattaaagcatgagaatctgaaggtttggtcatctacatcttgttccatagataagcatagactgtctactaaacacagttgtcaacttgatccaaaaatcttcgctggattctgtttctttcaagactgtttctagaggggtccacaaataattatctttgaagtttctgattaggacatctttcctgggattctaagattatttatgcctctttaat

SEQ ID NO: 2818 - DNA, 480 bp, Homo sapien
atattttatatttgggtaagttgtcaagctatgtagtttgtatttctatatattttttcttattcacattggtgatggatgggggtgagcaacttaaataccaaaccagtgtttgaaaaaaaagtgtgcataaggcatgtggtataccttataaatggagttgggagggagagaatttgaaatgggatacctatttttttaattacataaatttaaactagcagacatttaaacatgaatgattaggatttttctatgtggttaacctggactttctgaacaaagaccaactgagcccctcccagtactctggtggatttttcttcagcaaccattacgcaagtcttagttgtaaccagcaatgttctgtgtgttttatgtttgctttttagttaaaaatcaccaccaccaccaaaaagaaaaacaaaattttttggctcctggattttcaaaacacatggtagacctctctgattttag

SEQ ID NO: 2819 - DNA, 145 bp, Homo sapien
gggtcaattcaaatctacagtacagtgcctcacatgtcacaaaaagtctaggacatttgaggccttcatgtatttgtctctaccactagcatccacaagtaaatgtacattacaggattgccttagattattttccaaagaagaa

SEQ ID NO: 2820 - DNA, 124 bp, Homo sapien
cgccgtcgagcacggctttacgcaaccgatgcgtcgcctgtcgctgcacttgttgagtgctacgcaggccgaacgaatggcgcgggccgaggatgctgatccgccgtgccgacgggccccaaac

SEQ ID NO: 2821 - DNA, 438 bp, Homo sapien
ccccgctcgctgcaggcgcgcgtggagtggactttccagcgcgcaggcggtgacagcccacacccaggtgctggcagaggagcgcaccgagcgaccgcccggggactactgctgcgcaggctgcggcgccgggactcgggcgtgtacttgtgcgccgccgtcgagcagggctttacgcaaccgctgcgtcgcctgtcgctgcacgtgttgagtgctacgcaggccgaacgactggcgcgggccgaggaggtgcgccgccgcgccgccgggccccaaactctggtaccgggactttctgcagctggtggagccgggcggaggtggcagcgcgaactccctgcgcatgtgccgcccgcagcctgcgctgcaagtcactgcccctggagtcgcggagaaagggccgtaaccggaggacccacgcccctgagcctcgcgctg

SEQ ID NO: 2822 - DNA, 464 bp, Homo sapien
  misc_feature (1)...(464): n = A,T,C or G
gagacagagtctcactcttgcccaggctggagtgcagtggcacgntcttggctcactgcaacctccacctcccaggttccagcaattctcctgcctcagcctccccagtagctgggattacagacatgcaccaccacacctggctaatttttgtatttttagtagagacagttttcaccatgttgtccaggctggtctcaactcctgacctcaggtgatccacccaccttgccctcccaaagtgctaggattacaggcgtgacgactgcacctagcccactgatcactcttctgcttacagaatatcagaagtcattctagaggcaaatttgaagagtggaaaaatcactttttctgaatgatcttgtttttggtgtagatgtttttattgtgtgggttagtttaatgaatacataaagactaccagtaccattctgtctttactccgtggcatctgtggaata

SEQ ID NO: 2823 - DNA, 479 bp, Homo sapien
ggacctgaggacctgcttctacctcagcaccgtggaggcctggtgggactatggcaaggaaggaggtgagactcccaaggcacattgaagggaattctggaaagctggcttggagagagcatggtcttctcactatatgaattccttctgtatccctcccttctttttttttttctcctgtagtccagagaggttgaaatgtctgataacatagcaggtttgcgacatgaaagagatgagaacctagctggtctcctagtatccaatacaatattctttcccttacatattctttttaaatataagatatttttattgaaatgggtgattatgacaaaggccttaggagagctcggtccaggggagcaatagagaagaactcagagaaaaagacaggctttgttttcccaaacattttccttatatccctggcttgctctttcccctgtgagcaccctggagctccagccctccgtcac

SEQ ID NO: 2824 - DNA, 251 bp, Homo sapien
accccagaaacttcagccccagcagaaaggttgtgaggctggaggaaggcactgcccactctgaaagagaaatcccatgaagcctgtccttgcagagcccctctctcttttggggaacagggagcattcacagggtcttgggaacataggcctgggctccccgtttgaatttgagccccagttccagggcaagtcccagccacccaagcatacttaccagtactgcccaccaccacccactgcccacctct

SEQ ID NO: 2825 - DNA, 301 bp, Homo sapien
cctcggcaccaagctttgtcccctctcgctgtggggggctagtgattctcctccgacctgacgattgcttggttttttcaaaagggagttttgtgcggtgagaagtgtgtttctgtgtggctaactctgggctagcgtgccgtggccattgaaggtgtggcctgcgtgggtgcagtgtaagtgacgctggattgtcaggtggcagcaggggacccctgctgtgtcagtgctaatgaaacatgttggttggtttctaaaataaagccaaacaagccagcacatgcagaggcttggaccctga

SEQ ID NO: 2826 - DNA, 508 bp, Homo sapien
atggctcggcgctagtgccagctcgcagaaggcgctgctgctggagctcaaggggctgcaggaagagccggtcgagggattccgcgtgacactggtggacgagggcgatctatacaactgggaggtggccatcttcgggccccccaacacctactacgagggcggctacttcaaggcgcgcctcaagttccccatcgactacccatactctccaccagcctttcggttcctgaccaagatgtggcaccctaacatctacgagacgggggacgtatgtatctccatcctccacccgccggtggacgacccccagagcgtggagctgccctcagagacgtggaaccccacgcagaacgtcaggaccattctcctgagtgtgatctccctcctgaacgagcccaacaccttctcgcccgcaaacgtggacgcctccgtgatgtacaggaagtggaaagagagcaaggggaaggatcgggagtacacagacatcatctggaagcaggttctg

SEQ ID NO: 2827 - DNA, 466 bp, Homo sapien
caggaaactgctcaacaagtgcgccgcctcagccgcggaggagagcggggccggcaagaaggacaaggtgaccatagccgatgactactcagatccctttgatgccaagaatgatctcaagagcaaagcaggaaagggggagagtgctggctacatggagccctatgaggcacagaggatcatgacagaatttcagaggcaggaaagtgtccggtcccagcataaaggtatccagttatatgacaccccttacgaacctgaaggccaaagtgttgactcggactcggagagcacagtcagcccccgactgcgggagagcaagctgccccaggatgacgacaggcccgccgatgagtacgaccagccttgggagtggaaccgggtcaccatcccagccctggcagcacagtttaatggcaacgagaagccgcagtcatccccctcatcttcgcgggatcggcggcgc

SEQ ID NO: 2828 - DNA, 339 bp, Homo sapien
aacataactcagtgaagctatattttcctaatgactaatacgtgagattatagaaaactgctagtaacattgtaaccaattgaatgcaaaagaaacaattcagttgtcttctatttaagtcagacatttagggaaacaattgccaaaatgtaaaacaatgcacctatttttttaaaaatatgcatttgttgctataatatttaaatattttactttctaatatggtaagatactagtaaagtgatttggggccctcaatctttaagaatgtgaagggattctctgaggccacaaagtttaagaaatggctactctagcacaaacgcacatagtaaatac

SEQ ID NO: 2829 - DNA, 388 bp, Homo sapien
aattcacatgtgaagctttattaaatctggttatatgtgggacttcaacagctcaatttttccacaatttccacttttcaaatcccatgccaaactgtcactttttcccttaaaaagtggataaacccatcttttgaaagacaggtcttctcagtttttctgttcatcctcctactgtaagtactggctgatattcacacacatgtactacagaattaaaatactgacaagcaagtagtttcttggcgtgcacgaattgcatccagaacccaaaaattaagaaattcaaaaagacattttgtgggcacctgctagcacagaagcgcagaagcaaagcccaggcagaaccatgctaaccttacagctcagcctgcacagaagcgcgaag

SEQ ID NO: 2830 - DNA, 117 bp, Homo sapien
aagccccaaaaaatgggttggagagcctggcagggccatgggagaagggcccatagaagccggtcccctgcccagaccctcccgggaggccccttcttggttggaattagcgggaca

SEQ ID NO: 2831 - DNA, 372 bp, Homo sapien
agtaagaaaaaatatctctttattcatgttattaatattatttccaaagcaaggctgttttaggccagttagataaaaaggaatgactttcagtcactaaaattaatgatttgctctatattggaaaatacagaaatggtaccacaatcctgttttcaattttatgaggatctctgcttccttgctacattgattccttcctcttagatttgtggtcctctaatgaagcacagtcacacgggatgcccgtgaatgtaactttacagacacaggagaagaaagtgagtctagaagtttttggtctggtcaagatgttgatcttgctgatttcatgacttttgtagaaatcaaaggtgctgaggcatttttatc

SEQ ID NO: 2832 - DNA, 442 bp, Homo sapien
gtaggaaatgtatatttaatcattctcttgaacgatcagaactctaaaatcagttttctataacaacatgtaatacagtcaccgtggctccaaggtccaggaaggcagtggttaacacatgaagagtgtgggaagggggctggaaacaaagtattcttttccttcaaagcttcattcctcaaggcctcaattcaagcagtcattgtccttgctttcaaaagtctgtgtgtgcttcatggaaggtatatgtttgttgccttaatttgaattgtggccaggaagggtctggagatctaaattcagagtaagaaaacctgagctagaactcaggcatttctcttacagaacttggcttgcagggtagaatgaagggaaagaaacttagaagctcaacaagctgaagataatcccatcaggcatttcccataggccttgtcaactc

SEQ ID NO: 2833 - DNA, 139 bp, Homo sapien
aatttgctgtgatccaggggtgttcaaatacttctctgagcattggcctctggctgggattatgcgtcaacagtcttgaaatgaggtccccggctccctctgggacaaagtcagggagtgtgaattcaacccgtgatat

SEQ ID NO: 2834 - DNA, 122 bp, Homo sapien
ggcacaaactatgaagaccctaaggctaagaaagaacactgtgaaattttcattatatagacattttaaaaatactctgatctttgctgtgctggcttctatagtgtttatggggtggacaa

SEQ ID NO: 2835 - DNA, 331 bp, Homo sapien
ttttttttttttggttatataaacatttaattacatctccatgcattttgattgtgccgtcttcttttcgtattctggagacagtgttttcctgagtgtcaaactttttggaaggcccccaagaggcctggcctggggcctgtggctggccagccgggcagccaaagctccacccaggttctcagcgagactctgctactgaccggctgagactgggcaggccctgtctctcctaagccctgtctctctgtgggcagggcgaggggttggaggctcttgctgatttggagctgattttcacattcctggcacttcctgggcaccccttagt

SEQ ID NO: 2836 - DNA, 261 bp, Homo sapien
ataacatatgaggaacaagacttctcttcccatatacttcatattttagaggacattgttttaaaggcttatgtctcactgtaaaattctgtcagccaaatagtaccaatacgttttcaagtagttctcactgataatttagttgaaccagagatcaaatatttgctcccgaattactactggtaatcaagtagttgaacaaaaaattactaaagcatttccgttagatcagtcaaggacagtactgcatctttttttttt

SEQ ID NO: 2837 - DNA, 402 bp, Homo sapien
ttttttttcaacttttgaagttttttatttttattttttttggtttttgttgttcaaatttcccttttacagtaaaactactgaggtgacggcatatcccgccaccatggcaatatcaacttcctgttccccagaaggagcgattagaaaaatcaggaaggagctgggaactacagcaccagagaggtgaacttgacctctggtggacaaagcaaccatcttggctggtgattgaggtggccaacctggtgcccaacaacagctttgatctaataaaactgagctgggaggaaactgaggcaacacccaattgcacactagagggcaggaagaggtatcagctggtcactatggaaacagtggcctttgctaagtaccactgtcagctagaccagccagtag

SEQ ID NO: 2838 - DNA, 412 bp, Homo sapien
acgtgtctgcagggggcatgttcccgtttactgagcgcgagttctcttggggtggaacggggaccacccgtgcctgctcctggccaggcggggatccccagcagggctggggccagcaagggagtggggccctcaggcacgggtggaggctaggagcagtgccaggacggtgagaacaggtccaggtcctaggaggcagggcgtccccgagaggacctctacagagagaggggtgactcagagcgcccacctccacgcccccagctctgcccccagccctggcctggccgccccgcccaccttgcatgctgaggtctaggaccaggtagccgttggggatgccgccctgtagccccagccccagcgtgtccaggtcgtcctgccgctgccgtgagatccagtcccgcaccgg

SEQ ID NO: 2839 - DNA, 172 bp, Homo sapien
ggggtggaagcgtgatgagtaagagcacctctgctacaggcgtagtccttgactgaactaggctgcagagctccctccccccttcgagggccgaagccagtggggcgcagagaccgaactgagcggctgcatctggtgcgacgactaggacggctgacaggcggcggcggag

SEQ ID NO: 2840 - DNA, 294 bp, Homo sapien
ttcaagtttccaaacaagaatttattctttcttttttaatctttttttctaaaaaaaagtaccaggtacaattttttcctgtttttgatttgctttgttttttcaagtttcagcaaatgcttgttcccctcagcccagccccaggagttaggactgaggctgggtcagagtctggagtggggaatggggtagtttggaaccacatgactgagtttgaggggtgcccctcaccccagctgaggtaggtgggtcagagtctggccaggtgaggggaggcaccccagtgcttggccc

SEQ ID NO: 2841 - DNA, 504 bp, Homo sapien
catgatccaagggtttattaataacctctgccagagactctgcccccagggagcagcctccccatggccgtggtgcaggtgtgcagcaggaaggggatggcgacacagatgaccacgtcatcgtcttctgagctgtggttattctttgaaagggcaggaggaagtcccactgctctggaggtgtggaagggtgggagtctggtcttcctggaggcggaggtgagctagaaacggcacggctcttccatctgtttcaagtccagcaagtaccataggtgcctgggcaggggcctgaaagcgccgatgaatccctgcatgatctcatcgtcctccaccaggactctggccaggtactgcacatcatgctctggatgggggtggtggtgtcctgtaggcggagaaacaggaattgtcgcagtcagtatcgggcagcgtggcctcgttgcgcaccgtatagttgatcttgaacttcttgtgattctcagtcttctctccgaggagctt

SEQ ID NO: 2842 - DNA, 115 bp, Homo sapien
ttgtggtttccttggactggaggatgttacagctgatgacaatcgtgacaggtccatcaggcagttcctgcatgatgttccaggactcaaagcgttctaaggcctacatagcagt

SEQ ID NO: 2843 - DNA, 416 bp, Homo sapien
tttaagcgccacaaagttttatcccagattggaccatttaaccccaaccatcaaacctccacccctgacagaactccacaaattccatgcttatttgttgactatgtacttcttagggagagttgttcttctaataaaaactaagttccattagtgaaatctttagaaaaccaaaaaggttatttttaaatcctcagtatttctgttcttggctttgtttattccttctagttaccacagctaattaggcctttgacttgagagtttgttcgcctcaatctggttctgcctcagtttttccttactggtaacatatgctatcagtgatttattgcagagaacacagctgactgactacatgtcctgtcattttctttacatgcacgattgataaaacaatgacagtggcacagtca

SEQ ID NO: 2844 - DNA, 481 bp, Homo sapien
gcgggccgcacccgccgagccgtgaaaaaagtacatctcctggaaggatgctttttagctgagctctggtggatgagaggagctagccttgaaaaacttgatactgatggacattgtgtgggccagagcgagggatggttggctatgaccccaaaccagatggcaggaataacaccaagttccaggtggcagtggctgggtctgtgtctggacttgttactcgggcgctgatcagtcccttcgacgtcatcaagatccgtttccagcttcagcatgagcgcctgtctcgcagtgaccccagcgcaaagtaccatggcatcctccaggcctctaggcagattctgcaggaggagggtccgacagctttctggaaaggacacgtcccagctcagattctctccataggctatggagctgtccaattcttgtcatttgaaatgctgacggagctggtccacagaggcagcgtgtacgacgcccg

SEQ ID NO: 2845 - DNA, 436 bp, Homo sapien
aatctgggatataaatgaagaagacatactaatagaactccttgcttttaattggggaaatagggctttaataattttgacctcaactaaaaatgatatgcaatagtctctgtgtgtgtttggaatacattgtgttctcagagatttctacattctcacgttctagtgatttggggcatgggcttaatagcagatgtacagtgtattcctgcattattgtgattccccttaaagcccagttcttgctgtcttctaccaggggctgctgactccagttacccatggaatgcaggacctgggaggggtagccattagggtctttcaaaactctttggatctaagcatttgtctctccttaagtgccaatcacaattggatatggaaggactgtgatttctgcaatgaacccaaacttttagagtaaaaagccaaattt

SEQ ID NO: 2846 - DNA, 337 bp, Homo sapien
ggcggcgcgggtgagaggcgacctgcacccgcctgattgcctccccgcagctgctgctggcctgaggccgagcgtgccgtggtgctccagtacctgagcgcgctgatgcaaggccgcctggtgtgccgcggaccgagcgagaggacccaggcggccgagcgcctgcggcaccgatgctgcccagcttcagcagcttttcctcagtttggtgagagcttcttgggcgggcagacgggcgagagtctcagtggctgggtgggagagaggtggctggccggcctcctgcctgccctcggggtcctgcgcccgagccctgctgctcgcagaataaaccacg

SEQ ID NO: 2847 - DNA, 441 bp, Homo sapien
  misc_feature (1)...(441): n = A,T,C or G
tttttgggtagagacagggtttcgccatgttgcccaggctggtcttgaattcgagctcaagcantccgcttgccgttagccttcctcaaagtgctgggattacagtcatgtgccaccgcacaggctaatttagactaattgtaatctgaaaaacctatccgcgaagaaaatcaaacaatggaaacccatcggtgagttatacacaggaaatcaaagcaaatactccccaccatccaattaacccatgttaaagattagggatactcatagtctaacaaaatacatttttctggatttagaaacctggcatccaccaccccaaccttccaaatgtttcataaaaatataaagtccgaaatgtacctctacattctcaacaggaacagtgtgtggcagcagaaaaattcctaaccaaaaacctgtcagataattatttgagac

SEQ ID NO: 2848 - DNA, 393 bp, Homo sapien
tgaggcatagagaggtttagaaacttgcccaacattacacagctaaccagtggcagaggcaggattccaaaatgtctggccccagagtccatgctgttaaccactctaccaacagttgttaagcagcacccgcagcatcaggaagctggttagggaagtgaattctcaggccacagctggactttactgcatcggaaactccagcatgctgcctagcgactggtgtttagtgagctttctgggcgattctgctagatgctcaagtttgagaaccaatgcatcccactctccggcctctcagatgtggatgggtgtattgatacaattcagaacgctgagaagtgttgactttcagctcagcttcccgctctcggatggcagctgtgcatggtg

SEQ ID NO: 2849 - DNA, 486 bp, Homo sapien
  misc_feature (1)...(486): n = A,T,C or G
ggcttctgtcctgcacaacctccctcacagaacagggaagcagtgacagctgagatggcacgggcctctccccagccctgagcactgtgtcagttcctgccttttctcatcagcagaacagaatccttttcctcttttccttcctcctctttggaattttcctgggacctacagaataaagggggggatggacagggggttttcaaaaggaacatggctcactcagagctatatggttagacgtttctccccttttccctaccttccatggtcctggttggccctggctttgcctactagaaaaccaaaacttcccccctnggggttttgtgcccactctctgagaagttggggctccatcaagccccattctagtcatgtgcccctttcctgtccctaacagtccacaggcaaacaaatggtacagtcataagagcatctgtcaggacccacgccagtagaacgtgcaganaaagcagactacat

SEQ ID NO: 2850 - DNA, 237 bp, Homo sapien
gactgtggctgcccctttacatcaaggacctacggccaccgagggccggccctggcctttccccatctggcctacctacctggctgccagggaaggaaagaccttgcatgtgggggagggaggaattgggttggaggacgtggggtgggccgccattgaaatcctggagtaaacccaacctggcccagggtgtcctgcagcctgtattccatttaattcaaggtgccattttttttt

SEQ ID NO: 2851 - DNA, 471 bp, Homo sapien
ggccacgcatcctggcctttccggatgtggtcagccttgtcagcactatgtggcctcctgcactgctgatacccgaagcgacagcccgatcctgctcccaccccggccctgcctatgcctaaggaggatgcgcctagtgacccagcactgcctgctcctccaccagccactgctgtacacctaaaactggtgcagccctttgtacgcagaagcagtgcccgcagcctgcaacacctgtgccgccttgtcatcaaccgtctggtggccgacgtggactgcctgccactgccccggcgcatggcgactacctccgacagtaccccttccagctctgactgtacggggaatctgcaccctcacccagtcgcaccctggaggggacatcagccccagctggacttgggcccccactgtccctcctccaggcatcctggtgcctgcatacctctggcagctggcccaggaagagcc

SEQ ID NO: 2852 - DNA, 476 bp, Homo sapien
ccacagtaccaggaatctcggccctactcatgagttgtccgcggcttggttgtaacatccctgcaccacttgcagtgacaaattcacctgaagtggaggatgacgtgcggccctgtttctccctctaagttctcttagctatgggatgacatcttagtctctggtggaggaaaagtgggcgacatacaccaaaaattggggctttctggtacttcacagcacagccatttgtcgtactttgtcatcactgtggttttctctttcctttctcagctctttgtgacgggagagtcggtcatcctattacagaagctaagccatagtccaacattgtttggtcaccatgggggtccttttgtaactgccttatgactcaacattaccaataaagtgatgatcctggtctgcgtttatacatacgcttgttcggtcctgttcctgacacgtgggttgagtcccacagctctgtgtgggga

SEQ ID NO: 2853 - DNA, 152 bp, Homo sapien
ctaaccagtcatcttgtctgcaccaatgcaaaggtttctgagaggagtattctctatccctgtggatatgaagacactggcatttcatctatttttccctttcctttttaaaggatttaactttggaatcttccaaaggaagtttggccaat

SEQ ID NO: 2854 - DNA, 472 bp, Homo sapien
atctttaacctgggactttatttgtacaactaagacatttgtataaaacaaacagaaaatgaaagaagcatgaagccatgggagagtagaaatgggagctgagaaacttaagagtaaaaatgggagctgagaagatgaagtgaactcctatcctcaaacccgcaagttcccggccccaaaggaagccctcagagactgatatgccttctgggaactggacagcccctctcagcaagcctcattcccaacctgcacctggcctctctgcgaggaaggtcagccccagcctgggaagaccaagagggagccagcccagcatcaccccatgaaagacccaggacccaatgttactgccctaccagggcaaagcaacctgcaaagatggtggctaaatggccaccactaaaggtcccagttcagggaaagcacaggagccggaagcggtggcatgggcagcatttcttactcagtc

SEQ ID NO: 2855 - DNA, 469 bp, Homo sapien
ttagaatgacgacagcccctggggttggggcaggcgtagtgtggccacatcatccaagccctcccagagacacaaataggcttttttgctctaaaaataaataccagcccttttttggtcacaaatccagcatctcagcagaaaactgcctgacatgaaaagtcccctgaggaactgcatctgcgtttcaggggcttttcattttttctcgttttttaaagtgtagattgtgggtgcttcctagaggcctgccttcttctggaactggaagtgggctatcaccatgggcaagcccttgggtgcaggctccccacctgcctgggaactctggcagctctcctcagctccttgggcttgagcagctgcaactgccccagatttgctgtggaagcaggggctagcctggcctcaccagggctcccggggcctgcagttgatgctcaggagttcctgggctgctcttgatcct

SEQ ID NO: 2856 - DNA, 474 bp, Homo sapien
aacgagctggcggagtttgcccgcttacaggaccagctggaccacagaggggaccaccccctgacgcccggcagccactatgcctaggcccatgtggtctgggcccttccagtgctttggccttacgcccttccccttgaccttgtcctgccccagcctcacggacagcctgcgcagggggctgggcttcacaaggggcagacgtggagggaagaggatttttataagagaaatttctgcactttgaaactgtcctctaagagaataagcatttcctgttcttccagctccaggtccacctcctgttgggaggcggtggggggcaaagtggggccacacactcgctgtgtcccctctcctcccctgtgccagtgccacctgggtgcctcctcctgtcctgtccgtctcaacctccctcccgtccagcattgagtgtgtacatgtgtgtgtgacacataaatatactcataagga

SEQ ID NO: 2857 - DNA, 279 bp, Homo sapien
  misc_feature (1)...(279): n = A,T,C or G
cgcctacgcctactaccagcagctgaacacggagctcaaggagaacctgaaggacaccatgaccaagcgctaccaccagccgggccatgaggctgtgaccagcgctgtggaccagctgcacaggagttcactgctgtgcagcaacaactcacaggactggcgagacagtgagtggatccgctcacaggaggccggtgcgtngatggtcccagacagctgctgcaaacggtggtggctctttgtggacagcgagaccatgcctccaacatctacaaggtg

SEQ ID NO: 2858 - DNA, 396 bp, Homo sapien
  misc_feature (1)...(396): n = A,T,C or G
tacgtgtctgcagggggcatgttcccgtttactgagcgcgagttctcttggggtggaacggggaccacccgtgcctgctcctggccaggcggggatccccagcagggctggtnccagcaagggagtggggccctcaggcagtggtggaggctaggagcagtgccaggacggtgagaacaggtccaggtcctaggaggcagggcgtccccgagaggtcctctacagagagaggggtgactcagagcgcccacctccacgcccccagctctgcccccagccctggcctggccgccccgcccaccttgcatgctgaggtctaggaccaggtagccgttggggatgccgccctgtagccccagccccagcgtgtccaggtcgtcctgccgctgccgtagg

SEQ ID NO: 2859 - DNA, 330 bp, Homo sapien
gggtgtggaaacatgtgagtgtattatttatttttgaataaataatacaataaaatataaaacatacacttattgtggccctctgcacaagcaatctggttgtgcagagtcttggtgtcccctgctagtcttagtacctgtatagagctcttcagactgggtgtcgtgttgcagaggctagcaccattcctgatgtcaccctgggtgagacgtggtcctcagaatccagatttccttttttgtctttttccttcttccacatgttctaagaaaacatagatttctggccaggcatggtggctcacgcctgtaatcccagtactttgggag

SEQ ID NO: 2860 - DNA, 300 bp, Homo sapien
ttaaatgaggtaaatttccatgtattaatgcaagaggaggtccagaatacaatgcaaagtgaaaaaagttgcaaaacagtacatataatatcccatttcatttaaaaaaaacctatatacaaatgtgtgggtattcatatatgtatatatgtgtatattaatatataaacacaaacagaacaacatctgggaagacacacaccaaattaagttattcttggagaatgggagtggtgagagggactaaggaaaaatctttcactttttactttacacatttatgttttgcttgaattttgt

SEQ ID NO: 2861 - DNA, 276 bp, Homo sapien
tttttttttttttttttttttttttgttttaaaaaagccattaagcttaattgaaaaaccaagtatagagtacaaaactgcaacaagagccacagtgattccatggcatccagaccccgagtccttcatgcagagctgcagccggtcagtggaagtatcacattggtgtgctgtgtggacacaagcatgtctagcctggggagtgggttgggagctgcatttgggtcctgctgtcgcttttattcttgaacttgaacaggcggcagaatatcaaga

SEQ ID NO: 2862 - DNA, 297 bp, Homo sapien
tgctttaaaatccaaggcctttaatttagtttttggtaatgaccataaatgccttcacaaaacctctttttcactgtaaatagaaggcactaggcattacataatacccttaaagcagtgattcctcctgatgctggtagagataaaacatttaatgtcagggtttacatagtaacaaattcttcttaaaaaaaaaaagacaaatctaaaaatcacgcaccaaaaattatcagtcactctttcccaggttcccagtgcaaatttacatcatttttacaagtacatagtttgaaatta

SEQ ID NO: 2863 - DNA, 214 bp, Homo sapien
tcaaggggcttaaaaacaagcccaacttttattttattcacaaattggcaatttcggtgaggcttagtccggagggctcatcttgctccactccattttggtcagctggggcggcccaaagcctgggccaggagttgtctgaacctcattcactcatgtggctggcacttgacactgctgttggctggggcttcagctggggctgttggcaaga

SEQ ID NO: 2864 - DNA, 400 bp, Homo sapien
gacaagagtttcacttttgtcacccaggctggagtgcagtggcacgaatctgactcactgcaacctccgcctcccacattcaagcaagtctcctgtctcagcctcccaggtagctgggactacaggcgcacgctaccacgccgggctaatgtttgtatttttagtagagacagggtgtcgccatgtttgccgggctgatctcaaactcctgacctcgtgatccgcccgccttggcctcccaaagtgctgggattacaggcctgagccaccgcacgcggcccccttcgtgccttttgaggaagcagcagccttggtcatggcccataagaactcagacttcaactgaaaaaagtggctcttccctacacaacagtccaggaagctggatattgggagtgtg

SEQ ID NO: 2865 - DNA, 152 bp, Homo sapien
ttcaagttctttacatcatttggagtagtaagttgttagcagctctgtgctccaagtttttgagtcagagatggagacatccagccccacctcactgtgtcaggtttgaagttcggggagggaactatggacagagtaaggacaggagtcac

SEQ ID NO: 2866 - DNA, 348 bp, Homo sapien
  misc_feature (1)...(348): n = A,T,C or G
gttgtttggtgtgtatggctgattgtgcgtgttgtggtcgttgttgtgcgcagtgttgtgtgttggtgtatggtgcctgttgcggatggtgtgtgttgatgtgtcttggttgatgtgtttagatgtagctatgtgtgtgttgtgtgtgtgtatcgagtgatttgtgtgtgtgtacgtaatggttgttgtgttgtggtgtgtgatgtagtgtcagatggtatgtggtggtgtatggaggtcgcgtgttgtaggtgttctgtgtgtnaggttatgttgtgtggcttgtgngtgatgtttggcgcgtgtcgtgtgtgtgcgtttgtgtgtgttgtggttcgttgtggtgtg

SEQ ID NO: 2867 - DNA, 356 bp, Homo sapien
acacaacaatagtataattttttttgtacaagagcacaagatgaaagcattaaactcagcaaaggctttgatactgggagcccagtttctaatatggaagaagttcatagctataagggatcctggtacatggattgatacttatggcacaagtgaatcgcagggaagtttttgaatatcttaagacttgggcacacttatcacgggtcttattggacctattggatgtcaccactggggatcagaacttatcaggggcagagcatcaacgtcatcctatttgcttcttggttattaacactgggtgatccctcgggaagtagtggaaacatgggaaggcgaatgtaagacttatt

SEQ ID NO: 2868 - DNA, 228 bp, Homo sapien
tttattccctcacatgggtagttcacatacacaacacagaggcacgggaaacatggaaaaggacaaacaccagacttcagaaggattcaaggcctcacggtgtatgacgagagaggatggtttctcaatctgcacctcactagggcctagggtatccaaaaagcaaatcccaacacagccttaaaactcatcaaccattgaagaaaccacactaggtgtcagtattag

SEQ ID NO: 2869 - DNA, 114 bp, Homo sapien
aataacttcatatcattgtgcggagcgggacattatcaagactcaggacttcaggagatgcgtcatgatgccggcagccttggtgaacgtgcatacattgaagagcaatgactt

SEQ ID NO: 2870 - DNA, 172 bp, Homo sapien
tgcgagatagtaataggatcgaagtgctgatgttattgttgagttgttggtatgcgagagtagtttagataataataaatgttaatatatgaaaggttatgttcaggatgaacgaaagaactgcttatatacatccttagagggtaatagaagagtttgcaaagattatacg

SEQ ID NO: 2871 - DNA, 136 bp, Homo sapien
ccccctgtcgcatttgaccttgtacttacgagccgctgcgttccgcattgccagacgactggtgcagtgtgactgtgccatgcagcatatgcggagcagcgagcatcagcggtgtgaggccctcactggtgctcca

SEQ ID NO: 2872 - DNA, 317 bp, Homo sapien
taaaagttttattttagttttaattgacacataataattgtataccaaatagcaatttttaaaaatagggagacccaagagttaaaaacacaaagtttttccactgttctttgtaaaatttctcatactgaggaaactgtttttataaagcaaccatgtatgttgccattacagtgtactgcatacttattagacaattgacaggaaaaacaacttttggcacaagaatgccaatttattccttttttggacacataaacacaaaatatccctgcaggccaaaaaaaattgcaaaatttaaacgaccatcatcttat

SEQ ID NO: 2873 - DNA, 420 bp, Homo sapien
aaaacttttaaagaagttgtttattgccaataattaaagagctcaaagggaagtcatttaaccatgagattgccaaatagaactctacaacagctgattcaacctttttaaaattttccctggggagagacttcactactatctctgctgatggactccatagttctcatactttacctgaaagttcttcctaacatctgatctcaacctttcttgccggggcattggcctgttttcccagccaagccttgtttttgtttttgaggaacgaacagcttttttgggtacagaccaggagtccatgggtcttgaggacctctgtgtatttatcagttttcttctccacattctttttggcctgtctccatagacttgtgagccccatgccttgtttaagggggaaaaatggcatttccctac

SEQ ID NO: 2874 - DNA, 381 bp, Homo sapien
aagggtagtacagctttgagtatacttttattagatcagagaaatttggggttgttagagcagcataatccagcctatcctgactgattatccccacaggcatagaagggactaagttgctgttaaccgacggaagcagaattgtgaacccagaagggccattccctaggacatcttgacctcagtgatgtacattctccaaagactgtcctgaatctatctacttctcctaactccattccctacccctctgaccctccattccagactttctcctggatggttatgtcagggaggaaaagcttttcctctgccctcttagattcagcatctggggcctgcaaattaaactgacaaaagacaaattagcaagagaaacgg

SEQ ID NO: 2875 - DNA, 118 bp, Homo sapien
gcacgcggtcaagccaggtctggttgggctcaaacaggatgacgaaggtagactcgtagtgaacatgccggaacttcaagtcgattatctttagtagcttcttgtctagggcacgcac

SEQ ID NO: 2876 - DNA, 210 bp, Homo sapien
taacaagcatggatagtattcttatgtaaaggtagtatcaatgagaaagagctggaagacagacctagctgtctgtcaggtagaatgagggtgaaggagatctaggatgcttcaggcattgcgcttgaacttaaaaaacaggatcagcaggccctgacttcataaggcccataaatacaaatgactagctccctttgcccaaacccatgt

SEQ ID NO: 2877 - DNA, 143 bp, Homo sapien
ttgtttttttttttgagatggggcctcactatatcgcccaggctggtctcaaactcctaggttcaaaggatcttctagcctcagtctcctgagtagctgggactacagtgcgtgccaccatgcctttttttttttttttaatg

SEQ ID NO: 2878 - DNA, 203 bp, Homo sapien
cactggataaggcggacatctttattcaagccagcaaatgacacgccaggagcccaggtgagccggagtgctctgcccagcctggctgcagttgttggccagagctcagagctctcctgggcctggcagatggctctgctgcacttctttttgggactcagagactaaattagaaaggggtgggggtagccccaggagaaccc

SEQ ID NO: 2879 - DNA, 423 bp, Homo sapien
tgaattgtaaatgtattataaaatagatttttaaagtaaaaaagctttttttttttttttgggtcagcactgacaatggcctcatatagagctcttcttcagcacattcaatacttaatcttatcaattttattatgaagttaattaaactaatatgtatcaaacgtcatattaattatgttgaatactagctaagagttaagaaatgtaaggcatgtgtcctatcttcaaggagcttaatatagttggggaggcaactataaagaaatgagatgattggttcaacttatgaaatgagtcatagttttcattccagaagtatgactctaaacttaaaacgtgtgacaataatgaaaaataattcctaacatggtacataattatcaaatgctgtgagttcagaaaagatgtttctgagtaatt

SEQ ID NO: 2880 - DNA, 388 bp, Homo sapien
taacaaaaaaaatatattaataaaaaagttcaaaaaaggggggggattgtcatctcctttggggtgcgatggcttcaaatccaaactgaggctctccgggtggtaaggatgtgcgaggaggcctcttgaagaactccaggcctatcatgctgtctctccgctaaagccaggaagcgcattcacttccccgacgctgaccccaggcatcctgctgggcaccatcacgctgatcacggagctctgcgaacgaagccctgcagccctcaggcacttccgaaaggtgggctggtgaaggggcaggccctgggctccagctggtacacatcctccggactctggtgacaatgggatactccacagaacacagcatatctggagtcagcgaccc

SEQ ID NO: 2881 - DNA, 346 bp, Homo sapien
tcaaaggtttgtttatattattaacaacatgaagatcctgtagtgagggagggtgtttttcccaagtcattgcaaaagactcattaaagaccagcttcgatgccatttagaaaccatttcccatcaattccagtgaaacattcttgaaatattagaatcctctttaccagggaaaataaaatgtccctttaagcttacaaactattagggaagaagactcaaaaataactaaaatgtgctacaaagtgaaaatgtttttttcttacaagaaactgatgagatgagttgaaatatctgatgatgaaaatccagccgaggaacaattggagaaccatcgggctagatt

SEQ ID NO: 2882 - DNA, 153 bp, Homo sapien
cccgagtgaggacagaaaccccttccccgtcaagctccggtccacctccctctcgctcaaatacagggatggcgcctctcaggaggtgaagggtgtgaagaggtacagtgccgaggtccggttagaaaggtcgctgaccgtgctcccgaagag

SEQ ID NO: 2883 - DNA, 112 bp, Homo sapien
gatgagtcgctggagtatacacagtggcggtgcaaccagctgacactttttgcacgacccctgatagatgccagaatgtctggttcatgaaaggtcacctcaagaacggcag

SEQ ID NO: 2884 - DNA, 454 bp, Homo sapien
cctcagggaccatcttcaaggacgcacccagaacctctagctggccgacactgtcaatctggcccctctaggccgacgaagagttcagtcccaatgggcctccactaggggaggcataaggagcgccccacagtcatgctgtttccctttaggaatctcggctcaccaacccaggtcatatctaagcctgagagcaaggaagaacatgcgatatacacagcagacctagccatgggacaagagcagcctccactgggaagtctaagagtccatgccagaccctggggggaagggctctgaaggagaacccagttgacttgcctgccacagagcaaaaggagtgagtggaacagagttgcttcttactaggagcacattctttgcctgccttcccttcatcctatcctctttgcttgctctcacctcaggaattgcttggattgctacatggacc

SEQ ID NO: 2885 - DNA, 424 bp, Homo sapien
aattcggaacgacggggctgatctcatttctgatgttgagggctgtttggctctgtctgtatagcttgtaacaggagccttgggctaggggctggggaaggaaagccgagctggcattcgttctctggactttttatgcctgccatacctgctaatgctcctcgaggtgcatgagcaggttgctgagccagtggtgccccgtgccctccttcccagcactatcatgtgtcacgtttcgcggactctgcccctacatctcagctgaatctccagggaggctgcagagcatcgtggagaccactttctgcctcggcctttaaatgctgactcacctcctctcggaggaggcgatcctgtcttcacgggggggtcccggtggcctccagacgtagccatttcctgacatcaagatgttgaatgtaat

SEQ ID NO: 2886 - DNA, 358 bp, Homo sapien
ggctcacaagtgtgtagttgtgcgagatcgcgcagtcgcgaagacctgccttctcattagctagactagcaatgccgtgtccgggaaagtcatatcctaccagtgtttgacaactatccagccgttatgatgctgtacagcaagccagtgacactggaggtgtgatacactggtgggcaggacggattacgacgtctcaggacgcagttttatccgatagggacgtttcataatcagctactcctggtgagcgggcctcttatgagaatgtatgaccaagtggttcaataagtgcggaataattgccaaagacaccactcgtcctggtggtcacaaagtgaacctgcggcacgataag

SEQ ID NO: 2887 - DNA, 461 bp, Homo sapien
attcggcaccaggagagcagaagccagggaaggccgcccgcgccgaagccctgggcgccccagccgaggaagagccgggaaagggcgtcgcgctcatgtagctcacttcgagtgcggaggtgacggagcccccgttcaacacactcagccactcgaagtggcacagttgaggcatcgtgaggggtgatgcttcgcagccctggcacctgggtcgtccactgcggccccgtggtccagcaggaagcggacaatttctgcagaccaggagacgtaacccagctcccgatgccccgccagactgactcttcgccccacgtgtccaccaagggtctcactccagcctgggtgacagagcgagactccatctcaagaaagaaaaacaacacaacatggatggtgcctggctcaaagtgagggctgacggctgccaacctccaatggtggtctctgccatcagcact

SEQ ID NO: 2888 - DNA, 118 bp, Homo sapien
cacgattgggcagcgtgacatgcgtgcaggcctcacggctggatatgcactgcgttctgatcgcaaggccgtccgtgaactgctgacgagaggtgtgattgacccagctcatctgtac

SEQ ID NO: 2889 - DNA, 193 bp, Homo sapien
cgtctacttctagcgttttttcctagttttggctccggccgtatggttcctatcttaccccgactgcccgcgctcacagtcctgcttccttgtcttttgcctcatatcgtcaggtagctagtttcggttcagctgctcctcccagacagtttgatgcatctcaattcagccaaggccctgtgctggcacttgt

SEQ ID NO: 2890 - DNA, 291 bp, Homo sapien
tggagtgcaccggacaccatgaagagatactccatgtacctgacacccaaaggtggggtccggacatcataccagccctcgtctcctggccgcttcaccaaggagaccacccagaagaatttcaacaatctctatggcaccaaaggtaactacacctcccgggtctgggagtactcctccagcattcagaactctgacaatgacctgcccgtcgtccaaggcagctcctccttctccctgaaaggctatccctccctcatgcggagcaaagccccaaggcccagccccaga

SEQ ID NO: 2891 - DNA, 343 bp, Homo sapien
gagacagggcagctgctagagcacaagttggactacatcttcttcacagggagccctcgtgtgggcaagattgtcatgactgctgccaccaagcacctgacgcctgtcaccctggagcccgggggcaagaacccctgctacgtggacgacaactgcgacccccaggccgtggccaaccgcgtggcctggttctgctacttcaatgccggccagacctgcgtggcccctgactacgtcctgtgcagccccgagatgcaggagaggctgctgccgccctgcagagaccatcacccgtttctatggcgacgacccccagagctccccaaacctgggccgcatcatc

SEQ ID NO: 2892 - DNA, 237 bp, Homo sapien
agttcggcaagaggaaaaggtttacaagtaaaaccagtcaaaagagtagtgaaaataaattccttccccatacatagatcattttggtctggtcaataattcaactgtcttagataacaaaactgtaaaataaaaacttttaaaaagcaattttaaagattgttgctggaaagtaagttttttagtttacattgaacagaaataggcaaatgtctcatattgcaggtggcttaaaaa

SEQ ID NO: 2893 - DNA, 225 bp, Homo sapien
aggatctggtgcccagcctctatcagagcttgcctacctggcaaagctgcctacccttcaagtgggaaaatataatccactgtttaacaaggctcaccctctccaccctgtcctaacgaccttttgtgaatgtgctgtgatattttcttgctcaatagcaaggtggtagctctgctttcaatttaagaaagtggaggctgagggcattgtatcaatactgttgca

SEQ ID NO: 2894 - DNA, 342 bp, Homo sapien
aggatctggtgcccagcctctatcagagcttgcctacctggcaaagctgcctacccttcaagtgggaaaatataatccactgtttaacaaggctcaccctctccaccctgtcctaacgaccttttgtgaatgtgctgtgatattttcttgctcaatagcaaggtggtagctctgctttcattttaagaaagtggaggctgagggcattgtatcaatactgttgcaactccaagaagttttccttgtaaaattaaaggaaagatcttgttattgattaaccattttcttatgccttgctattgacatattcatgctcctttctacgtctagtggctgaaaatg

SEQ ID NO: 2895 - DNA, 470 bp, Homo sapien
ttcatatagaaaaacaggctgggatagaaagatgtcaggaatgtgtgtcagtgagagattgagattagctacaaatagtgatggctcaagtaagattaggcttcccctgttatgaaatgagaagtgtggagggggcagtctgatgccattagggattcaggttcctcctctccccacatttttttttgtccccacattttttttttctgccatgtgcctctggcctcatcatcacaatgtggctgcaggagttccagccctcatggccatgcctgctccacgcaccagggaagagcaaagggggttggaccctgagtcagcctcagccagtgaacaccttctgctcaagttctgttgctcatcactttgctccatggctcacccctagctgcaaggaattctgggaaatgtaaagtgatttactttttttcaagttaaagtttttcttaaagctgtgcacatttggacta

SEQ ID NO: 2896 - DNA, 513 bp, Homo sapien
tttgagaccttttctcaaaataaaataaaataaaatataaccttttgggcaggcatggaaaggggctggagagaataagaggaaacagagataagccccctccctgagagcacaagggactcatccccagacatggcaccacaggcaaacagacactgtcacaaaactagcatattctctttcctagaagtcctttgttttccccaagtgccctttcccccaaccttttgttggtttacgagctctcaattctaacctcctagtacacgaataaaaatgtctatcggggtggtggcgtgacgtgtagtcccaggtacttgagaggcagaggtgggaggatcctctgaccataagagttcctgaccagcctgtgcaatactgactccatctcaaacaaaaaacagaaagctatacaactccgtttctcttgctaatttgtcttttgtcagtttaatttgcaggccccagatgctgaatctaagagggcagaggaaaagcttttcctccctgaca

SEQ ID NO: 2897 - DNA, 534 bp, Homo sapien
caagttgacgtcacccgggagaacctggagcaggaaattgccgccatgaacaagaaaattgaggttcttgactcacttcagagcaaagcaaagctgctcaggaataaagccggttggttggacagtgagctcaacatgttcacacaccagtacctgcagcccagcagatagtgggcacctgaggcggagtctgcgtggagaggggcggtgctgccagccctaagtgccgtgtgggctcccccaggggcacgtgtggctcctgccccctgccactgccaagagaatgaagcacccagtctcgtaccattttgagccctccagcactacttattttcccccacctttgcctgctgttgctggaagagctggctcatacccccaaaggacactttcagcgacacgtatggacagcatggtaccaaggagttaagttgaggctgtttccagctttctctggttcatttgattgcttgataaggcctcaggatctcagcattgcacaatgcctcatggaagcctttgagggtatcacac

SEQ ID NO: 2898 - DNA, 242 bp, Homo sapien
ggtcattgaaaatatacagtagtttcagacatcacatgggtttgggcaaagggagctagtcatttgtatttatgggccttatgaagtcagggcctgctgatcctgttttttaagttcaagcgcaatgcctgaagcatcctagatctccttcaccctcattctacctgacagacagctaggtctgtcttccagctctttctcattgatactacctttacataagaatactatccatgcttgtt

SEQ ID NO: 2899 - DNA, 352 bp, Homo sapien
gccatcagcttagttagccattgatgcaaatactagggaaagactaggaggatgtgccagggttgctactaaggactaagtgtcgcaccaaggtttgccttttgtatttgcataaagaaaggagttggagctgggtgcagtggcttgtgcctgtagtcccagctacttgggaggctgaggcaggagggttgcttgagactagcctaggtaacatagtgagaccctgtctcattaaaaaaaaaaaaaaaggcatggtggcacgcactgtagtcccagctactcaggagactgaggctagaagatcctttgaacctaggagtttgagaccagcctgggcgatatagtgaggccc

SEQ ID NO: 2900 - DNA, 256 bp, Homo sapien
gttttctttgacctcaagattgacaatgaaagtgggttctcctggggctacccccacccctttctaatttagtctctgagtcccaaaaagaagtgcaggcagagcatctgccaggcccaggagagctctgagctctggccaacaactgcagccaggctgggcagagcactccggctcacctgggctcctggcgtgtcatttgctggcttgaataaagatgtccgccttatccagtgaaaaaaaaaaaaaaaaaaac

SEQ ID NO: 2901 - DNA, 513 bp, Homo sapien
tacatgaagagtgacagtctaaattgtttgaaggaaagtaaaatgaacaacaaactagaatcagcaaagaggaccctgacaatatcagaaatgatctgctccttgagatcatagcactgttcctgatttgactccctccaccattatttattctccccacacttttagtttggtagggaaaaaaccccacagtttctgtattttggaacagtgactgtgcagccaaactccctatcgctgaaaggtttctggtggaaaataactcatagatcagaatccagcctccttgaaaaagtaaaggcctaggtagtaacttgctcaacattacactgccagtttttgatagaattaactaccttaatttgttagaattgagactaacacccgaatctcttcattctaacaatgctttgtagcttctaaatgatcccacacggggtttttcaaggtcttcctcctccccaatcccttaattactcagaaacatcttttctgaactcacagcatttgata

SEQ ID NO: 2902 - DNA, 296 bp, Homo sapien
ggcgccatgtccgttatgatctttggaacctcaagtacttgcaccgtttcacctggtcccacctcagcgagcacctcgcctttgagcgccaggtgcgaggcagccgttgagagcggaggttgctcaagccaagcgtgagaccgacttctatcttcaaagtgtggaacggggacaacgctttcttgcggccgatggggaccctgctcgcccagatggctcctggacatttgcccagcgtcctactgagcaggaactgagggcccgtaaagcagcacggccagggggacgtgaacggg

SEQ ID NO: 2903 - DNA, 414 bp, Homo sapien
acagcagtgaaaggtcaccccacctgcaggaaggggtcgctgactccaggatatgcgtgtgttcgtgtggaggtatcccagttgtcagccggagtccgggaggatgtgtaccagctggggcccagggctgccccttcaccagcccacctttcggaagtgcctgagggctgcagggcttcgttcgcagagctccgtgatcagcgtgatggtgcccagcaggatgcctggggtcagcgtcggggaagtgaatgcgcttcctggctttagcggagagacagcatgataggcctggagttcttcaagaggcctcctcgcacatccttaccacccggagagcctcagtttggatttgaagccatcgcaccccaaaggagatgacaatccccccccttttttgaacttttttattaatat

SEQ ID NO: 2904 - DNA, 330 bp, Homo sapien
gcgccatattccagggttccatgagtccctccccaccgcccggcgtttttttctcattggacctttctgcaggctcctcccaccggtcttcgtgccgttttcccgggaacttggtcgcgcccccatgcgtacaggctacacacggcggctgttcatctttgccagtcccttccatcccgctgttcatccttgccagtcccctccatcccttttctggtttcttaggggcaaaggatcgccgatgcactcatgatgcttaggctggggtgtaaggttcacccccaaccttcatgcctcactctctgttcatgcagccctgccctctgagct

SEQ ID NO: 2905 - DNA, 476 bp, Homo sapien
aaaatatagtagggggactaaggaacatagaattttattagcatatgtgatttacccttatctttgtttctaatttaaagaaacaatttcagaaagtgttagaagaattctatgtttaataatgaatattgttgagttcaaaatattctcatatacccagatttacagagatgacacagtattgaaatggcaggtgggctctgtaagttattttggattaatgacattcagggtctttgcagtggggacttcatgttgcctctcactcattcctcatatgtcagagtcttctgtctatatgcacatgctcaaagtccatactcagtaggggaaatctagccggatggttctccaattgttcctcggctggattttcatcatcagatatttcaactcatctcatcagtttcttgtaagaaaaaacattttcactttgtagcacattttagttatttttgagtcttcttccctaatag

SEQ ID NO: 2906 - DNA, 439 bp, Homo sapien
ggaattctgactccttccaattcccctgcaacaaagtttgtaccaggagcatttggcgagtgtccagcaagatgtgcccgtggatgtggatctccccaggccctgcccttcccgcaccctcggcgggcgtcttaccagctcccctgcgcacgggccttttctccgccgtcctgggctccttcctgggttcccgctctcccgggccggcgtcggggggcgcgggctggtgcgggacgtgaagctctgcagaagcggcttccggggcaggggcggcttggagctgagcgctcggggggccgggccttcccctttccttggtcgctgggggccctggtgcctcgaaggcgggggcgtcccgagggacacttctcctccttcgggagcacggtcagcgacctttctaaccggacctcggcactgtacctcttcacacccttca

SEQ ID NO: 2907 - DNA, 284 bp, Homo sapien
ctggccacgggtgtacctggctgagtcctgtggccgcggaggcgagctaagcggctcggattatcctgggcagaccagagacttgaccagctaaacacttccgtcggtccggggcgtggacggggccagatcagcctcctgctctcccgagtcagggccacggaaaggcacaaatccatccgtgcgactcctggtacccagaccgggagttgtctagtcacgcgcggtccgtgttgggcgagactgaggagccggcgtccctgccaacgactcggccccgggac

SEQ ID NO: 2908 - DNA, 243 bp, Homo sapien
ggtttcttgccagcccctccgctcccttccatctctagcctctgtcctgtttagtttgatacgtcactgcagtaccttaagaggtgactcttaagaatgcatcccctcctgattcctcagctggttcacccttgaggttatttgcaaaaagaaaaggaggttcttgagggcaccgattgcgagcattctggtgcctggctccccgcctgtgaagcgatggggtgctcagagcagcaggcaggt

SEQ ID NO: 2909 - DNA, 396 bp, Homo sapien
ttctaaaaactgtaggcttttttattcagttaagaggtagacaaatgaacatggaaggctgtcccatttaacttgcccaaagttcacattccacttcattcatccatcccacactgccagaaatcttaaagaaataaccaagattgccaacaggctttttctttcttacttcttcttagcaataacagtcaataaactgcttgcaaaaaagttactaatttaaattttcactgtgttcaaagaacctcatccctctaagaagctcccgaatatgccaatagatcctggcactactgacaggagggcagagtaccaaggactctacttatataagagactacaagggaagttgtagttatatttttgttgttaaatccctgtgcatgtgagggcaga

SEQ ID NO: 2910 - DNA, 461 bp, Homo sapien
atagtttacaaatggttttttcagtcctatccaaatttattgaaccaacaaaaataattacttctgccctgagataagcagattaagtttgttcattctctgctttattctctccatgtggcaacattctgtcagcctctttcatagtgtgcaaacattttttcattctaaatggtgactctctgcccttggacccatttattattcacagatggggagaacctatctgcatggacctctgtggaccacagcgtacctgcccctttctgccctcctgctccagccccacttctgaaagtatcagctactgatccagccactggatattttatatcctcccttttccttaagcacaatgtcagaccaaattgcttgtttctttttcttggactactttaatttggatcctttgggtttggagaaagggaatgtgaaagctgtcattacagacaacaggtttc

SEQ ID NO: 2911 - DNA, 420 bp, Homo sapien
  misc_feature (1)...(420): n = A,T,C or G
tgtttttgtttttataacatgtatgaaactgacatcttctcaaatcttgttcntccggctcttgatgtgtccatcgtccagcgctgctatggacaccacacgtatgccaggcccccccccgcagtccagtctgattctggggtatgcccatgctgtgggaaagaatagggaggcctcccaaatgtatgcgaattgtccccattccgtgggggcacctggcaatgacccgggtggagatggggcatggaggagtaggaagacccagccctatttgactggggagaggaggatctggagtccttcatgcccaggtctggaacccaggttctgaccccagggccccaccctgggctggacaatcagatcccaaaggaatgccaaaggggactcggttgtgagagccgcttaggggccagacct

SEQ ID NO: 2912 - DNA, 402 bp, Homo sapien
gcagacagggccgtcagaggtgatggtgtgcatctttagcaggtggcacaactggcgctgggaactgggggtcccttccctcaggagtccttatggaggcagaccctcacccagtgaggtcacggagcccccggggcgcctggagggaggagcgaccgcaggctctctgggccccgtgactgctgtgactcaggttcctttgcaggtgtgcacagcagggacgccctgactctcgccctctccctggcaggaggtggtccaggccacgctggtggtcctggccttggcatggtgcccatcctgctgcttggacacccctgcacctgctgcaccgccaccgccgccgcctgcgtaggaggcccgctgaccgacaggaggaaaacaaggccgggttgctggacc

SEQ ID NO: 2913 - DNA, 434 bp, Homo sapien
ccatttgtaagctatagcatatgaagctatatatatagcttgtgaaggtttgatctagaacacccagtaacaaatgaacaatgttgcttacctgcttctttgacatcttaaaaaagaaatccaaggaggattgtaaggattgtcttaccaccttagctgaactgtgatgcacaagatttttctatgtgtttggtggaaatgtacctggtttgtacattcacgctaaacagatgataagctcaagtctgatggtttaatagaatgtaagttcatcgtttaaagcttttcctttttaggttggagaaggcaaaacacaggcttgcaagttggaagtatatgaagtcttgacagagtgtgtctggtaaattgaaaagtgtttcaaactatggcagttttgcaatcaggtgaaaatcacctcatgatattcagctgat

SEQ ID NO: 2914 - DNA, 101 bp, Homo sapien
cacagagaacattatagatggtacctgacaaggtgaggcacaccaggccccacccacaacaagggatctacatggcaactatgaagaggggaaattcagtg

SEQ ID NO: 2915 - DNA, 432 bp, Homo sapien
tgttacccatctttgaaatacctgaaacatttttaggtactaaaaacgttcacagattatgtaaaatataaattttgcatatcctacttgagtactattaagttcagttaatccatatgatttcttgtatactaaatcaatgatagtgttgaatagttgattccagcctgtattaaaacatctatttcaatattctctctttttaacccatgatcaatcaagcttactgttgcaaagatctacttagcactcaagagttaacaggacactgtgctttgagcggccacttccatttaaagctcttagcagaccagtagaacacactcattcatgtatactgcttctgaaatttcatctttggagctcacttgctttcagttattaagcattaatttatataaagaaattacataagctatatatataaaaaca

SEQ ID NO: 2916 - DNA, 390 bp, Homo sapien
ttttaaaatatattgaagacaaccagatatgtatttgctactcaagtgtacagatctcctcaagaaacatcaagggactcctgtgtcacatactgtgtttttattttaacatgggtcagggaggcgacctgatcaggggaggtgggggtacacatcaatttgagttgttcaggctactgaaacattaaaatgtgaattcccaaacttttctttttggctttgtcagggaaaagaaaaatatctttataaagaaatctttggaaattaggagaaggaatttcaggtgggtttaagtcagagctagttccccaacagaaagatcatttgaaaccagtttttatcccttctctttccttccctttccctaaatcaaatcaatattaattgtgc

SEQ ID NO: 2917 - DNA, 319 bp, Homo sapien
gctatttataaagaagttatttgctgaaataaatgtgatctttcccattaaaaaaataaagaaattttggggtaaaaaaacacaatatattgtattcttgaaaaattctaagagagtggatgtgaagtgttctcaccacaaaagtgataactaattgaggtaatgcacatattaattagaaagattttgtcattccacaatgtatatatacttaaaaatatgttatacacaataaatacatacattaaaaaataagtaaatgtataagtttttacacattatatatatgtttatattgctactcatgtatctatctgga

SEQ ID NO: 2918 - DNA, 516 bp, Homo sapien
gggatcgctgtaggccctccttcacgtcattctctgtgatcagaactctactgggagaataggattgcccactcttcttacagaacatcttcctagagcttaacctagccagcaccgccagctgcagtccgttcaacccagctcgggcgtcaccgtcactgaggtaagccagggtgtctactgctttatcctctatgaacatggcgggctctgagctgctgttgctgctgtggctcagagggtcagtgggacggctagagtctaggacgtggattcccagggagttgatcgctcgcattaaaatagtcaccattgcctctactggaagcttctcaagaacaatcactcgacagctgctcataatagcagcgttgacctggaaggaagggttttcagtggttgcccaatcagagtgatcgtcgcacatttcacgtgaggaatgaaagtgtcctgctgagaattattgtatcgattaatctcagtaagtagtgggatgttctttgttttgaaaaggtc

SEQ ID NO: 2919 - DNA, 349 bp, Homo sapien
cctgccaggatttggttgtttaaatataaatctgatcacccccctgcttagaacccttctgctttctattacccctcatttaaaatgtaaactcttcaccttggtttatgagaactggttcttgccttccccttgaacctcattaaatggtgatttcttgctaagctccagcccgagtggtctcctctcagcttctaattttgtgctctttcctgcccttttcctgggccttctcagctctccacccccaccactcttgactcaggtggtgtccttcttcctcaagtcttgacaattcccgggcccttcagtccctgagcagtctacttctgtgtctgtcaccacatct

SEQ ID NO: 2920 - DNA, 275 bp, Homo sapien
tacaaataataatccgtgtatattgtcaaaaggaacattttatcaaaaggtaggattgtagctaaggttggcttgccttcttccctcttttattcaacaaacatttaatgaaggcccactatgtgccaagcacttggtacatgatggtgaataaaacaaacaaggtttctgccctcatttacagcctggtaggggagacagaaatgaacaagtaaaagtagcatatatataaactgcaataaatgcaatgaggggaaaagacaagatgtggtgac

SEQ ID NO: 2921 - DNA, 425 bp, Homo sapien
tcacctccacagctgccccgcacacacgctgctgctcagtcctgagcacaacggactggtgagagtccacatgtttttctcagagggaccaacatacctagtactgtatgagttcttaaaatactaaagaaagctagaagcatcaaaggggaattaaaagttgccatgtttctcaaacaatagtcatgttaaaggctgttggaacaaataattacagattacatgaaaccacatatggtgacattctctgcatagatgaggctctgaccccatttgcaaagtaatagtccccaaagaagagttccatctatcagttactttagccaggtcccaggaagctctgtctgcttctgagctagcaattaaagatagacatctgcatgatggagttgggcttcctgaatgtcagttattcataaggggtg

SEQ ID NO: 2922 - DNA, 398 bp, Homo sapien
gtctgtatttagtctttatttgtattgctatatttgagcattccaagattgcagacatgagcgtgtgtatttgtgtgattctttaatttcagctgccttaggtttgagtaaaagatgtaaagaaaggtaagtgattttctattgtaagactttaacccatacctgtcacacttggtgaaaaggatgtacttacctgagtattgtgttggtgattctgagccagtcgtccatacaaacttaagtagggtagctttacctgttacttttcacaactcagtagcagtgtaggggaaaccacctggcagaatgtctccctggagtagccctgggagggacagagacagcatctgacagagtctcagagagctgcaaggtcacaggagacgaggcaactaact

SEQ ID NO: 2923 - DNA, 197 bp, Homo sapien
ccctggactcccctaagggctgtggcactgtcctgctctccggtgagtgatacgtggtcgacgggtttggactgagctgtgtggctactggcagccttcaccctcctggatctgggaggccagaagctgggcgccagatccctgtctcaccggttctcttcccttcctaggtctcgcaaggcgagagtgtacggcat

SEQ ID NO: 2924 - DNA, 344 bp, Homo sapien
ctaatttggaattgaatattgtggatatcttagttaaaggccatgcttacagcttagaaatgaagccttaagctgcatcaagttacgaagtgattaatttccttctcagcaaacctccgggagttccagaatgagttcttcctgacaggttgtcttcactgggagcgtggggccccaggcaccagcatcgtcctcccctaatgaggggccctgccgaggcatcagctgctctgctcagttagtttttattcccggggtaccaagcagctgcacagtcggtgcctgggaggacgtagaggcccagagagtccctgggggttctgctctgaccgtgtgggtggtga

SEQ ID NO: 2925 - DNA, 400 bp, Homo sapien
agccctaagcaggggccccgcctgactcagggacaggacagccactcctgccaacgtgtgttctccctacatgagggagggcgtggcaagggacccctgccactgtcccctgctgcagcacgtgcccctatgccctttgcatgtggtgccagaataggcaggctacgcagtggctggcccctcagcgggctgggaaaagagtggccacggtgaccgtcacccgcctgccggcaccatgaagtgctccctgcgggtgtggttcctctccgtggccttcctgctggtgttcatcatgtccctgctcttcacctactcgcaccacagcatggccacgctcccctacctggactcaggggccctggatgggacgcaccgggtgaagctggtgcccggctatggc

SEQ ID NO: 2926 - DNA, 415 bp, Homo sapien
  misc_feature (1)...(415): n = A,T,C or G
tcttaaagaagggcagccaaggtagtaacctaaaaatagtgcccaggcatatgagagttgtcctacgaggttaaagaacacactgttccactgtatggctttggcctgagtgccagggaggtcaacttgaccctgccatgttggtttgacttactaagacacaggaatcattgtttccttgaccagggtctcacaccctggaggaatgttaagtaagagaaagaacctctttcctgaatattgacatgtaaaagaccaaagtaatttttctgaacttctgcaattctgagaactctccaaggaatttacagtgattttagtgcttgtcagcatttttccatgaggactttcatacatttgactctttagttcacaggttcccattgattgtgagcaagatatntatctctttagc

SEQ ID NO: 2927 - DNA, 441 bp, Homo sapien
gaaaaatggaaaaatgtaaaaggcagcccctccccaggcatttgtgagcctggcccaagccagtacaagagggcctggggcacgatgtggtcagccaggaagcataggatgccatttcttttatagattccttggtatttctggtggggtaaggggcaggccagggctgttcacgcccatgagggaagaggaaagtgccactgggcaaggtgtcccaccctcccctcctgaccctcctacgaggcttatcctggcaatggggtagtcactgccacccttccacacacacacacacacacacacacacacacacaaaaatcccttccttgtgggattcttgggcatctcctgcctccctcactctcacggtaattaatgtcttaattggctgttgcctggggaacaggagagctgctgcaggcagatgacctcatggggggt

SEQ ID NO: 2928 - DNA, 437 bp, Homo sapien
gcaaaatgctaccagcgcctgctaatcctgaccttcatgcccccaggtgaatcccacaaccatcctgaagccgggtttcctcattcctgataatgggattaaaaagaccttcctgggtgttatttgtgaggatttcataaaatagtgtacaaatgcttactcatacccagcatggagaggccgctgggactattctgccatgactgtggtctcttggtttagagcatttagggccaaactgctggcatggttgaccctaagctggagattggaggctgctttaaccaggctgtggccctagaatctgtgggtcatggcacaaggatcctgaagaagtttccggccggcctctgctggccaagtgacaggcaggtggttccaggactcgacagctcacttgtgtcgaatgtggacctcgtcagtgcgctttcatggat

SEQ ID NO: 2929 - DNA, 344 bp, Homo sapien
gcaggctaccgtggtattgtcacctcccagttcctgggccgccgtgtccactgtcgcccccaacgacgtcacacggctatgagtctagctagcacaagccacagcctgtcctcactgagctcctccacgccacatcatgagctgagactgcgacacagattccacggtgaaccggcctgattgctgttgccctcttaggtgcatttatctgtttgaatcaagcgagtggcagttaagctgcacgcatgataccaagaggatgagtcccgcgaacgcaagcgagccagatcaggggaactagtcaagggtaagatactgtgtactaagcaggaaaccactgtgtg

SEQ ID NO: 2930 - DNA, 235 bp, Homo sapien
gacctggcctcagcagtctaagtacctcatggcttcagacaccaacctgcaggtgctgagagcggcctacatccagcacaagtgctacagcgatgcagccgccaagaagcaggcccgcagccttcaggtcgtgctgaggctggtgaagctcttcaaccacgcaatccaggaagtgcagcgccatgccacaggtgccatgcgcaacctcatctacgacaacgctgacaacaagctg

SEQ ID NO: 2931 - DNA, 434 bp, Homo sapien
  misc_feature (1)...(434): n = A,T,C or G
cgagaccctccaaggcatcctctcgtggggtgtttacccctgtggctctgccagcatccagctgtctacacccagatctgcaaatacatgtcctggatcaataaagtcatanctccaactgatcagatgctacgcccagctgatccagatgttatgctcctgctgatccagatgcccagaggtccatcgtccatcctcttcctccccagtcggctgaactctccccttgtctgcactgttcaaacctctgccgccctccacacctctaaacatctcccctctcacctcattcccccacctatccccattctctgcctgtactgaagctgaaatgcaggaagtggtggcaaaggtttattccagagaagccaggaagccggtcatcacccagcctctgagagcagttactggggtcaccaacctgacttcctctg

SEQ ID NO: 2932 - DNA, 445 bp, Homo sapien
gcaacgaggccgtggaccagctcggcccggtgctcggcgggaggtgacgctacccctgggccctggtgagaacggcgggctcgacctgcccgtgaccgtgtcctgcacgctgttctacagtctcagggaggtggtgggcggggccttgcccgctcagactctgaggacccctttctggatgagtgccctccgacgtcctgcccgagcaagagggtgtttgcctgcccctgagcaggcacacagtggacatgctgcagtgtctgcgcttccctggcctggccctgccacacacacgggccccctccccactcgtccccacccgagaccctgtggccacttttctggaaacttgtcgggagcctggcagccagccagcaggacccgcctccctgcgggccgagtacctgcccccatctgtggcttccatcaaggtgtcggcggagtg

SEQ ID NO: 2933 - DNA, 447 bp, Homo sapien
attcggcaccaggggcatccctggtctctcagggccagttggaggtcccaggaggcatgttcttgatgcctgtggtgcctgaatccaattaactgaattctgaagagtgcatggggtaactgtctcagcctttctcctgtctctgcctctgtcctctgctccaaatcataaaatctcagagctagaagcactttcaagatcattccatccagcgcattcaatttgcaagtttaggcgttgagttccatagagggatggtagcttgctgaggtcccagtcaagcacacttgccattgtctcagctttcccctaaacacggtgtctgtggtcagggttgcagaggaggagctttcctgttttgcctctccttcttcccattggctacacccatctctggccctgctgataccgattcccctgacatttcaggctaagcagcaggaaaga

SEQ ID NO: 2934 - DNA, 440 bp, Homo sapien
gtattaattaaatagcttttgtgtcttacattggtagccagccagccaaggctctgtttatgcttttagggggcatatattgggttccattctcacctatccacacaacatatccgtatatatcccctctactcttacttcccccaaatttaaagaagtatgggaaatgagaggcatttccccaccccatttctctcctcacacacagactcatattactggtaggaacttgagaactttatttccaagttgttcaaacatttaccaatcatattaatacaatgatgctatttgcaattcctgctcctaggggaggggagataagaaaccctcactctctacaggtttgggtacaagtggcaacctgcttccatggccgtgtagaagcatggtgccctggcttctctgaggaagctggggttcatgacaatggcagatgg

SEQ ID NO: 2935 - DNA, 298 bp, Homo sapien
  misc_feature (1)...(298): n = A,T,C or G
gcagctataaaggccgcgcgggtgcagcgaggagcagagccggcgccgtcaccgcccgcattgccgctcccagtcccgcgctcggcacgacagtgaaatcccccagacgaggtgctacgcgagggcgagtttggagaagcgccggcnagcctcttccagctatggaagaagaagcgcggggtgctcacctccgaccgcctgagcctgtccccgccagccccgcgcgcgcccaaggagctgcgcttcactccatcctcaaggtggactgcgtggacgcacgggcaagtacgtgtacttc

SEQ ID NO: 2936 - DNA, 371 bp, Homo sapien
gagatggagtgtcgctctgtcgcccgggaggcggagtttgcagtgagccgagatcccaccactgcactccagcttaggcgacagagccagactgtgtctcaaaaacaggaaagaaaacaaaagaaaatttggactattgccaattacaaatatttttagagaagaattcaaaacagtaactgtggatgatggaaacaatagttatgataaaagtctgatgaaacttcccagttcacaaggaaatttacttatgtgcagcattttaagacagtaatcagaatcatgactgacagcatcatatcagggccagcagacttttataaatttcatacaatcttcagaaataataacttttttttttttttttggat

SEQ ID NO: 2937 - DNA, 319 bp, Homo sapien
cacacggtacttgatcgatggtagatgacaatgttcggctcccgatgcccctcccctcttcaactggtctacatggcgactgtgtaggtattgtattcagtgtgtttggggactagactgtagatggagtccccagcaatgagggtctcgctcctccacatgtgcgcatgctaggcgcgggttgtcacggggccttacccctgaatagcatgtcagctatgaggtccagcagcccgttgctgtatccaaattcggggtcataccaagggatgagcttgggaaaattgtcgtctgacggtaatgcagccccagcgtcaaa

SEQ ID NO: 2938 - DNA, 419 bp, Homo sapien
ttttgagctgtaggttttattgagcagagtgaaagtacaaagcttctacagtgtggaaggggtcccaaatgggttgccactgctagcttgggtgattgccttttaaactctttaaggcgggagatacgtgaggcgggaagaatgttacaggagcaagaaacaaaggcagtaaattattttgtgacatgccttagattttgagaaaatctgaaattgcgacttatgcttactcgttttgtggccttggagctgtacagcaagaaaaagaggatcttatagaacttaacgaactatgttcataaggaattgggaggatagataaggtccgctgatcacagaaaaatgggcagttaatcttttctttaactctggttttggcaggggaggagtggggcatacaggaaaacttacagctaaaa

SEQ ID NO: 2939 - DNA, 452 bp, Homo sapien
gagacggagttatgactctggcccaggctggaatgcagtggagcgatctcggctcactgcaagctccgcctctcgggttcacgccattctcctgcctcagtttcccgagtagctgaggtgggagtgttacctaggcctgggaggtcaaggctgcagtgagccgagactgctctactgcactccagcctgggtgacagagtgagaccctatctaaaaaaaaaaatgttgttcccaagtggcagcaaaagtttgaggtctcatttcttcctctgtagtttgagttatctggcttttctacttttatctgaagcatttgttctctgagcaataatgatgtgatgtgaatttgttttgaagttggtgatatttttgtggactgagcctttttaggaattatcttcaaggctgtgctgaagacccacaacactgaagatatctgaggatgcaagttc

SEQ ID NO: 2940 - DNA, 118 bp, Homo sapien
gtttgtggctccaagggagggtcttgggagccacctgagctgcaaagctgggaaatttctcatagctgggcatatcaggaaggttcttactactgcagacggtccagggtgcgtcctg

SEQ ID NO: 2941 - DNA, 431 bp, Homo sapien
cctgtgtgaccaaagccaaaggtagaacctggctgcattttattggatgggtgatggaagtgggtgggagtactatggtaaaggagggatatatgggtgggagccaccaacaaaagtcccccatccccctcccccaacagaaaggagagagacaaccctttcccctcaggtgatctggaattccagggcctctgccagctttgcaggaggtgcacagaagctggatgcttttggtctggtggccatgagctagactctgttgcctttggttgcttttcactccacagcaaacccgcaggtctcctccacggctgtcagcagcttctcgtagagcttctcataggactcatatggtggaatgtcgatccggttaaagcaggtatgggccttcggaaggttgtctgtgttcgcgtctatcaggtggatggtga

SEQ ID NO: 2942 - DNA, 485 bp, Homo sapien
aacggacagcccgacctcttaggcgccgggaccctcaggctcagatcagtggccgaggcccagagtttgcaaactcagctctggagttcagcagcaacagcagcaggaaaaacctgcccctgctcccccctcccgccacctcccctctcctcttcccccctcacccagcaggcacccccggttcccgccaggccctcctgccatgtcggacccagacgtccccaggggctcggatgtccccgccatgtggccccttgttccaggggtgcctgagccccttcaaggatcactaacccacccccaaccttggcccagccctgagccccagggaccatgagcgggggcaagaagaagagtagtttccaaatcaccagcgtcaccacggactatgagggccctgggagcccaggggcttcggatccccctaccccacatcccccaaccgggcccccgcccgcctgcccaatggggagcccagccccgat

SEQ ID NO: 2943 - DNA, 96 bp, Homo sapien
agcctttttattggaagcagcagccacatccctgcatgatttgcattgcaatacaaccataaccgggcagccactcctgagtgataactagtataa

SEQ ID NO: 2944 - DNA, 517 bp, Homo sapien
  misc_feature (1)...(517): n = A,T,C or G
agacttcagtctggagtgaatactttgcaggggttcaaagaggataaaaggaacaaagtcactccagtgttatatttgaattatgggccctacagttcttatgcaccgcattatgactccacatttgcaaatatcagcaaggatgattctgatttaatctattcaacctatggggaagactctgatcttccaagtgatttcagcatccatgagtttttggccacgtgccaagattatccgtatgtcatggcagatagtttactggatgttttaacaaaaggagggcattccaggaccctacaagagatggagatgtcattgcctgaagatgaaggccatactaggacacttgacacagcaaaagaaatggagattacagaagtagagccaccagggcgtttggactccagtactcaagacaggctcatagcgctgaaagcagtaacaaattttggcgttccagttgaagtttttgactctgaagaagctganatattccagaagaaacttgatgaga

SEQ ID NO: 2945 - DNA, 432 bp, Homo sapien
tgcagacagaggaccagtatcagctgtgctaccgtgcggccctggagtacctcggcagctttgaccactatgcaacgtaactaccgctcccctctcctccgccacccccgccgtggggctccggagggacccagctcctctgagccataccgaccatcgtccagccctcctacgcagatgctgtcactggcagacacagcccacggggatcacagcgtttcaggaacgttgccacaccaatcagagagcctagaacatccctgggcaagtggatggcccagcatgcaggcactagtggccttctgtccaccagacccacctggagcctcgcttcaagctctctgttgcgctcccgcatttctcatgcttcttctcatggggtggggttggggcaaagcctcctttttaatacattaagtggggtagactgag

SEQ ID NO: 2946 - DNA, 475 bp, Homo sapien
atcgaggtctctggttaaattaatactcttttaatagtgacctgtgattctgttttgatcaagtgttttcaaacttgacatctttgatgggtttctccagtgtcaaaatcctaaatcaagtctttttggcttaaaactaactttgggatttttttcagctgcatcccttggggagtctaaagaatgtatctctcatcttgtagaggtattaagtgattcgatttatttggtagattaaatgggcaggcattgtcaaatgtggcgatactgcatgggagggcactgtcaagtgaggtgacattagatctcatctcagttatatttatgggtatgttgttgatatgcgtgttccaaaaattgcatacatttatacaaatttaatatgatttgtaattttgatagttatgctaaatatttgctaaagttatatttgtataacatgtcacgaatggctgggcaccgtcactcatgcctg

SEQ ID NO: 2947 - DNA, 464 bp, Homo sapien
ccaggagactccaggaagagcatcccaactgccacgcaataaaggccatcaagctacaaatggccttacaaatggaacctcaaatgaatttaactcaagcttctaccgaggaccccaggatcagcccactggtctcttaactggcctagaaagttccctctggaggacaatacaacagcagggccccatcgtcgcccctaaccagcaggaagtagctagagcagtcatcgcccagttcccaacagcagttggggtgtcctgtttagaggggggactgagaggtgatgccagctgagcttcctgggttgagtaggggcttggaaagctgtaaaactcactcatttcctgcatcaggacttacttcagttctggataaataatactgaggatatatgcttaaaatattcctaacaccaggatttgcttatatgttttcttcccaagaaagctataaacagcgagaa

SEQ ID NO: 2948 - DNA, 254 bp, Homo sapien
cctcgtcggagaaagtcttatctttgccagcctcaaaaataaggtcaagaagaaacagtctctcggtttacagttggacagttgtagcctcaagaacaaatgaggtattaatattagctaggaatctctgacaaggaccagaacttgcatcctcagatatcttcagtgttgtgggtcttcagcacagccttgaagataattcctaaaaaggctcagtccacaaaaatatcaccaacttcaaaacaaattcacat

SEQ ID NO: 2949 - DNA, 432 bp, Homo sapien
gcctcagccttcctctggaagcatcccccgttcctggcaagggggaagggctcctttaaggggtgtgctttcccagtggggagcagtctggcctgcccctactaaagcctctgctctcagcactttcccccaagtccttgtaatttgcttgaaggtgggttctggctgccagccagtcccgtggacaaactctcctgccccttttaaatttcactcattttgtataaacccagcaggctggtgtttacttagccctgtagcttttttcattttttctttccgtctttcttcttgagttcacggttcaatattgcctcctcgccctggtgaggggaggtgctgcttttctgccccacctgccggctggttccagcagcgctgaggcccatctggggggccgggatgggggcttctctctctgggaggggtgca

SEQ ID NO: 2950 - DNA, 193 bp, Homo sapien
ggctccagcatcaagatccgtctgacagtgttatgtgccaagaaccttgcaaagaaagacttcttcaggctccctgacccttttgcaaagattgtcgtggatgggtctgggcagtgcactcaaccgacactgtgaaaaacacattggacccaaagtggaaccagcactatgatctatatgttgggaaaacgga

SEQ ID NO: 2951 - DNA, 485 bp, Homo sapien
ttttgttgttgacatgaattaacctggccaaaaacaaaaaagaaaaaaaaaaacatgacatttgtcatgtaaaacttttttttatcctatgggacttgaggaacagaatcagtacttcagttattgtaaatagtgagctaaacctcaaatttctatcacccagttgcccttttcatgaactaaacaattatctgtgtgattggtatgtttcaccaggtcactgctcatgtataacagtactctttatttgtagataccttttttgtatatatttattattgtaaatcatgtgctgccaccagcagtctgtaagtctaaactattaaatgacacatttatatttggaattttaatttttaactaagcgatcaagttttttaaattgttcttttattgttttaaattaagaactttttgaactaaaaccagaaactctgccatagttcattgatttttacatgaaacatttatttacaagatgatat

SEQ ID NO: 2952 - DNA, 526 bp, Homo sapien
gaagaggacgcggtgctgctcggaccccacggttcggcggtcccaatcccacgccctccgcgcggtcggccgctccaggactgaggggcacaatagctctgaagctgcagtgacccctggtggtcccgatgtccgtgcacaggcagccgaggttgagctgcggacgacactgagccccgctggcttcggagcaggtgcaatctgtgctctccagctgggaaccacagcgagttaatgcgagtcgcagttaggggagacacgaggggaggtgtcacagaaaaaaaactctatattgagttttagagttagagctttggcatcagacgtagttttgagttgactattctactgcttgttagctgggtagccaaagctcaaaaaaaattgcttaaaacctaggacgttagcccttaaaacaaaaccaggcttccgtagcacagtagaaatgaaatgaacaattggcgacttttgatggagtttcctctcatagtgatttgccacaaaggaccttctgtaggaagcctcg

SEQ ID NO: 2953 - DNA, 480 bp, Homo sapien
gtgaccccctccgccatcgagcgcctcaactatgtgcagtactaccccattgtggtcttcttcatccccgagagccggccggctctcaaggcactgcgccagtggtgccgtgcctcccgccgcagcacccgtcgcctctacgcacaagcccagaagctgcgaaaacacagcagccacctcttcacagccaccatccctctgaatggcacgagtgacacctggtaccaggagctcaaggccatcattcgagagcagcagacgcggcccatctggacggcggaagatcagctggatggctccttggaggacaacctagacctccctcaccacggcctggcgcacagctccgctgacctcagctgcgacaccgcgcttaacagcgactacgagacggacggcgagggcggcgcgtacacggatggcgagggctacacagacggcgagggggggccctacacggatgtggatgatgagcccccg

SEQ ID NO: 2954 - DNA, 508 bp, Homo sapien
ctacttggtctcctgctttcgcgacatggccttcaattttggggctccctcgggcacctccggtaccgctgcagccaccgcggcccccggctgggtttggaggatttgggacaacatctacaactgcaggttctgcattcagcttttctgccccaactaacacaggcactactggactctttggtggtactcagaacaaaggttttggatttggtactggttttggcacaacaacgggaactagtactggtttaggtactggtttgggaactggactgggatttggaggatttaatacacagcagcagcagcaaactagcagtaggttatagttgcatgcccagtaataaagatgaagatgggctagtggttttagttttcaacaaaaaagaaacagagattcgaagccaacaacaacagttggtagaatcattgcataaagttttgggaggaaaccagacccttactgtaaatgtagagggcactaaaacattgccagatgatcaga

SEQ ID NO: 2955 - DNA, 478 bp, Homo sapien
tccacatgtaagtgagaacatatgttatttgtctttctggtccttacttatttcacttagcataatgttctaaaattccatccaatttttcacaaatgtcagaatctcttttgtttttaaggctgaatagtattctattgtgtatatataccacattttctttattcatctgttaaacgcttaggttgatttcataacttagctattgtgaataatgctgcaatgaacatgagactacagacatcccttcaacaaactgatttcagatgtttggggtaaatacccagaagtgggattgctggatcatatggcaattatatttgtagtttttttgaggaaccactatactgttttccataatggctgtaccaatttacattcctaccaatggtgtgcaagggttcccttttctccacatccttggtaacacttatctttcatcttcttgataaaagatattcagacaaatgagaaatga

SEQ ID NO: 2956 - DNA, 531 bp, Homo sapien
catatcaccagtctggaaaaggatcagaattcgaagtatggtttctcctgaatgcatatcgccacaccattgtaaagttgaaaaatcataatttccccaacttacaattttagtccattgtccatctgtacaatggaccttactgcatgagtaaggtaagcagagtccactgtcctggggcttaataaggtaatgggaatagaaatgtaagactctctcccttccctcttttcttgccaaaggaattaaaggagttccctttcctgagagctttttagaatgttgaagttaaccctcccaacttttttctctcataatgggaaagcataagcagtgaaatgggagttaaagttcttttctcttgccaaccttctcccctttaacttttattagggaagaaagctggcaacatacaaatagactccatgtgtaaatagagacaaattgactgtagatagaaccaaaaaacaaacaggatgacacagagcaagactaggtatttgccacaggatcctgcaagtcccgacaatg

SEQ ID NO: 2957 - DNA, 497 bp, Homo sapien
gcccggctttgaaggaccagctctccctgggaaatgctgcacttcagatcacagatgtgaaattgcaggatgcatggggtgtaccgctgcatgatcagctatggtggtgccgactacaagcgaattactgtgaaagtcaatgccccatacaacaaaatcaaccaaagaattttggttgtggatccagtcacctctgaacatgaactgacatgtcaggctgagggctaccccaaggccgaagtcatctggacaagcagtgaccatcaagtcctgagtggtaagaccaccaccaccaattccaagagagaggagaagcttttcaatgtgaccagcacactgagaatcaacacaacaactaatgagattttctactgcacttttaggagattagatcctgaggaaaaccatacagctgaattggtcatcccaggtaatattctgaatgtgtccattaaaatatgtctaacactgtcccctagcacctagcatgatgtctg

SEQ ID NO: 2958 - DNA, 315 bp, Homo sapien
ttcggcactgagggagatgaacaaaataccagatagaacaagttccctgagggcaggaatttttgtggccttcagcaccttggtgaatgctgacacatagtagttatttaaatgattgtagaataaatgaagacacagtttgagaccagcctgagcaacatagtgagaggcatgcacgctgggagcagtggtagtatgtgcctataatcccagctaggtgggaggattgcctgagcccaggagtttgaggctgcagtgagatatgaccataccattgtgtactccagcctgggcaacagcatgaggccttgtctc

SEQ ID NO: 2959 - DNA, 534 bp, Homo sapien
  misc_feature (1)...(534): n = A,T,C or G
cacngaggtgttaccaatctgaagtgggaggatcgctggagctcaggagtttgagcttgcagtgaactgtgattgtgccgctgagctccagcctgggcaacaaagcgagacccagtctctaaacaaacaacaacaacaacaacgaaaagaatgcacagcaattctaatgtaaatgcaccaaacaaaaaagctgtaaaatacatgaagcaataactgttagctatgaaaggagaaacagacaaatccacaattatagttagagacttcagcacctctctcaacaactgaaaactagaccgcaaatcatcaaggatatagagaactcaaaagcacctttaactagcaagctctattagacatttacagagcaccaacaacagtgggatatacattctttttcaagtacacatgggacatataccaagatagactatatcctcagccataaaacaaaccgtgagaaactcagaattaaaatctgtatgattttaatcaatacagatcgaactagaaatcaatgaaagaaaggtaaca

SEQ ID NO: 2960 - DNA, 531 bp, Homo sapien
cacagacctagtgatataggtggctctgtgacgagaagtatttgtaaaatgcctgtgaatgcatctatttaagacgtgtatgccccaaattgtatacatgagggtgcagatattgggaacatatggttccttgcaatgttgaacaaccccagaggaagggtttgactggggctgggtcccacaagtacctcctgaggctcatgggcatccctgaggatcctcaacccacccaaccaacttcccagaatacagaataggaaaatggttctgcagagagttgcattggagggctgaaggtggcctctcctgtggtccttttgtctctgatagagagcgagctggccaaaacggagagcacttatttggctgagatgcacagacaatctcccaaagagaaggccagcaagactacaacggtgcggaggaggaagcgtccccatgcccacctgcgagtccctcacctggaagaggtgatgagcccggtcaccacgcccacagatgaggatgtgggccacaggatcaaacatgtgg

SEQ ID NO: 2961 - DNA, 176 bp, Homo sapien
cagaggcagagctgcagtcactggtcacccttaatatttattaagtgcctgagacacccggttaccttggccgtgagacacgtggcctgcacccaggtgtggctgtcaggacaccagcctggtgcccatcctcccgacccctacccacttccattcccgtggtctccttgcacttt

SEQ ID NO: 2962 - DNA, 634 bp, Homo sapien
tcggcactgagggttgtcatagaactgtcctcgtctttcagcttcttcacttgtgattacctaaacagaaaaaactgtaagtatattacgtagctactgaaccaaagaagcattcatctacctatctactaatatgcgaatacctacaaatatttaaaaagtaagaaattcaggtgtcatcaaagcaaacattcacacaaactaagactcagatgcaaagaggtgggaaaatgaggggaagaaaaatgataatgcaaaagactgatgaccttttttttttaaacagggtctcactctgtcactcaggctagaatgcggtggtgccatcatgactccctgtatcctttaactcctgggattaagcgatcttcccggcttcagcctcctgactagctggatcacaggtgcataccgccatgcccagctaatgatttagtttttatagagatgtggggtctcactatgttgcccacactggtctggaactcctgggctcaagtgagcctccagccttgacctccccaagtgctgggattaactgtaactggttgatttatgactttttaaacaggatttgagcagtacattggaacactgcattactttcattataattaggatgttcaaaagctat

SEQ ID NO: 2963 - DNA, 298 bp, Homo sapien
attcggcacagggtgggtctgtgaatgaaggggacagggagccattgcacccatcagcagtgtcacttctggggctgccgggtgacaattgccatctctgcttcctccccggtggagcgtgtggctccagggcagcgagggtgtctgagctggccaggagcgcgtctggtctgttaggggaatatgtactcgcatcctgtccggtgtgaggggcaacgtgtgctcccgagctgtggcggaggtcagtcggggtcagtgaaagcacagaggtgtccctgggttagggtcagagaaggag

SEQ ID NO: 2964 - DNA, 586 bp, Homo sapien
ttccatctagtagtgtacgatctatatagtgcatgtcagtagcacaaaatgcagtcttagcattagcctgtctaatctgaatagtttactcaaaagtacttctttgtgttaagtattcagccactgtttttagatctagttaataggttctatttaatttgctacaacatttactgaatggtggagtgaaaaaactgatgcatactgggaaatatctaccattttttaaagataatgttaattaggaaaagaacacttttaaggaatttatagcagtgatgaaatgaattcagttatatcagatacaccaaactgttgatggtatttaaatgtgacttccagttagtatttctggaatatatattgattactggtttgtttttagatatgtaagtctgttctaatctacagttcacatatcgacagttactctggtaataatagaatgttagtgatgatcacttggtggatgttgattaagtgcctgtgttttgtttcctcctctggataccaaataggtgtatgctacttttttggtgaacttatttcttggaagatttggctatgctattcagggtttttattc

SEQ ID NO: 2965 - DNA, 546 bp, Homo sapien
tgaaactgttttattaataaggaagtttcaacttcttgggaaccctttactttgaggcaaatacagttttcctggttcattattaaacttatctctcttttaaataccttgccaatttttgagagtggtggaaggtgtggaaagctctatgttctttagagtttgaagaaatatttattgtgttaggtatattaatagaaaattatttacttttcgtaggtgaaagtactgtgctataaaatgtctctccttttcaaaatttgcattatccatcattaattcaagtgaagtagtactttcaacatggaattgtgaaactgaagttgttcactttctatttagaagttacttctgttcaaggatatttctttttacctgttgcagaagagcatcttaatagctgccacatttgttgactattttctatatgccagtatttgcactagacattttacagatattcttttatttaatctttacaatagaacctttaaagggttattattgcatttatggctgacaagagtaaaactccaacagattaag

SEQ ID NO: 2966 - DNA, 574 bp, Homo sapien
ggctgaatgtgcgagtccatagctgaagaggagcgccagatggtggaggaatacacttatttatgaaactgtcttgagttcttcttgaattgccagttttcagcctcctcatgcctccgtctcctttagacgacagggtagtagtggcactatctaggcccgtccgacctcaggatctcaacctttgtttagactctagttaccttggctctgcatacccaggcagtaacagccaccctcctgtcatcgccaccaccgttgtgtccctcaaggctgcgaatctgacgtatatgccctcatccagcggctctgccgctcgctgaattgtggatgcagcagtgccagctgctcgactgtggcaacctacgacaaggacaatcaggcccagacccaagccattgccgctggaccaccaccactgccatcggaacctctaccacctgccctgctaaccagatggtcaacaataatgagaatacaggctctctaagtccatcaagtggggtgggcagccctgtgtcagggacccccaagcagctagccagcatcaaaataatctaccccaatgacttgg

SEQ ID NO: 2967 - DNA, 537 bp, Homo sapien
tggaaatcttctagtgaataatttttaaaagcttcttttaaactgctcagtaaaacattgccatacattaactctccatttctgcattaacttcatttgctggaaagaaattattttgttaatgaaccaaacccagccattaagttatgtgaattcaccttctctagacacattgaggtatggcagagaagacacatattccctggcctagagtgggctgacaatattgctgcctcccctaaattgactcaatcttgagaaccacatactgcagtgacagttgatcatggatcagaaatattcctttttctcctagaggaaatccctcatggcattatcattccctaaggacaatgagatgtccctccgctcaaatcctaaagccccctgatgaaagatttggctctgatttgctgccaacttattggtaagtgctgaatgagttactgtgctttggcatagcttctacatcacagcaagtgacttctcagaggggaaaagccaagctccagacaaggagtgctgttagcccaaggg

SEQ ID NO: 2968 - DNA, 547 bp, Homo sapien
gctggcctttgtctatcctgagcttctggctggtgagttcacccgactggagttccctcggcggctgaagggggatgacttgggacagaaggttttgttcagggatcaccacatgagtggctggagctacaaacgtgtggagaaatcggatctcaagtacccactgatccatggacagggtaggcaggctcggttactaggaacactggctgtctcccggggcctgggagaccatcagctcagagtcctggacacaaacatccagctcaagcccttcttgctctctgtgccacaggtgactgtgctggatgtggaccagctggagctacaggaggatgatgtggttgtcatggcaactgatggactctgggatgtactgtccaacgagcaggtggcatggctggtgcggacttcctccctgggaaccaagaggacccacacaggttctcaaagctggcccagatgctgatacacagcacacagggaaaggaagacagtctcacagaggaagggcaggtgtcctacgatgacgtctctgtgttcgtga

SEQ ID NO: 2969 - DNA, 526 bp, Homo sapien
tattttgattagcagctattgaagagcctttacccaccatgacaaatgaatactccatcttaatggctgtcagctgggctgtggtttgctgccattgtttgccattgtttgcacacaaaagcctgatcccattaagaccgtcagatatttcctgccatcgcatggcctcctgctcacaaacatttgatgctatttaaagcctcttctcagcaaatatgcatcggtcacatgtatgcactgcccattaattaaggccagatttgaagctctcacagctgtcacttctattaactgattgcagggaatgtaggacttcatttttctgggagataatgtgaacatcggagaaaagccaagagatcttcgaatccctgtggcacttaccttgacttccaggcttgtaatgaaaaagcttcttagacaaaaagggacaaaaagaccctttcacagaaatcataaacaatctctgccaagcaggagatttagtgggtgggaacacacacacacacacacacacactctttat

SEQ ID NO: 2970 - DNA, 130 bp, Homo sapien
ttggagctggcggatttgtcaggttggaaattgctttcttcatctacacccaggacacgcagcccacagctctgccccgcgatgtcacgaagaaggactgaaggttcaacagcttaaagaggttttgtgc

SEQ ID NO: 2971 - DNA, 187 bp, Homo sapien
aagctttttgtgggggtaaaattttaaagcccttagagagggttttgaagcgcactttaatgccttccgaattttaattttccaggcggaataataatgggggtttaaacccctgggggattattggaaataactcccccggtaaaccttaagggggtttgaataaaaatggcgttaataccagggg

SEQ ID NO: 2972 - DNA, 549 bp, Homo sapien
tacggggagacagaattcgtttattgggatcactgggtggaggtggaggaagaactgagtggctgctgtcctggtctggggatggatcaggcaccaaggttaggggagggagcccatcaccatgttagtaaaataataaaacagtggttggacagagggaagacccactgcctgggatgaggctgctctgaggcaagaggtgtacgtatcctacctggcccaacacacgcacttccccactggctccttggcccgtgtcagcgaagggagcgcgggacggtggcgggaggcggacggtatcagtggctacccctccagtggccgctgggagtagcagcaggccgctcagggggtctttgcggcacggcccatggcttccttgtagctcagccgttccttggagatggggtctgtcaaatccttctcgtagctggactcgtcctgcaggagctgggccagctcttcactgatcatcccggagaggagggcctgctggatggggatgtcgcctgtcctcttggggtcgatgagccccccggtcaggtgctg

SEQ ID NO: 2973 - DNA, 500 bp, Homo sapien
  misc_feature (1)...(500): n = A,T,C or G
gcggccgccactggagacactccctcccgcctcccgggtctcctggcggcggcggagtgaggctgacagcggggaacctgggagacccctccgccctccccgcggtggcagcggccgatccccggctccggcgcgagggacggccgcgatgcctcggcctgaggttacccggcccggcccttcctcgcttccctcgactattccactgcgtctccgcgccccgggtcatcctgcgagtccctctgacgggagggaagatggctgcacggagctggcaggacgagctggcccagcaggctgaggagggctcggcgtcnntgcgggaaatgctctcggtcggcctaggctttctgcgcaccgagctgggcctcgacctggggctggagccgaaacggtaccccggctgggtgatcctggtgggcactggcgcgctcgggctgctgctgctgtttctgctgggctacggctgggcgccggcttgcgcggcgcccgcaaaaagc

SEQ ID NO: 2974 - DNA, 176 bp, Homo sapien
aacaataaatgttttatttgctttaaaagtgcctctgaaagggccccccagaagtgagcagtgcgccgtcaagcgggtgtgcagggccacagctgcacggcacagtgtgggtctgagtcactgccggagaagggaccagggtggtctgggccgcagcccctttaacaatctgccct

SEQ ID NO: 2975 - DNA, 510 bp, Homo sapien
actatgttaaacattctatatacatggtctcatatagtccttacgagtcaatgtggtaggtaatcctatattcctattttagagatgaacaaaaaaaaaggctttgagaatttatcaaggacccataataatccacagaacctaaattcaaatccttttgtccaactccgaagacttatctcttaaccacttcataagattaaaacgctgaaggggcacatactgttatgaattttaatggctcctacacatgcatcctttatatatacccttcatgatttttcaaaccatgtcagattctcatttttcaattctcaagatacagcatcttcttatagcatcttcaccacctttcccgtttactgtcttaaatgtgcccaatctcggaaatatcaataacaaaacaagcttgttgacattttgtgaaacatttaaggagacttccaaggaatgtaacatatgtagactttgtgacacatatattggcatgtggtcacagctctgttctga

SEQ ID NO: 2976 - DNA, 209 bp, Homo sapien
tacatgaaaggtatcattttattatagaggtaataaaataaagaggtaataaaggtataatgtcattacagaaaaatcagtggaagagaaaagaccaccaaactgttctttgctataattattatttcatgaagtcttatcagacgtgtatttctctcctctcatgtgcaggcaccttcctgggcaggaagcagacctagcagaactgc

SEQ ID NO: 2977 - DNA, 125 bp, Homo sapien
ttatttgaagaaagccactttaatgtattctggaggaatgtcctaaactaacaaataaaacgattagatctaaggagttgttttcattctccaggcaggaacccttagtgtccctaagtagggtg

SEQ ID NO: 2978 - DNA, 106 bp, Homo sapien
tcaaggtcggattcagggtggcaccgggcttgtctatggtgaaagtggattccctacccagctgttcgagtttatggcatcgttcgtgacagaataggcccagcag

SEQ ID NO: 2979 - DNA, 261 bp, Homo sapien
ttcggcacaggggtagacaacacacctggggcaaggctggtttcctggggttgaacgcgggaacctgaaacgccatttgagaacctgtgaccctgtaaggggccaaccgcctgaccctggaggacgccaaaatcgtgcagcctctgggctgaacatccttggcaagcatctctactggatcgaccgccagcagcagatgatcgagcgtgtggagaagaccaccgggggacaagcggactcgattccagggccgtgtcgcca

SEQ ID NO: 2980 - DNA, 364 bp, Homo sapien
aagactcacatcatttggcagagagagagtcgttgaagtcccaggaattcaggactgggcaggttaagacctcagacaaggtagtagaggtagacttgtggacaaggctcgggtcccagcccaccgcaccccaactttaatcagagtggttcactattgatctatttttgtgtgatagctgtgtggcgtgggacacatttaatgagaagttactgtgcaccaaactgccgaacaccattctaaactattcatatatattagtcatttaattcttacataacttgagaggtagacagatatccttattttagagatgaggaaaccaagagaacttaggtcattagcgcaaggttgtagagtaagc

SEQ ID NO: 2981 - DNA, 383 bp, Homo sapien
ttcataggcatagacctccctccttccctcctaccccctcccccctctcccaactaatgccagaccggccactactttttaactgttttacatatttaaccttcaagaaagatttcctttgatccaagtgtattgcagcccacaaaaaagcttggaaacccagctagatggtctgtttttctagttcctacattggatttaagtcctacccatcgagactactgtcttcagagggcatcttcatgtgtgggcaccagggctgcggctggaaccacagtggacaccccacgctccaaggacaatcctctgcagaaaccagcagctggaaacaattcttaatgctgcaggaagtagttaggagaaaacgactgtgtaagtcagag

SEQ ID NO: 2982 - DNA, 311 bp, Homo sapien
tctatacctcaatttccttacttatcaggtgaagatattaagagtacctcctcagagtgtgattttgttaatttatgtaaagtactgagaacatgcctggtatagagtaggcactgtataagtgatatctattattattgtacatgggattatttgatgtctgtatcccatcccccatcagacatgaaaaaataggtctgcttttgatcaccattttacacttaaagaaaagggtcaggctgggcatgagtggctcacacttgataattccagccctttggacggctgaggcaggatggattgcttgagcc

SEQ ID NO: 2983 - DNA, 330 bp, Homo sapien
ggcaaggcagggtttcaccattttggtcaggctggtctcaaactcctgaccttgtgatctgcccacctcagcctaggagttaagagaccagcctgggaacatagactccacacaaaaaatttttttaattagctgggtgtggtggcatgcacctatagtcccagccacatgggaggctgagcgtggaaggatcatttgagcccaggagattgaagcggcagtgtgtggtgattgtgcccctgcgctctagcctgggcaacagcgcagaccttgtctcaacaacaacaacaacaaaaggctatctattgtgggtacactgcctatggggta

SEQ ID NO: 2984 - DNA, 361 bp, Homo sapien
agtaggacagctccggtggccaactctcccctcaaaatcattgtcaaagaaaacctatttgtaaaaggagttttttaatttggaaacccttttgatgaaagaactgtggttttggttctgtgaacactatatttagattaacggaatttttctaaaaatcaggaaaattagttactaaaaattgctgatcatttttgtttcattatttttgttatttcaaatgtataagctctgggattctttttggagcaatacctacaaagtcaggcaccagaatgtgctccagagctgtgacatttcaacatgatggttttggtttggtttggttttgtgtcctttttatttgcagttttttctgttg

SEQ ID NO: 2985 - DNA, 349 bp, Homo sapien
tccagttttggaatgggcactcagaacattttgtacatgtcttggtgtacataacatttgcatttctattgggtatataccaagagtggaattgctggctcatagaataaacagctaccaactagttttccacagggttgtgtcaattgatacttttgtagcatttatatgtgggaattttaatacctataaatttttatttgccagatatttctataaaacttaaggcttcaattctaagaacgttcttatgctttgattactctgtattagagtaaataagccactctaatgcttcaccttctgtttttagatatggctcgtggacagcagaaaattcagtctcagc

SEQ ID NO: 2986 - DNA, 385 bp, Homo sapien
  misc_feature (1)...(385): n = A,T,C or G
tttgcaggtaatcttattttcctaagggtagtttcatgatgacagtgtcacaaaaattactgtggataaagaaaaaattgtctcaatgaaatagaatttttcactgaacacagaaaccatctcaatagttgctgctccctggtttccagcncacgcaacagacatcaaaccaggaagccaaactttcatggacctgtgttaagaaaaacacacatacatgggcatactactttttccagaaaaacggaattaggcagagaaggaagtgtgggtgtacaactgatccacaagctattgggaaatcaatagctaaaaaatgtcaacaccctggcttccttttatcaggaactccaggaggctgaaggaatgtgagtgcatgagataa

SEQ ID NO: 2987 - DNA, 310 bp, Homo sapien
cgccaggagctgaaacgaggtttggtgtgagtgtcccaagtgcaagcccctgtcccctggagagatcctgggctgcacatccccccgactgtccaaagaggtggaggccgttgtgtatcttggagatggccgcttccatctggagtctgtcatgattgccaaccccaatgtccccgcttaccggtatgacccatatagcaaagtcctatccagagaacactatgaccaccagcgcatcgaggctgctcgccaagaagccatagccactgcccgctcagctaagtcctggggccttattctgggcactttg

SEQ ID NO: 2988 - DNA, 353 bp, Homo sapien
agaaagtctgcgggctgactgagtgagcgaaattcccccaccacccctaccctggggagccaggggtggcagccggccaatggctacagcaaagaccccccctggatgtgggtgctctgtgctctgatcacagccttgcttctgggggtcacagagcatgttctcgccaacaatgatgtttcctgtgaccacccctctaacaccgtgccctctgagcaaccaggacctgggagctggggccggggaagacgccgtcggatgaagcagcagcgcatcatcaatggatccgactgcgatatgcacacccagccgtggaggccgcgcatgttgctaaggcccaaccagctctactg

SEQ ID NO: 2989 - DNA, 315 bp, Homo sapien
tccacggcgctgctggcctttgagctgaccggccagatagtgcatgctgcaccgtgctgatggcggtgctggcaccaacgctttgacacagagctgccagcgctccttctatgatggcaccatcattgtcaagaagctgccatacctgccacggattctgggccgcaacatcgggtcccaccatgtgagggtggagcacttcatgaaccacagcatcaacacactggccaaggacacgccgctggaggaggtggtcaaggttgtgacctccacagacgtgaccgagtatcccctggtggagagcacagagtccca

SEQ ID NO: 2990 - DNA, 395 bp, Homo sapien
gcacaggctttactgttaactcttaacagatgcagtcgcagtttctgggcacttttctcagtaggtggctcatgctgacttctccagtaaggtttcaggacaaactaccaaggaattgcctcagccttctaacagttcttccttaaccaactttcggccaggttcaattggtttgtcatcaggaactgagcaggtccaggactcagctttctgcttcacctaagccagtactccttgtttgaggtaaaagccttaaaatttagctccctagctcttgattagaagcaatttggagtaagtgtgttttgatttaggcagggtagcttgggatacctttttaaaaacaccagatattaaaatgtctggcaaggttagaatcagactagatgatttgc

SEQ ID NO: 2991 - DNA, 186 bp, Homo sapien
tttttttttgtccacaaggcactttatgcattcaaaaccaccgaattcacatccaggtttgctcagacagaggcccagaggcgaccccgctctggcgtggctaccacctgagcggctggcggccctggccagctcggcctccgcgtagggttcatacagcaccttcaggtggacaagcagctgctc

SEQ ID NO: 2992 - DNA, 384 bp, Homo sapien
ttttttttttttttttttttttttttttttttttttaagagcaggatgataatttactttcaacttctaacaggatttgtaaacaccatgataaatggggagaggcacaacgctgcattcctccagcgggtcctctgaacacaccacgtttcggcatcagttggcttaaatcattcatttcaaatcaggactgaaattctccagtgttcctgtcaggcacccttcccatctgatcccctggaaaggatatgtcagtcgaagtcacaggtaacacggtgtattaagacttgagagcgttgatatcaaatccattaactatgcttttggttgaaggcggtactcgcaaatatgtagtaagcaaagggacgattttgggaaaagggg

SEQ ID NO: 2993 - DNA, 458 bp, Homo sapien
ttgagacggatttcactctgtcaccaggctggagtgcagtggcgtgatctcagctactgcaacctccacctcccgggttcaagcgattctcctgcctcagcctcccaagtagctgggactacaggcatgtgccaccacaccagtgtaattttttgtatttttagtacagatggggtttcaccatgttagtcaggatggtctcaatctcctgacctcgtgatccgcccaccttggcctcccaaagtgctgggattacaggcgtgacgaccgtgcctggccctggttgctttctattgggtggtcataaaggtctccctgagaagatcctgtcctagctaagatctagatgatataacagccatgtaaacatcttgcgggcagagggaacctaaaaggtaaatgagcttagcatgtccaaggagccgaaggaagactagtgcagatgaagttgggagcac

SEQ ID NO: 2994 - DNA, 250 bp, Homo sapien
ttgccgtatacattctttcactcagattaaacgaagtaggctagctgcggttcagaacagaggcccagagctgatctaggatgagccccatccaggaatgctttacaaaaggatcctatttacaaagttagcaatgctgctgccgataagccaccgagccggggcccacctgggtcagtaagggataggccccacagcagcgaatgagctggagcactgtcccgcctgaatcacgttaaaccgcaaacag

SEQ ID NO: 2995 - DNA, 492 bp, Homo sapien
  misc_feature (1)...(492): n = A,T,C or G
aacttccaggcacatgtgtaccttgatgaccccctccagcccgagcccagcccagtggggtggctgggtggcagggtagggaacacgtaagaggcgtgagtgcctggggactcccagcttccctgaagcaggcctctgtccaacttcaaccccagaagcactgagctctcagtaaagggagaggaaaggcccagagaggcantcatctctctcagctcacaactggaatcccaaagcatttgcacaaaggaccaggaccccagacggcagccaaatgcagccaaactgagcagggcaatggaggcctgacatccagccccggggcccacagatgatcagccaattatggagcaagtgcagggaaaaccgcgtggggcactgcagaaagcaggggaggcttgaggtgtgcccagaagcaaggtagacccagcaggaaaccagtaaccagtgcttttgtgaaggcctccaccaggggtcccagcaaaggccctg

SEQ ID NO: 2996 - DNA, 204 bp, Homo sapien
gtgtactaaaactaccagcgtatagatttcaataagaattgttgtatttttgtatttggaaactgaaaattacagtaaataaatggaactctaagaaaaatttcagtagacagttcaacagaatgagattccttttcatatgatttttttgacctcaaaatggacatcttatttcactctcagtaaaaagttgaaaatttgact

SEQ ID NO: 2997 - DNA, 358 bp, Homo sapien
aattacatactgggttttgtaccacatcactaaaggcccaaatcattgaagatacaaaaccgtacatgcaggctggttgtctggttagtcaatggctgatttgcttcaactgtctagtatgtatgtgcagcctgaaactggctccttaaaaggaaagccgggtcagtcatcttgaaaaaatgacatgtaaaagtaaatcgataattgttttgagagacggtacatgttttaaaggttggccttaagcttcagtaacattgtcattttgtgaccttttgttgtcacacctgtaccctaacctgacaggaattaactactgtttttttgtggggcagaaagcaaaacctggtgttgtgac

SEQ ID NO: 2998 - DNA, 501 bp, Homo sapien
gcgtcggctcccaaagtgctgggattacaggtgtgagctactgcgcccggtctcctttattcttataactagaaatatgtagcattcagtcattgtatgcatccaagcaatgataaaagtaaatatcgtttaaaaagtgattgagctgcatgtggaaatgtctgttcttcattcttttaggagcaggaatacatatagatataaaaaacatcccatattttaaaaggaattcttagggcttgcgaatcttgtagtaaaggttgaattagcagtatatgtcttctacataaaggaaaagagaaaacagtaattgggggaaatttcttgaccatgcctttcttctgtttgttcctgctttcctttgttccttctttgtttcatcagcaattttttcttgtagtttttttgagacagagtctcactgtcacccaggtgggagtgcagtggtgcagtcttggcttactgcaacctcgaactcctggactcaggagatcctcccgc

SEQ ID NO: 2999 - DNA, 470 bp, Homo sapien
tttatgaagagctcgactctgactccgaggacctagaccccaatcctgaagatctggacccggtttctgaagacccagagcctgatcctgaagacctcaacactgtcccggaagacgtggaccccagctatgaagatctggagcccgtctcggaggatctggaccccgacgccgaagctccgggctcggaaccccaagatcccgaccccatgtcatccagtttcgacctcgatccagatgtgattggccccgtacccctgattctcgatcctaacagcgacaccctcagccccggcgatccaaaagtggaccccatctcctctggcctcactgcgagcccccaggtcttggccaccagccccgcggtgctccccgcccccgccagcccgccccggcccttctcctgcccggattgcggcgaagccttccgccgcagctccgggctgagccagcatcgccgcacgcacagc

SEQ ID NO: 3000 - DNA, 279 bp, Homo sapien
gggtgaaacaagggatcataggaaaaggggaaagagaaatgatctgtttttcagttatgacatagaaaaccaaactgcaagtgtagactatgacaaaaaatacactaatacctttgcaatctgaatgagaatttgaccatttgtgtgtgccctctacccttaaattcagaaataaagacaataaaaaattaaaataattgcccagctgaaaactgctatgaggaatggattgtcaggttgctgaagtataaaaataaactcttggttgtcctgtgctta

SEQ ID NO: 3001 - DNA, 552 bp, Homo sapien
gagggatagatgttaatttttccatttacacgtgaggaatttaaactgaaaggtgaaataattggttcagcattatgctcaaaaccaaagcgttgtctgcatttttatttagcagttctacttccgcagtctcttagtggaacattttaataatattctgcattataaagtacaaaattagttcctattctcatttcctttttaatgtcgggtttctttttgtaaagtctttagtatctcaactcttcagttcttacacctcctccctcagatcttttgtttcaaaaactgactacttcaggttattctactgtaaagaaggctaagccttcttttccatttgaaaaggaaatagatttaatgggaaagaatatatagtagtgactcagatttaagatgcttaatcttatttaacatgaacatgactatacatgataacttaaaagtatttctaaagagggtattctacaaatgcacttaatattaattttctaattatttgcatatatctttcttttaggatccttcctgagcgtttcctggcagttttaa

SEQ ID NO: 3002 - DNA, 499 bp, Homo sapien
aggaaacaaaaaactgaccgagagaagatggagaagagaacagctcatgaaaaagaaaagtatcagccgtcctatgataccacaatcctcacagagtgttctccgtggcccgatgcccccacagcctatgtgaataacagcccttccccagcgcccactttcacctccccacagcagagcacttgcagtgtcccagacagcaattcttcttccccaaatcatcagggagatggagcttcacagacctctggtgaacaaattcagccttcagctacgatccaggaaacacagcaatggctgctcaaaaacagattctcttcctacacaagactgttctctaatttttcaggtgccgacttattaaaactgacaaaggaggatttagttcaaatttgtggtgcagccgatggaattcggctctataattcactgaagtcaaggtcggttagacccgtttaaccatctatgtctgccgggagcagccaagcagcacagtgct

SEQ ID NO: 3003 - DNA, 256 bp, Homo sapien
gcttcttaataacccaccttctgccccactctattccttatcctgctgcccctgtagggtcaagggccctccgtctacaccctcttcttctcctccatcctttattcagagtcatctcgcccttccccatgggtgggggaacctgtgtttgtttgtgtgcacatgtaaattttaaatattttaagcagaaagtccttacctcctgtaacacatcaataaagtacaatcattgtgaaaaaaaaaaaaaaaaaaaacc

SEQ ID NO: 3004 - DNA, 470 bp, Homo sapien
  misc_feature (1)...(470): n = A,T,C or G
agtttaaaaacaacaagcatcctttattctccttccagtctcagtgtccagaggctacggttaacaggttttcaaagtgcaaatcatttcattcctcaaaagccagaggggaataaaaactgtacatcatctccaatccatattcatcaggagcgccctggggcttgtcatcctgctggcacggggccaggtttcagggcctggcggaaagaggtctgtaggctttgggacttggtgtctggccccttgagatgagattagttctccaataacctgaatgcctcttggggaggcggcacgacgcaggcgtagaatccctctagacagccagatcgggcgtgggtggagtttaaaccccaggatgttgctaacagccacaatgaaagctgggggtcagaggtaagagcctgctgagncagagtggggatctgcaaagggactaagggggtagaataatacaaaaggccaaa

SEQ ID NO: 3005 - DNA, 460 bp, Homo sapien
tcaaaggtttgtttatattattaacaacatgaagatcctgtagtgagggagggtgtttttcccaagtcattgcaaaagactcattaaagaccagcttcgatgccatttagaaaccatttcccatcaattccagtgaaacattcttgaaatattagaatcctctttaccagggaaaataaaatgtccctttaagcttacaaactattagggaagaagactcaaaaataactaaaatgtgctacaaagtgaaaatgtttttttcttacaagaaactgatgagatgagttgaaatatctgatgatgaaaatccagccgaggaacaattggagaaccatccggctagatttcccctactgagtatggactttgagcatgtgcatatagacagaagactctgacatatgaggaatgagtgagaggcaacatgaagtccccactgcaaagaccctgaatgtcatta

SEQ ID NO: 3006 - DNA, 469 bp, Homo sapien
cctcgttccgaatcggcacaaggttttgctcagtcgttcaggctggagtgcagtggcgcgatctcggctcactgcaacctccgcctcccgggttcaagcgactctcccgcctcagcctcccaagtagctgggattataggtgcccgccaccacgcccaactactttttttgtatttttagtagaggcagggtttcaccatgttgatcaggctggtctcgaactcctgacctcaggtaatccacccgcttctgcttcccaaagtgctgagattacaggtgtgagccaccgcgcccggccctcttccgtttattctttgcctactcagtaatcttttctacactcgcctataactgctgaggacccctcgatatgtatcaccagaccagatcgtctggaagtccctcagtattttcagctaatgaacactttcacctgtgtatagggcagacacttcaaatcccacgtgtc

SEQ ID NO: 3007 - DNA, 431 bp, Homo sapien
agaaacgtaaaaggacatatgagaccttcaagagcatcataaaagagtctttccgccacgacccggcctcaccgacgcattgctggcttccgcactcagcttctgtcccaagccagcaccccagctatcctttagtcatctgagcaccatcaactatgatgagtttcccaccatggtgtttccttctgggcagatcagccaggcccggcttgcccggccctcccaagtcctgccccagctccagcccctgcccctgctccaccatggtatcagctctggccaggcccagccctgtcccagtcctagccccaggccctcctcaggctgtggcccacctgcccccaagcccacccaggctggggaaggaacgctgtcagaggccctgctgcagctgcagtttgatgatgaagacctgggggccttgcttggca

SEQ ID NO: 3008 - DNA, 465 bp, Homo sapien
caagggacaaaatgacgatgtaggaaccagcaagaacggaatctgggctgatgcttcagtctccacctgggtgatggctagcctcccgccctccaccaccgcatcccacacgtgctgccctgtccccgtgtctcctggagaaccaaactggagaaaacctttctgagtatctctcatagtaccccttccttaagaagatgtggtttagagcatgtgtgcaatcctgcctctgtaattaggaaacggagcccgaggctttccattgttggttgaacccaggacagctggtgctattcacaggctgaagaactgggcagttcttacttgggtctgtcctaggatgtggaggaagttcaggactaacgctaggcagagagtatgactcggtttacccagcctaggggcctctggatgggacactccattccaagatctcagcagagcagggcttcctggcttgaggca

SEQ ID NO: 3009 - DNA, 452 bp, Homo sapien
gagtcttgctccgttgctcaggctggagtgaggggcacaatcttggctcactgcaacctttcgcctcccgggttcaagtgattctcctgcttcatcctccccagtagctggggttacaggcatgtgccaccatgcccagctaatttttgtatttctagtagagacatggtttctccatgttgtccaggctgatctcgaactcctgacctcatgggacttcagtctagctccaaatctagtgctcttgcagtcaattcatattttcttctgttactgaccatatgaaataattcctctatgaaatttatgtgcaatttttataaaagtctaaatgtattttatggctaaccctcaactatggagcatattaacattaaaatgagttcttgaaataagagttgattaacatgggaaaatatccatctctttcatcttgaacaaagtagttttgt

SEQ ID NO: 3010 - DNA, 323 bp, Homo sapien
ctttttctacagggtattattataagggacaaattatagttgtaaattagattaatgaattttgtgagttttaaagtttgtacgaaccatgtctcccttgtgtcatattttccaataatataattacctaacaatgacagaattatacattttccctttaattctctaagcattgagtaaacagaaaaatatagggatgaaatacacacatgccaacattcaaaactttgtactaactagaaacaaaaatagaaggggatttataaaggaaaatgatggagacattttagagaaattaagtataaatcgcaacattctgtttt

SEQ ID NO: 3011 - DNA, 318 bp, Homo sapien
tgagacggagtttctctcttgttgcccagttaggagtgcaatggcgtgatcttggctcactgcaacctccgcctcctgggctcaagcgattctcctgcctcagcctcccaagcagttgggattgcaggcatgcgccaccgatgcccagcgtaattttgtatttttagtagagacggggtttctgcacgttggtcaggcccgcctcagcctcccaaagtgctaggactacaggcatgagccaccgtgcccagccagattcgtatatttttaaaagaattttttttttattttttttgagacagagtgagactctgtctc

SEQ ID NO: 3012 - DNA, 453 bp, Homo sapien
ggagataatgcttcacgttccccagttgtaattaccattgacagtgacagtgataaggattctgaagtaaaggaggatacagaatgtgacaatagtggtcctcaagaccctctacaaaatgagtttttggctccttccttggaaccatttgaaactaaagatgtagttacaatagaagctgaatttggtgtgctggacaaggaatgtgatattgccacacttagtaacaacttgaataatgccaacaaaactgtagataatattccacctctggcagcttcagttgaacaaactctcgatgtaagagaagagagcacctttgtttctgatttggagaaccagcccagtaacattgtgtctcttcaaactgagccatcaaggcaattgccatcgccacggacatcattaatgtcagtatgtcttggtagagactgtgatatgtcttaaaactgc

SEQ ID NO: 3013 - DNA, 450 bp, Homo sapien
ttgaaagattcataaccaactattcactattataacatgtttcccagtgtaaatgagtaaggaaaaaaaaagtgtaacaggtggcgtgcagatgaggagtgaccctcatatttaagttattttatatttgactggacattgttcagaagtgtgctttaagggacacttgttggttgtctgcccagcatctctcaagaatatccctcctgtcctccacatggttgtgcagggccatgtgtgaagacagcatgagtcttaacccctcttttattttatttttgagacagagtctcgctctgttgcccaggctggagtgctgtggcgcgatctctgctcactgcaacctccacctcccgggttcaagtgattctcctgcctcagcctgccgagtagctggaattacaggtgtgcaccaccatgcccagctagtttttttgtatttttagtaga

SEQ ID NO: 3014 - DNA, 449 bp, Homo sapien
gtcatttgatagaaagatgagatcggagacaatgttgtgttatagggcacacattgaaggtatatgccaaatctctcaccagataagtccttttctccctgtgccgttttcttgctcaaagggaacagtgaattagccagctagaatcttcctggtccctttttgaggcagtagcaggtaaggaaagggctgattttcatcaaaaccaagacctttctgcagggatgatagtggaataataatgtggattagcccgctagcattaggagcagttgggaagttacctggtagatcaagcattacacacaaaaaatcaagttgatcagagtatgggttctccatatagcaatacttcagtgagattaagtataaacagtttttggcaaaaaacaacacagtctactctttctgcttacaaagacaaagccttacaaactcactatgaaggt

SEQ ID NO: 3015 - DNA, 276 bp, Homo sapien
cgattcaccactgctaatgtatcagtagtacacctgacgtttcgtataaaactaccttgcagatatgatgatatcaagaacgcggtgcaacaggtgtctgatggccccctcaacagcatcgtgggttaaactgatcaccagatcgtcttatctgatcttcaacagcgatacccacttctctacctttggagcatgtcctggcattgtcacagcgacccaatttgtcaagctcgtatcgtagtatgacaaccgacttaggcgtacagcagcagggtg

SEQ ID NO: 3016 - DNA, 449 bp, Homo sapien
aacgagctggcggagtttgcccgcttacaggaccagctggaccacagaggggaccaccccctgacgcccggcagccactatgcctaggcccatgtggtctgggcccttccagtgctttggccttacgcccttccccttgaccttgtcctgccccagcctcacggacagcctgcgcagggggctgggcttcacaaggggcagacgtggagggaagaggatttttataagagaaatttctgcactttgaaactgtcctctaagagaataagcatttcctgttcttccagctccaggtccacctcctgttgggaggcggtggggggccaaagtggggccacacactcgctgtgtcccctctcctcccctgtgccagtgccacctgggtgcctcctcctgtcctgtccgtctcaacctccctcccgtccagcattgagtgtgtacatgtgtgt

SEQ ID NO: 3017 - DNA, 343 bp, Homo sapien
gagacagggcagctgctagagcacaagttggactacatcttcttcacagggagtcctcgtgtgggcaagattgtcatgactgctgccaccaagcacctgacgcctgtcaccctggagctggggggcaagatcccctgctacgtggacgacaactgctacccccagaccgtggccaaccgcgtggcctggttctgctacttcaatgccggccagacctgcgtggcccctgactacgtcctgtgcagccccgagatgcaggataggctgctgccgccctgcagacaccatcacccgtttctatggcgacgacccccagagctccccaaacctgggccgcatcatc

SEQ ID NO: 3018 - DNA, 418 bp, Homo sapien
tggcacacacgaaacagccttcctgggacccaaggacctgttcccctacgacaaatgtaaagacaagtacgggaagcccaacaagaggaaaggcttcaatgaagggctgtgggagatccagaacaacccccacgccagctacagcgcccctccgccagtgagctcctccgacagcgaggcccccgaggcaaccccgccgacggagtgacgctgacgaggacgatgaggaccggggggtcatggccgtcacagcggtaaccgcacagctgccagcgacaggatgtagagcgactcagactcagacaagagtagcgacaacagtggcctgaagaggaagacgcctgcgctaaagatgtcggtctcgaaacgagcccgaaagcctccagcgacctggatcaggccagcgtgtccccatccg

SEQ ID NO: 3019 - DNA, 454 bp, Homo sapien
ggccccacagctgcgcacccagcgggtttgctatggcgatgagcagcggcggcaggtgtgtggcggcgtcccggagcaggaggattccgtgctgttccggcgcggcacaggccagagcgatgattctgacatttgggatgatacagcactgataaaagcatatgataaagctgtggcttcatttaagcatgctctaaagaatggtgacatttgtgaaacttcgggtaaaccaaaaaccacacctaaaagaaaacctgctaagaagaataaaagccaaaagaagaatactgcagcttccttacaacagtggaaagttggggacaaatgttctgccatttggtcagaagacggttgcatttacccagctaccattgcttcaattgattttaagagagaaacctgtgttgtggtttacactggatatggaaatagagaggagcaaatctgtccgatc

SEQ ID NO: 3020 - DNA, 460 bp, Homo sapien
accttaccaaatcactcttgaacattcatgataaacaacttcaacatgacccagctcctgctcacacttccataatgagctatctaaataagttagaaacaaattacagttttacacattcagagccactttctacaattaaaaatgaggaaaccatagagccagacaaaacctatgaaaatgttctgtcctccagaggccctcaaaatagtaacactaggggcatggaggaagcatctgcacctggaattatttctgccctttcaaaacaggattctgatgaagggagtgaaactatggctttaatagaagatgagcataatttggataatacaatttacattccttttgctagaagcactcctgaaaagaaatcaccactttctaagagactatcccctcagccacaaataagagcagctacaacacagctagtcagcaacagcggacttgctgtctc

SEQ ID NO: 3021 - DNA, 311 bp, Homo sapien
gcctgacgaggactgggaggagcagcgggaagagcggaagaagaccatggagctgaccacccgctgaccagtgtcaggcaggggccagcccctcagcccctgagccaagggggaaaagaagaaaaagtacctaacacaagcttcctttttgcacaaccggtcctcttggctgaggaggaggagctggtcaccctggctgcacagttagagaggggagaaggaacccatgatgggactcctggggtaggggccaggggctggggtctgctggggacaggtctctctgggacagacctcagagattgtgaatg

SEQ ID NO: 3022 - DNA, 145 bp, Homo sapien
agcttctgaaaagaatcggggtcaaagaaaaggcggtcgtgttattggtaccatgaaggcgtgagtcgtgtagcagtaacagcttgcgaagtagctagaagtcggaatgcggaataagatcgaatatgatgtggtgattaacgca

SEQ ID NO: 3023 - DNA, 411 bp, Homo sapien
  misc_feature (1)...(411): n = A,T,C or G
ctgagtggacccagggtgtaagtctaacgccagttcctgcctgttgcctcttgtgagctcggactgctgatgccccggtgctgctgagcgccgtgcaggaatggaaacagtgggcctggatcaaagttaaagtttctgagggtgggaaatgtgggggctttgctaantgactgtagcattcaaggcttgaggctggaggaggtagctagggtatagtggctggtgaggctgcacagagcagattcaagaaagaagatcaggaaggggcatgaccctgagttatgaaggggagaagggacagatgagcttccggagactgctctcctaccacacagcactagtccatcctcagcacctgagcctccctcacttggacactcaggggaccacacagagaagtggatggacact

SEQ ID NO: 3024 - DNA, 441 bp, Homo sapien
gttagaaccactctggcatcgacctttcccggtaggagtgccagggagattgtacacccttctgctctagaatcatagagtcactggcagaaagcacctcaggatatggaattcctgggcctccccaggtttctaacatgcaaattatttcataagatgaaaataagcaggccaggcactgtagcccatgcctgtaatcccagccctttgggagtccaaggtgggcagatcacccgaggtcaggaattcaagaccagcctggccaacatggtgaaaccccatctctactaaaaatacaaaaattggctgggcatggtggcagggacctgtaattccagctactcgggaggctaaggcaggagaattgcttgaaccctggaggtggaggttacagtgagccaagattgcgccattgctccagtctgggtgacaagagcaaaa

SEQ ID NO: 3025 - DNA, 307 bp, Homo sapien
aaggtagaagacattcagatgcacaactaccagcaacacagccacctgcccccccagtctgaggagatgatgccgcactccgggtcggtttactacaagccctcctcgcccccgacgcccaccaccccgggcttccaggtgcagcacagccccatgtgggacgacccgggatctctccacaacttccaccagaactacgtggccactacgcacatgatcgagcagaggaaaacgccagtctcccgcctctccctcttctcctttaagcaatcgcccctggcaccccggtgtctagttgccagatgcg

SEQ ID NO: 3026 - DNA, 385 bp, Homo sapien
actttccacagcttttggtaatagatagggactgtttgttttatggctgaagttttgtgaaacaattattgcatttcatacattctgctcatggttattgccttagtttttgtttagtttgtcttagacatctgctaatttgaggatgttaatttttttgtgtatttaaaatatgctgatacttggtctagttttctttgtgagctccttattctcaaacatgcaactgtgaactgatttttttaaaaagggacatttacgtttcactccttcagtataggaatttacgtttttagccttctgtgaaatcagggaatagattcttatctttgccatttataaggttgcattaggaaggtagatttttgaacataaaatgaaagta

SEQ ID NO: 3027 - DNA, 324 bp, Homo sapien
gacaatcttgcacacacgaagaacagtgtaaattaaaaccaaaccaaaggctgggtgtggcggctatgctgtaatcccagcactttgggaggctgaggtgggcagattgcttgagattaggagtttgagcctgggcaacatagtgaaaccctgtctttataaaaaatacaaaaattagccagacatagtggtgcacatctgtagttccagctactcaggaggctgaggtaggaggattgcttgagccagggaggtggaggttgcagtgagctgaaattgcaccactgcactccatcctgggtgacagaacaagaccctgtctca

SEQ ID NO: 3028 - DNA, 100 bp, Homo sapien
aaagcccaatttggacatccgtggtggagcggctccaagacgcagcagagccgatcagacgtccctcctcacggtgtgagcgttgcttctccaagttctc

SEQ ID NO: 3029 - DNA, 364 bp, Homo sapien
cttaagatgagtcaaaagacactttcctctgttccattccccatctcagggactcctgaatattcagcctctccaggctggtgtcttctagtttcccccactgggaatgctggctgggagagccatgactaccagacttttcctcaggctccttggcatgttagtctgaattgttcttgagcactgtactactgacccaacaactgtgactagctggccacaccattcagggctggtgtggcatttatgtgtgtgtgtgtgtgtgtgtgtttttcctgtttgcccagcagtgcattgtgggttccaagagtgggtagtgtgtgtatgtgtgtgtgtcagagggagacctgggcaggcacctctt

SEQ ID NO: 3030 - DNA, 405 bp, Homo sapien
cctcacactaagccaggcgcttcatatgtatctaacttgaaaaatgctgagctagttaccttaacaccattaacttttacttaaaagtttgtttttcttttttaatcccagtgagctccaaacaagttttaggaggctccccaaaaccagtgaagactttaactaaaagtagaatttcaaagtattagaaaccaaaccccaaaattaaatgtgaagatcagtgtctgtactgagctggcccatctggtggacacaggatttgcgttatcgactgcaatgttacccaggattcacgatttctagcatctgtcagggttaagaaaattggattgagtaccaaatacagcagagcaaacccggctttgaggcaagggccccatcaagtagtcatgcagtactttttgt

SEQ ID NO: 3031 - DNA, 339 bp, Homo sapien
aaaaaaaaaaaaaaaaaacctttcctctgagcccatcttcctttcgctccttgactttccttgacttgctgttggaaagtctaatatgaaaagggctgaaattaggcattaaatataactgatgctcaaaggtaagatttccatccaacagattccttctccctcccaagggtcttcccaggcagtgctgctacttatcccaaataaaatggtaaaagaataaagacagccgggcgcggtggctcacgcctgtaatcccagcactttgggaggccgaggcggacggatcacaaggtcaggagatcgagaccatcctggctaacacggtgaaaccccggt

SEQ ID NO: 3032 - DNA, 367 bp, Homo sapien
aaaacaccaccaggccataccacagcctgcccagtgaggcggtctttgccaacagcaccgggatgctggtggtggcctttgggctgctggtgctctacatccttctggcttcatcttggaagcgcccagagccggggatcctgaccgacagacagctgctgctacagctgaggcctggatcccggcctttccctgtgacttacgtgtctgtcaccggcaggcagccctacaaatcctggtgacctgctctcccaagaacagagcctgtccccagatgtcccagtagcgatgagtaacagaggtggctgtggacttcctctacttctccttgctggatcagggccttcctgcctcccggctggggcag

SEQ ID NO: 3033 - DNA, 356 bp, Homo sapien
agagacagggtctcactatattccccaggctcaactcctggactcaagtgatcctcccaccttggtctccggaagtgctggaattaccgccactgtgcccagaccccaaatttattattaaaaaattcaaacatacagtaacgttgaaaaaacgtataataatcaccaggacatccataattatattcatcaattattagcattctgacatgttcattttatctagaaccatttgaaagcacagacatgaagacacttgacccctaaatattttagcacgtgcttcctaattagagggacattcttctatacaaccataagaccattaattaatatattttaaaaagaaaaaccgt

SEQ ID NO: 3034 - DNA, 383 bp, Homo sapien
gcttggaaaacggtgttgagctgggctagctggtctcctatcaactcagtcctcagcaggcgtgccacttcctgctccgccagctcagtccaaccagcctcctcatcatccccagccaccagctgggccttcagctgttctaagcctcggtaatcccgaagctcggtcctcaacatggtcagcagtgcagatgggggcaggtggccctggaggatggaggccagagcctgaggtgcccggaatgtgctgctgtgtctcagttcttctggagtgagctgggcaccccgcaggctccgcgctggtagtacccgcaggcctcctcaaacaccagatccttggctgaaggcaactcaacaccctgtggggcttcccagcccacacaa

SEQ ID NO: 3035 - DNA, 195 bp, Homo sapien
gagacaaggtcttgctctgtcacccagggctggggtatagtggcacaatcatcactcactgcagaacagcctcgaactactgggttcaaactgatcctcccacctcaccctcctgaatagctgaaactacaggctcacgccaccattcccaactagttgtttaatttttagtagagatggggtcttgctatacgg

SEQ ID NO: 3036 - DNA, 368 bp, Homo sapien
ggagaacagagcccaggtactgcagcggcctcggtgcaggtacagctcaggatcctgcccggtttctcagctggagaaaaggcccagggttagtgaagcatccagaggcctggagcttggacatggaagacccagagttgcagccaagacccatgagaggctgctcccccagggcccgcctgagctgcccagtgagtctccccctccggagctgccccctccggaagctgcgcctcctgtgttgccagcctcctccctgcagccgccatgccactgtgggaagcccctgcagcaggagctgcacagccgtcggtgctgcccttgcggagaagcgtggatcgggctcgccacagcgcttggcaaggcct

SEQ ID NO: 3037 - DNA, 404 bp, Homo sapien
gggatttattggaagaaagtgcactcatggagggtctgtccacttggctcactccaacagtttgaatttggaattctgcttttcttcatgaagcacagtctcataagcccacacctacggtctgagttctgaactctcagcaggcctgatagaccacgtccctacacatattcacatttggaaatcattctcagtcacagtgcatcaagtccagatcacagcggcgggctttgctctcacagtctgtggcatatgtctctcctgggatccacacagccgaccactgaacaacgatgaagggggctttcgtgggaaagttcttctcactatgcctttccacaggcgacacagggtcacatctcaatacaatttccgtcctattctatgatacactattatccact

SEQ ID NO: 3038 - DNA, 406 bp, Homo sapien
ccttcataaaggaaacagaggacatcaacacgctccgggagtgtgtgcagatcctgtttaacagcagatatgcggaaccctgggctggaccacatggtccccgtgccctaccggaagattgcctgtgacccggaggctgtggagatcgtgggcatcccggacaagatccccttcaagcgcccctgcacttatggagtccccaagctgaagcggatcctggaggagcgccatagtatccacttcatcattaagaggatgtttgatgagcgaattttcacagggaacaagtttaccaaagacaccacgaagctggagccagccagcccgccagaggacacctctggcagaggtctctatgggccaccggtcctttgacctgtgctggggaattgctcggttcagacaa

SEQ ID NO: 3039 - DNA, 297 bp, Homo sapien
gcctggccgagctgagcagcctgagtgtcctgcgtctcagccacaattccatcagccacattgcggagggtgccttcaagggactcaggagcctgcgagtcttggatctggaccataacgagatttcgggcacaatagaggacacgagcggcgccttctcagggctcgacagcctcagcaagctgactctgtttggaaacaagatcaagtctgtggctaagagagcattctcggggctggaaggcctggagcacctgaaccttggagggaatgcgatcagatctgtccagtttgatg

SEQ ID NO: 3040 - DNA, 270 bp, Homo sapien
tggatgggtagttgtcacctcaaattgaccttagtgtatcttcaacatagttgtaatgtaaggaacccacagtttgaagactaataacttgggtttgaatcttagctccatcatttattgctaatttaactttgagcaagtttcttaaacttctataccttggtgttcccatgtgtaattgagtacttggcctttggagagattggtaagtgccaattaaaaccaattcctggccaggcagccagactgctctttctagcccagcctccc

SEQ ID NO: 3041 - DNA, 351 bp, Homo sapien
ttcggcaacgagggaatccctccagattcctgtcctggcccctggggattctgtggtgtgggtggaatgagcagagtgccacctctgtctggtatgacctggagagggggcttcctctcttaggggtgagaaagcattgaactagaagattctagaaatccctcatagaagcactcagctccctcggggactcccagggaagcttgttactgagaaggacagtggaggcggaatcgtgtctcccaccatgttaagtgtgtcctctgctgccaaggaccctcgtctacaccttagaccaccagccccagctgttctctgtcagcacacccacctccatcccctctcccaacc

SEQ ID NO: 3042 - DNA, 447 bp, Homo sapien
attcggcacgaagggcctctctccagatcttggactctctcaaggccaagactctctctcttaagatctctatctcaaggccaagatctctctccagatattggcctctctcaaggtacttccaagatctcagagggccattcactgtggatctaatatgaagacagagaaaccagccttccagaggagcggacacatttccttagtcccaggatacactttgtgtggaatccacagatctgccctgatgatcatgaaggaatgcgaaagagcctggtaaaacgatatggacttgtgcaaatgcaaagcaatggtgaagtcatcacgaaccgcacagactggacagaactcctatctgggctgcaaatggcttggggttcagtccagctccaggggccaggagatagttggctacaaaggagcttctgggagtgccccctcccttcc

SEQ ID NO: 3043 - DNA, 375 bp, Homo sapien
tgatacttaaaatacctttactaaaaaaatgaagccttccatttccattcccttatatttacatgaagataaaaatacttactaagtcgttgtatttgtccattctggcagtgctataaagacatacctgagcgtgggtcatttctgaagaaaagaggtttaattggctcatggttttatgggctgtacaggctcctgttctgggggaggcctcaggaaacttacaatcagcagaaggcaaagggaaagcaagcccatcttacatggcaggagcaagaggaagagagcaaagggggaggggttacacacttttctttcctttttttttttttaagattggagtcttcactggtcaccccaggctgggaggtgcag

SEQ ID NO: 3044 - DNA, 386 bp, Homo sapien
ttcggccgaggggcccagccctgtcagcctggtagagacagcacctgaagacagctcaccccgtgggacactggcaagcagtggagatggatttgaagaaggtctgagtgtggccacagtagtggagtcagccgtttgtgctctgagaaattgtatagccttcatgcccccagcggaacagaacccggcccccctggcccagccagagcctctggtgtgggtcagcaagtgggttgactactccaataagttcggctttgggtatcaactgtccagccgccgtgtggctgtgctcttcaacgatggcacacatatggccctgtcggccaacagaaagactgtgcactacaatcccaccaggcacaaagcacttcttccttctccgt

SEQ ID NO: 3045 - DNA, 113 bp, Homo sapien
aaaccctcatcaatagatggagacatacagaaatagtcaaaccacatctcacaaaattccatgtatcagagcgtcgcattccaagcgcaaatgtgatgatttggcatgtgaaa

SEQ ID NO: 3046 - DNA, 139 bp, Homo sapien
gcgccgtggttggtgggggggaggaactgtggtggagctcacatccttcagtctcaggcccctgggagggggaggggaaagaaccagggctgagctgtggagtgaaggggagccatttctctccaccgactgcaacctc

SEQ ID NO: 3047 - DNA, 266 bp, Homo sapien
accataaaagttgaaccatgcatgtttattgctgcactattcacaatagccaagacatggaatcaatgtagatgcctatcaacagtgttctggataaagaaaatgtggtacatatacaccatggaatactacacagtcataaaaaagaacaaagtcatgtcctttgcaacaaaagatgcagctggaagccatcatcctaagtaaattaatgcagacacagaaaaacaaataccacatactctcacgtataagtgggagctaaatgc

SEQ ID NO: 3048 - DNA, 118 bp, Homo sapien
ctaatttgtctgtttattcccacaaggtagccaggggtgggggcgccgagccaagcccagcaaggccagtgggaccgttccgtccggcgggggtgcacagctggagttttcagggtct

SEQ ID NO: 3049 - DNA, 369 bp, Homo sapien
attttaaaatttttatttgaatgaaatcattgtaataatcattaaagtgatttgaaatagaatgatctctgtgaaaggaagtttatagcatcactatttataggagagaaagcagcagaggtatgcatctggaagtgaatataacattgtaaaatcagcccacattaaataccaaaaaagtaagaaccatcaaaatgcagcattatttacaggattaaaaagtgtgaacagtacagagttaaactttcttatgtgtgaattttgacctgctatgttgttagcaaaaagctttagtgtttgtataaaatgagtgtgtacccttgatcccaaccaccaccaggtcaagacacaaactgacaatgattcctt

SEQ ID NO: 3050 - DNA, 250 bp, Homo sapien
gcccaaaaaaaagttttattaaattagttgcatgcaggagaaattgggttctccccaggggaagcagagcggggtgtaagggggcaggatccagggcggggaaaggcggggcggatttgggggcctggaggctggggcctggtaactgggggaggtgaagagccccctctgggggggctgaaacccatccttgggggggccctgggactcagagtgcccccgcaagtgtgacaaaagacaaatatccaca

SEQ ID NO: 3051 - DNA, 348 bp, Homo sapien
ctttttttttttggcgagactccaagactattatttttatttccggacaaaaacatctgcttcacacagtgcacggcatcaaatgaagaggaaagaacttgtatcccaaagcctggctttctgtatcatccacaaattaagacagcatctgctgagcccatgctgagcctgtcacagtcaacaactgggaaaccggggcctctactgaaccaggggacaagtagccgaagcacttaaacagcttgatacttgttttttggtacatttgtttatttaaagcacaggaaatgaataaaatgccacctaaaaagtatctgcaatgaataaattatttccagtgaagcactg

SEQ ID NO: 3052 - DNA, 357 bp, Homo sapien
acagtctacagcttacttgcgtccttcagcccacagctcctagtccatctacgacacttgtgcctcaatgtcatgatacactagtaggtgtcactattcgtcatcagtggagaagacactacaagtcggtacagcggacagctatgcagcaaggctcagatgagcaatctccatctgtcgacaggggagtaggtctatgaactggtctaagctagacagatgtccgttcgtgacatgatagcagcgtctagcacaaggctccacagacgctaggttcattgactagatgcgaaggcacagagtagtagggatcctcctacaggcagagcccaggctggacatgctgactgtcctctc

SEQ ID NO: 3053 - DNA, 410 bp, Homo sapien
gctcccctccctactcccggcccgtagtggaggtgacttcctgcgcagcggcttctgagggcggagaacccacagggagtgcgacccctttgcacgctgtgagtgggcaactgtccgagggatcgagccgatcgaagggtgaggaccagctcgcctgggggtggacggcctggaaaagccgcccctctttggcttccctctgccgcctgcagcccgcacccctccagagattcgtgccccactggacggtttgcgaaggctgaggctgccttggggactcacaaaagaccacaggggttattcgaagtgtaaatagggaaacaatcatcagcacacaatccggctaaagggataacatatgagtttgcttgttgtccttcatgggattcttctctttttatagctggacg

SEQ ID NO: 3054 - DNA, 106 bp, Homo sapien
taacgccctccaatcgggtaatcccaggagagtgtcacagagcaggacagcaggacagcactacagctcagcagacctgacgctgagcaagcagctacagaacaca

SEQ ID NO: 3055 - DNA, 460 bp, Homo sapien
aaactacttaatttctctgcatctcaatttcctcatatgtaaagcataataactacctctgaaaccgttttaggaaataaccttaaggtatgtgaagtgtccagcaacatagctagtaatggtaaaggatcaatacatagcaattcctttcctctcctaccccacccactgctcccctgcctcctgaattctctaccatctcttggagtcaattaaaaaaaaactgtactttaaaatattaccttggagtgtatcatcccttttcatatatgtgtggtaggcatatatatcttttttaaaaatatttttttcccttaccatctgcagcagtacagcgagaagcagttcccataggactaatcccatggcatacatatctatcctcaaaaatgcatccctttggaagtttatagcaccctctaatacctctgggagccatgtacctccgggtaccaacctg

SEQ ID NO: 3056 - DNA, 383 bp, Homo sapien
gacacaggccgccctgcagtctctttaggtaggcagggcctttgctgggacccctggtggaggccttcacaaaagcactggttactggtttcctgctgggtctaccttgcttctgggcacacctcaagcctcccctgctttctgcagtgccccacgcggttttccctgcacttgctccataattggctgatcatctgtgggccccggggctggatgtcaggcctccattgccctgctcagtttggctgcatttggctgccgtctggggtcctggtcctttgtgcaaatgctttgggattccagttgtgagctgagagagatgatggcctctctgggcctttcctctccctttactgagagctcagtgcttctggggttgaagt

SEQ ID NO: 3057 - DNA, 491 bp, Homo sapien
gagactgggccttgctctgtggcccaggctggagtgcagtggtgcggtcatagctcactgcagcctcaaaccctagggtgaagccaccctcctgcttcagactcccaaattgctgggattacacacgtgagccgccccgtccggctggggcactgtgatttttaataactctcatgccacccagttgtctacaatccagggacaaagaggtttgggtccccgtcttacaaaaaaaagaaaccaaagatccaagaggctattgaataagtgacgtgttgtctgactgcttacttcctgctgagagctgcctcaattacattacatgcctgtaaccattcattctcaccaccccctgctgaagtgggtggagttaccagccccatttgacaaatgaggaaacggaggctaggagaaggcagctcacttgcccagtcaaaaatgctaggctgggcatggtggctcatgctgaaatcccagcaatttagggggct

SEQ ID NO: 3058 - DNA, 434 bp, Homo sapien
atggcataattgaaccaattactggattcaactatattaagactatttccttaaatcctacttcagactaaattattttacctacattcttttccatattttggaacttctgagtcattattttccatcttgcacattaaaataatttaaaattacatgtatcccttctcaataagtttaatcagctaaccctaagctagaggtcaaaatctacttcctctaatatcaaaacgaaaatttaaagttttccaaatattaattcaatattaattgaatattcaatgaattaattcatttaatgttagattaattcattgaatattaattcgatgaatgactaattaatagtattttaacaagattttggtatatttaacaacattttggtaataaagacaataatttgagagtgtgtggaagtcccctaatagaag

SEQ ID NO: 3059 - DNA, 468 bp, Homo sapien
caactggctcacttaaccatgaatgtgaaaggttgaaaagcttatttaaatgtgggctactgaactttcctggggctacaagaactgatactttgttcagccattacactcagtgaaactctctttttaaatgaacctcgtttcacattatacaaactggaccagactggctggaaagggcaggaggctccctgtgcaggcccacggtcgaagggggccagcgtgattgcagacagggtccccctctgctggaaagcttccaattctctaactaccagcatcttccattttccctattagctttctcctgtgataatttttctacttttaccttgtaaaccaaaaataagattcacagcccctgaccatctgaacggacccctcctcttggcaagggcattccaaagctaacctgaaaaactagctcaggccatgatgggaaagaagagctggacatgcctcgttatg

SEQ ID NO: 3060 - DNA, 329 bp, Homo sapien
caccggagccgcggggtaggcggggcagtgcgtggggcgtcctggagccagtggtcgagcgccatctgtgccacctcagcctcagcctggctgactcgggccacctgccggacgtgcatgggttcaacagctacggtagccaccgaaccctgcagagactcagcagcggttttgatgacattgacctgccctcagcagtcaagtacctcatggcttcagaccccaacctgcaggtgctgggagcggcctacatccagcacaagtgctacagcgatgcagccgccaagaagcaggcccgcagccttcaggcggtgcgtaggctggtgaac

SEQ ID NO: 3061 - DNA, 256 bp, Homo sapien
cctagccctggagattccaccaactccagcgaaaacatgtacactatcatgaaccccatcgggcagggcgccggcacggctaatttcccgctcggccctggccggacgccatggccgcctatgagcgcgtatggagcctcaccacgtgaacggatccctgggctcgggcgacatggacgggttgccgaagagttcccccggcgctcgtggcggcctgagcaacgccccgggcaccccgcgggacgacggcgagatg

SEQ ID NO: 3062 - DNA, 465 bp, Homo sapien
gattcggcacgatgtatggagtagacgcagagacaccacacagggccctggtggcacgaaaggtccctttgcacttgaagatctgctgagggtcgtaggagcctaggatgcccatgttcagccgcgcgttgatgtgggacagctcgtcatttaacatggatgcgtcccgccggaactccatgaggtcctcgctgagcttgctctggttttcgtccaggacgtcaaacttgagctccaggctcttctctagctggtcgatcttctccgagagctttcccagcatggagcgcaggaaggcgatctcctggtccttctgggccagagccacgtgcatctcgtggaagcggtcatcgtctgctgcagaaactccttcaggccctcgaagcggcaagtctccaggtgggtctcgtaagtgtcctggttcccgatgaacgtgcacttggagtgggggcatttgatgtgctc

SEQ ID NO: 3063 - DNA, 429 bp, Homo sapien
  misc_feature (1)...(429): n = A,T,C or G
gttgtcggggacggcctatttttctctaccgttgggactggcagggcattgcagccatataccatagtggtcaccaaaaaagaaacctcttcaacttgaaaagggaagtgaacatgagccatgagagagatttaaaagacccctgtgcttgcagttaatgccacgttgattgattatctgtgcttcaaaggtcacagaaatcttaaaggatttttagcaccatgtagatattgtcttttgtcctgctttataaaaagcgttgctataatgtattagtgggttctcgtgtctccaaattaccaccgtggctaggctgctggaaaaancactgttctgttcactccaatctcctggtagactctgttggtctatagacttctgtgaagccagtgggtttctactaataaccaggtccagcttattcccgga

SEQ ID NO: 3064 - DNA, 475 bp, Homo sapien
  misc_feature (1)...(475): n = A,T,C or G
ggtaacaaacctgcacattgtgtacatgtaccctagaacttaaagtatagattaaaaaacaaaacaaaacaaaacacaaacaatgaggtgctattgttttagtggtgagtatccggagacctgggagttctatttaccaggtataacctgggctcaaaattccaggctgacttcaggcatgtcctcatctcatagatgccagcactaaggcccagagagggcgngctcattcagcccacccatcttctcacccctgactgcatttcccgggggtccttctgcagccaggtgctgctgtggtactttgggatctattggctgagctcccagagaagggtcatggattgggctagtttggaacaagtgaagggactgaagatgggctcagtatggggcgaagccgttcaggaagggtctgcagagtgagtaggggggttttgactaggaaaagttcaaccctgccggggccgctgtc

SEQ ID NO: 3065 - DNA, 471 bp, Homo sapien
ccaaaatgggacgcttgccaaacattgagtcctcctcaaaaatgacaattctgtgtctggtgggatctgaccttgtgtgaggttagcctgaagtctgaatggagcccatagttggaaaacaacctaagaaaatctcttagaagcaggtgcttggggaatgcagttcactgacagcacaggaccctgcagatggtttacatgtggtttgggtttcacgagaaagaaggattcacttcccagtcagcatctggctctgcagatggtaaaggcgtgctttagtgtgtagacaataccggggaacacgtttttaaccggaagtggaattctagaccacaggctaccaaaactaggcttaggctttgcgtgttgctgtgaagttgtctgtgaaatcgaataatcacaccattgttcagtgcaggagcccaaactagtccttacccaagaagtagtagcctctggatagaactgtgt

SEQ ID NO: 3066 - DNA, 410 bp, Homo sapien
caactggctcacttaaccatgaatgtgaaaggttgaaaagcttatttaaatgtgggctactgaactttcctggggctacaagaactgatactttgttcagccattacactcagtgaaactctctttttaaatgaacctcgtttcacattatacaaactggaccagactggctggaaagggcaggaggctccctgtgcaggcccacggccgaagggggcagcgtgattgcagacagggtccccctctgctggaaagcttccaattctctaactaccagcatcttccattttccctattagctttctcctgtgataatttttctacttttaccttgtaaaccaaaaataagattcacagccccctgaccatctgaacggacccctcctcttggcaagggcattccaaagcta

SEQ ID NO: 3067 - DNA, 452 bp, Homo sapien
ggcactttttaaaaatgtttatatgaggaaacaaagaagacttgctgtgatcagcgacatgcccagtgagtcgaagagaagaaactggaattaagctatctgtgtgccacttaggtcaggccctccactacatggtcctgcttctcttgcatgagttagctactcatatcatgagagcatccctttcttaattttctgcgctagtggagcagaccatgtatgtgctatggcccatatgttgaaacttgtttatctacagctagccagatggtctgtaacagcacacaaagaagccatttggaaactttcagagggtcagcacgttttgaaaacaactcagagtaatgcatattgtgatgtcattgcttactttaagcttacagtgaggaatatcttgttaggtactgaatgtgaaacatgcagactttgagaaccaactcagaggtcctagc

SEQ ID NO: 3068 - DNA, 206 bp, Homo sapien
acgagcctcagtgccgggtggaaggctctttgccttgtccaccagggctcagcaagccctgcaggtgtgtccccgctcgggtagggcccggccgagcggcagggagagccagtcctgtcggctgggccttggacggctgtcagttttgcacatgatgttcctattgtaactctcagagaccttaaaaagaagtttactgcaatgtg

SEQ ID NO: 3069 - DNA, 441 bp, Homo sapien
gattcggaacgaggcgcccgacagaggcctcctgatccaggactggcaggattgatcccacctccaagtctccgggccaccttctcctgggaggacgaccatctctacccctagaggactgtcactctagcatctttgaggactgcgacaggaccgggacagcaggccccttgacagcccctcccacaggatgtggcatctgaggcctaaaccatttccagctgagtttccttcccagactcctcctacccccaggtgtgcccccttagcctccggaggcgggggctgggcctgtatctcagaagggaggggcacagctacacactcaccaaaggcccccctgcacattgtatctctgatcttgggctgtctgcactgtcacaggtgcacacactcgctcatgctcacactgcccctgctgagatcttccctggggctctg

SEQ ID NO: 3070 - DNA, 369 bp, Homo sapien
agttttggaggaactgactgagcttcctgtgatggttgaacttgctagtgattttctggacaggaacacacctgtgttcagggatgacgtttgctttttcatcagccagtcaggcgagaccgcggacaccctcctggcgctgcgctactgtaaggaccgcggcgctctcaccgtgggcgtcgacaacaccgtgggcagctccatctctcgcgagaccgactgcggcgtccacatcaacgcagggccggagatcggcgtggccatcaccaaggcttataccagtcaggtcaactctctggtgatggttggtttatatgtctgagacgaatttcactcaaacaggagcaagagatcactgtgcttgagatt

SEQ ID NO: 3071 - DNA, 437 bp, Homo sapien
gcgaccgcctgcacttgcgctggggactcgctggactgcggtgggcgcgggctggctgcgttgcccggggacctgccctcctggacgcggagctaaacctgagttacaacaaactcgctgagattgaccctgctggttttgaggacttgccgaacctacaggaagtgtacctcaatcataatgagttgacagcggtagcatcactgggcgctggttcatcacaagtagtcgctctctttctgcagcagcaccagaatcggagcctcgacgggaagcagctgcaggcctacctttccctagaagtgttagatctgaatctgaacaacatcacggaagtgcggaacacctactttccacacggaccgcctataaaggagctcaacctggcaggcaatcggattggcgacctggagttgggagcatttgatggtctgtca

SEQ ID NO: 3072 - DNA, 186 bp, Homo sapien
aaccatattttcattgaatatattatcatgaacactttcagtcattaaaatctgttctgcaacatttttagtgactgcaatagatccacattttatgaataaactttgatgtttttactgtgcaatttctgtatgagtagataagggtagaaaataatataatgctatatataatgccacacaaag

SEQ ID NO: 3073 - DNA, 420 bp, Homo sapien
aattcacaatggaagtttattgcaaggatacacacaaatgttgatgtggaaaggtcctcccaccagcagcacagtatcacaggtcccatcctcctatcttctggaagttaagaagttcaaacctgttttacttgcatttatatttcccaaggacagagtgccaccctgtgggtaaggtcctagtcagcaacttttaccttcctaacaaacttttctgttcaagagatagcagctaaagggggcaaaaaacatgattggaaccacttttctcaataagaaactttgtataggccggccgtggtggctcacacctgtaatcccagcacttttggaggccgaggcgggcggatcacaaggtcaggagttcaagaccagcctgaccaatacagtgaaacccgtctctacttaaaatacaagaac

SEQ ID NO: 3074 - DNA, 474 bp, Homo sapien
tgctaactagatgctcattttatctttttaaaaatatgtatttcagttgcacatgaaatgtactttgaaagaatgagctccaaagttctggggggctgagacaggcgggctgagtgaaatgatgaagaaacagtggctttcagtgcgggccaagagagtagtgagcaatggtcagttattgagctgtggagtgccttcaacaagggtttttagacacatccatctggtgcctcatcccagaacctcacaggcctagggacctgaaatgctccccatgacaaggcaaacttcatatcctcacatgctgagacagactcaactttcagtctggaactgggctgggtgtctgtcagtccacgccacccatatccggagtacatcagagtctgggttcagtggcagccactttcgctgccctctcctgccccacacctagcgctctgcctggcccctttgctgtgggcgtgaaaatct

SEQ ID NO: 3075 - DNA, 481 bp, Homo sapien
caatttggaaaacttttatcaatcaacaagttatcaaaacaagggtttgctttttgacagtgaatgtacaatattatatggtttgccattatttcctcttttggaagaaaggtaaaatgagaaatacattatataagtcattataagttcagtagatttttaaaacacttgagacacgagttagaaaaaatgcaattgaataaaccaattgtaagacccatctcaaaacaacaaatttaaatatgaaccacatattagatgatactaagtaattattgtttttgttaggagtaataatatcactgtggattttttaaaggccttactgaagtattataagtgaaataatttgtgtgatttgctttaaaatattccgattttaaaaattttgtgttggatggatgcagtggctcatgcttgtaatcccagcactttgggagacagagataggattgcttgagggcagaagttccagactagc

SEQ ID NO: 3076 - DNA, 399 bp, Homo sapien
agagatggggggtttcaccatgttagccaggatggtctcgaactcctgacctcgtgatccacccacctcagcctcccaaagtgctgggattacaggcgtgacgaccgtgcccagcctcctttttctattactagagaactccaggacattaagaatttcaaaagcgattttttcacccacggcttctacggtgacagagtatggtgttcctgtagggaaacaaagccaagtttttttgctcctttcactaaagctgcttcatccggggaggaagcctggtagattataatatttccagggataacagtgtggcacacagataacagggtaagaaattggtctatatagttttctgtgggatggccattctcaatgttctccaataaactggggtaatta

SEQ ID NO: 3077 - DNA, 402 bp, Homo sapien
ttatttttttgcttttgaattactttatatgacataggacatgacaaataatttacataatgtgaaactaacaaataatgacataatataattgaatagaataaacattatagagtaaaagcaaaaaaattaatactaattcatgtctgtatttcaagagagtgaaaagacaggaataagggagctgagaggtatcaaagtgataaacgcattgccttaagtatgtgacacattgcagatattttatttttgactttgacattaaaaaaataagtcaaaatgcattgggaaaacttatgggtaaatattggaactaaaagccgttacgatgccttccaaaatagaaggcagaagaaaaaaaatagacaaaaataacattaaaacattaaaaagagaaatatt

SEQ ID NO: 3078 - DNA, 475 bp, Homo sapien
ttatacaatgggggggaaatagtttatgatgatagtcctaaattaccaaggaaaaattaaagtgttttaatatattctaagaaagcacatgtgtacaatccatttaatactttcatcaaatgattaaagtaaaacaaacattagttcttagtaagctaagcttcattgatctaaaatatttacctacaggacatgttttcttccttgagaatgccataaaatgaacagacctgtaataaaatcagagctcctaatcttcactgaaagaaagggcaatacaagcttatagagaagaaatacgaatttcaatttcccaccaatcgtatacatcataaagcatcctgggatctaaaacacacataccacttaacaataacgttgtgttccttgttaactttggtgcattgattaaaagttatctgaaaccttaaaaatctagtcacattcgatataaatatcctagactttagaaatc

SEQ ID NO: 3079 - DNA, 187 bp, Homo sapien
cctggttcttcccccgaatgaccaccttccccagttcctcctggggtgcccggtttttgggatctatcgccagcaccttcttgaggtcagcagttgctttttccaggttcccaaggggagcctggggaaacccccttcggtataaggcctttaaatggccaggctcccgctccaaaaaccggtcaca

SEQ ID NO: 3080 - DNA, 210 bp, Homo sapien
aaaatctaaaattgttccaaaataaaaaggttatttttaaaaccaaaccaaaacataaaaccacctgggagaacccaggtttgaatatcagatctgacactgatataaccggtgttacctgggccagttacttaaactttctcagcctctgtttcctcatatgtaatatgggagtaatttaagacttattcttcaagatgtttatgagaa

SEQ ID NO: 3081 - DNA, 465 bp, Homo sapien
tgacggcctccagcccacaggcctgctttctcctgtcctaacaccaagcctgggtggcagatgaacagtgcttccttgggttgccagctgagtcccggtattagggaatagtttcagctctttcaaagtgcacagtgttacagtcgaatgggctcccatcctggaataatatggagaatcctttgtcttccactcactgtcattcacaaggcacagtgccccatgaaattgccccaatagaaaacatggcatccctgacctccaaatggtctgttttggcctccattcctatatcctttaaatgactgagcccagctatagatgtcttaacatcattgttttctgttcttttgttccgggtaataataaggagctgaggacagctgaggaagggcttggctgacaaaatgccttccgacagagccctaactactccacgtaaacctaggacagtctcaatggtag

SEQ ID NO: 3082 - DNA, 434 bp, Homo sapien
agagatgggatcttgcttggttgcccaggctggtcttgaacttctgggctcaagcgatctgcccttcttggccttccaaagaagggattacaggtgcgagccaccatgaccggccaatgacatgtttttaatgtaaaaattctacactaccacacccagtccagccgtatgttcatcttttacgaaaatggctcagtgagcttcactgtggccattctgcccttccaggtggaacctgatttatttaccatcattccaggatgggaaatctgaactctatcagtcagctctgcagccaggaagcgtctgccgagccacctaacaggcttaacagaccacacctgaccagccgaggagccccaccaggagaggagccggttgaaatgtatggtctcccttagaaaaagccttgaaaacatcttttcatgtctgag

SEQ ID NO: 3083 - DNA, 324 bp, Homo sapien
tcggcactaggactttccagattcttccagcaacccaacagccacccgtttcctcactctcccaatgcagtacccaaactctctggacacacacactcctcattcacactcagaccagaagctttcagatgcactgatacccactcttactgctctgaagacccatgaccaggatggttagcgatggaaaacatgatggcccctgcctagaatcagaggagatgcaggtgctttagaacaacatggtgtcattgctatatgactcaaaatcgtgtgggtgaacgttcatgcctctcacaagtgtgttggtggatggttcactga

SEQ ID NO: 3084 - DNA, 202 bp, Homo sapien
gtgatgataaagcccagttctggaattggagccgtattaaggaatgattctcttccagcgctgctcctcaagggttgggggtccttctccctcgcagccaccacatgtctcagggctaccttctccgattggatttgcatttgtggcactgtctttgatgcagtgatgtacttaatggtgcaataaagctgcttcgatttgg

SEQ ID NO: 3085 - DNA, 142 bp, Homo sapien
ccaaccatttatccacccatccaaccatttccatctgttcatttccatccatctacccatctacccattcactcatccgtccacctatccatttatcacccatctacccatccatccacccactcatccatccattcatcca

SEQ ID NO: 3086 - DNA, 462 bp, Homo sapien
cttgttattcctccagcaactccctcaccaccacgcctccctgcctaccatccccggaagggtgcttattctttaacaaagagaatctaaaaaaaaaaacaaaaaactgttgtctaatatatctacagtaaatgttacactagagcttttattttcctctgtagcttttcagaagaagcaatttaccttggatttgtaaatcaagctgaaacttttttgatgttcatgtactcatatgtcttgtaggtggtaggtgtcacttgtgtgtatgtgtaagtgaagtatgatgcatgctcattcacttggtccctttgaaataagggaaaggatcacagtgctgctgggccatgatggtatgtagaagggtctgtcagcacacatggaaagcccccatttgcacagatgtagaactttaataatccagatgcaatcattggaagtatttaatatgcaattggtagc

SEQ ID NO: 3087 - DNA, 271 bp, Homo sapien
tcggcacaggcaggggctgaaaattcaccagcgctttcattttgccagtgccctgaagcgaatgtccgtgcttgcctcgtatgagaagctgggctccaccgacctctgctacatcgcggccgtgaagggggcccccgaaactctgcactccatgttctcccagtgcccgcccgactaccaccacatccacaccgagatctcccgggaaggagcccgcgtcctggcgctggggtacaaggagctgggacactcactcaccagcaggcccggg

SEQ ID NO: 3088 - DNA, 459 bp, Homo sapien
tctgtcttgttttcctgccaatagaagaactatgataaatttattcatagcagtgtgataagaacttgatcttaatcatacactgtagccctcaaatcgtgtattatgctggcttgtttttggtgtccctagtaatttcatcagattgtgagctccttgggagcagagaccatgtttatttgaaatggtggcagcacagttcctagcaggtgcttgcattttggtagatattcaataattatttttcggcttattaatctttgctctccaaactgccatataaaagaaaacatcgaagaggagtgatgttttacacccaagaatggatccctcctggtagaatttcaaataatgacctggggttccactgcctttcaaatctgtaaagtgttaactaccacctgcattgtttatacagcaagtaggtgatttctagaatgaatcttttcttgagtatga

SEQ ID NO: 3089 - DNA, 447 bp, Homo sapien
gccacttttctttttaagacgatcatttctgacgtttgtagttgggccaaacgtgatcccacctcccagcacctcagagccactgcaaggtttatctggagaggggccaccctggctttctcctgcaaaagaagatttgggctttcaggtcaccaagtgtttgctgcagattggttctcattaaaataaactctggacagtggtccataattttattatcgacctttgattttgttgaggttggagaggcatccctttagaatgacagattttttcttggaatttcataattatataaaaaagcagtgattaaaaaaaatcaagttactggttaagaaagctggattatgtccttgatactccagtgacatatgacatttacttttcttaaactaaaatttaagcttctctcatttcctcacatcttcatctagaatttcatcctca

SEQ ID NO: 3090 - DNA, 515 bp, Homo sapien
tttaaaaagacatttcatagccaacaagaatcagtagaagtgctgggagcagcagctggggaagctgcgcccacgggctctgcccgttccagctggagccgcccgtgcctccaggggccaagaggatgatgtcgtggcctccattctcgtttctatgcagccccatagtccaaggacacccagtccacatctaccatatagcaagtttagtaagggaaggcagcatacgtcccagggacagtgggtttggatctgtctagaacagcggtttgtggctgtggccagctccgagagtgatatttgctctggtaggtgagggcctgagggtacatttctccacctgtgccccctcatgttcacagaggatttcagcagctgcaactgcgcacgccaggtggggaagggtgggggtgggcctggttgccccatgttaggaaatcactaccagtcaggtggggctggggctgggtggacaggatcaggattcccttgaaagcccaggcagggtgagcagt

SEQ ID NO: 3091 - DNA, 200 bp, Homo sapien
tcggcgttgaccggcgagaacctggagcagctgctgttgcacctgaaggtcgtgtatgacgcctacgcggaggccgagctgggccagggcgccagccgctcaggtggtagccacgccagagcggggtcgcctctgggcctctgtctgagcaaacctggatgtgaattcggtggttttgaatgcataaagtgccttgtgga

SEQ ID NO: 3092 - DNA, 303 bp, Homo sapien
ggtgcacgttagtcagcaggaggatgataacccgaagcagttgctgccaggctaagacagtacaaagacgtggcacagcaggtcattgaacttatacaagagccgaggagtgctcaccaatttccggaacgatacgaacaaaatgtggcccatacgtttacgacacttttctcaaacaagatcacacctattcagtccaaagaagcatattgaccctgcccatatggaagaaccatggaatgatgtggtcattcagttcaatagtagtgtgtagtattggtagctgtgtccaatattataagc

SEQ ID NO: 3093 - DNA, 208 bp, Homo sapien
gctaaacgccacggagctcacgcaggacccggccgcctactcccagctggtggccgtgctggtctacaccgccgagcggccgaagttcgccaccggggtagagcggcaggactggatggagctgttcattgacacctttaagctggtgcacagggacatcgtgggggacccgagaccgcgctggccctctgctaaagcccgggcaccc

SEQ ID NO: 3094 - DNA, 365 bp, Homo sapien
ggttcctgaactagagaaccagaaaggccctcagcagttggaggaggccagactacaggaggaagagcagaaaaaagaggagctggccaggctacggagagaactggtgcataaggcaaatccaatacgcaagtaccagggtctggagataaagtcaagtgaccagcctctgactgtgcctgtacgcccaaattctcactcgatccactgctaaactcagctgtgactgcggataccgccggcaatgggacctgctcttaactcaaacctaggaccgtcttcgtttgtcattgggcatggagagaacccatttctccagacttttacctaccgtgcctgagaaagcatacttgacaactgtggac

SEQ ID NO: 3095 - DNA, 356 bp, Homo sapien
attcggcacaaggacggggggtttacctggcttttatgaccaggcatagtatctattatatttgctttgtaataggcatgatgtggaaataccatcttggtttgagatgcatttgaggattttaatttatggaaagcacaacatatgcaattatatttattgaattcctagatgcagtatggatatttaaattgttaaaactttatgaaaacttggaaaaggttgttcaggtttataaatagctttagtgatgcctcccctctttaaatacctgtcacaccgtatgaatatggtgagatcagactccctaagactcttttcaggttcatttttataatgtttactttttaggacag

SEQ ID NO: 3096 - DNA, 455 bp, Homo sapien
cagaaaagaggcttatgtgcacaagagtgtaatggaagaactgaagagaattattgatgacagtgaaattacaaaagaagatgatgctttgtggcctccccctgatagggttggccgacagagcttgaaattgtaattggagatgagcacatatcttttaccacatcaaaaataggttctcttattgatgtaaatcagtcaaaggatcctgaaggccttcgagtattttactatttggtacaagacttgaaatgtttagttttcagtcttattggattacacttcaagattaaaccaatttaaattgtatgttttcaggctgtttgtatatttaattaagggatgggaggggttatttgtcatttacagtattggggtttttatgaatgtgaagcaaacaaaaaaaatttgtatgtaaactgaaaataagaaaatacattagcaagcttaatggt

SEQ ID NO: 3097 - DNA, 495 bp, Homo sapien
ggatcagcagtatttgcagattccgatttggagtctctaggtaattgatttcagtataaaatccaatcatataaaaactttaatgaattaggataacaagaagagaaaataaaggtaaaaacactattacctgtttctagtcactttagaacagatggcactaaaaaaattttttttttaactttttaccagctgttcttggattccaaactaaacaccaagatacttttcattttaaaatgtataaagtaacaattcagattcacttgggaatagcagaatttttttatacagggttaataatccttaaaatacttttatttccatgccttattagtatacatacttaagatatggttcattgggcccgagtttcttgattttatttaatacaatcggatttaataattttgtggccagtaaaattataccattggcatgaagctgtgaaaaatgagaaattctacctttaccagggatatctgttctactgtt

SEQ ID NO: 3098 - DNA, 441 bp, Homo sapien
gcccgcacctgccgtacccggtggagacgctcctagcctgagtagcgccgcggtcccgggaacgccgagtgcgcgccgtcggggaggcgggaaccggggcccggcgcggacgtttgcactttgaatccagaggaagatgaatttttaaaatctccatcaaacgtgccttaaagctaaagcattttgacaggagtatttaaacttagtccaggatattttcgtttgtgttttataactttacagaggaccaaagcaattcttgttttagtttctttgcgacgctgctcctccttcccttcataaggactttttttgtctttctttaacgcccaggcttcgtcttatttctactgtttttgtcgcaacttccattgatttatgtcccttccctcccccctaagtacatcagggaacctttccacactataaatgatatgacta

SEQ ID NO: 3099 - DNA, 557 bp, Homo sapien
agtggacaacttatcggtctatggcagaagataccataaatgctgctgtcaaaactcataatttaaaagcaggaccaagtagaacagttgggcttttccttcaagggggtaaagattggagccccacactctacattaggcttgtgcaggattatggacttgaaagcgaggtggcacagcatcttgccgccacctatggtgataaggcctttgaggtggccaaaatggcaagtgtgactggcaaaaggtggcctattgttggagtacgtcttgtgtcagaatttccatatattgaagcagaggtgaaatatgggattaaggagtatgcctgcactgctgtggatatgatttcacgtcgtactcgcctggcctttctaaatgtccaggcagcagaggaagccctacccaggattgttgaactgatgggcagggaactgaattgggatgattataagaagcaggaacaacttgaaacagccaggaagtttctatattatgaaatgggctataaatctcgattcagacagttaacagatcgctctgaaattagcctactg

SEQ ID NO: 3100 - DNA, 461 bp, Homo sapien
tgaagtggggcgttttggtgaatgatggcaacacattcacggtgagcctggccttatgtgaataggtggagcaaagtggttggtgatgacacattggtagcggccctcgtgcccgaaagtgacctgacggaggtgcaggatggtggtgtactccatcacttccccgtcctgcgcgtggacgtggacaaagttctccatgtctgcattggtcaggacttcattgtctttcttccaggcaaaggtcatgggggagctgctgctgctggctgctgagcatgtaaaccggatgtccttgcccaccatagccatggtggtttctggctgggtgatgatctgtggcttcaggaagtcatcgcacacgaaactctctggtggcacagagaaaatgctctgacccttcagtgattctgggtgggcacaggtggctgtcacaaaggcctgcagcatcctgccaattagcc

SEQ ID NO: 3101 - DNA, 500 bp, Homo sapien
tacctgaagagggtagagggtataggagctccctgtcccttcccacatgccttgctctatccatttcttcatctctatcctttgtactgtcctttataataaaccagtgaacctaagtgtttccctgagttctgtgagctttactagcaaattaaactcaaggaggggtcatgggaaccctgatttataggtttggtcagaagcacaggtaaaaccacctggggtttgaacttggcactggaagtgggcagcagtcttgtgggactgggccctcaatctgtgggatcaaatgccatctctaggggatagcatgggaaactggaggacacctagctggtatctgctgcaaaattgattgcttgcttgatggtggggaaaaaactccacacatttggtcagagaagttttctgtctttattgtggtgtgagagcagaggaaaaaagtttgttttttccgctcagactttgttttaaggaacaggggagagggaagttctgtg

SEQ ID NO: 3102 - DNA, 462 bp, Homo sapien
gtgaactatgtcttacatgtctagagttctgctggatctagggaaaggaggagctatcgaagtacaacggatcaaaaaaccacagggcttttgggcactgcctccttgggaagttagtggccacagaagagagatgaaacctgtaagaagtctggagtcttttggaacttgcccatttcccaggttgttactttcttagtatgtacagtcttctcaggatgagcagtaaaacctttgaacaaaggtctgtgtggttgtcttcacgggcaatcaggaagggagagagctggggaccatattctgcaatgcagccaaatccgaggaagagaaactgaagggagaagtagatggcaatggttatgataaaaagggataaaactaaatcttcgggacttctttaatgctacgttaatgtttcactgctcgtctagaaactcctaaatccagctttctatcatctgc

SEQ ID NO: 3103 - DNA, 584 bp, Homo sapien
gtgatcttatcgatgtaagagaagtcatggagagagatgcaaaggactacgccgactctattcatgcaatttttgtagagaccagcgcaaaaaacgcgataaacataaatgaactctttatagaaattagtcgaagaattccatccactgacgccaacctgccatctggcggtaagggcttcaaactccgaagacagccttcagagccaaagcggactgcatgctgaccgaacctcagcctctcagacttgatgatgaagtaggtggtcctgaaagttaacaggagggctggggtccctgccaccagttttcacctagccagtcttgagtcttctccgtgcaaaaaggattcacagaaatggaccagttctgttctccaaagactgcagcaatgatatttcagtctgtgaacttctattatgtaaagaatctctagtgtacaaagggactacatcgttggcttttgaccttgctgaaaaggaacatataattgtatggatggtaggattaggttgtgagtagttttgtaatcagattttatgtacatttgtaaggggaaatagcactttgtggtcttagggaaa

SEQ ID NO: 3104 - DNA, 512 bp, Homo sapien
gtgtaggatgccttcagaatatccgagaagcagcattggggtgtctggagatgcgaatgtgaccatgtggggacacagtccaaaggcaacccttgaggtagagttgtgaagaccactctcctagacctgagtgctggcgacaacagtaccgggcatctgcagtgtgtaaactagtgccaggtgctgcacacacgtggtcataaatccatctgttggcacatcagggatcccttccttggcccactgtatggatgaagggactgaggcttaacatgcccaaggtcacacagccagcagctggccatgctggagtttgaacctagtcctctgacatcccagtcaggagaggcgtgacgaggctgccgaggccaaatgcagcccagggcctcaaccccccagaggggcctcaggagccagttaggtgccccacagccaacgtgggctccagggtgaaggggaaagtgatgaatcaaacagaaagcagcagacgcagactgagctctctccctgtc

SEQ ID NO: 3105 - DNA, 509 bp, Homo sapien
attgtcattattttacaaataaaataatcttcaatttttgtttcctctatgcatgggttacttagtattttgtaatttgaatttcaagcataattaaaaagaaatcaggtatctaggctgggcatgatggctcaagcctgtaatctcaacattttgggaggctgaggcaagaggatcacttgaggccaggagtttgaggtatcttttgttgatctctacactgattgtattctctcttttattctatgaaagttaaagattttttctgatactacatattgtcagttttttaaatactcagtttgtgctaaaagaaaacattcggcaactgatatctgctgttctgtatgtatctgtcagtccagatttgtccattatggtgtatgaatctaatagaacctcaccaatgttatacctgccttcttgaaatcattactgagatagctaatattaaaatatcctggtttgtctgtatatttaattctttactctcattatactaaattttt

SEQ ID NO: 3106 - DNA, 469 bp, Homo sapien
tgaatggtttaattcacttgtactcctatttaaatcctacatgaaaaatgtctagattattgttcttgactgcataggactgcattcagcataaagaatgctttatttttatggattagatatattggatctaaacattttgaatcttgaagatgtaattccatcagcagtttctggtggtgtgctactccacagacatcgcagagtgtgagcaggatgcttggtgacctcaagtctggcacagagagagcttttcattcaaaagttgtctttcttcggttgcataatccattaattctagcatagactagtaccctagctctgtggccttccctgagtcttaggaaatctatgataccaacatattccttctatatgcctcccctacctgttacgcttacaaccctcctccaacagtttagatactagagtcactctcatcaatcacagatgtgcttagcaatgcata

SEQ ID NO: 3107 - DNA, 176 bp, Homo sapien
taccccagtttattggagaacattgagaatggccatcccacagaaaactatatagaccaatttcttaccctgttatctgtgtgccacactgttatccctggaaatattataatctaccaggcttcctccccggatgaagcagctttagtgaaaggagcaaaaaaacttggctttgt

SEQ ID NO: 3108 - DNA, 149 bp, Homo sapien
gaacttggcactggtgtgtttgggcccttccatcttaaccctcctaccttgtgtccccatgctagttctgtctttcgtgtgctcgcagaatctgtctgcctcttgccccacctcagaggcttcttccagcctgggcaacagagtgggac

SEQ ID NO: 3109 - DNA, 430 bp, Homo sapien
ggtgctttcctgtgacaagcagccccacaatgtcagggatgttatcaagtggctggtcaaagcagtaactgaagatggattgactcagcccccaaatggaaatcaaacgtcttcaggaacaggaatcttgaaagccagcagtagccacccttcttcccagcccaacctgacaaagaacaccaatcagctgattgtgtgccagcttcagaggatgctctccatagccgtagaggtggacaggacccccacctgcagctccaataaaattgccgagatgatgtgtgggtttgtgctggacattcctgagaggagccagagagaaatgttctttactaccatggaaagccaccttctgcgctgcaaagtgttagaaatcatattcctccacagctgtgagacacccaccgcctgcctctgtctctggcccagg

SEQ ID NO: 3110 - DNA, 517 bp, Homo sapien
accattcttctatggaaagaaaacttttgatgatgaaacaataaagattttaaatatctattttagtttgtgggtgtttttgaaatgaaaatatatggcacactttcattctgaagtgcattaacattctaataaggtgatgtaaagcaagatgacattggtgtaatgttagagttgcagaagtttccattccaaaataaaatggaaaccatagttacagatattacaatgcagccctgtaattttgagctgtagtaaaaggattggtaatctgggaagtagaatttttacaaaatcttttacaaaaatagtcataaaaggttttgttgacatttaagactactactgatctaaaggcaaggtcctacttcttaaattttcagaacatttttatgacttcttattatgtatttattaccactcattattatagcatgttactttttgcaaacattttaaacaaaaaatatttctgtttggtacactgtgaagagagaaagtactgttctgtattttc

SEQ ID NO: 3111 - DNA, 389 bp, Homo sapien
  misc_feature (1)...(389): n = A,T,C or G
gctgcccgatgctatggacgggctcttcggctgctcctgactttacccccaccgtggccctccagaacgaactgtccttcatgccaatctggctgcctgtcagttgttgctagggcagcctcagttggcagcccagagctgtgaccgggtgttggagcgggagctggccatttaaaggccttataccgaaggngggttgcccaggctgcccttgggaacctggaaaaagcaactgctgacctcaagaaggtgctggcgatagatcccaaaaaccgggcagcccaggaggaactggggaaggtggtcattcaggggaagaaccaggatgcagggctggctcagggtctgcgcaagatgttgtggtgattaaaagttaaaccttaaaagag

SEQ ID NO: 3112 - DNA, 141 bp, Homo sapien
cttaaatagctcgtataaggggcagtattcggaaaccgtgatggagctatcatttacagtcgacactgcacgctcactgtcacgatggaataaagagcgcaggccacgtagcctggagcaccgatgagatggtgtcctctt

SEQ ID NO: 3113 - DNA, 435 bp, Homo sapien
cattactcatatcttgtattttatttcttatgaaaatggctacccaaagaagtcattgtagcaggctactattttaaggcagcaactgtataacttaaatgctaagactcactccataagacagaaaacccttccccagggctgtaatgggcatttaagtttcccaaacccagggacaactaatttttattacctattgaatagaaacaactggattttaatagttcccctcccctatagctgaaaaactccacaaacaaaattgactctatctacatgatctgttgactcacgccagaaatagttactaaaacacttagaattgtgatgttcaaactggcctctggctacttctggggggttatttggtgttacgcaatgacatattgccagcgacatggtgaatatactgtctttatagtcagcaatgtttag

SEQ ID NO: 3114 - DNA, 441 bp, Homo sapien
tcaaactccagttaaactttatttgcaaacacagatggcggccacaatttgccacctgctggtgtagaacgtgtttttccacggttttgccaagaaatagtgtccaactgttaccaccatctcccttttttccccgattttcctgttggtggcttttaagtcccccatccctgctttgccatgagagcagggactcccagtgtccctggcgccctgcagcttccatagccattcggggtgtgcgtgggtgctctgctcccagctctgtgagctcgcaggtcgatgcttctgacactgatctgtgcacatgtgtgtgacacgcgtgtcgtcgattgtgagcgcctgccgtggccctgggcgcgataagtgctgagcgggccagttcgctgccttccactggttgaaggaaggagatgggtgtgtaaagaaccgcaccccaga

SEQ ID NO: 3115 - DNA, 303 bp, Homo sapien
aaccggaagcggaagtgcgtgtcggcgggatcatggcgactttggtcgaactgccggactcggtcctgctcgagatcttctcttacctcccggtacgtaccggatccgcatctccagggtctgtcaccgctggaagaggctggtggacgaccggtggctgtggcgacatgtcgacctgacgctctacacggtacgcgcactggccgggcggcatgggcgcggtcggtcgcccggaccccgaagaccacctctcccaccctgggactgtgtgtcggggcccgggctggggatttagagccaggc

SEQ ID NO: 3116 - DNA, 423 bp, Homo sapien
catgctccaagggtttattaataacctctgccagagactctgcccccagggagcagcctccccatggccgtggtgcaggtgtgcagcaggaaggggatggcgacacagatgaccacgtcatcgtcttctgagctgtggttattctttgaaagggcaggaggaagtcccactgctctggaggtgtggaagggtgggagtctggtcttcctggaggcggaggtgagctagaaacggcacggctcttccatctgtttcaagtccagcaagtaccataggtgcctgggcaggggcctgaaagccctgatgaatccctgcatgatctcatcgtcctccaccaggactctggccaggtactggacatcatgctctggatgggggtggtggtgtcctgtaggcagagaaacaggaaattgtcgtagtcag

SEQ ID NO: 3117 - DNA, 198 bp, Homo sapien
ataatattgattttaaatagtggagatagggtctcactctgttgtccacgctggtcttgcctcaagtagtcctcctgcctcagcctcccagagtgctgggattacagatgtcaaccacttcacccagcctgtgctgtctttattgaaaatagcaagcgatgattttccaaaccagaaggccaagcaggaaagcccagc

SEQ ID NO: 3118 - DNA, 407 bp, Homo sapien
cgagaccgcaccattgcactccagcctgggcaacaagagcaaaactccatctcgaaaaaatacaaaaataaaaaaataaagagaccagaatagaagagagcccaggactgagtcctgaggaaacagcacagagatcagagagaggagaagactctgaaatagggaaactggaagaaatggccagagagaggagaaaaccaagagggtcaatgtcactgtggctgagagagaatatttccagaggatgaatttgctcagccagccaagtgcttctcacagggtcgctccatacagaggccattgatttcatgggcacatggagctgattcaagaacgagtgagaggaagtgacagcgtgtgcaagaagacagcttgtagagggctggctagcttctcctcactttgta

SEQ ID NO: 3119 - DNA, 135 bp, Homo sapien
aggggtcttacatcctttgaggccatctaggcaatcaggtctaccaacctgcatgctgtagccacaattccatggcataccaggcaattcgcttgacaaagtgatcccttagggcaatgcagccccaccgtcaaa

SEQ ID NO: 3120 - DNA, 326 bp, Homo sapien
tcggcactaggtgttaccaatctgaagtgtgagccggccagagggtgacacaggaaagtacaagtccattcctcatcaccatcgaggagaagtccagtttcttggaaggtatgctctgatgaggaagtcaaaagaacggcaagggctggatggcctcaacaacctgaactactttgcaaacatcacatacgacgccttgtataaaaacataactgtcaacctgacacccgagctggctcaggtgaacgagtactgagaggagagaatgtacgtttgctttacccaccgccaccaagaaagcagtccgatgagatttttttttggag

SEQ ID NO: 3121 - DNA, 395 bp, Homo sapien
caatcaacactgcctcatgagctactgctctcctgctctttgaaaagacaaatccttatttctttgtagtgatccagaaggcagtgggaagaatgacaggtgcttggttatcttcaatttaatctctacctttcaatggggctagtgcaagctagggccattttactgcacccaaaggaatttaagacatttctattatctctaaagaatccagattaacatgccttcttggtgggcagggagaccagctatgaattctaggatctcaattcaaatgcttttgaattcttcctgcttgttcagttaattacatatatgtcaccacaatcttgctttattttttctatgcttctaattttctctgaatctataacattattttaggggttaataaa

SEQ ID NO: 3122 - DNA, 326 bp, Homo sapien
gaaagatttcaaaacagtactctggatttgtaaggggaatattaaccaatggtgagaaatttgggatccagtttccatttgatcttgatgttaaaattaaagcattgatgcttggagcaactttcctcattgaatacatgtattttgaactgtggccataagaattaccctgaaagaatatgtcagagattactggcatttatttttgccagccctcaacaaaactaagcaactttcactgaaaatatctaaataaagttttattttactaaaactattcatatatattctttctgcctaataaactacatcaaaaatgtttaact

SEQ ID NO: 3123 - DNA, 521 bp, Homo sapien
ttgaaagattcataaccaactattcactattataacatgtttcccagtgtaaatgagtaaggaaaaaaaaagtgtaacaggtgcgtgcagatgaggagtgaccctcatatttaagttattttatatttgactggacattgttcagaagtgtgctttaagggacacttgttggttgtctgcccagcatctctcaagaatatccctcctgtcctccacatggttgtgcagggccatgtgtgaagacagcatgagtcttaacccctcttttattttatttttgagacagagtccgctctgttgcccaggctggagtgctgtggcgcgatctctgctcactgcaacctccacctcccgggttcaagtgattctcctgcctcagcctgccgagtagctggaattacaggtgtgcaccagcatgcccagctagtttttttgtatttttagtagagacagggtttcactatgttggccaggctggtcttgaactcctgacctcaggtgatccgcccacctcagcctcc

SEQ ID NO: 3124 - DNA, 515 bp, Homo sapien
cagtctttggggctgtcctgcacccctacacctgggccgcctgaccttggactgacctcccgttgcctcctggagccctgcataccttctgtgccacaatgcctgccgtctcccgctaatgtctccagctgcctggaacaaatgtgggctgcggtcactctggggcagtcttctggcctcactgactcctccaccattgcctcccccagacccccctgcccctcccactcttcttcataactgccacctttgccagaagctccagagagactccccaacctgccatgcctgcctccaccccaaccgtacagtccccactgcgctgtccagcccctggtaccatacctatggcctggctcccccctggccttggagcccggtgcccctttcacttcctcagcctcagcaatgttcccttttcagtgtcatggagctggctcggctcaagtctttcgttttcccaggctaggtagggctgtgaggaatgcattaagagggtttgggagtttctgaga

SEQ ID NO: 3125 - DNA, 389 bp, Homo sapien
gtaatctaatccctggactttcctgcaggtgtgattgtgtgcattgcaaacaccttagtgatttgactctcctgccttggcaagcacacaaatgagattgtgacatatggcttgactctgaacctccaagatgtgactcttttttccagccttggagctgcccacatgttgcattgtgacatattcctaagccctgcactcaggttatgtgactctccttttttgcttaggccctgaatatttttcatgttaagacatattactaggtccaacacctataaaatgggagactaccacctgggctctttctacagagggccttgtgacatacctctgcatcaataacctaggagatgtgatgctccatttttgcctgtacgtgccccaca

SEQ ID NO: 3126 - DNA, 363 bp, Homo sapien
taatatttgaagaaatttattgagtcaaatatgagtgaccatgccccatgacacagccctcagaaggtcctgaggacatgtggcaaaggtgttcttcaaagtgttcattattaaggcatccatctcccataacttcaatgcactttgctaaacaatgcattatttctgaggacatctgaatctgtttctgtaccaatggtcttaatcagaacatcacataaattgccacatctgtgtgagatactcaggaccacggactctcacacactccagaagaaaaggcacggattctgctgctgcccctccaacaccattgtggaaataaaatttcagtaaagggaccaccagtttgacaacctgctt

SEQ ID NO: 3127 - DNA, 140 bp, Homo sapien
gggggttcatagtaaaaaagcgatggtgagagctaaggtcggggcggttatttaaagggtgatggaaaattgtgcgggttttaggggccccttggggaaaaggttttatggcgcccaaagggtttttaataccccgtggg

SEQ ID NO: 3128 - DNA, 590 bp, Homo sapien
aagagcactcaggtactattaccaaaggggtattctggcaaaagtggaaggtcagcgcttggtgtatcagtttaaagaaatgccaaaagatcttatatatataaatgatgaggatccaagttccagcatagagtcttcagatccatcgctatcttcatcagccacttcaaataggaatcaaaccagccggtcgagagtatcttcaagtccaggggtaaaaggaggagccacttcagttctaaaaccagggaattctaaagctgcaaaacccaaagatcctgtggaagttgcacaaccatcagaagttttgaggacagtgcagcccacgcagtctccatatcctacccagctcttccggactgttcatgtagtacagccagtacaggctgtcccagaggagtaagcagctagaaccagtaccatgcaggatgaaacattaaattcttccgttcagagtattaggactatacaggctccaacccaagttccagtggttgtgtctcctaggaatcagcagttgcatacagttacactcccaacagtgccactcacaacagttatagccagcacagatccatcagcaggtactg

SEQ ID NO: 3129 - DNA, 496 bp, Homo sapien
ttgaagacaggtggtcacctggacctggggtaagggtgcgcagggaggccgggcttgggggcagcctgctcgtatgtccttgctggcgcccatacctgttggactgcctgaactttgctactagcctgaacgacagtgccttggaaagcaggctccatgcggcacagcaggattgtcttcggtaccttaaatatgctccctgtgcttccccagggaggatctctgggagcagagggcggctgtagacatcacagctgaagaggtgacctcaggccctgggagcctcagctcctcatgtgctgtaccctaggcacgtggctcgagcaagagccccaggcaggacaaagggagcaggcagcagctgcagaaacagccctagacaggtgctggcctcaaccctggcagtggggagggggagcccagagtgatgtttctccttaaggccaaacccccaggggtgggtcatttgagaggagttccagctgttctggccaca

SEQ ID NO: 3130 - DNA, 282 bp, Homo sapien
tttttttgcagacgcacaaacatttatttacaaaagtcccagttacatatgatacaggctttttacacacagtagttgaaacggaattattttatctatttttactaccagaaggtaaagaaaaagtttaatgaactaatcgtttcttgtttttatacaaagtgacagatcatgcacatttttttcagtttttaaatattttgctaagtgcaaatactagattcctctctccagttttaaggcaagtaagagggggctgtggctggggagcctcacgccctg

SEQ ID NO: 3131 - DNA, 484 bp, Homo sapien
atcagcccactaccgctgccaacaccaatgcctaaaacttgtttcatacattggggttttctatatatttcagttgggaaaagcttacatttaaccttttgaaaaaataaatacgtgattagcctcaactaaacattgctgactataaagacagtatattcaccatgtcgctggcaatatgtcattgcgtaacaccaaataaccccccagaagtagccagaggcaggtttgaacatcacaattctaagtgttttagtaactatttctggcgtgagtcaacagatcatgtagatagagtcaattttgtttgtggagtttttcagctataggggaggggaactattaaaatccagttgtttctattcaataggtaataaaaattagttgtccctgggtttgggaaacttaaatgcccattacagccctggggaagggttttctgtcttatggagtgagtcttagcatttaagttatacagttgctg

SEQ ID NO: 3132 - DNA, 450 bp, Homo sapien
tctaggtcttgggggaagagctgggtaatacctggtgtctgagtgattctctgcagaccctttcccctcctcaaggatcacccatcctcctttcagccccctttatggggaccaggcagctctggagccagccacaggggctgttagagaagcaaggcctggagtggcctgcaccgagtagcagggtcagggttcgtgtgctcctcctcctgctgcaggggctgcacatcccattgccccacttctgctttgtgtctcctctgtctagcttccagggcagggagcaggccccacctagggctgcaggcagtctggcctgtgccagcacggtctcctgtgcccaccagccccacaggtgctgtgctttgtgctcttggctgctgtgctgggacagaatgggatgccaggaagagaagaaagggggtgcagtctgaggccaccacccccctt

SEQ ID NO: 3133 - DNA, 521 bp, Homo sapien
aaagccaggaagaagcggggcggtggggaccacaggcctggaggagcggcatggggcgggtggacacttgcggctgtgttctggaagcaaggtcatttctgttccatcccattacacaattcatgtgcttagattagaagattcagtccagatcccacccaaagggacaagcatttctgaagggccaagcacacgggtctgcactccatgagctggcagcaggcaggcagccatgtggggccaggggaccagggcgcaggaaccccagctccctccagtcctccagccccaccgctcggccagccaccctcctctgaagtacccagctggggtcctcaccaggggcccagaagcctcgcctacccagctctagccacaggcaaacaagcgcattcccaaaggggaaccagcttgcggacacacaggctccccgacactacgcagacagagccagcagaagtttaaaggaaacagagaccgggcctcaaagcattcccagcagaagctgcccgagagcccgg

SEQ ID NO: 3134 - DNA, 465 bp, Homo sapien
ctgagctacaggacgcctggttccggaagctcattggctttgtggtcctgcctgcctttgcgtctgtccacgttctctgtgggttcattgccggacttgagtctgagttcatggagactctgtcggatgaagaagtacttctgtgtctcacccaagtgctccggagagtgacagctccagatcctgtttgcgggggaagccacacatcgcacgttttactccacgacgcacggggctctgctgtcgggatggagggaggccgaccgcctcctcagtctgtgggccccgcagtgcagcagccaggcgaggtctactgggccagctactctgttccacccgtgtcgggggtaggctgggaccgtcatttcttctgacagatttcagtctggcttgaaatttggggatgttaatgagggtcctctggtttttggtaaccagggccaccttctcagttcttgtgtctgt

SEQ ID NO: 3135 - DNA, 521 bp, Homo sapien
  misc_feature (1)...(521): n = A,T,C or G
tgggaggctaagtcgggagaatcacttgagcccaggagttcgagaccagcctgggcagcatagtgagactccgtctctacaaaaaataaaaaattagcaggtgtagtggcgagcgcccgtggttccagctactcaggaggctgatgcgagaggatcgcttgagcttgggaggtcgaggctgcaatcgcaccactgcactccagcctgagcagcagagcangactctgtctcaaaaacaaaacaaaaacttgataacatagtcataaattagcatttatcgaatgataaatatgtgccagactgttctaagccctttccctgcgtgatctcagtgaagtccataatagccccgtgaggcaggtactgtcctttatccccattgcagggatgaggaaattgaggccctgaggtcgaagaggagctggtaagcgatgatgccgagataggccccggatcgcctggctctaaatccccagcccgggccccgacacacagtcccagggtgggagaggtggtcttcg

SEQ ID NO: 3136 - DNA, 485 bp, Homo sapien
ttcggcactgagggggacctggcactccatggccatggcgaccaacaacatctccctcatggcgacactgaaggcccctctgagggtccacatcacctcactgttgcccacccccgaggacaacctggagatcgttctgcacagatgggagaacaacagctgtgttgagaagaaggtccttggagagaagactgagaatccaaagaagttcaagatcaactatacggtggcgaacgaggccacgctgctcgatactgactacgacaatttcctgtttctctgcctacaggacaccaccacccccatccagagcatgatgtgccagtacctggccagagtcctggtggaggacgatgagatcatgcagggattcatcagggctttcaggcccctgcccaggcacctatggtacttgctggacttgaaacagatggaagagccgtgccgtttctagctcacctccgcctccaggaagaccagactcc

SEQ ID NO: 3137 - DNA, 464 bp, Homo sapien
cctgcccggtgatgctgttgatttctcaaaggtcttccaaaactcaacagagccagaagtagccgcccgctcagcgctcagggtgccagctctgttctgattcaccaggggtccgtcagtagtcattgccacccgcggggcacctccctggccacacgcctgttcccagcaagtgctgaaactcactagaccgtctgcctgttcgaaatggggaaaccgtgcgtgcgcgttatttatttaagtgcgcctgtgtgccggggtgtgggagcacacgtttgcaaagccacagcgtttctggttttgggtgtacagtcttgtgtgcctggcgagaagaatattttctatttttttaagtcatttcatgtttctgtctggggaaggcaagttagttaagtatcactgatgtgggttgagaccagcactctgtgaaaccttgaaatgagaagtaaaggcagatgaaaaga

SEQ ID NO: 3138 - DNA, 505 bp, Homo sapien
gctgggagggtcagatcattaaatcagatttaaaaaactccaacaggaattggaatctagcctcctcagacctgcgatgatgttccttgctcttgagatctgttcacctatcccagagaactaagacattcaactaagaaaaacagactccacaactttggcaatctgggagggggacccagtgggtgggcctgaaatactgacatgaaacacgtcataaacaacagtacagctttggtcccacaacatggccctgtcaggctgggctaccagagggggactggtgccgtgaatctctggaaacaagaagtgaagcagcccggccgacctgtgccaggaagcactggtggacacaccccgtcaaacagccagggctttctcgctctgctgcacaacgcccagacactcagggttagaccaaaggctctggccacccagaagctaattctgcccccaaaatattgatgcaggccatcggaatgattacaaaggcatgaccttctct

SEQ ID NO: 3139 - DNA, 421 bp, Homo sapien
atggtgatcagctctgatgacccagctatgtttggtgccaaaggttgtcctatgatttctatgaggtcttcatgggcattggggggatgaaggctgacctgaggaccctcaaacagctggccatgaactctatcaagtacagtaccctgttggagagtgagaaaaatactttcatggaaatctggaagaagagatgggataagttcatagcagatgtggctacaaagtgaggagaagctagccagccctctacaagctgtcttcttgcacacgctgtcacttcctctcactcgttcttgaatcagctccatgtgcccatgaaatcaatggcctctgtatggagcgaccctgtgagaagcacttggctggctgagcaaattcatcctctggaaatattctctctcagccacagtgacattga

SEQ ID NO: 3140 - DNA, 196 bp, Homo sapien
tgatgatgattagattctgattcagcatgaacgaggatagcatttgttatgccatatatgtcactagcgattgtctactggatctggcttaggtatatattgcatgcaggatcatcgtgaatcactaggatgcgtgccacgtgcgatatttggaagaatagagctagtgttatggatatttggtatggacggtatc

SEQ ID NO: 3141 - DNA, 549 bp, Homo sapien
gaggtggtgcgggtccgagtcaaggcccattgctagaagactgggacataatcagccccaaagatgtcattggctccgacgtgttgctggctgagaaacggtcatcactgacgactgccgccctgccctttacacagtccatcctcactcaggtgggccgtaccttgtctaaggtccaacaagtgctgagctggtcgtatggggaagatgtcaagcccttcaagccacccctgagcgatgctgagtttcacacgtacctgaaccacgagggccagctctcccgacccgaggagttgcgcctgcggatctatcatggcggtgtggagcctcgctgcgaaaggtggtgtggcggtacctgctgaacgtgtatccagatggactgacaggccgagagcggatggactacatgaaacgcaagagccgcgagtatgagcagctcaagagcgagtgggcccagcgagcgaaccctgaggacctggaattcatccgcagcacggtcctcaaggatgtactgcgcactgaccgggcccaccctactatgcggggcct

SEQ ID NO: 3142 - DNA, 205 bp, Homo sapien
ccccctgggtctttatttcatctttaaaaaaacaaaacaaaaaaagtaaaaactaaacagaaaagcactctgtacaaagcctggatactgacaccattgctgttccttcctcatggggggcagtactaggtttcagggacagtctctgaatgggtcgcttttgttcttagacactcccttagggccgcttcccctctcaggccag

SEQ ID NO: 3143 - DNA, 354 bp, Homo sapien
tcatataagcattttcatagcagctttatttataatagcctaaagctggaaacaacccaaattaacaggtaaatggctaacaaacggtattttcatacaatagaacattgctcagaagtaaaaaagaatgaactgatacatatgagaatatgataaaatatgaatcttaaaaacattctgctgagcaaaagaagtcagacataaaagaatatagattctatgacactaattctaagaaattcttccacagtcagtctatgtccttatggacactcaccagacccagagtctcaagtcccagccatggataccacctgatgaagccctcaagtccagcccctgcctccacaagaa

SEQ ID NO: 3144 - DNA, 425 bp, Homo sapien
tcacaatagatataattctgtttatatgaaatgtacagaaaaagtatatccatagagacagaatgctgattggcatttgctggggctgggggcaggggaaaatgagggtgactgctaattgggtacaagattttcttctggggtgatgaatatgcttggtgatagtttaacaacattgtgaatgtactgtgccattgaattgcatactttaaaattgttaatttaacattatgtgaatttcactttaataagaaaaaaagaggctggtgtggtggctcacgcctggccgatttttcacattttctttatccaggtcagatcatcatagtgaaatcaataggcagtttactttttgtttccaatattcttttaatggcaggcgttttaaggacagttatgtgccagtccagtgaaagacagtactg

SEQ ID NO: 3145 - DNA, 479 bp, Homo sapien
gctggataattttttaataaagtgaggtttacatcactgatatttaagaatggctatatgcacaaaagaaaacacacctttttggttaaggggtgaggaagttagagaaagcatgagaaacagggagcatgtggggtgaggcggggcaggagtggaaggctgcaggcacccccagctcactccctgcctgcggcacacccatgacactacagatcaaggggttatgaatgacatggattcagatttctttcattctagacttcaacctagccttaaccttttgtttcagcaccagtctaacagagcagcgcaggcgtttctcatccagcagcaatgctacttcctcacccagggcaggtgcatgggctgaccctgacgggagcctccaggaacactgccttgagaaggcaccaccgaggggctatgaggtccctgaagaccaactggtgcctgtgatctacaaacagacaaatatttga

SEQ ID NO: 3146 - DNA, 460 bp, Homo sapien
attcggcacgatgagagacagggtttcaccgtgttggctgggctggtctcgaactcctgaccgaagcgatgatccagccgcctcagcctcccaaagtgctgggattacaggtgtgagcccctgcgcccggcggaagagtcttcatgttgttttgcggcaccctgcagatctgcccctcccctccgtccctcccccgtcccgtgacctctgatgtgcgcttgtctgctgactctggggctgggggctgtgttcttccctaggactgcgggctgcagctgagcggggaggagggacgccgttgctatcccctggcgggccacctactgtgtcgtcgttgccacctgcggcgcctccaacctgggcctcttccctcacccactgtgcacgtcactgagctctgagcaggggaaaacccgtccctgggccggggtgggtgtgggtgtggagggagggcccgcgt

SEQ ID NO: 3147 - DNA, 453 bp, Homo sapien
ccagtgatgaaactggacagaggttagatgaccttttcaggggtgatggctgagataacaggcaaggccactccagagcttgtactgttgtgtactaagttatactgcccttatttgagtactttgtagatgattggagagcatcggtaagtaccacatacctcatgtttatgcctgcttttaggtctttcaccaagaaagcaaaattattttctggaaagagccaaggacttgttttctaatcctgtctctgccactacctggtgaactgatctggggcaagtaatttcatctgtgggccttctgttttttaatttctaaaatgaagaggttgggctggatgactgcttgatttggctaatttattttccaagttctgtagctgtatactggagctacatattaaatattcacagtatacactcatgttaggctcagggaagtcctatagta

SEQ ID NO: 3148 - DNA, 392 bp, Homo sapien
atctgtagctcatccagtaccagtgatggaaaggacagatggcaaggaaaccctttcggggggaaaaagaaagtcatattgtgttggacctacagattactagagacatagctttagtaaaccaaggctttttttcttgaacacaatctgtgtagactgtgtagttcttgattggtggctttaatccattatcattaggtgtctccttgaacgttctcaaacactgagagtcttaagctttcattaaaaaaaaaagagtaaatgcagctttcagaaaatccaggattctgtacagtcttcgagtgtttcacttcagcctccctgtcctgttattaccaacagcaggtacccgggtggtagacaagaagcctcatgggatagataaggaaatg

SEQ ID NO: 3149 - DNA, 423 bp, Homo sapien
tagtttcaatttttattatgaatgtccaaagtgacagcatactgtgaaaatgctaagttctcattgattaaatttcaagagaccacagactacagcattccaagcactttaatttttgacagagccaaaaacaaataaaagaatgataaaaatattcttttgggtgtaaagagtattcatatttgagtttttgtatttttttcttccctgcaggtattgtgaacactgataatttccaaaacataaattctggtctggatacttgcagcaaatttttataatctctacctggataagaagctaataagaaatgtacttataaagtatgtttacgatacagtgtgatatgtttgtttatcttcatttccctatctatcccatgaggcttcttgtctaccacccgggtacctgctgttggtaata

SEQ ID NO: 3150 - DNA, 455 bp, Homo sapien
ctaggcagtgcccagtaggatcgtgtgtgggggctccctccacatttcccttctgcactgccctagcagaggttctccatgagggctctgcgtgcagcacacctctgcctggacatccaggtgtgtccatacatcctctgaaatctaggcagaggttcccagacctcagttcttggcttctgtgcacctgcaggcttaacaccatgtggatgctgcaaaggcttggggcttgcacctcctgaaccatggcccagctgtaccttggcccctgctagccacggctggaccagctgggatgcagggaccaaatcccaaggctgcacacacagggggtcctggacaggcccaagaaaccatttttccctcctaggctgctgggctatgatgggaggggctgcccaaaggtctctaacatgccctgtggacattttcccattgtcttggtgattaacgtt

SEQ ID NO: 3151 - DNA, 210 bp, Homo sapien
aatgaccagttgataggtgtggccttctcccagagcaacgtctcctcctacgtggtggatctgacgcgtgtcaccaggactggcacggtggcccgggaccctgtgcaggaccaccggcccctggcacagccacgtgcccaaccccagcgcccccctccggcgcatctatgagcggcccagcacaacctgcagcaagcctcagagggtgaa

SEQ ID NO: 3152 - DNA, 145 bp, Homo sapien
attatgtaaatgttaaaatgagcatctcaaagaagtctgttaaatcatgactgaaaaaaatcaatcagatgtatcttcaaaaagtggagtcccagttttatgaatcagagatataaaccagaaattctataactgatcatagaag

SEQ ID NO: 3153 - DNA, 170 bp, Homo sapien
gtttttaaatccaggatcaagaccacaatttattatgtaagacatggggtgaagaatggtcaaggaaagttatggccgtgagtgacatggaattagatgaaaaggctcaagtttgctgaagagagtttaaatttggcttttgctcttggaaacgtcaaaataatcataag

SEQ ID NO: 3154 - DNA, 111 bp, Homo sapien
tcctgcctcagcccaagacgaagctcccgtgggattcgaatgatgtaccccagattgactgttgagtaaggatgagtgacagcaagctttcatgatggatttcaatcgtgg

SEQ ID NO: 3155 - DNA, 443 bp, Homo sapien
ggagaagcaaaccccttgcagaagcacttgcgggtctgcagcctacgcagtaagtatgaggccagccagggtccgggctcattctagaaggtgcacgcacacacaaagtcatggagagtccagggagacgacttaaccacggtcacatggttactagcagccgtagagctgggacctggccctgggtctcctgactccccccaaggtttcttgtcactgaggtctgctgtgggtgatcagaactgattatcgggcacctgccgtgttctgagcctgggtcagcaggatgggagcttcttagaggccacatagccttgaatggttgagagctgagccagggtgtcggctgaggtctacttggcttgctgctttgatcctgagagccacccaccccatctcacagtgaataggttggcaggtgtgggctggcgggtggactacac

SEQ ID NO: 3156 - DNA, 460 bp, Homo sapien
aaccaaggttctcatgaatctccaaccttaaatcctgaaacagtggcaataaatttatctgatgttgacttgagtaaatatatcaccactattgctggagtcatgacactaagtcaagttaaaggctttgttcgaaagaatggtgtcaatgaagccaaaatagatgagatcaagaatgacaatgtccaagacacagcagaacagaaagttcaactgcttcgtaattggcatcaacttcatggaaagaaataatcgtatgacacattgattaaagatctcaaaaaagccaatctttgtactcttgcagagaaaattcagactatcatcctcaaggacattactagtgactcagaaaattcaaacttcagaaattgaatccaaagcttggtctagagtgaaaaacaacaaattcagttctgagtatatgcaattagtgtttgaaaagattcttaatagctgg

SEQ ID NO: 3157 - DNA, 120 bp, Homo sapien
gcttcaaccactaaggaagagacgcttgaaggacttgttcatcaacaccaaaaagatgaaggtgaggacggagtgagggcccagacggcattagtaacagcgttaaaacctaccacaggc

SEQ ID NO: 3158 - DNA, 323 bp, Homo sapien
gtgggagctgagctgaaagatagatatgtgggagtcatcagaatagactagtagacgacaatgcccaggggcagggcgtagagtcatgggtgtggaacgaaggaaatcctcgttttcgagtttcaccccctcagggaggcccagctcaagccctgcccggcccgaccccacctcgcccacacgggcttgattccgcacaaggggctgcgcgtggcagacaacggttcttccggcgcccggctcactgggcacgctgggaacggaagcccgctccgaacgccgagcacttcgggagctgtagtttggggcaggctcagctgggc

SEQ ID NO: 3159 - DNA, 331 bp, Homo sapien
cagctcacactagacttcgaatatgttatcaatgaggtcatccgccacgacgctacctggggccatcagttctgttctttcagcgactatgacatcgtcattctggaggtctgcccagaaaccaaccaggtcctcatcaacattggcctgctgctcctggccttcccgtcccccactgaggagggccagctccgaccaaagacctatcacaccagcctcaaggtggcatgggacctcaacacagggatcttcgagacagtcagtgtaggcgacctgactgaggtcaaagggcagaccagcggcagtgtctggagctcctaccgcaagagct

SEQ ID NO: 3160 - DNA, 428 bp, Homo sapien
aatcagcctatcaccccttgaaacatcttccctgtgtccctgggggcccctgatgctttctccttgggtgatagtaacatgcagacacttacacaaagctccctctttggacataccccacgtcgacctgtcacaggcctggctgtagcgagcacctccctatgacgcagaatgcttcttgggaattatcttactcctctggagggttagtccatcaatgttttgcttcttgtcccaatactactgtgaccctctctgatcgcacagaaatcactgcctatcacatatatcctgttaagcactgaagaccctattgaaattagagttctacagatgccaaaagctgtactttccatcaggcagatggcaagcttactgccttgatgcacatctggagccactggagctccttcctctctggttccagc

SEQ ID NO: 3161 - DNA, 304 bp, Homo sapien
  misc_feature (1)...(304): n = A,T,C or G
cttcgcagttcggccgaangntcggccctcagagcccttgcccgctcgagtatgaagatcgggcggattggtaagtgccccctctagctaatgcttgggtttattttgaagcattggccccaaaaagcacgtgctgtgcccagtggatgtgcagcggctggtctggtcacttttggcagttaagtttgttaagggaggctgcaagaggcaccttgtgacttaaaaatctctccctgaatatctctgtcaccttgatatgaatgtcctgtttcatttgtgaatctctgtcctacactgcctggtg

SEQ ID NO: 3162 - DNA, 333 bp, Homo sapien
gaagcctttctgagagcgggctaggccggcacctggagaggccggagcctttggaacaaaccgtgcggacgccgacctgttgtgcaccaccagggaccgccgcgcctactctgcacgggagcagggacagcgctagatttcgtgtacaaaacctgtgtacccctctatatatatgttacatagaatgtatatatgttgggaacatgctcgcttctcccgtgtgtcgccgccgtgcgtcgtgccccgcaacagagccccaaccggcctttgccgggtaaggggctaccgcgacgccacttgtccacgcagccaccaccggcccgggccagtccc

SEQ ID NO: 3163 - DNA, 415 bp, Homo sapien
ggcttgagtaacatcatctttgggattttttaaatactggtccagtctaggagaacctggaagatgaccagaggtatttcagtttccctagggagagcttcgttatccatgtggatgataagtctgcttgatttattattaaatcattatagcagtgaagtggtgccattttctctctcttaagccccatttgaaaggctagagaaggggatatatatactatgttcaaggtttgtaaggttgttaatgtacataattgcagattgcaataaaagcttagatacattttgtaaacccaacccactaaatgagcaggttacaagacaaatgtcaccagcctcaagtattttatgaactatttactgagggtagttatgttaaatagattataatgtggtaaattatttcctgaatc

SEQ ID NO: 3164 - DNA, 411 bp, Homo sapien
atctgggatgatcatttccttctgattagagaaatttaccttgttaatattctgttcacccaacccttctaccctcagtgttgaccaatactggaaaaaatttagggctttggagtgaaattttaaaagttcaaaaccttgatctattaattagtttgcttaccttgaggaagttgcttatcttaatcttctatttgaacttcaagtacaaaaaccctactcacggacttaactgtgaccattaaatgagataaccaaaaggctgaagatgatagtgagttgattttaccttttttctacatacagatgtttcagttctttcattagtggttgaaggtctgcgttctttttcgtcgtcgggctccctcccttgactacccccagaatgagctttgatggtctctactgggc

SEQ ID NO: 3165 - DNA, 412 bp, Homo sapien
taccaaatctttgaccatgccttctatctgttcctgggccacattgacatcctctgtagggccctccagggtgatcttgtcttcgccctctgtgaactcgatgtgaacctttggcatctgctgagtgattttggaggctctgagttgggcatgggcggtcatctctcgatgacatcccacatgtccgggcacagacacccagggcatcctagctgggtgagtaataggttctgaaacaaccagaagctggtcgaagtcctggaataatcgtgggtggaggaaacttcatcttgaagaaggcatctttcaggggagatgcaggggcagtctccaacaattcctgacagctgagtggtcagaaaaggcaaccgtggagactgctgggttttggttcagctcattggccaagtaa

SEQ ID NO: 3166 - DNA, 273 bp, Homo sapien
ggtagctggtaacattgttgtctcaagaacaactcacctctctccctaggactaatttttgtctctctcagttgaacatgttttgtcattcaagatcagtcaggtgcattctggcaactgacatacttgatggaggattgattcggtagagagcagtagaaatcttgttctaactgtgcctggtgagagactttggccccctccctcccgtataaggctgtggaacgtgaggaagtagatacttgaagagattctgtttaggaagaaactcac

SEQ ID NO: 3167 - DNA, 425 bp, Homo sapien
gtaaaaatcaatagatacaatgaaagctctttggggtcctgagagcaagaaggttgagaattgctgccctagacagggaccatggcccgcagcaaatccagcctgtggttttactggcacaaagccccacctcgtgccactcccactggccagcagcagaggagctgggcagatgactctgtggccggggccagaccctctggttctttatggagtttgccgccccccaccctggactggccaagaccctcttactgtccaaccaagcacaacagaactgtccccctcctgccctgccgccagtctgtgtgtggactccggaccatcgctggaccttgccaagtgtcctctcggtaacaaagggctggagtctgtgagcgtcctctgcgtccctgacccaggacactctctcggcaaggagggac

SEQ ID NO: 3168 - DNA, 352 bp, Homo sapien
gaattcttatttggagaaagacacaaagttttgtagaaaataggggtgaggtgcgtggaccccaaagcctaatttcccagcagaaatcggccctggaactagaactccctgatccccagaattgcagctgcggatggaggtccggttcctgaagcctcgggtttggccgccgagtcgctgcctggtgggaggaaactggggttggcgcgggtaccagcctgagcgttcctctgacccggaaccggagggtgagcgcacgcagcccgcggccactgctcgggatccagcgttcccctctgatctctccagcgcattgctttgggctgaattctctcagccctggggagtggtg

SEQ ID NO: 3169 - DNA, 401 bp, Homo sapien
tgtgctccagcccaagcagcctccgtaggctttagatcctgtggttgctagatccagtcctttctaataccctgagtcaacacattactcctgcaggtcttaggctacaatgcaggtcccttgagggccaccaacatggaggtaggcagtttctaggactgtccccagtacatctcaccacccacagccctttttttgccttgattcgagcctcaccctggccttttggcttcccctgcctgagagagacctgaggaggggacagagcccagcccctctcctgtggctgagcaggcctctgtgtccatgacacctgtcttccgggcctgggggctgtgggtgtatgtctccctactggcttccccggcccctgctgcatgatgctcttggaactcttctcc

SEQ ID NO: 3170 - DNA, 224 bp, Homo sapien
tccatcccaagatatggaccgaggatggaatgataattttcaaaaatatttgtaaggaggtttaggtgtcaaattgtgacttgaatttgatgaccttctaagcccttcctgatgttatgattctgttttaatttatatattgtcaaagactattcaaataaaaaacaccttctatgccaggtgctggaaacaaaaagataaacataacacagtctagtatttta

SEQ ID NO: 3171 - DNA, 110 bp, Homo sapien
gcaccgcgcatcctgcagctcactctgagagatgtgggcccagggagagaacaccaggcgggtgggcatgacgggcgcaacggcagtcagacgaaagtcgagaggagaga

SEQ ID NO: 3172 - DNA, 130 bp, Homo sapien
ggcaaggactgtcaactatgaccagcctggggcctgggtgctgggtttcccttcgccctgtgccgtcccagctcgtccgtagagcctttggccctgggtccttagcgtcaggaggcagcttttgatgtca

SEQ ID NO: 3173 - DNA, 144 bp, Homo sapien
aggagaaagtggagggaagggaggaggaagagaggagaggagaggaagggagggagaagacgcgggagagggaaggagagaggggcgaggagagggagagagagggacgaatggagaaggagatgagcggggggaggaggaggg

SEQ ID NO: 3174 - DNA, 130 bp, Homo sapien
tatgaagaggaatgccgacgattgtaatgggtatggagacatatccaaacagtactgctacgctgagtggtcggaagttttttcataggcggtgtctgcgttggtcgtcacggcatcggggatataccga

SEQ ID NO: 3175 - DNA, 152 bp, Homo sapien
cccataattagctgtttatttggcaatagtccggaaagggaggtggacttagccttccccgatgacaccacaatcaactgtccagagggccgaacgagagcgggcttgacagcctggagacccgaggtagcggccatcctattccagagtgg

SEQ ID NO: 3176 - DNA, 331 bp, Homo sapien
tggagagtacattacagacgccattggacattcgccttaaggaaagcataaactgccagctctcagacccttccagcaccaagccaggtaccttgttgacaaccagcccctcaccagagcgatcgctattgctgaaatacgcgcgcaccccacgctggatcctgacacgatgcacgcgcgcctgcgcaatgtccgccgatcgcctgacggtgcgctgcggcctgctgggcagccatggggcccgtgcccgtgctgcggttcgacgcgctctggcaagtgctggctcgtgactgcttcgccaccggccgccactacttgggaggttgacgtg

SEQ ID NO: 3177 - DNA, 395 bp, Homo sapien
tgcagcaacactggtttattctcaggtttgaaagtcaggaaagtagacacagcggggaaaggcaagggccgagggacacagcatggcgtagaagagtcgacaagaagacaggtgacaggcagaacttccctccatgctcctctctcggggaccatcggagccgggcagttacttactcttgttgttactgttctcactgacaaaatcttccgcaccatcggtgtcatcctcatcatctccggatgagatggcatctgtgacattcaccatgaagtaccaagtttcactgtctacagtcctactggcagtacaagcatagaggccggagtctctaggcgtggcgccctttatctgcaagtactccccaataagcactgtcctattgttgggcccaa

SEQ ID NO: 3178 - DNA, 401 bp, Homo sapien
ggacaaaatcagagttaggatcttgtaaaggaaaaaaaaaaaaaacaaaacaaaatggagatgagtacttgctgagaaagaatgagggaaggagttggcatttgttgaaagtgtagtctttttctcttttttttttaattgcaacttttactttagatttaggaggtcgtgcgcaggtttgttacatgggtatattgtgtgatgctgagcttgggatgcgaatgatcctgtcacccaggtagtgagtatagcacccagtgaaactgtagtctcatgccaggcactgtgctagcccactctggctcatttaatcctctcctaagaagagaggagacacagcgtccccatttgacagatgcagaaagaggttccacaggtgtgccttgattctgtcctaaaac

SEQ ID NO: 3179 - DNA, 424 bp, Homo sapien
cctcgcggaatagcaggcgagttctacgaccgtgcgtctccggttctcgtggaggtcatccgcaagtgggcgatgaagatccctggctttgctgagctgtcaccggctgaccaggacctgttgctggagtcggccttcctggagctcttcatcctccgcctggcgtacaggtctaagccaggcgagggcaagctcatcttctgctcaggcctggtgctacaccggctgcagtgtgcccgtggcttcggggactggattgacagtatcctggccatctcaaggtccctgcacagcttgcttgtcgatgtccctgccttcgactgccacactgcccttgtcctcatcaccgaccggcatgggctgcaggagccgcggcgtgttggaggagcagcagaaccgcatcgccaagctgcctgaaggagca

SEQ ID NO: 3180 - DNA, 411 bp, Homo sapien
cgccattgttcctgcatggctaagtccctgggttcgtcctaattgagctgaacactagtcactgggtgccacagttctcttccatgacccacggcttctaatagagctacaacactcactgtatggcccaagtccttggaatctgtgaggccaaggaccccaggtcagagaacaaaaggcttgctgccatcttgggagcagccccaccccatcttgggagctctaagaacaaagacccgcccataacagagtgaagtggtgtgatcacagctcactgcagcctcaatctcctgggctcgagccaccctcccacctcagcctcctgagtagctgggatcacaggtgcacgccaccatgcctggataatgttttagagtaaagcataaggaggctgtcagtatgtttgccagg

SEQ ID NO: 3181 - DNA, 160 bp, Homo sapien
ttgacatacgcaggaagctctatagcagaagacctagaagtgatacagtagtgagggaagatgggaggtggagggtagaatgtttgatgcaggacagctgggtggagagtggggaccgatgcacactgagaaaggcactagagagctagagaagacaagt

SEQ ID NO: 3182 - DNA, 421 bp, Homo sapien
tctggcctctgtgcacagctccaatctaggacacaattatctttaatctttgttggcctaaaaatcctctagcattgactaaccggttcaatcctcctccagcaagtatgtggactggacttgtgtgatttctggtcctgacttcctttggtttgctcaggttcacagagtgtttccaaatgggctggcctcccaggaagggactattcagaagggcaatgaggttctttccatcaacggcaagtctctcaaggggaccacgcaccatgatgccttggcatcctccgccaagctcgagagcccaggcaagctgtgattgtcacaaggaagctgactccagaggccatgccgacctcaactcctccactgactctgcagcctcagcctctgcagccagtgatgtttctgtagaatctacaga

SEQ ID NO: 3183 - DNA, 156 bp, Homo sapien
catccatatttatttgaaaaggtcaagaggagcatctatgagacataggagaggtacaggctggaacaaagcaacagcagcaagagacatgtaagcaacacgaacaagaacaacacggacaacactatccgcacacacacacaagccaggcgcgca

SEQ ID NO: 3184 - DNA, 159 bp, Homo sapien
ttgaacacagagtacttataataatggtacatagcaaagatcggctccctggtcccctcccctcattcaaggagtctacatagcaaatgtgagaaagagaaagtcaatgtgaagggggactgattagggcagagactccccaacaatagaggagctctc

SEQ ID NO: 3185 - DNA, 373 bp, Homo sapien
catgaggtgcgcctgtctccgcacgtgttgggccacagcaaggcgcacgtgagccggatcgtgggcgagctggtgcgggctggcgcgccgggggtcccccggtctcattcctgggggagcgctggccttggcttccgcggagacttcatccaggtgggcagcgctacgagcaacataaaatccgccggcccgacagcttcgacgtgctggtgccactgcgcctcccgccgcttgtgcgctggaccacggagcctgggcgaggaccagcgctggcccggcttccgcggttgcttcttgtgcgccctcaaggcaccaccctcaccatcgggggcctcggggggcactggcttcgggactgcaaaccctttgctga

SEQ ID NO: 3186 - DNA, 374 bp, Homo sapien
tgctaaagaaagagtacatggaatcctttgaaggtatattcaaagaacagtatgataccatccatcgcttggaaacaaacaagttgcgaaatgttgctaagatgtttgctcaccttttatacactgattcacttccatggagtgttcttgaatgtataaaactgagtgaagaaaccactacatcatccagtagaatttttgtcaaaatatttttccaggaactgtgtgaatacatgggtcttcctaaacttaatgcaagattaaaggatgaaactctgcagccattctttgaaggattattaccccgagataatccaagaaacactcggtttgccatcaacttctttacttctataggtcttggaggtttaacg

SEQ ID NO: 3187 - DNA, 354 bp, Homo sapien
agatggagtctcacccttgccacccaggcagtagtagcacgatctcgactcactgcaacctccgcctcccgggttcaggcagttctcctgcctcagcctcccaagtagctgagatcacaggcacccaccatcacgcccggccaattttggtattcttagtagagacggggcctcaccatgctggccaggagttcaagaaaagttttttaaaaataataaacctctaaagtgttaccctaactgtaccttacagtgatatatgacttctctagtcactccacattatccagtgatggcacctagataataatgcaccaaagaaaagtaaagaattgcagacttctagaagcaatg

SEQ ID NO: 3188 - DNA, 295 bp, Homo sapien
gcaggtcctgccatcagaggagagctcgaagccgctgtggcaggaacagtggaagctacccggcttgttgtggcagatctggaggcagcccccgttctcctggctgcattcgttgacatctttgtcgcagagccggtccccccagccagctttacacaggcagaagaagttgcccatgaggtcctggcaggcttgggtccccttcctatcgcaggggttgggcgtgcactggtcaggcaggttttgcacgcaggtggcgaagcttgagttttgtggtgtacgggagacccatact

SEQ ID NO: 3189 - DNA, 169 bp, Homo sapien
gcatctcgtcgtacaggcggtaggacaggttccgcaggacgcacaccgcgttctccacgctcttgtcctcgcatttgcccgcgtccagggcgtggttgatagaggtgaccagggcgtccagcagtccgtggcactcccgcatcttctggcgagtggactgagaggctga

SEQ ID NO: 3190 - DNA, 349 bp, Homo sapien
ttcagatcacgacaacaggtaacctttagtcagaactcaccacccactgtgttaagccttacatgacaatcaccatgaagatttacatacacatgttatatcatagtctcctcacaacatgtctaagaggtaggcacgtcattgttcccattttgcagatgaggaaactgaggttcagagagggcacttggcttgcccaaagtcacacagcagggagtggcagaggaagtcaggttgggtgaccccagtaactgctctcagaggctgggtgatgaccggcttcctggcttctctggaataaacctttgccaccacttcctgcatttcagcttcagtacaggcagagaat

SEQ ID NO: 3191 - DNA, 139 bp, Homo sapien
gaagatcgatctccttgtggtcggtggtgacgatggtgaagtacacgtacttgtccgtgcgctccacgcagtccaccttgaggatggagtggaagcgcagtcccttggggcgcgcgcggggggctggcgggggaacagg

SEQ ID NO: 3192 - DNA, 331 bp, Homo sapien
ttttttccggcagccgtggtttattctgcgagcagcagggctcgggcgcaggaccccgagggcaggcaggaggcggccagccacctctctcccacccagccactgagactctcgcccgtctgcccgcccaagaagctctcaccaaactgaggaaaagctgctgaagctgggcagcatcgtgccgcagcttcggccgcctgggtcctctcgtcggctccgcggcacaccaggcggccttgcatcagcgcgctcaggtactggagcaccacggcacgctcggcctcagccagcagcagctgcggggaggcaatcaggcgggtgcaggtcgcct

SEQ ID NO: 3193 - DNA, 416 bp, Homo sapien
atgttgtgtttcttattcagggttttgttttggactgtaatattttatagaaattttaggattactttcataaaaatttcttaatacttcagagctaattcaagaaacctgtgtgcattaacgtcaggaagttaactgtcccacataattgccttggagttgttctgaattgttgattatggtctcaaataattatctgacaggtttttggttaggaatttttctgctgccacacactgttcctgttgagaatgtagaggtacatttcggactttatatttttatgaaacatttggaaggttggggtggtggatgccaggtttctaaatccagaaaaatgtattttgttagactatgagtatccctaatctttaacatgggttaattggatggtggggagtatttgctttgatttc

SEQ ID NO: 3194 - DNA, 427 bp, Homo sapien
tttaacaggaagaaatatgccttttattaggagttgcatatgtacagagaaagctgtttctcacagctcaggggaggctgtgagaaagagccactgtcatccaaggtcactgcgcgtacactggtaacaccacttagacaccgccgcacgtgattaagaaacagaaccatgacacagaaatgcagaagagacacgggtacgtgtgtggacacatcatttctaaaaacaagtcaacacaaaaatacaatgtgccaataaaaaaaaaatagacatatccatacatgtctttttttctgtttttaaagtaaatacatggtatgctgagctttcacctccagctttttccacatcgggattcacaggcactttagcaccccagccatggtttacaatacaggatgttcagaacaatgaaggaagatgggag

SEQ ID NO: 3195 - DNA, 487 bp, Homo sapien
catgagggggaaagccggaaattagaatcggcacggaaaaaaatcaaaaaagaaatgctacgggtgtggcgaggaagtttctacacaggaaactagatagctgtggctaccggaagccggggaacgctgttcgaattcataaaaacacggaggtcagaaggagggtccaggtgaaaaaatattattgggacctttcaagggagagaacgtcaaatttggttcccaggaaaatctctgaggagagggctgctattgaaaaaactattgaccatgcgggcaagaccaagagggcaaaaggacccaccgggagctcaaattcgaagcctgaaactaattcggacgccccttcggcaaagtctaatgcggttcggatgcaccctcccagttcggaaataaaccatattctgcccaagggccaaaatggaaagatttagcaaaggggtccttgatctaggaaaactgtgtacagttgaaacggcccccccat

SEQ ID NO: 3196 - DNA, 342 bp, Homo sapien
ttttttttttttttttttttttttggaggtgtccttatgagtatatttatgtgtcacacacacatgtacacactcaatgctggacgggagggaggttgagacggacaggacaggaggaggcacccaggtggcactggcacaggggaggagaggggacacagcgagtgtgtggccccactttggccccccaccgcctcccaacaggaggtggacctggagctggaagaacaggaaatgcttattctcttagaggacagtttcaaagtgcagaaatttctcttataaaaatcctcttccctccacgctctgccccttgctgaagcccagccccctgcgcaggct

SEQ ID NO: 3197 - DNA, 570 bp, Homo sapien
tttttttgccagggcggaccgtctttattcctctcctgcctcagaggtcaggaaggaggtctggcaggacctgcagtgggccctagtcatctgtggcagcgaaggtgaagggactcagcttgtagcccgtgcctgagtagaacttgttctggaattccacccagtgcagccgcaggcgtgcacggaaggctgagagtccctccatcaccagcaggatagccacggtcatcacggcaaaggcggcaaagatggggaccagcaccacagccgccacgcccacctcccggcccaggcccaggcctatgcgcatcaccatggcccacagaacctcggacagctgggcgtgtggcaggctcagggccacaggcgcaggtaggaggcggtgttggagacgcagcccaggcagaactcgatggtgtggatggcctggtgcatgagcactctggaggggacgagctcggcctcctcttcatcatccaggccccctgccttttcctcatcggagctccagccattcacagatgcgtcaggcaggtccagcaacccggccttgttttcctcctgtcggtc

SEQ ID NO: 3198 - DNA, 312 bp, Homo sapien
cacgggcacgccggccaccaccaccaccaccatcaccaccaccaccacccgcccatgatcgctctgcagccgctggtcaccgacgacccgacccaggtgcaccaccaccaggaggtgatcctggtgcagacgcgcgaggaggtggtgggcggcgacgactcggacgggctgcgcgccgaggacggcttcgaggatcagattctcatcccggtgcccgcgccggccggcggcgacgacgacctacattgaacaaacgctggtcaccgtggcggcggcggcaagagcggcggcgcggctcgtcgtcgtcgggag

SEQ ID NO: 3199 - DNA, 289 bp, Homo sapien
taaggaaatactaataattaccatatcagatactaatgtctctacaaatcctgtgaaaaacaaatctggcatctattcttacccctcctttcaattttctctctaagtttacaaattatctcttctgctttaattcaattgtcttttcattgtagtcactgtttctgaacttctacaccgcatttgaaactgtcaacaccctgcccattgtagaaaatcttcctatcctggaaatgatgcactttctggttctctcagaatgctattagcctatttcaagacccaaaat

SEQ ID NO: 3200 - DNA, 106 bp, Homo sapien
aaagcccagcctttctggatccacagtgtatgggagccctgactctcacgtgctgatctgtgccttggtccaggtaggccacccctgcactccactgcccagccct

SEQ ID NO: 3201 - DNA, 326 bp, Homo sapien
ggtgctttcctgtgacaagcagccccacaatgtcagggatgttatcaagtggctggtcaaagcagtaactgaagatggattgactcagcccccaaatggaaatcaaacgtcttcaggaacaggaatcttgaaagccagcagtagccacccttcttcccagcccaacctgacaaagaacaccaatcagctgattgtgtgccagcttcagaggatgctctccatagccgtagaggtggacaggacccccacctgcagctccaataaaattgccgagatgatgtttgggtttgtgctggacattcctgagaggagccagagagaaatgt

SEQ ID NO: 3202 - DNA, 198 bp, Homo sapien
ctaattctataatggaaaactatccattctgaataataggtatgtaattatttgctgctgctgctgtgctctgtaaattctgaatatgacatttaaactctgtgcctactaaaggtatcttctggagtttttgggaggagagaaactggaaaattaaattgtatttttgccagaagactcttacttgcatgtgtctca

SEQ ID NO: 3203 - DNA, 384 bp, Homo sapien
ttcggcacaggtttgaagaggtcataaagaaatttccaaggtgtgccgacgagtgcactatacgcccaggtaaatgttttttcaggtttttaaaaataactgcatacatatgccaaatctcagtatggaaatcagaaaacagtgctatgatggttgcagcttctttggaagcaggtggctttgttcctgattgattctcatggcccctggttggtcccgaatcacctgagaagaggctcctttgttacacaatttggaaatcatggccctaaactcaatatggggaagcttaaggcgagaatttccctcctgtcttcatttggattggttttgaaaaagtaattacattaggaaaatttaccgtatgcaattggtggagaaaat

SEQ ID NO: 3204 - DNA, 589 bp, Homo sapien
  misc_feature (1)...(589): n = A,T,C or G
attcagatgatcttttatttgaggggaaaatgtatgaccgtcactacaagaagctaatcattttcatttaaatggatgatttaaaactaagaagttttcaagaatttcagactacaataaaaaaattcagatttaaatcctgctttccatagcttcaatcctaaaccaagagagtttcaggaattttagataaagcaaagataaattaaaataaaccgttacaacaacctagccatataaaaaggcagtgaccagatagaaagagaagcctttccgtggatattttctccaccaattgcatacggtaaattttcctaaggtaattactttttgcaaaaccaatccaaatgaagacaggagggaaattctcgccttaagcttccccatattgagtttagggccatgatttccaaattgtgtaacaaaggagcttcttctgagggtgatcgggaccaacaggggccatgagaatcattcaaggacaaagccacttgcttccaaagagctgcnaccatgatagcctggtttctggattccaaccgaggattggcaatgtatgcagtaatttttaaaacctggaaaacatttc

SEQ ID NO: 3205 - DNA, 366 bp, Homo sapien
gtatgacacagaaagaaatgtttcttcacagagggaggagaaaaatatcttcaagagagaactaatagaatcaaatcaatgaaccatgtctcatctttttggataagtaactgttagtaatccagacacttcatgagctttcattatgtaaagtctttagcagaagctaaaggaggggcaccaaccacagtaattttaacttaagaacaaaatggagcatgaaaataaattattaaatcatttactcccacgtatttttgggttagggccaataatggggagagaaagaggtagactagttttgtgtttgtggctattttaatagagtagcacaagtaatcaaaaaacagtaggctgttttgaatt

SEQ ID NO: 3206 - DNA, 357 bp, Homo sapien
ggtagtttacaaaggataaaccttcattgtttggaaaggaaagatcagagagctctttatgaagtttaaacaaaatcagagaaataaagagatgtgggaaagaaagaaaaaaaagaaagtacattgaggacagtccaatctaactgtgaactcataagggacagccagtaaattcaaaacagcctactgttttttgattacttgtgctactctattaaaatagccacaaacacaaaactagtctacctctttctctccccattattggccctaacccaaaaatagtgggagtaaatgatttaataatttattttcatgctccattttgttcttaagttaaaattactgtggttggtg

SEQ ID NO: 3207 - DNA, 353 bp, Homo sapien
ctgaagtgggggaaaagttcgtttacctctgccccgcagacacttaaaacgctggtgaagaaaggcaacaggcaaggcttatataaggaaacagtagtaggctgcactgaagtcctcaaacacaacaaaaagctcttaggttgcaaatgttaaccttgattcttttacccttttgaaaaattcaatgggatggttggaaaaaaaaaaaaccacagacacacacacacacacacgcaaccttctaacgtaatacccaggcagtccgataatttatagtacaacgtgtaacactgggatccaacttttcacccagcaaaatctccttacaaattagggcaacatataccacaaag

SEQ ID NO: 3208 - DNA, 375 bp, Homo sapien
cctcgtgctgctctgcagttccagctggaccaaatggactgcaagggaaagaaaagagccagctgcagaatagccgagacctggcccagaatgagcagcgcatcctggcccagcaggtccatgcactagagaggcgtctcctctctgcctgctaccatcaccagcagggtcctggcctgaccccaccgtgtccctgcttgatggccccagctcccccttgccatgcactgccacccctctactcctgcccctgctgccacatctgccactgtgtcgagtgccctggccactggcttgcctgccaggggagcaccacctgccccaggtgttggaccctgaggcctcaggtggcaggccccatctgcccggccccca

SEQ ID NO: 3209 - DNA, 519 bp, Homo sapien
tgttaccaactgaagtgggagcggcatagtggtgacaggcgtgcagcgccgtagatgtgggcatcccaggccccgcatagtaggggtgggccggtcagtgcgcagtacatccttgaggaccgtgctgcggatgaattccaggtcctcagggttcgctcgctgggcccactcgctcttgagccgctcatactcgcggctcttgcgtttcatgtagtccatccgctctcggcctgtcagtccatctggatacacgttcagcaggtaccgccacaccacctttcgcagcgagggctccacaccgccatgatagatccgcatgcgcaactcctcgggtcgggagagctggccctcgtggttcaggtacgtgtgaaactcagcatcgctcaggggtggcttgaagggcttgacatcttccccatacgaccagctcagcacttgttggaccttagacaaggtacggcccacctgagtgaggatggactgtgtaaagggcagggcggcagtcgtcagtgatgaccg

SEQ ID NO: 3210 - DNA, 238 bp, Homo sapien
cctcgtcgcctcgtgcgaagccttagggaagctggcctgagaggggaagcggccctaagggagtgtctaagaacaaaagcgacccattcagagaccgtccctgaaacctagtactgccccccatgaggaaggaacagcaatggtgtcagtatccaggcactgtacagagtgcttttctgtttagtttttactttttttgttttgtttttttaaagatgaaataaagacccagggggag

SEQ ID NO: 3211 - DNA, 323 bp, Homo sapien
ccttgtgctcgttgctttccttctccgggctcttttcccatctgtgaaagctgattaaggtcttttcagcccaggatctggattatagacatctctgacatgaggtacctgctatggcccactagaagaatccattccacttcccagcctgggctatataggtcattcagtacccgccatagagccagatcttgtgtggagagagaggatgcaggattccactgggtaggcaccgactgtccagttgacccacttgtggtgctgatgcctaggcagcagggctgtggtcgggcttgaacaccatggcctgcgccctctggaga

SEQ ID NO: 3212 - DNA, 304 bp, Homo sapien
cagagcagccatgtgggaagtctttcaactttaagaaacacctgaaggagcacatgaagctgcacagtgacacccgggactacatctgtgagttctgcgcccggtctttccgcactagcagcaaccttgtcatccacagacgtatccacactggagaaaaacccctgcagtgtgagatatgcgggtttacctgccgccagaaggcttccctgaactggcaccagcgcaacgatgcagagacggtggctgccttgcgcttcccctgtgaattctgcggcaagcgctttgagaagccagacagtgt

SEQ ID NO: 3213 - DNA, 331 bp, Homo sapien
ttcccatgttcattgcagcactattcataatagccaggatacgggatcagcctaagtgtcaacagatgaatgaataaagaaaatatgagatatatatatatatatatatacatacatacacacacagtggaaaattataatcctgtcattgtgaaacatggatgaacctggaggacataatgttaagtgaaataggccaggcacagaaagataaatactacaggatcttacttatatgtgcaatataaaaaagttgaactcatgtgtacgacgaatagaatggtgattaccacgggctagacggggagagggaaagttggggaaatgttag

SEQ ID NO: 3214 - DNA, 368 bp, Homo sapien
tttcagctattttcttaaaagtatattttttctataaacatcctttgctgctacattagaacttttatagcctaaacaattgcagttggtgtgtttcatttttttaaggtttaaataagggttttttgttttgttttgttttttgcagtgagcatcactacagtctcagtcaacagtgtgaatgtatcatgttttactttaaatgtgtgtgtgatacttcttcattatgtcctgcgctgcagtgagacctgggtgaaaatcaggaaccgcacacagccacatcttcctagacctaagagtaaattaatgaaggattttatttatggctatttatatgtaaatgtcattgaagacaaaggtcaaatatt

SEQ ID NO: 3215 - DNA, 442 bp, Homo sapien
atttaaatgtgtcttatctagctagtatactctgaaaatttgagtatttaatattaggcatatgaagtggttgttgggaaaggagattccttcagaatatttagaatagcgtttaaggctctcaaggcttaggtatttaccatgagatggttgtggtcagttgcacctgataccatgtatccctgaatcatgtgtatttttattagtaatgcagccactaccattgctgatggggtctgtgtcctagtccctgtgggattggccttctgaagaaaagcacatttatggtacacaaggttgattctcagtttggtaggctctatagttccatcccagctgtctaattctgaagtgctccagtcttattggtgcccaatggggtaatctgtgcctcttccccaaaagcaatgacaggcaccagtgtctccacatttagatatat

SEQ ID NO: 3216 - DNA, 225 bp, Homo sapien
aatggcccagtcctctcccaagtcttgttattggcgtggctagcaagtgagttttgtctgctattttttattcgcttatcttattgttgtttagttgaatggtgagcctcgtatcatcttccccttatgtccttattgagatgttgagctttggctgctggagtgggtgagcaccagggttactgtaactgacttgagaccagttgaataaaagtgcacacctta

SEQ ID NO: 3217 - DNA, 397 bp, Homo sapien
aacacaagcataatattcggcccaaacctttcgtgatcccgggccgaagcaggtcataagcgctgagactgtggagtttgcagtgcatgcttcttaaatcagttcttactaatcatcaagaaaagtaactggtagatgtttggagtggcttttctcattgcgaacgttatttcaaaagcaaaaagaaacaaactcacttggcagagaacagaagccaaataacttgcatttccaagagtaaatattgacaagatgacagagctgtgaaattgtatgcaatcaccacgtgtatttatagcgaacacccctgaggctctggggatcccatccagaacactgtgacctttgagtcgggcagtcagtatgtctatcccaggtcaggaaagccctgccagca

SEQ ID NO: 3218 - DNA, 412 bp, Homo sapien
ttaaatgtataaccttaaatatttatttgagaaaacaaataaagatccaaatacgtgagttgatcatctgataaaagtaagagttgacaaaaaaggtacatcttctccaatccgaaaacagaaagtgggaaagatcaaggtatcactagaggtcaatgaaacaaaacatacaatagtggatgacaaaagccaatctctgaatctttgaaaagaatataataaatgaacatctgaaaccagtgatcgagaaatgttttagataaggcacaaaaagataccaagaatgttaacactaggctgtacatcctaaaacagtcagatgagctcactgttataattctggttcaccgcaagaaccttagcacaaagaaaggactcaacaaacatttggatccatgaataaaattatctt

SEQ ID NO: 3219 - DNA, 253 bp, Homo sapien
tgagggagtcgcctccgcgggacgtcacaagacctgaccggactgcgccgcccgaggctgtcgcgccttgtcagcgagggcgccgagcaacttcgttcagaatgaccgaagaagcatgccgaacacggagtcagaaacgagcgcttgaacgggacccaacagaggacgatgtggagagcaagaaaataaaaatggagagaggattgttggcttcagatttaaacactgacggagacatgagggtgacactgag

SEQ ID NO: 3220 - DNA, 118 bp, Homo sapien
gcctgctggcgcagtcctaccacgccgtgtgtatgctggacgagcgccgctcgccctggaccgccaagcgtctggtcaccctggccctgcggcggcgtgtctgccggagcgcgcgcgc

SEQ ID NO: 3221 - DNA, 473 bp, Homo sapien
tcagggcgagttatttctttaatgaaaaagcacaagcccttatgtgtcgaaatacacgctgttacactgaaaatatatgcacgacagagcaagaagcttgtgcatgatcacttcttatccgtccccttcccagcactccctcctcttcccattctctccacatgtctcaagcaccctaccgagtagggcaggccaaatgttccttgggagtaatgccaactcccgacgttgccttcaggtccaaagggcttggaaccagctcgtgaggaagttctgaatctggcactaatattcttgagtggataatagtgtatcatagaataggacggaaattgtattgagatgtgaccctgtgtcgcctgtggaaaggcatagtgagaagaactttcccacgaaagcccccttcatcgttgttcagtggtcggctgtgtggatcccaggagagacatatgccacagactgtgagagcaaac

SEQ ID NO: 3222 - DNA, 510 bp, Homo sapien
aaggatggagacggtttattgttataccaaaaatatatgtatatatctatatatatatgcagaaataaaggatcagaaggctataaacccaagtatcattagcatttatatctaggtgcagcattaagcctgaattcccctttacactttattttacactgaacgtgtatcctatgtacaatagagttaagcaataaagctgtcttcatttggaaatcaaggcaccattatcatccacatcttcaccaggactgtggttggggaccaaggggagtagggatgaagatgtccctctcagaaaccaggaagagccaagccgcgactccccgctccccaacccatcctcattcctcctctactgcctgtggcatcaccgtggggcctgtgttagagacaggtggggaaaagagcccaagagccgtctgcctgcacagagggcatcataaatgagaggggaggcgggcgcagtggctcaccctgtaatcccgcactttgggaggcgaggcgggt

SEQ ID NO: 3223 - DNA, 510 bp, Homo sapien
taatttaaaaaaaaaaagaaaagtttatgcttgaaagtgcaacaggctccagggcaacgtcactctagctgaagatggcaaaagctgtcctggcgggggtgcaggtgttgaaacaggagtggagtccaggccgccaccgcccaggcagagggagcagcgtgctttccgccagggttcttagttccagctgtggctggcctccctgcggcctgtgctttcggccccttgaggttctggtctgttttgctttctgctggaacctcatcatctctgtccctctcctgggcctgcttcttgggctgtctcagaggcttcttgccatcttcatggccggacaccggccgtacagcctcttccccagaccctgccacaggaaatggacagaagacacttttgagagggtgaaaatgtaagctgcagactgggaaggatctttaaaatgggtgctgctaaaatcattgcttttaatgtagtcagattcaccagtcttttgctttatggtatttttag

SEQ ID NO: 3224 - DNA, 202 bp, Homo sapien
gtgatgataaagcccagttctggaattggagccatattaaggaatgattctcttccagcgctgctcctcaagggttgggggtccttctccctcgcagccaccacatgtctcagggctaccttctccgattggatttgcatttgtggcactgtctttgatgcagtgatgtacttaatggtgcaataaagctgcttcgatttgg

SEQ ID NO: 3225 - DNA, 169 bp, Homo sapien
tccaaatcgaagcagctttattgcaccattaagtacatcactgcatcaaagacagtgccacaaatgcaaatccaatcggagaaggtagccctgagacatgtggtggctgcgagggagaaggacccccaacccttgaggagcagcgctggaagagaatcattccttaata

SEQ ID NO: 3226 - DNA, 302 bp, Homo sapien
agagcagaagtgagggaaggccgcccgcgccgaagccctgggggccccagccgaggaagagccgggaaagggcgtcgcgctcgatgtaggctcacctttcgagtgcggagggtgacggacgccccccgttcaagcagcagctcagccacctcgaagtggcacagttgagggcatcgtggaggggggtgatgccttcgcagccctggccacctgggtcgtccactgcggccccgtggtccagcaggaagcggacaatttctgcagaccaggagacgtaagcccagctcccgatgccccgccag

SEQ ID NO: 3227 - DNA, 372 bp, Homo sapien
gaccagctgggcttttatttcgcagccaccatcttcattggcaaactggagacagtagttgtacccctagcctcccagggtgggagaggagatggcacgcgtggtccaggagtgctgatggcagagaccaccattggaggttggcagccgtcagccctcactttgagccaggcaccatccatgttgtgttgtttttttttcttgagatggagtctcgctctgtcacccaggctggagtgagacccttggtggacacgtggggcgaagagtcagtcctggcggggcatcgggagctgggcttacgtctcctggtctgcagaaattgtccgcttcctgctggaccacggggccgcagtggacgacccaggtggc

SEQ ID NO: 3228 - DNA, 392 bp, Homo sapien
ccagaaaaaaatttttaaacaggaaagaagattaagaacatgaaatgagcatgaatagcagagtactgtaagaggaggagtgatgagaagagactgggattagttacaaagtggaagggtgaaaaggcctttgtagctgggtttgctttttatacatttcaaaataaaaaccagatcacagtattcaaatgaaagctgaagtgaaagcagacattttcctcaactccccagggttgaaaagaccagtcactccccacccccatttccagtcacagcagtggggatacagtagctgaatcagtcctccaccccctgcagggaagtgggtgggtaagcagcagagtccatctctccatccgcggggaaaaggagctgggagtagggtagggtag

SEQ ID NO: 3229 - DNA, 453 bp, Homo sapien
gacagaccaatggtttattccaaaggggaaagcccaagctggatgtctccctccccaacccctgcaagctggcccatccttccagagcccccataggcctggggctgttgagacgggagatgtccccactgtgctgctcctggttttgtctcctctccaatccttgagcaccctgatatgcaacatggggggtaatcagaaggaggaggcagcctctgatggggcaacggctgagggtgggggcagtgtgtaaggcaccttttgcggtcaggccagccacactccatcgccagagagaatgccaaagtgtagactgaatgaaattctgtaggcaaatggtaaatggtagctgggccagtagctatttgcatgggtggattatatcatgttaagggaattctttatctcagcagagggaacagaggaatatcttggctaaggtcatcctgccag

SEQ ID NO: 3230 - DNA, 338 bp, Homo sapien
tacaaacacaaaagaatccattttcagaaaaataaattactaaggggagaggaagaaagggtccactttgcttttctcaataaatatgcaattctgctcacctaagacttgaaaggtaattatctgggggtgggattctaacatcagggtccacgaaggtgattctaaacagagctgcagccccagcgccttgtcaggggagcccccaacccttccagagctgccccgttggcctcttccaagcaggtcagagcacccgtgtggtgagattccaaaaaaaaaaaaaaaaaaaaaaaaaaaaaaaagtgtccttgtgcccaaagtctcaggtgcttgga

SEQ ID NO: 3231 - DNA, 427 bp, Homo sapien
gttctccaaatatttattgaggtcttactatatacaagactatataacaagttatgcttgttatatatgttatatatgttatgttatatatatatatgttatatatgtaatataactatattacaagttatgcttgaaataatgctgttaccaagataaagaagctccttcacccaaggaaccctggtgttaaaggcaaagattaaccaaataatcccacaagtaaactatcatggactatgtaaatgctgtgaaagaaatgtatgggaagtcgagagaggatcccacctgggggctggacagggtctcaacacagtaggtgagggttctccatgcaagagacatgtgagttgaattctgaaggatgaacaaaagtcacctatacaagggtagggttggaggaaggaaggtgaggagctgttcaagc

SEQ ID NO: 3232 - DNA, 397 bp, Homo sapien
tactgttctaatttactgtattttcacagcttgttgttatatctgttacaatacatctcacaccactgtatttttttcacaatttttttggctatgaattttaaaaatcaacttgtcaaagcccattcttaaacatcttgcagcctggtgcggtggctgatgcctgtaatcccagcactttgggagggtgaggtgggcagaacagcctggccaacatggcgaaacctcatctctactaaaaatacaaaaattagctgggcatggtggggcgcacctgtaatcccagctactcgggaggctgaggcaggagaatcacttgaacccgggaggcagaggttgcagtgacccgagatcacgccactgcactccagcattgttcttggtgctttgtgtgtat

SEQ ID NO: 3233 - DNA, 304 bp, Homo sapien
tccttgtggacaggactaccccataggcagtgtacccacaatagatagccttttgttgttgttgttgttgagacaaggtctcgctgttgcccaggctagagcgcaggggcacaatcaccacacactgccgcttcaatctcctgggctcaaatgatccttccacctcagcctcccatgtggctgggactataggtgcatgccaccacacccagctaattaaaaaaattttttgtgtggagtctatgttgcccaggctggtctcttaactcctaggctgaggtgggcagatcacaaggtcaggagt

SEQ ID NO: 3234 - DNA, 163 bp, Homo sapien
agttggcctggatggtttcctggatccacttggtgaacttgcagaggttcgtgtagaaaaccggtctgttgggccgggcacaagggtaatatccccaggacacgggtcccttgcaggagccattgaaggaccaaaggcccccagaattccccttggaggagtt

SEQ ID NO: 3235 - DNA, 424 bp, Homo sapien
tcggaaaataggttgactgtgcgtgtcttgctgctgtgacttctcttgctttgctgtgcaagtgttttcctttgcattcaagtgggccttagagatgctggagaagaacaaatggaattgctcgtctgctaactgtaacgtgcagaaccagggcgggagggacttctacaatcatcgtggtctggcttgcgtttcttatttggcgggggaaaggggtgagcaagggattatagttattatataattttttttcttgaaaaaaatcccaccagttcttcaatttgtctgcaaaggaaatgtaggtgttcagatgtcggttgttgctgtcagccaactgctctgccagccccagcagcagtgcaaggatgcggtgtttcctgtatatatatctatatctctatatatctatatatatatgcttttc

SEQ ID NO: 3236 - DNA, 400 bp, Homo sapien
aaacaaaagaattaaataaaacatgcctgtgaaataaatccacctatgggccatcagtttgcaacagctgcggtaaatcatattcaatgttcctgtcggaatcaatccggtctaaccaccagcttccttcctgtgggctgactggcttagctgaggtcagaaggatggaacagaggtttcctgaagtcactgtttcctgatttggcaatacagggcattattttctttccccttaggttggagttcaatttctagagaagatatttgaaaaggatgatctgaagatgatcagtttctctactgagagacgagaaggaagagcttgctccttatcattctggcttgttcacctgattccttcctcctaaccggggctggtttccatgctcgctcctgctgg

SEQ ID NO: 3237 - DNA, 374 bp, Homo sapien
caaggcttgggaccctggctgcctgccgaaaccctgcgcaccctcagaattggggggttctaagctctttccccaatacccggttttcggctacacgttctcaaaatgaatttttgttcccctgagaactttcgggtcctgataaactccacggattcccaaggaaaattccaatggccgtttggggaacttaaagcttcttaggtttcgggaaaaaaagttccatatattgggcaaattcccccagggcaattttttaaaaaccggaaccggaattttttccgaatttttccccagtttgagaaaccacccgggtgtacaattttttgggccacacacttatgtggaaaattttggggttcttccattatgaa

SEQ ID NO: 3238 - DNA, 393 bp, Homo sapien
ttgccttcccaattgaaaatttttgagccaggatttgtaacccccatcgcaaactctagtaatctgtacctcagaaatggctatactgatcgataccctgcgctgagagatacgtctctaaaatacagccatgttgagggtcctgctagtgtcacaggctaatcctttgagagtgacagggatactcggacttgtttcccaatcggacccagtttttcaaacagcagcgagagtagacaagatgcctgaactctttccggggcgacgaagatttcccggaagggcacaaaggaagcagtctcaagggggagacttagttgactcaataaggttggcattggagttccagctctgccgggccaaccaggcttgttccttgaaaactgacccaaa

SEQ ID NO: 3239 - DNA, 174 bp, Homo sapien
aattcggaacgaggcggacagtgagaaggtcaggtgagggcggcaaccagctccccttgtcccgccctgttcatcctcccattaccaccgcccccacacactcacacgcacacttacgcacagatcattgcagcggatgagatggggctatgacagaagcctcaggctcgtttc

SEQ ID NO: 3240 - DNA, 254 bp, Homo sapien
gtaaggagtagtttgggaaatggagtatcatttgtgcttctctctggagtacttactgtaacagatgcacactttatctacttcaacccttttataaagcaatatatagaggtcttagatgtataatccttgagatgccatttgatcagatgccaatttgtattcagagctcataaaaacaagtccattcttatagtttgtttgtcactgagacggtgcctgatttaatatatttaagctgcttaacttgtttt

SEQ ID NO: 3241 - DNA, 329 bp, Homo sapien
cagatggtcaccatcattcctgtgctcagaggccaacccatcacaggggtgagataggttggggcctgcctaacccgccagcctcctcctctcgggctggatctgggggctagcagtgagtacccgcatggtatcagcctgcctctcccgcccacgccctgctgtctccaggcctatagacgtttctctccaaggccctatcccccaatgttgtcagcagatgcctggacagcacagccacccatctcccattcacatggcccacctcctgcttcccagaggactggccctacgtgctctctctcgtcctacctatcaatgcccagcat

SEQ ID NO: 3242 - DNA, 481 bp, Homo sapien
gcggccgcggcaccatggccgagggggcagccagagggtccacgggcagctccgggctctgctcctgcttcaccatgatggagcacagtttgtgtcccagcgcccatgctccatgctctgcatcttgggtggtgtcctccatcttgatgggcacaagggggctctggggcgctgagtcgcgctcagggagtagctgtgctccgcctggatgcctggcgtaggggagtccagttccatgtccaatagagggctcttctcatccagcacagggtcatcaaagaagctgctgaacaggtcattggagaagtcctccatgttctccgtaaagtggtccaggtgctcaggaaagtgcgcattgttgaggaagtccgactcgttcagatcccccaagtccaggaagctggatccggggaacagcctgtcggccgggaagggttccagacggcgtccatcgcagccggctcccgggacccccttccac

SEQ ID NO: 3243 - DNA, 417 bp, Homo sapien
agaacacacacatttattgattatatttgccattttacatgggtgcggcttttgacatcctatgacaattatcatagtaacatcaaagatcactgatcacagatcaccatagtagataataataataatgaaaaagtttaaaatattgcaagaattaccaaaatgtgacacaaagacatgaagtaagcatatgctgttgggaaacggcactgacagacttacttgattctgggttgctacaaacctgcaatttgtaaaaaaaatgcaatatctgcaaagcacaataaagcaaagcacaataaaacaagataagcctgtactcataaactttgacatatcttcattacaaaggagaaaacagccactagatatgaaaagatttgcccaaagtcattcaactaggagagaaatgaagac

SEQ ID NO: 3244 - DNA, 421 bp, Homo sapien
tttttcctctctgggaagtgtttaatcctgcatcaaatacagacaggaaagcattggcttcgagagaatcacagttcactgtaaaggcaagccggtgttcgaaaaggaccattaattcagaaggacccaaaactctggaaaggagaagtcatgatcactgctgtttcaggaacaaccttggtaacttgccagttacgctggtggtggagagaatggaacagctggaagggagacttcttagcgcgctcggcataggcacagacttcactgcttcagaggacacgcagtgcagacgagagtcccaagcttcccagctgcaccaggtccacatggcacttgaaacaggctgcctaagaggccacaacgcccaagcatgctcctttgctcagagacccaggacctcagctgggtggctgtggac

SEQ ID NO: 3245 - DNA, 432 bp, Homo sapien
tttttttttttttttttaatttataaagaaaagaggtttattttggctcactgttctgcagactgtgcgataagcatggtgccagcatctgcctctggtgaggccttaggaagctttcacttatgtcagaaggggaaggggaaacaggtgtgtcgcatggtgagagagggagcaagagagaggggaggaggttccaggctcttttttgtttgtttgttttctgagatggagtcttgctctgttgcctaggctggagtgcagtgctctgatctcggctcactgcaacctccacctcccaggttcaagcaattctcatgcctcagcctcccaagtagctgggattacaggcatgcgccaccacgcctggctaatttttttgtatttttagtagagatggggtttctccatgttggtcaggctggtcttgaactc

SEQ ID NO: 3246 - DNA, 439 bp, Homo sapien
gacaagagtttcacttttgtcacccaggctggagtgcagtggcacgaatctgactcactgcaacctccgcctcccacattcaagcaagtctcctgtctcagcctcccaggtagctgggactacaggcgcacgctaccacgccgggctaatgtttgtatttttagtagagacagggtgtcgccatgtttgccgggctgatctcaaactcctgacctcgtgatccgcccgccttggcctcccaaagtgctgggattacaggcctgagccaccgcacgcggcccccttcgtgccttttgaggaagcagcagccttggtcatggcccataagaactcagacttcaactgaaaaaagtggctcttccctacacaacagtccaggaagctggatattgggagtgtggtgagacgagaactgacccatccataagctattctggat

SEQ ID NO: 3247 - DNA, 110 bp, Homo sapien
tttggagagtgctcaatggacgtagttattattatcatcatcagcacagtgcggggcacatggtgggcattcagggatgatggcccttgtgtcacagccgacactcttga

SEQ ID NO: 3248 - DNA, 373 bp, Homo sapien
ttttttttttttttttttttttctctctctctctccccctctctctctttctttcttcctttctttccctccctccctcctaggctcaagcaatccacctgcctcagcctcccaaagggctggaattacaagtgtgagccaccatgcccagcctgacccttttctttaagtgtaaaatggtgatcaaaagcagacctattttttcatgtctgatgggggatgggatacagacatcaaataatcccatgtacaataataatagatatcacttatacagtgcctattacatgccaggcatgttctcagtactttacataaattaacaaaatcacactctgaggaggtactcttaatatcttcacctgataagtaa

SEQ ID NO: 3249 - DNA, 448 bp, Homo sapien
catcattcagaagtttttaataaacaacttcattataaaaacctttttttgaaaatgtaattctgtaaaacattgaaaaatctactttaacaaagatatgccctgtgcattttctaatggcacttatactttacaattaaaaaccttgttttatataaagccaaaaatactccaagaggttattcactgtgtttacaaagtgctagaagatttctgtcttgtacttttctctttaaataatctggagttacaaaagagtggctccaaagccttgaccgctggtagggagggagaagcatgagaagtggtgtctcaggagttctagtgccaaaggtggagaggtgcaagtgggaacaatcagctaaggaagtcagctgacacacaaagaaatcggactggaatttttccaaacccctctatggaggcactaggttatcatggtgaacac

SEQ ID NO: 3250 - DNA, 344 bp, Homo sapien
gatacagggtctggctctgtcacccaggctggcacaatcacagctcactgcagccttgttccccagcacctcagcctcctgagtaaccgggaccacaggcatgcaccaccatgcctggctagttttttattttttgtagagaggggatctcgctttgttgcccaggctggtcctgaactcctgggctccagtgatcttcccgcctgggcctccaaaagtgctgggatgacaagtgcgagccaccacacctggccccaatttagctctgtttcccttcctcttcctctcatgatgcttctggtagattccatccatttctgagggatttcccctgaggttaaaac

SEQ ID NO: 3251 - DNA, 136 bp, Homo sapien
ctgtgtggaatgttgcctaatgctgtggatttgctgagcccccctgacgagtgggggcatgacgacctgtgagctcgcctgtggcccagcttcgaggacgcctgctgcccacctcggaccaggggcgggggtatga

SEQ ID NO: 3252 - DNA, 153 bp, Homo sapien
gggatttcttggaagaaagtgcactcatggagggtctgtccacttggctcactccaacagtttgaatttggaattctgcttttcttcatgaagcacagtctcataagcccacacctacggtctgagttctgaactctcagcaggcctgataga

SEQ ID NO: 3253 - DNA, 382 bp, Homo sapien
gcaggaccagcgttccctgtgcaggcgccactgcgtttcctgcagattccgaccggcactgcaacggattccctgccggagctgaggtcaccaacaggccgtcgccatggagacccctggtacttctcattcccctgcgcctggggctcacggacatcaacgaggcctacgtggagacgctgaagcactgcttcatgatgccccagtccctgggcgtcatcggagggaagcccaacagcgcccactacttcatcggctacgttggtgaggagctcatctacctggacccccacaccacgcagccagccgtggagcccactgatggctgcttcatcccggacgagagcttccactgccagcacccgccgtgccgcatgagcat

SEQ ID NO: 3254 - DNA, 375 bp, Homo sapien
gtcatgagcacaggccctcgctttctgccctaagaagcagtaagcacagcgtcggcggcggcggcggcggcggaggcggcggtgcagaccctgcctggaccagcgcgctctctggaaatagctccggccccggcccaggctcgtccccggccggcagcaccaagccttttgtgcacgccgtgccccctctgaccccctgcgccaggccaaccgcctgccaatcaaggtgctgaagatgctgacggcacgaactggccacattttgcaccccgagtacctgcagcccctgccttccacgccggtcagccccatcgagctcgatgccaagaagagcccgctggcgctgttggcgaaacatgttcgcagatcgggaag

SEQ ID NO: 3255 - DNA, 426 bp, Homo sapien
  misc_feature (1)...(426): n = A,T,C or G
cgcatccgcacgtacctcaagtcctgccgtcgcatgaagaagaacggcatggagatgaccagacccacgccaccccatctgacctcggccatggcagaaaacatcctggcagctgcctgtgagagcgagacaagaaaggcagccaagcggatgcgtctagagatctaccagtcctcacaggatgagcccatagccctggacaagcagcactcgcgggactccgcagccatcacccactccacctactcactgccagcctcctcctactcccaggaccctgtgtacgccaacgggncctcaactacagttaccgcgggtacggggccttgagcagcaacctgcagccccctgcctccctccaaacaggaaaccacagtaatgggcccacggacctcagcatgaaaggcggggctctaccacctccac

SEQ ID NO: 3256 - DNA, 471 bp, Homo sapien
caaaatataaagaactagtagtttatttaaaaagaaatatcaatgcaaaacctactgatagtaagataaagttccttagatgtatcccaattttagtgtaatatgattaattacaacactcttttatcactgaaaattattttgaaactattctgattctttggaattctataaatattcttggagaaaattaaaaaaacataaaatatctgtgaacaactcactcatctgatgagattataaataaaagatcccctgtccctattccagatagaatattttagaaagtttcactgtttgttctgctttagtaagttataaaagtaatttatttagcttatcaaggcaaatttagagctgccttatagtgatttttgccaagccacataaataaagttgtaagttgagtgactctactaactttattatgaaattaaagtgaataaaatttacttggtagatgtgttggtc

SEQ ID NO: 3257 - DNA, 421 bp, Homo sapien
cagattctaacaagaatacttttattatacacgtatcatacacacaacaattatttggggaacatttacaggcagagagttcaattccaaatctccatttcacccacacacactgtactgcacactcaccttagggttcagcccaacaggaacgagacaaagttattgctttctgaacagagagtttcaattaaatagaatcttccaagccaagaacagagcccagcatcctcttaattcttaataccctgtatatatatgaataaaaccttatgatgtgttatagattaccccatcaccattaaaagttaatattaaaattggatcccatgtctcaaaaaagtcgtaagaagtgcaccagtatttacagaccccattaaattacgcataaataaaatctgtacactcaacgcactgtttc

SEQ ID NO: 3258 - DNA, 478 bp, Homo sapien
tttttgagacaggttcttgctctgttacccaggctggagtgcactggcgagatcacagctcactgcagccttgatctcttgggttcaagcagccctccaacctcagcctcccaagtagctgggactacaggtgcacaccaccacacctggctaatctgtgcattttttgtaaagacagggtgacatcatattgcccaggctggcatccagtttaattttctactgaggaatctgaggtcccaacaggagagaaatgtaaaggataagagtgattgcctctgttttttttctgattactaggtataatattcatgttggaaagcagagaaaaatgttaaaaggcagggaatccttttatattcttaattatattcttaatacaaaggcaaccactgtcaaaatattggcagattttcttctgtcctctttcctaaatagtatttttttcaatattgaaggtattatttccagtatatgc

SEQ ID NO: 3259 - DNA, 412 bp, Homo sapien
gctgtggtaggcgctgggttccagacactgcgctggccagagcgtcctcagggtcactcgcctgggccctggggagaggacccacttgcctggcagcctcatgtcgcacctccacacggtgaaatcccgagtttgccgcctcccaggcaccgcaggcctacacggttaggctggggcagtgaggactctgaccccaggctgtaccaggccctccagctcagggctctacaggctgggaggtcccaccacgtgggagtctcccacacgtccaccaagtgctcagagacacgcgggacggactgcagcctcctctttaggagagaagccaggacacagggttgaagggctggggggcttcccgcccagaagcaaggcaaggatgcggaaccgctgggtgtggtcagggctgtgg

SEQ ID NO: 3260 - DNA, 209 bp, Homo sapien
aatgtagtcgtcgtcgccgccggcggcgaggcaccggagatgagaatctgatcctcgaagccgtcctcgcgcgcacccgtccgagtcgtcgccgcccaccacctcctcgcgcgtctgcaccaggatcacctcctggtggtggtgcacctgggtcgggtcgtcggtgaccagcggctgcagagcgatcatgggcgggtggtggtggtggt

SEQ ID NO: 3261 - DNA, 414 bp, Homo sapien
ctaaaaactgtaggcttttttattcagttaagaggtagacaaatgaacatggaaggctgtcccatttaacttgcccaaagttcacattccacttcattcatccatcccacactgccagaaatcttaaagaaataaccaagattgccaacaggctttttctttcttacttcttcttagcaataacagtcaataaactgcttgcaaaaaagttactaatttaaattttcactgtgttcaaagaacctcatccctctaagaagctcccgaatatgccaatagatcctgccactactgacaggagggcagagtaccaaggactctacttatataagagactacaagggaagttgtagttatatttttgttgttaaatccctgtgcatgtgagggcagaagctggtgaaacaacaacgc

SEQ ID NO: 3262 - DNA, 446 bp, Homo sapien
tccagatttctgtgatcccactagccccatgttgctcaacacaaatactattaacttgtatactatacctctttggcccttgctggactgtaaaaacctgtgactaaactatttcctcttatccatttcagtgataaattctgcagtacttgatactgtttagccattgctaatttgactaattaagtggactgtgacaccttttgaatccctatagattatttatataaaaactaactggggatctttacttcgaatggagaggaggaagaatgaaaaaaattgtgttccattactgttttaaaaaattagagtacaccatctttggtctatatcaatcaaaggaaaacaagaatagtgaagaatatgaatttttagagtttgtcctaactcatgcttgtcctattaaaaagaaagtaacaaagtgttactataagtttatatgc

SEQ ID NO: 3263 - DNA, 368 bp, Homo sapien
taatctaatgaaactgagccacagaatagtaagtggaggatccacgaatctaaacctttaaaagataagccatttctatcaccatcccctcagtgcccagaattccagatgggaagtgataccgttttagagttaaaatttctggcctcacgcgtgtaatcccagcactttgggaggccggatcacttgaagtcaggagcgtcagaccagcctggccaacatggtgaaaccttgtctccaccaaaaatacaaaatttcagcgtcaatttagtagatactaatggttttaggaatcggaaaggagtcctatactatcttgccactcgattatgtgaatccacataccagcgatagtgctacaatgtatt

SEQ ID NO: 3264 - DNA, 423 bp, Homo sapien
ttattttttagggtaaacttagaatttatttttagatgaatatatggttcatttgtaagaaactggaaatcatatggttttaaacttgtatacaaagcttatgtcttattcttaacactgaagaggcaggaatttagggttttgggtatacagatcagcaattcccctgtaattttctatcttgtcttgatctccaatttctctggaaaaacacttcagctatttttcactatctggtccctatgttaactggcaataaaaagtaaaaaaaacttaacatcttcaagggtatcaaagttggtctgcaaaaggtaattttagttttgttcaacgtaagtcaaggtgatatgaaagcatttatccaggaagagagttgaattatcattattttaagtaggggactaagggttctgtttcctggtc

SEQ ID NO: 3265 - DNA, 110 bp, Homo sapien
tttttttataagcacaggacaaccaagagtttatttttatacttcagcaacctgacaatccattcctcatagcagttttcagctgggcaattattttaattttttattgt

SEQ ID NO: 3266 - DNA, 144 bp, Homo sapien
agtaggtggaaaccaggttggagatgctggactcgagccaggctcccgagatcatctctgctcaactcgggagtgcagtggtcgggtaactcgggggtcgagccggagcctggcacgaagttaagatccaggtctctggcgagc

SEQ ID NO: 3267 - DNA, 379 bp, Homo sapien
ctgaggcagagaatcttccagatgataaaccccagcagccgactcgaccccaggagcagagtacaggagacaccatggggagagaccctggtgtgtccttcaaggctgttggtctacaacctgctggagatgtaaatttgccatgacttcctggaggacagcagcatggagaaagatcctagaaaaggcctctgacttccctcacctcccaaccatcattacaggaaagactgtgaactcctgagttcagcttgatttctgactacatcccagcaagctctggcatctgtggattaaaatccctggatctctctcagttgtgtatttgttcatcttcatatgctggcaggaacaactattaatacagatactcagaagc

SEQ ID NO: 3268 - DNA, 477 bp, Homo sapien
aattcggaacgaggaggagctgcacttcattgaaaaggcccacacgctgatcctgcagcctccctccgagaaaggccggcagtgcgagtggcgctccattgacggcagcatcgtgctgccctggcccggggctccccaaaggcactggccctggagtacgcactgtgcctcacaggcgacggcttggccacctgcaggccaccgacccccagcagctgctccgcctcatcccccatgtgcaggtgttcgcccgtgtggctcccaagcagaaggagtttgtcatcaccagcctgaaggagctgggctacgtgaccctcatgtgtggggatggcaccaacgacgtgggcgccctgaagcatgctgacgtgggtgtggcgctcttggccaatgcccctgagcgggttgtcgagcggcgacggcggccccgggacagcccaaccctgagcaacagtggcatcagagccacctccaggacag

SEQ ID NO: 3269 - DNA, 419 bp, Homo sapien
aaaggacctcatcagggtggggagagcgctctcagcagggaacggcgtcaccaaggtgtcctgaccgccagaatgtcctgaccaccaaggtgtcctaacctaccggcccctctgctggatacccctcttggacctgtagccacctgcaccaggagctggacctgccttccttacctgggagcaattagtgccaacacacctttgctgtattaacatccctccccagacatccatcctgctactcaccctctgttaatctcctgttacactcagcttcttggcatgtacatattcatttgtgagtgttaatgtgctgctgttttttgttttttggtggtttttgttttttgtttttttttgttttgagatggagtcttactctgtcgcccaggctggagtgcagtggtacgatcttggct

SEQ ID NO: 3270 - DNA, 411 bp, Homo sapien
gatacagggtctggctctgtcacccaggctggcacaatcacagctcactgcagccttgttccccagcacctcagcctcctgagtaaccgggaccacaggcatgcaccaccatgcctggctagttttttattttttgtagagaggggatctcgctttgttgcccaggctggtcctgaactcctgggctccagtgatcttcccgcctgggcctccaaaagtgctgggatgacaagtgcgagccaccacacctggccccaatttagctctgtttcccttcctcttcctctcatgatgcttctggtagattccatccatttctgagggatttcccctgaggttaaaactgccttgttttcctgtggcttagttgtcattatcatatgatggtagtattttcaaccatctccctta

SEQ ID NO: 3271 - DNA, 509 bp, Homo sapien
cctcgtgcgtgtacagcagttctacgacctgctctccggttctctggaggtcatccgcaagtgggcggagaagatccctggctttgctgagctgtcaccggctgaccaggacctgttgctggagtcggccttcctggagctcttcatcctccgcctggcgtacaggtctaagccaggcgagggcaagctcatcttctgctcaggcctggtgctacaccggctgcagtgtgcccgtggtttcggggactggattgacagtatcctggccttctcaaggtccctgcacagcttgcttgtcgatgtccctgccttcgcctgcctctctgcccttgtcctcatcaccgaccggcatgggctgcaggagccgcggcgggtggaggagctgcagaaccgcatcgccagctgcctgaaggagcacgtggcagctgtggcgggcgagcccagccagccagctgcctgtcacgtctgttgggcaaactgccgcagctgcggaccctgttgcaccaggg

SEQ ID NO: 3272 - DNA, 464 bp, Homo sapien
gagttcaacatcctgtggaaccgcatccggaattacctgtccatcttccggaagtttgacctggacaagtcgggcagcatgagtgcctacgagatgcggatggccattgagtcggcaggcttcaagctcaacaagaagctgtacgagctcatcatcacccgctactcggagcccgacctggcggtcgactttgacaatttcgtttgctgcctggtgcggctagagaccatgttccgatttttcaaaactctggacacagatctggatggagttgtgacctttgacttgtttaagtggttgcagctgaccatgtttgcatgaggcagggactcggtcccccttgccgtgctcccctccctcctcgtctgccaagcctcgcctcctaccacaccacaccaggccaccccagctgcaagtgccttccttggagcagagaggcagcctcgtcctcctgtcccctctcc

SEQ ID NO: 3273 - DNA, 237 bp, Homo sapien
aattgtgataacattttatttaaatgaatatattaaaattatcatttgaatgtataatcaatatgaacatgattgagacattttacatgcttttttctggtattaagtctacaaaatcctgtgtgaattcacacttacagcacatctcaattggggctagccacattttaagtgctgtgcctcacggccatcgcactggacaatgtagctctagcatggggtacgaagccaggcgga

SEQ ID NO: 3274 - DNA, 390 bp, Homo sapien
  misc_feature (1)...(390): n = A,T,C or G
gggacagagcctcgctctgtcacccanggatagagtgctgcagtgtgatctcggctcactgcaacctctgcctcctgggttcaagtgattctcctgcctcagcctcctgagtagctgggactacaggtacgcaccaccacgcctggctaatttttgtatttttagtagagagagggttttgccatgttgtccaggctggtctccaactcctgacctcaggtgatccatccacctcagcctccaaaagtgctgggattacaggcatgagccaccatgcccggcctagagtccattttctaacattctttttaaggaggaatatacagagggcacaggttaactacagggtgaaggccacagcacacacagaataagttccagagtaagaga

SEQ ID NO: 3275 - DNA, 494 bp, Homo sapien
ttattttttttttttttttttttttcaggatttggtatgttttattagagcaaatttttaacaaaaggtggctttcatttacagaatttaatgtgtgtggggactgtccaacccatgtggactcaagtaaggataaccattaagcttgctaatgtattttcttattttcagtttacatacaaattttttttgtttgcttcacattcataaaaaccccaatactgtaaatgacaaataacccctcccatcccttaattaaatatacaaacagcctgaaaacatacaatttaaattggtttaatcttgaagtgtaatccaataagactgaaaactaaacatttcaagtcttgtaccaaatagtaaaatactcgaaggccttcaggatcctttgacggatttacatcaataagagaacctatttttgatgtggtaaaagatatgtggctctctccaattacattttcaagctcctgtcggccaacccttttaggggg

SEQ ID NO: 3276 - DNA, 230 bp, Homo sapien
tcaaatatccaagatagtagatactaattcttaaaaaatcagagtactattcttttaccctctcctcccatctccatccttcccccttccccccacgccattttataataggaagcaaaaataagaaaagtacttcaatcactagtaaactatttctgaaaagaaaatattttcacaccaacaaatggccaatcttaggtcaaatggaagcaatgaactatgaatgaaaa

SEQ ID NO: 3277 - DNA, 396 bp, Homo sapien
ttgtttttttgtattataaattatctttatatgaatataaagactttccctatttcaattgcgaatatacagatctgtgcactcaaaaataacaagcctattaggactcaaacagttatttgtatacccacgttcacagaagcattattcacaatagccaaaaagcagaagcaacccagtgtccattaatggatgaactgataaacaaaatacggtatttacatactacggcatatttggcctttaagaggaaagaaattctaatacatgctacaacatgaatgaactttgaagacattatggtaaatgaaataagaatgaatccatttagatatctagagtagtcaatgcatagagactgaatgctggttaccagaggctgaggagagaggaggt

SEQ ID NO: 3278 - DNA, 104 bp, Homo sapien
gctaactaaggactttatttcaaacaaaaattaaaaataaaaaattgagagctcttttccctgggtttggggaaggagtcagggtagggaattccacatggcta

SEQ ID NO: 3279 - DNA, 417 bp, Homo sapien
tgagggaaagacaaaacgtatttattccaggccaggtcttaaaatgcacactgcacggttccctgttgttatcagcaccagtaaggaaagaacgtgccttaacggcagccccacccagagcctgctgcgtggctgctgtgaggctccccatgaatccacgcagtcttcttcctcactggtgcagttggtgaggttttctaccctcacagcaaagggatccttaactataaattcacggtatgcagagaagaggacagaatctgatttactgattgttcctcatttaaaccatgacttaatctctatcttaggatttaactatctttattttctggttaaaatttttaaaaaaagtggggagagggtgagagtcgtaaggggcaatagcaatagagattacactgtgctgacacagag

SEQ ID NO: 3280 - DNA, 206 bp, Homo sapien
ttgaaataagtcaaagcattgtttatttatgacatatttacatatttacaaaactgattttactcaatacatcatcctgcgtaatatcataaaatgaacaccatatcctgggaataaaaatccatatttcttaataatttatgtatagcccaacttttagaacatagaatattatcaatttggcttccaaactacaaagtcctgtt

SEQ ID NO: 3281 - DNA, 425 bp, Homo sapien
aagagataggtcttgtcctgttgtccaggctggagtgcagtggcatgatcatagattactacagccttgaactcctggggctcaagcgatatgtttcgatttttaaattttttgtagagatggaggtctcactatgtcctgatctcctgacctcaagtgatcctcccaccttggcctcagtgctgggattacaggcatgagccattgcccaaagtataaccttatgtcagtaattgctataaaatataatcagcattgtaatagcaatctaacaaattctggtcaacagggcagtctgctatttgaaattacccttgggttgcatcttacaaaaggcttatattaaaatcagcaaagatgaaaattgtgtgtagtcaaaattaccctttaaaaaaatctctatattaaagtatggttttgtgtac

SEQ ID NO: 3282 - DNA, 416 bp, Homo sapien
cagctgagtgtcctgggagtggagagactgattagagtgcttatggagaattttaggaataagctgatgagggtctgatataagatagtggttgtaggaataaaataatagctaacatttacttactgtatgacaggtattctaagcgcctacgtttgtttaattcattaaatcttcataataaggtattaaaatcagaagggactttgggcaagttgcttaaccttatgcatgtaattattcccatatacaatgaacggttagatgaaaggtagattttgcactgaccagggatatagatgctagtaaaacacatcagtagatgtgtgttgggagggtagtagtataatgaagaaagagctttgaggtttggaattttgggtcttgaaataggctaatagcattctgagaagaac

SEQ ID NO: 3283 - DNA, 413 bp, Homo sapien
  misc_feature (1)...(413): n = A,T,C or G
ggcacgagtggtggaaggtgggtgtgtagtcgtggtactttacgcctcggtgtttagggaggagcctaaggtaaggagtcagaaacggggagtaaccgagctgcggcttttatataaggtcagtggtaggtaaggaaggggccttaacctctgctggtgaccagaagcctgcatttntgcattctgcttaattccctttccttagatttgaaagaagccaacactaaaccacaaatatacaacaaggccattttntcaaacggagagtcagcctttaacggaaatggaccatggttgnacacagagatgccattctggcccaccaactttgggntccagctcggttaattccccgtaatngaagaccattcccactcctttgnatancaagcccttcactactgttggacttt

SEQ ID NO: 3284 - DNA, 285 bp, Homo sapien
  misc_feature (1)...(285): n = A,T,C or G
ggcacgagcaaagantcacatgccactttggtgtttcataatctcctgggagagattgaccagcagtatagccgcttcctgcaagantcgaatgtnctctatcagcacaatctacgangaatcaagcagtttcttcaggtatgatgagaaactgaggacaaggagaaacaggacccgcagagtcgggtgttagtnttctttcctggaagcatctcttttttcatttggctaagtaacgagaatctatcttgtatttncaatcacaggagaagtaattagcccttt

SEQ ID NO: 3285 - DNA, 304 bp, Homo sapien
  misc_feature (1)...(304): n = A,T,C or G
ggcacgagtnacagcgcagagctcagcgccggcctttccctccctctgccaaggactcatggccaagccagctctcggggccttttttccagtgcccatttggctactctgctgcaccaagcttggnagccagcctgccaagagccgcctgggcctggcctccccactggctggccttgaggtaggcagagtgggttgtggcgcctcctctctctgtntgggaccaggacggtggcttaagtntccactccaggaaagaatcaaagtttctagagttgtgagaaaaccagagagtggctctcct

SEQ ID NO: 3286 - DNA, 249 bp, Homo sapien
  misc_feature (1)...(249): n = A,T,C or G
tggccgctgtgtgcgcgtgcgggagggctacacctgtgactgttttgagggcttccagctggatgcggcccacatggcctgcgtagatgtgaatnagtgtnatgacttgaacgggcctgctgtgctctgtgtccatggttactgcgagaacatagagggctnctaccgctgccactnctccccgggatatgtggctgaggcagggcccccccactgtactgccaaggagtagcagtcaggggtcagtgt

SEQ ID NO: 3287 - DNA, 283 bp, Homo sapien
  misc_feature (1)...(283): n = A,T,C or G
gttgaaattgccacttaccgggaaattgtgacactattgggggtgtgtcttcatctaagtcatcaactcctccagcaattggatagggtggaatggagactctgggcatcaccacccagctgtgatcagaataaagggaagaggtcaggctggggagtcctgagttatgggctatctgaaagccacagatcttctcaatttgttgccagcgaaaaagtcgttctcgtaaacaagttgtcaactcagagagagctttnctgggaaaagccaataaaggaattac

SEQ ID NO: 3288 - DNA, 301 bp, Homo sapien
  misc_feature (1)...(301): n = A,T,C or G
ggcacgagcgtggtgggagattaataaccaattcctatcggtcccctggtggttataaaggttttnatacttatagaggactcccttcaatttccaatggaaattatagccagctgcagttccaagctagagagtattctggagcaccttattcccaaagggataatttccagcagtgttataagcgaggagggacatctggtggtccacgagcaaattcgagagctaactgcttcattatgagaaactcactgttgctaataaaacagcagggtggagtgattctttctcaggtgagcag

SEQ ID NO: 3289 - DNA, 261 bp, Homo sapien
ggcacgagttttgtttcatatattctcttccctttttccctgggaatattttaaagggaatttcagatattataagacagatagctagtttaaaaggggaaggtggaaggaactgcatttgtaaaaggcttgaagcaaagtacagatacatgctacaacataaacctcgaaaacattacactaagtgaaagaagccaatctcaagagtcacgtatttgtatgataccatttatatgaagtgtcccagaatagaccaatcta

SEQ ID NO: 3290 - DNA, 276 bp, Homo sapien
  misc_feature (1)...(276): n = A,T,C or G
ggcacgagcagagattcaacccttagcctccaaggagacacaaatggccatgctgtgaactgtctttggaggtggcagctctaggagctgagggccttcgttcaacaattgcaagaaattganttcagtccacaaactgaataagcttggaagaggacactgagcatctgatgagaccccagctgacactctggttgcagtattgtgaccctaaatagaagacccagttaaaccctgcccagacccttggctcatgggaaacagataataactgga

SEQ ID NO: 3291 - DNA, 303 bp, Homo sapien
  misc_feature (1)...(303): n = A,T,C or G
ggcacgagtgatagggtatgtggcgcctctntactttctgagcctaacaagtgaggttcagagcaaggcaatgtaaatntctgctttgaaagtgaacatggattgggtaactaaaaagagagtgatacgtaggagaaacttccaaaganttgcaatctgtccctctgactaacatgtctacgtggagacttccaaaatggaaaatgagacatagcataacagaaagcaagaaagcctcctaaagataagcttagcccagcagctctgcagagtatgactttaccctccaggggaaccatttgg

SEQ ID NO: 3292 - DNA, 274 bp, Homo sapien
  misc_feature (1)...(274): n = A,T,C or G
ggcacgagactttgggcaagactctccatctatcttgtcttcatttcatctgtaaaatgaagtgagtngattcaatgctccctaaggtcccttccagctccaatacttgacaagcttgtnattctaaatcgtttccgttgcctctgaacatgggtgagtaatgcctccactgcagctgtttctctccaggaggctttgttcagaggagatctgactattgcacagccagttttttcttcctcttcagcagttctttactgtcttcagaatggtt

SEQ ID NO: 3293 - DNA, 235 bp, Homo sapien
ggcacgagcaggacgtctagtaatgcccgctccagaaattgttagttacttgacagcggcaagcttcctccagatgtggcatgtggtagacaaatgcactgaagttttagagggaaaccctacagtcctttgtcagaagctaaatcatggcagtgaccaccagtcaccaagcagcagtagttataatggcctggtagagagctttgagctgggctctgggggtcatactgatttt

SEQ ID NO: 3294 - DNA, 290 bp, Homo sapien
  misc_feature (1)...(290): n = A,T,C or G
ggcacgaggtcaacagcatcaaacaatttgtnttccttgtgctggtgcacttggacttggagctgatcaacgcagatgtggagatccctgagtttgacctcagcaggtacggcttcggtctgatgcagccggaacacgacgtgcccgtccgctaccgcatccgcccatgacacagggagcagatggttccacgtgctcgcctctgcccagcctgccccagcctgccccagcctcccagctttctgtgtgcacagttggcccgggtgcaggtgcttagcattaccacttcc

SEQ ID NO: 3295 - DNA, 405 bp, Homo sapien
  misc_feature (1)...(405): n = A,T,C or G
ggcacgagcctctgcctcctgggttcaagcaattctaatgcctcancctcccgagtagctgggattacaggtgtgcgccaccacgaccggctaatttttgtattttnagtagagacagggtttcaccatgttggccaggctggtctcaaactcctgtcctaaagtnattcgcccgcctcggcctatcaaagtgctgggattacaggcatgatctgccatgcccggcctcctctacaattatcttaactcaatagttttttaataacgttgtttagtttcaagtacagggatttgtggttttttttctttnttcttttctnttcttttttcttttgaggcgggagtcttgctctgtcgcccagggtgggagtgcaatgggttcaattcttcaggttcatggcaagg

SEQ ID NO: 3296 - DNA, 309 bp, Homo sapien
  misc_feature (1)...(309): n = A,T,C or G
ggcacgagctcagtccaaaacgctcaaatggtgctccaggatttacttttttntattgttttgttttgttttttgcgacggagtctcgctctgtcgcccaggctggaatgcagtggcgtgaactgagctcactgcaagctccgcctcccgggttcacgccattntcctgcctcagcctcccgagtagctgggactacaggcgcccaccaccacgcccggctaatttttttttgtattttttagtagagacggggtttcaccatgttagccagggatggtctcgatctcctggacctcatgatccgcccg

SEQ ID NO: 3297 - DNA, 433 bp, Homo sapien
  misc_feature (1)...(433): n = A,T,C or G
ggcacgagtcactctgttgcccaggctggagtgcagtggtgtnacctcggctcactgcagcctccacctcctgggttcaagcaattctcctgcctcagcccccgagtagcctgggactacaggcgtgcactgtcactcctagctaatttgtgtattttnagtagagatggggtttcaccatgttggcccggctggtctcgaactcctgacctcaggtgatccgccaaccttggcctcccaaagtgctgaaattacaggcatgagccactgagcccggcgagaattttgggatttttgtccataagcagcagataggtgcttgagatctttggaactaaagaatgtccacaattaggaacttggacatgnttttttttttttttttttttgggacggagttgttggctctgggagtggcaatgggcgggaatct

SEQ ID NO: 3298 - DNA, 482 bp, Homo sapien
  misc_feature (1)...(482): n = A,T,C or G
ggcacgagtatcaacatcagaacttaaggaaatgtctgagtactactttnatgggaaagggaaagcctttcgaccaattattgtggcgctaatggcccgagcatgcaatattcatcataacaactcccgatccgatgtccagttttcacaagctgattgctgagaaggttctaggcggcgtctgttaaaaagcattgctttctgttaattagacatgtgcaagccagccagcgcgccatagccttaattgcagaaatgatccacactgctagtctggttcacgnatgacgttattgacggtgcaagtcctcggaagagggaaaacacacagtttaataaggatctgggggtggaaaagaaggctgttccttgctggaggtttaattctttctncagcatctatagctctggcacgattgggaaatacaactgttatatctattttaacccaagttattgaggnttggtgcgtggtggatttt

SEQ ID NO: 3299 - DNA, 388 bp, Homo sapien
  misc_feature (1)...(388): n = A,T,C or G
ggcacgagcacaagactccggaagcatgccagcgtataaaaccacactttgcctcattggttcgtgcctcagcttccaatctggacatggagcacaataacagtgggcccactgctctccgaattcctgcgcgcacttgaagaatcagaaataacacaaaccactgcagggtaattttnantgctcatttgactatgcagtgacatcaagtggcgagttgaggaatgatcatatgctgtgtgaggaactccgtgtcaaaaattccatggggccaggctagacaccacatttgggcactttcagctgtttaggatttcagaggaattaaaagggaaatgggtcaccgacctggcctttggatagtacccgtataaccctttcccaccct

SEQ ID NO: 3300 - DNA, 388 bp, Homo sapien
  misc_feature (1)...(388): n = A,T,C or G
ggcacgagcccagttatccgggaggctgaggcaggagaatggtgtgggcctggnaggcagagcttgcagtgagccaagatcacaccactgcattccagcctgggtgacagagtgagactccatgtcaaaaataaataantaaataantaaataaataaataaataaataaataaataanttttntntcctcaacttgcgtatgttgacatcttaactcccaaagtgattgtnttaggagctggggaattttgggacatgatgaagtcatgaggggctctgcagaatgggattaccccccttcatgggaaggacaccccaaaggntatttcatggccactttctacttgtatttgggtttacttcaaggaaggtnggcttctctgtgga

SEQ ID NO: 3301 - DNA, 226 bp, Homo sapien
  misc_feature (1)...(226): n = A,T,C or G
ggcacgagtgagcngtctaaattcaggagttggtatggtctgaaataccaaagaaacagaactccgagctcttagcatttatttgacttagtagttacatttatatctataatattcaataaaagcctccaatatgtgcctggnagtgtacatgtacatgtgttaggggaaggagtatatgggaactatatgcaggcacattcagtaagtcctttaagaatacaga

SEQ ID NO: 3302 - DNA, 302 bp, Homo sapien
  misc_feature (1)...(302): n = A,T,C or G
ggcacgagcccagttatccgggaggctgaggcaggagaatggtgtgggcctggnaggcagagcttgcagtgagccaagatcacaccactgcattccagcctgggtgacagagtgagactccatgtcaaaaataaataaataaatanataaataaataaataaataaataaataaataaatttnntntnctcaacttgcgtatgttgacatctttaactcccaaagtgnattgtttttaggagctggggatttttggggncatgatgaagtcaagagggctctgcagaatggggattaccccc

SEQ ID NO: 3303 - DNA, 282 bp, Homo sapien
  misc_feature (1)...(282): n = A,T,C or G
ggcacgaggtctcgaactcctgatcccaggcgagccgnctgcctcggcctcctaaagtgctggcattgcaggcgtgagcactgcgccctgcaatgagtctgttttatagtttctctagaattgaaagagttccactcaaaattgagcttctgtttaccatttagtttgagcatgtnacgtgaattattcctccactttgatagtggaaagaangaggtgcagaggtctntaattaggctttaggctgcattagagttgggattgattgtgggctagcataaa

SEQ ID NO: 3304 - DNA, 271 bp, Homo sapien
  misc_feature (1)...(271): n = A,T,C or G
ggcacgaggattggtgaaagtttttagtaccaagaaaacagggatgaggctcttggattaaaaggtaacttcattcactgattagctatgacatgagggttcaggcccctaaaataattgtaaaactttttttctgggcccttatgtacccacctaaaaccatctttaaaatgctagtggctgatatgggtgtgggggatgctaaccacagggnctnagaagtctttcttttatgggctcaaggaatgccatgcgctgggcagtaccatgt

SEQ ID NO: 3305 - DNA, 286 bp, Homo sapien
  misc_feature (1)...(286): n = A,T,C or G
ggcacgagggagacagagcatttcaaacccatatagacacctatcatacctgtatatcccctaatacatggancataaatttnatttcagctttatgcattaatgtattgaagaggcaggctttttttccagtaataatactgtacatctaaggttgctattcagtaaaactaatagaagagataattnttgattaccttggaatatgtagtgagaagaggccaaatttttcatgtttgtgagcatgtctttcagatactcgctaatgggggaattcactttagac

SEQ ID NO: 3306 - DNA, 284 bp, Homo sapien
  misc_feature (1)...(284): n = A,T,C or G
ggcacgagggaataaggaagcgacctgcaaccgacgattctnntactcaaancaaaagagccaacagaacagaagaaaatgtttcagacggttccccaaatnccggttctgtggagcagacgcccaagaagcctggcctcagaagacgtcaaacgtaaacagctcgaattaagaatatgtttcctngtttatcagatacatcactgcttgatgaagcaaggnagntatacatgaaaattttaaaaatacatatcgctgacttcatgggaatggacatcctgtat

SEQ ID NO: 3307 - DNA, 345 bp, Homo sapien
  misc_feature (1)...(345): n = A,T,C or G
ggcacgagtcatatgctggagtttcatttttaaagcagttgaatcaacaaggtatgccttcattaattatatttatnaggtgtttttaataatctgaggnatcttgtaaattgaatgctgtattacagtaaagtgaacttttttaatttagacaaatgatctaacccagttaagcatgcgtagaagaaagcctgggaagaaaaaaaacactaaaattttatagtagcatggttgtagttttnatctaccttgttttcaacagtgaggaatgtattccttctgtaatcaactgatttagcttttcnctatggcatttttgaggatttattccattaaattggatac

SEQ ID NO: 3308 - DNA, 366 bp, Homo sapien
  misc_feature (1)...(366): n = A,T,C or G
ggcacgagcatccctagagaacgaactttattttcacaagaaaataaggcacaataagggggaagaacttaaacctcaacataatatcgtgtccaaaaatgtgtatttagaaaantaaaatcctgtggagtttgttatcctaatgtttattttatactagataaggtgacttgttttcttgtattgaggtcttactgtttcanatttgtttttgtttctgtnctaactctaagcagacagagctcacaagtctttggcatccattttaggttgtacactcagagtcatcttataactggaaactgtcaggtggtcccccaccccagtgagtgtatgaaagagtcaagnaaaaggttgggaaccaac

SEQ ID NO: 3309 - DNA, 327 bp, Homo sapien
  misc_feature (1)...(327): n = A,T,C or G
ggcacgaggctccagccacctcagggttctgcaaacaccacccttctcagtctgcacccatcaacatctaggcaaggttcctccaccagcaaaaggatttggacttgctgaagacccagatgattgtnagcatttttnagcagtaaaatatttttaattaaggtatgtatatngtttagacatagtgctattgcatatttaataaactgtagtacagtataaataataacattaatatgcttctgggnaaccaaacaattcatatgaatcattttattgctatggtctcaaaccaacccacaatatctccaaggtatggctgtacca

SEQ ID NO: 3310 - DNA, 323 bp, Homo sapien
  misc_feature (1)...(323): n = A,T,C or G
ggcacgagcttctgtattgatgtagaatgttcactgagcagcttgtaggagaaaaagactgccttantttttgggcaaaaagttagaagggaaattgctttgcatttttntctccataatgttaatgaggaaaagaggcaatgctggaggaaaggagataaatggatgtttcctcccttccctatttaagctgcctaagttgactaaagttcgacttgataaatgtcctagttaatttaatnttgtgttagtgcctctcctcccctcgagtgtccagtccattttnagctgacttgcagaaaaaccagggtaatgcaaatccc

SEQ ID NO: 3311 - DNA, 293 bp, Homo sapien
  misc_feature (1)...(293): n = A,T,C or G
ggcacgagacatggtgctctccctgtgcgtctctntntcttctcttctcataaggataccggtcatattggattaaggtcctatcatgtccagtatgacctcatcttcactagtaatatctttattcaccctatttccaaataaggtcatatcctgaggtactaacgactttaacacatcttttgggggacacatcccataatggtgcagaagattgatttgtnttgtttctcttttgcaggcagtggcttggtaaatagagttatttagatttgaatgagatgggttttatt

SEQ ID NO: 3312 - DNA, 208 bp, Homo sapien
  misc_feature (1)...(208): n = A,T,C or G
ggcacgagcnagtntctcacctctntgcacttccaaggactcttgtnatctgccttaggcgggaaatgctgttgctggattgcaaccccgaggtgagattcgggctcacagagccgaggcttttntcctgcaggctcaagcttctagattcgtcttctcgttaatgcggggacggaccactgggcgctgcctggtcagagctggttng

SEQ ID NO: 3313 - DNA, 383 bp, Homo sapien
  misc_feature (1)...(383): n = A,T,C or G
ggcacgaggtaagtncatggcaaagtgctgggattacaggcttgagccaccacgcccagccagtgttgttattttatatatgttgcaaaatactaaatatatggttttccttttgctcttgttcacttaacattgatacacactgaaaggtaaaaagactaatcatactctaccttcctcagttattacttacaggtgtgtatcggcttgcaaaatcgtaaaaagtaatattccagatccgatgattgaggccaactgcagagtccaagaaagcactctcttatttagtgttctgagttttcctgttcttttataagcccnctatanggcngtctgaccttggatttagcagtcttttcattacctatctttncctagaaggn

SEQ ID NO: 3314 - DNA, 427 bp, Homo sapien
  misc_feature (1)...(427): n = A,T,C or G
ggcacgagaganaacggtgccatccctgaacacggctggccactgggtatactgctgacaaccgcaacaacaaaaacacaaatccttggcactggctagtctatgtcctctcaagtgcctttttgtttgtactggttcattgtgttacattaacgacccactctgcttcttgctggtgaaagccctgctctttaatcaaaccctggtggcccactgactaagaagaaagtttattttcgtgtgagacgtcagcccctccgggcaggcaagggctctgnaagatttgggcaacgtgggcttaaattgttctgcttttttctgtagttcaatttcatgtttcttgnaccctttttgtataaagctggcaaatattnctctcttaattgttcntttcatatgggaatgtaatttttccaaaatgtaaaac

SEQ ID NO: 3315 - DNA, 387 bp, Homo sapien
  misc_feature (1)...(387): n = A,T,C or G
cttccttggtagtcctgagtgacttcctttatgtgacagttacgaggaatacctgaaattatagtggtttggttaaattactgttagtcaccaggcctattctaaattagaaaaataaagtgcaactctaaattatccttgagtactggtagattaggaaaaataattgantgaaaaccactcataatcatcaaatttgttataaaataattnctgtcactataaaataaatttgaattaagagtttacttgccaaatattttcctttttctgggacttctgagggatgctgtgggaaaaataattgtcttcaccaagnggcaggttgtantatnaaccagtaggaaaataggaagttcctgccttggggtttgggttgttggtatc

SEQ ID NO: 3316 - DNA, 342 bp, Homo sapien
  misc_feature (1)...(342): n = A,T,C or G
ggcacgagcagatgccttggtgcccacatctctnttctcctacttggctctccccttttaatttctttataaaaatgaaggtggtgaactaagcagcctcaggctttagaagtgagtccctggcatcggtgaggccacccacacagccattccctgtacatcaggagggtggtctcactctgtacctatcacccaggttctcgggaccggaagtnaggtgggagactgggctccccgaagccagagcggcagaggaggccagaactccaaagcccctgcagccccggctgacaggaagcgncantgttcaaccccagtccaagagctccagcaaggttcacg

SEQ ID NO: 3317 - DNA, 307 bp, Homo sapien
  misc_feature (1)...(307): n = A,T,C or G
ggcacgagagaaagtcatctatttggacgatgatgtaattgtacaaggtgatatccaagaactgtatgacaccaccttggccctgggccacgcggcggctttctcagatgactgcnatttgccctctgctcaggacataaacagactcgtgggacttcagaacacatatatgggctatctggactaccggaagaaggccatcaaggaccttggcatcagccccagcacctgctctttcaatcctgggtgtgattgttgccaacatgacagaatggaagncaccagcgncatcaccaagcaattggag

SEQ ID NO: 3318 - DNA, 328 bp, Homo sapien
  misc_feature (1)...(328): n = A,T,C or G
ggcacgaggaacatacgatgatggagcaaccaaactcaatgatgaggcacggcggctcattgctgatttggggagcacatctattactaatcttggttttagagacaactgggtcttctgtggtgggaagggcattaagacaaaaagcccttttgaacagcacataaagaacaataaggatacaaacaaatatgaaggatggcctgaagttgtagaaatggaaggatgcatcccccagaagcaagacttaatgggaaatgtgggggaggaattgaaggaaagcgcactttccactcttnaatgggnggagcttttaaatgggcagagc

SEQ ID NO: 3319 - DNA, 371 bp, Homo sapien
  misc_feature (1)...(371): n = A,T,C or G
gaaaaagattctgggattgttttaaaaactaacaggagattcatgaggnttagtcttcaggcaactggctttagcctggggcttccacttctgttttccttgcatggcttatgaattaacttggggtttgggctggcaaacctgctccttcttagagcacagatgtcattatctctctggaagtatggccttcttggaaactttgtggttcccatacatataacaagacaagcgtgaaaaaaaaaaagactttaagtgtggttttacttcgtttcttgtttactttattaatctttcctttttnatggcttttntttttgagaccgagtctcactctgtcactcaggctggagtgcatggcgaaatctcag

SEQ ID NO: 3320 - DNA, 438 bp, Homo sapien
  misc_feature (1)...(438): n = A,T,C or G
ggcacgagaaccccatagctctgtattttntgagcaagaaatttaaaaattgtttccagtcatgcctctnctgctgctgttaccagtccaaaagtctgatgacctcggtccccatgaacggaacaagcatccagtggaagaaccacgatcaaaacaaccacaacacagaccggagcagccataaggacagcatgaactgaccacccttagaagcactcctcggtactcccataatcctctcggaggaaaaaaatcacaaggcaactgtgnagtccggggaatctnttctctggttccttcttccttgaattcactcccanacccanggaaggaaatggttttccaaaaccgnaaggttggactggttttttccacccacaacattntaggattcgtacttcttttaattggttctaatttacatattctgcgtgttgt

SEQ ID NO: 3321 - DNA, 410 bp, Homo sapien
  misc_feature (1)...(410): n = A,T,C or G
ggcacgagaganttctgtccatcacctcctgccttgaaagatggatttnttcaagatgaaggtacaatgtttcctgtggggaaaaatgtagtgtactcttgcaatgaaggatactctcttattggaaacccagtggccagatgtggagaagatttacggtggcttgttggggaaatgcattgtcagaaaattgcctgtgttctacctgtactgatggatggcatacagagtcacccccaaaaacctttctacacagttggtgaggaaggtgactgttttcctgtttcaggtgggcatgtccttaggaaggtccttcagcatttntctgtggctccagccttaagtgggagtcctganntgaagaatgcccgntgtgttacaaaaagaaaatccgtttaacacaggcagtg

SEQ ID NO: 3322 - DNA, 335 bp, Homo sapien
  misc_feature (1)...(335): n = A,T,C or G
gatttaccaagctgatgtacaaagacctactacagcggtaagggctagctcctttctcccactctggcagtcactccactttgagaaacatacctcttgaaataaagctacaagtggagaggggcaggtgatttgggcaaataattccatactaaatattaggacaaaacatcctaggcaaatatcacaatccggcgtcatagtggcatactaaattcanccaagaaatataaccatgatgttgaaagagccaggcttatgggaatgtaaacagcaaactattttattcttgttttctatttaccaattcaaacttgctctgcaggtcactcctc

SEQ ID NO: 3323 - DNA, 316 bp, Homo sapien
  misc_feature (1)...(316): n = A,T,C or G
gttttcagccagtccctcatatctctggacttgattgangatttttttgaattagctagtagggagaagacagaagataaagataaaccccttatttataanggtgaggggaagtggcttcgaaacattgactattaccgtttagatggttccactactgcacagtcaaggaagaagtgggctgaagaatttaatgatgaaactaatgtgagaggacgattatttatcatttctactaaagcaggatctctaggaattaaatctggtagctgctaatcgagtaattatattcgacggtttcttgggaatccatctt

SEQ ID NO: 3324 - DNA, 282 bp, Homo sapien
  misc_feature (1)...(282): n = A,T,C or G
agtagggatggggtttcactatgttggccaggctggtcttgaatncctgacctcaggtgatccgcctgcctcggcctcccagagtgctgggattataggcgtgaaccaccatgtcaggctgcctgttcctttttnaaagcaggtgagcacacagcanttttaacaataagctaaagcaagctcttttctaatgagagagttctgttaaataaaggtcaacaagaaaagtaacancactcattgtctcttgtttacggtccatctgagcatccatgcaaactt

SEQ ID NO: 3325 - DNA, 362 bp, Homo sapien
  misc_feature (1)...(362): n = A,T,C or G
ggcacgagctgaaaagctacagactgcaatacatagagtgacactagctcagacagcagtgcctgtnctttgtggaagtgccctgaaaaacaaagggatacagcccttgttagatgctgttactatgtacttaccttcacctgaagagcgtaactatgaatttttgcagtggtataaggatgacttatgtgcattggcatttaaagttctccatgacaagcagcgaggaccactggtttttatgcgcatttactcaggcactataaaaccccagttggccattcataaatattaaatggaaactgcacggagagaattaagtcgtctgcttttgccgttttgctggaccaacatgtagaaat

SEQ ID NO: 3326 - DNA, 356 bp, Homo sapien
  misc_feature (1)...(356): n = A,T,C or G
ggcacgagcgcacccagcgtgtaagttttgtntttttttttagtaaagacggggttttaccatgtgggccaggctggtctccagcttctgacctcaagtgatccgcctgcctcancctcccaaagtgctgggattataggcatgagccactgcacccggcctaattacgaaaattttaagtgcatacaagagagaataatataatggacctccatgtaagtattgcccagatttaactcttatcgaggtttttcatacttcccttagcattacatcccaaagtacagtcttatgcagttcctgtgctgtgcttagatatcccaacagtggaagctcactcaggtttgttctgaagg

SEQ ID NO: 3327 - DNA, 274 bp, Homo sapien
  misc_feature (1)...(274): n = A,T,C or G
cgcnctgctcgcagtcacagacacttgagcacacgcgtacacccagacatcttcgggctgctattggnttgantttgaaggttctgtgtgggtcgccgtggctgcatgtttgantcaggtggagaagcacttcaacgctggacgaagtaaagattattgttgtnattttttttttctctctctctctctcttaagaaaggaaaatatcccaaggactaatctgatcgggtcttccttcatcaggaacgantgcaggantttngggaactgagct

SEQ ID NO: 3328 - DNA, 266 bp, Homo sapien
  misc_feature (1)...(266): n = A,T,C or G
ggcacganctcgtgcaatttcggcagaggntccctgcaattaaacttacttcaaccttttggaaagttatcaaaatctaaatttggaatgaatgcatttcctatttttngtctacttttgggtgataaaaagtactagcccttatttatagatatgagaaacataatgttctaaccaacaacattatggtatttgtgtggctttnntttgaaaaaatgtgagcagtaatttggggttagcctaccttcattaattctatcacatag

SEQ ID NO: 3329 - DNA, 266 bp, Homo sapien
  misc_feature (1)...(266): n = A,T,C or G
ggcacgagctgaggttggaggcttcgcttggaggctttgacacagctatgcgaatggcttttgtagcactgcaatgcagaagccaggctttgggggtagaaagggggtgcttgtncccccaacatggccagaaatatttgggtgcatgctttttgtttgctcagtgtcaaacagagaagttttgtttctatttaaggaaggaacttattaccattacaaaggaggcttggccagggactccactggtttggtgatctctgcccaag

SEQ ID NO: 3330 - DNA, 216 bp, Homo sapien
ggcacgagtctcaatccagaccccaagagagggttcttggaccttgtgtaaaaacaatttggggtgagtccataaagtgaaagcaagtttattaagaaagtaaaggaataaaagaatggctactccataggcagagcaacagcttgggctgcttgattgataatacttataattatttcttgagtatacgctaaactaggggtgtattatgcatga

SEQ ID NO: 3331 - DNA, 264 bp, Homo sapien
  misc_feature (1)...(264): n = A,T,C or G
ggcacgagggaaaagtagattcagtcagctcccacagggccttgactgantntgacattaggcatggagggccactgaaggttttaattcagaggaataagataagacctgtgtttccgaagatttaatttagcagcaatatagagaccatccgcaaggaaattggttacaaggttattacagaggtctggttgagagacattnagggagacagttggggaggaggggaaaggtacgcattattatggaaataggatgagtaca

SEQ ID NO: 3332 - DNA, 228 bp, Homo sapien
ggcacgaggtgtactcagcatcttgcgtcgaggactcagtaagtattatatttgaattcccactgcaccgctctaattagaattttaaaaatcactttctatctggattgttacacactttttttccccttaattcatttttctccatgtactacccatatgcatcctatataaatttaccaacactcataaaaatcttactcagaaatcttcagaggtttgctaagg

SEQ ID NO: 3333 - DNA, 223 bp, Homo sapien
  misc_feature (1)...(223): n = A,T,C or G
ggcacgagggaaatcaaagcctttnttgccaatcggaggatttcccaagcagttgttgcacaggtaacaggtatcantcagagccggatctctcattggctgttgcagcagggntcagacctgagtgaacagaagaaaagagcattttaccgatggtatcaacttgagaagacaaaccctggcgctacactaagtatgagaccagcccccattccaatagagg

SEQ ID NO: 3334 - DNA, 225 bp, Homo sapien
  misc_feature (1)...(225): n = A,T,C or G
ggcacgagaaacagccaggtgcaaaattattttggagtactttagtttgcttttgtttttagccaaagggatttcatactggtttaattatgtncatccttgagaatttttgagaagtttccaacagatttgtagttcattttgctgttgttacaatgtaaagctatatatagttgacccttgaacaacacaggttggaactgcaaggntccacttatacatggg

SEQ ID NO: 3335 - DNA, 276 bp, Homo sapien
  misc_feature (1)...(276): n = A,T,C or G
ggcacgagctccgccggtcccgttctgcaggtgggcgtcgccgccgnnttnccaacaaccgggtcgggggctcccggaagtgctcttgcggcttactgcctggnacagctgtcattcttctctacagaagagcttctcctcatcaactggggatgattacagttcttcctaaaaaaggatggctgctctttttctaaagaggttaacactacaaactgtaaagtctgaaaatagttgcattagatgttttggtaaaacacatcctgcaaaagacag

SEQ ID NO: 3336 - DNA, 197 bp, Homo sapien
  misc_feature (1)...(197): n = A,T,C or G
ggcacgaggaagaagaggaaagagagtggggtagcaggagacccttnganggaggaaacagacacggacttagaggtggtgttggaaaaaaaaggcaacatggatgaggcgcacatagaccaggtgaggcgaaagnccttgcaagaagagatcgatcgnnagtcaggcaaaacggaagcttctgaaaccaggaagtt

SEQ ID NO: 3337 - DNA, 276 bp, Homo sapien
  misc_feature (1)...(276): n = A,T,C or G
ggcacgagctcaagtgatctccaagtgaccctcctgcctcagcctcctgagtaccctcctggggactgcgggtgcgtgctaccatacccggctaatttttgtatttttttggtggagacagggtttcgccgtgttggttaggctggtctcgagctcctgacctcgtgatccgcccgcntcggcctcccagggtgctnggattgcnggcntgagcaccgtgcctggccccacataaagtttctnagcacttgaaatgtggctagtgtgacttagaaa

SEQ ID NO: 3338 - DNA, 356 bp, Homo sapien
  misc_feature (1)...(356): n = A,T,C or G
ggcacgagcagactatggtctctgttttgataaggaaactgccagctgtcgaaagttaaccagcagagaggggaagatggcccaggagccagcccctcctgagttttaaactacactgttttctgtccagatattccaatggagacagttggaaaacctgtacttcagagaaaagaagttttccgtggaagttcatgacccacgcagggcttcagtgacaaggaggacgtttgggcacagcggcattgcagtgcacacgtggtatgcatgtccggcattgntcaagtccatctgggntatggccataagccaacaccagttctatctggnacagaaagcagagtaagtccaaaaat

SEQ ID NO: 3339 - DNA, 271 bp, Homo sapien
  misc_feature (1)...(271): n = A,T,C or G
ggcacgagaaaatgtgctcccaggaatagacacaaatgttttgagtatctttnaagctgcattttcctttagtgatgcatttgtcaattgcactgantttaaatctgaaagtcagaggtgattattgatagtacttttgtattttgatatggacagtttattnatttgcatacagttattgactttttcccagctgattaaaagatagtnaagaaattctgcaatatagctgccaaaatagacagctacatttttatgatattgtcatctt

SEQ ID NO: 3340 - DNA, 173 bp, Homo sapien
  misc_feature (1)...(173): n = A,T,C or G
ggcacgagctgatacccaactgctcgagttcctggntgtgcagaagcacttgtggcccctcanggncctcacgctgacgagcaatcagaggtactccctggtcagggacaagtgtttcctgtcagccaccgagtgcctgcagangatcatgaccacggtggacccacgggaga

SEQ ID NO: 3341 - DNA, 296 bp, Homo sapien
  misc_feature (1)...(296): n = A,T,C or G
ggcacgaggaaatgtgacacctgcgatatgaacgttcacaagcaatgcgtcatcaatgtccccagcctctgcggaatggttcacactgagaagagggggcggatttacctaaaggctgaggttgctgatgaaaagctccatgtcacagtacgagatgcaaaaaatctaatccttatggntccaaacgggctttcagatccttatgtgaagctgaaacttattnctgatcccaaggaatgaaagcaagcaaaaaanccaaaacccattccgttccacaataaattccgcaattggga

SEQ ID NO: 3342 - DNA, 327 bp, Homo sapien
  misc_feature (1)...(327): n = A,T,C or G
ggcacgagcagaaatggaatccagtagaaatgataccaaagatgatcttggtaatttaaatgtgcctgattcatctctccctgctgaaaatgaagccactggccctggctttgttcctccacctcttgctccaatcagaggtccattgtttccagtggatgcaagaggcccattcttgagaagaggacctcctttccccccacctcctccaggagccatgtttggagcttctcgagnattatttttccaccaagggatttncnagggtccaccaactgctcccatttgcaatgaggaaatgtcttatcccaccgagggggtttttcc

SEQ ID NO: 3343 - DNA, 281 bp, Homo sapien
  misc_feature (1)...(281): n = A,T,C or G
ggcacganctcgtncaancggcncgangacaatctcantccccctcccaaccctccatatggctctcaatggtgctcacttgcttggaagcaggctcccaatagggaggggcctgccctctacagtctctttgactgtaagacagggctctgtatcagtgcagacgatgagaaaagtcccaggctaatggcagaaatttgcactttgaacatgtgtgttttttgtgttgtggaacctccagattccttattttattaaccaggaagtcttatttttttttt

SEQ ID NO: 3344 - DNA, 162 bp, Homo sapien
cctgggtaaagacatttttattaccagtctccttccttattctgtttctggtgatctcagaactttggagaactgaattatagcttcccttcacaaaatgctgggggaactctttataatactttagctaagcattatggtccctgatgaaatgtgctaatt

SEQ ID NO: 3345 - DNA, 225 bp, Homo sapien
  misc_feature (1)...(225): n = A,T,C or G
ggcacggggacatttaaaagagtttttgggtttttttgtttgtttgttgttggtgtttgtttttttttttttttttttggcacacttgagcngactcagtgcaggtttaatatcctggngacttgcagtcacattctaatgactttcaagggccagaatatggtgaaaatcacttaaaatatccgtcccttccatgccttagtttagcaggtaggctctatcttt

SEQ ID NO: 3346 - DNA, 259 bp, Homo sapien
  misc_feature (1)...(259): n = A,T,C or G
ggcacgagagcccccaccagagcccacattgctggccctgcagcgtccccagcgcctgcaccaccacctnttcctagcaggcctgcagcagcagcgctcggtggagcccatgaggctctccatggacacgccgatgcccgatttgcaggtgggaccccaggaacaagagctgcggcagtttctccacaaggacaagagcaagcgaagtgctntagccagcagcgtgggtcaagcagaagctagcggaggtggatttttt

SEQ ID NO: 3347 - DNA, 316 bp, Homo sapien
  misc_feature (1)...(316): n = A,T,C or G
ggcacgagccctgggggtctaggcccaaaacatgctgaagaaggtggaaggcttggaggntctgagcaatctcaccaccttgcatcttcgagacaaccagattgacaccctgagtggcttctccagagaaatgaaatcattgcagtacctcaacctgaggtatgcaccctctccaagccccaccttgcccctacccctgaccaggtgcagcttttgagtctgtgttcttccctgggccaatcccccagtcctagnccacagctgggattctcaaggaaagcccggcttttccttcctttctttcttgcactgagtt

SEQ ID NO: 3348 - DNA, 345 bp, Homo sapien
  misc_feature (1)...(345): n = A,T,C or G
ggcacgagcaagtattatgctgttaactacccgctccgagacgggattgatgacgagtcctatgaggccattttcaagccggtcatgtccaaagtaatggagatgttccagcctagtgcggtggtcttacagtntggctcagactccctatctggggatcggttaggttgcttcaatctaactatcaaaggacacgccaagtgtgtggaatttttcaagagctttaacctgcctatgctgatgctgggaggcggtggttacaccattcgtaacgttgcccggtgctggacatatgagacagctgtggccctgggattacggagatccctaaatgagctttccata

SEQ ID NO: 3349 - DNA, 266 bp, Homo sapien
  misc_feature (1)...(266): n = A,T,C or G
ggcacgagagctgccgccgccgctaccaccgctttcggntgtagaatttggaatccctgcgccgcgttaacaatgaagcagagttcgaacgtgccggctttcctcagcaagctgtggacgcttgtggaggaaacccacactaacgagttcatcacctggngccagantggccaaanttttntggtcttggatgagcaacgatttgcaaaagaaattnttcccaaatatttcaagcacaataatatggcaagctttgtgaggcaact

SEQ ID NO: 3350 - DNA, 343 bp, Homo sapien
  misc_feature (1)...(343): n = A,T,C or G
ggcacgaggatatctgggtgaaaataaggtatttnttaaattggtatttcccttttttgtgttttaagtgatagtggtgtcattcaacttatctttgcagttgaatgaagaatgaatgacattgagcattattgttttgtttatccatgtccattattagttttnctttgcttttgccagcagtgtgactattggccctgcccagagccatttgcaatcttacaatagttaagtgttagcactgaaagatactaaatgttaagaaccagatggctactgtctgattattngggnaaatattagtggtttcctaagtaggagcaacacagtttttttttaatac

SEQ ID NO: 3351 - DNA, 296 bp, Homo sapien
  misc_feature (1)...(296): n = A,T,C or G
ggcacgaggcgactgagcacttgaaatgtggccagtgcgactgaagaagtcaattttcaattttntttcactttaaccgattgacgtgtaagtntatgtggccgcacgaggcgtggctaccctattggacagtagcatgggtctagatgtttgatccatggttcaacatccccaggtcctgggagtctctgtggggctcctctggaagcattttgggagatagtttaaggagaccactagtgctcacgnctgggcccttgggcatgtattgtgtcctgattctggggaagagccgt

SEQ ID NO: 3352 - DNA, 343 bp, Homo sapien
  misc_feature (1)...(343): n = A,T,C or G
ggcacgagtgacagtgagtnagtgtggatagagaggacctcctggggtgggcaatgtgagccctcagactctgtaggtattgcattttgcagtgaacactggtagacatgttttttggctcaagccagcatgtntgtgatggtttaggattcattgacttttgatgatctggctgtggacttcaccccagaagaatggactttactggacccaactcagagaaacctctacagagatgtgatgctggagaactacaagaatttggccacagtaggatatcagctcttcaaacccagtctgatctcttggctggaacaagaagagtctaggacagtgcagagag

SEQ ID NO: 3353 - DNA, 325 bp, Homo sapien
  misc_feature (1)...(325): n = A,T,C or G
ggcacgagctgatacccaactgctcgagttcctggatgtgcagaagcacttntggcccctcaaggacctcacgctgacgagcaatcagaggtactccctggtcagggacaagtntttcctgtcagccaccgagtgcctgcagaagatcatgaccacggtggacccacgggagaagctggaggtgctggagaggacatacggggaaattnagggcacggtgtcgagggtattgggccgggagtacaagctgcccatgtnacgacctgctgccacttctcatctacgtggtgtcgcgcgcccgaattcagcaactgggagccgagat

SEQ ID NO: 3354 - DNA, 313 bp, Homo sapien
ggcacgagatcaggtgccgtgatgctgtgcagaactgctgtggcatctccaagacagaggaaagggagatccagtgcagtggctacacgctacccaccaaggtggccaaggagtgcagctgccagcggtgtacggaaactcggagcatcgtgcggggccgtgtcagtgctgctgacaatggggagcccatgcgctttggccatgtgtacatggggaacagccgtgtaagcatgactggctacaagggcactttcaccctccatgtcccccaggacactgagaggctggtgctcacatttttggacaggctgca

SEQ ID NO: 3355 - DNA, 300 bp, Homo sapien
ggcacgagtgaatatttagtggcattcaaggcctccaacctcagccaagtcctcacaccaacacgcagtcacaccaacacacacctttatgggttcctggtccatttccttctctaattaccatggcagttattttacacctctactgctgtccttaatcccataccccaccctcatcaggtgaccctgtttccttttttagagaaattgaagctcttagacattggtttccacagtaataattttaaaacttcttacaactacctacaaagcagatgttctatcctatctacagagcag

SEQ ID NO: 3356 - DNA, 325 bp, Homo sapien
  misc_feature (1)...(325): n = A,T,C or G
ggcacgagcttcaatgctattgccggaaactgggagcgcaagaggcctgtntgggtgatgctcatggtcaactccctgactgaagtggacattaagtcccgtggagtgcctgttttagacctgttccttgcccaggaggctgagcggctgaggaaacagactggggcagtggaaaaggtggaagagcagtgccatccattgaatgggttgaacttttcacaggtcatctttgctttgaaccagaccctcctgcagcaggaaagnctgcnagcaggcagtcttcagatcccctacacgacggaggatctcatcaaacactataact

SEQ ID NO: 3357 - DNA, 311 bp, Homo sapien
  misc_feature (1)...(311): n = A,T,C or G
ggcacgagtgccaccacactccagcctgggtgacaaagcatgactctntctcaaaaaaagaatgagtgtcaggttcacacagccataggtttgantttcagcttcaccaatnactggtgtgtaccttggcagtttacttaacctctcggttccagcaccctcatctgtaaaatagggagacttagctttntggaataataggaggatattaggcagcgctgcacattgagggtgtaccttgtacactgtctcgggatagaataaatggcgtgtgtgtatttccctctgtagatcccctttccttatctacc

SEQ ID NO: 3358 - DNA, 326 bp, Homo sapien
ggcacgagcagagccccttaggaaacccatcaaaaaccggagcataaagttaaagaaagtgaactcccaggaaatacacatgctcccaatcaaaaaacaacggctggccaccttttttccaagaaagtaaataacggctttttaaaatttgtatgattataatatggggaaaggtgcattggttttataaaaaggcatttaaaacaaattatctttgttaattattttggggagtagttgggaaatggaaaggtgaattggctctagaggccctgtatgctagtatcattttcttttttaatttttgacttttcacaaatgagtaa

SEQ ID NO: 3359 - DNA, 314 bp, Homo sapien
  misc_feature (1)...(314): n = A,T,C or G
ggcacgaggtcctgacgcgccgcctcccgtgggctccggccggctaagccgcggcggacaactatgctgaaagccaagatcctnttcgtggggccttgcgagagtggaaaaactgttttggccaactttntgacagaatcttctgacatcactgaatacagcccaacccaaggagtgaggatcctagaatttnagaacccgcatgttaccagcaacancaaaggcacgggctgtgaattcgagctatgggactgtggtggcgattctaagtttgantcctgcttgccggccctgatgaaggatgctcatggagt

SEQ ID NO: 3360 - DNA, 334 bp, Homo sapien
  misc_feature (1)...(334): n = A,T,C or G
ggcacgagaggatgctttgaatgtncttatacaagtntttgcatggncatgtgttttcatttctnttggctacctatctgagaatacaattgttcagtaatagagtagatatatgtttaactttattagaaacatggcatatgtatttnacgtactccctctataagaaaaacacaaaaacaagacatgtaattgtngcacaatactgaagtggcccaagaattagggttccttaaaggaagccttcttccacctgtattgatcatccatggtattgatcatccatggctcctcaccaggcatcattctttgggtcagctaggcagaatgactt

SEQ ID NO: 3361 - DNA, 329 bp, Homo sapien
  misc_feature (1)...(329): n = A,T,C or G
ggcacgagcctntncgcagcgctctcgcagaggcgccctcggctccgaaaatntctctggaaagaagacccgcggatgggtttgggttggctcaccgcagcggctcaggctttgtntcctagattggcgcccacgaccttctctatcaggagcctccggtagtttntcaaactagacggttgcctctnataactcaagtgaagtgacccaggcctggagcgccaagtacaaagcggggacgacacttgcacctcctggcaagccagagcacagtgaggttcaaaagaagggacaagtgaataaattnctcagttagttgtcctataatt

SEQ ID NO: 3362 - DNA, 329 bp, Homo sapien
  misc_feature (1)...(329): n = A,T,C or G
ggcacgaggcactaggttcttttatacattttaactgtactggactacagcgtaagtttcagaaattttacttctattttttgaaggtacatagtgtaactncttaagatcaatttggatttcattttcatcgtaaaaatgtcttgataaattccatacactgtagaataagcctttcactaaggctggcatcaacataaatgcagttattgcatatctggcaaaaagaggtcattaacagaaaaaaatgactagccattcaatgagacaaataaaaatacaaaangttataatctcatttggtaacacattatttactatggacagaa

SEQ ID NO: 3363 - DNA, 337 bp, Homo sapien
  misc_feature (1)...(337): n = A,T,C or G
ggcacgagtgggcctttnctgtcctgcaagggaaggactccgcccaaccagtgaaagtatctacccagaatagtagatactgaaatccctgagatttgggcatgtgggtaaaatctagtgccagtcttctcctgggtaatggcctgtnctttgttctcctgaaggagcttagtgataaggcaggggattatttctttggcacgcttcacaggccctgactgtctgcttgatagttttgaaaaggcctgactggagaccgcatttcaacatgagatttggaaggaacacatnttcaaaccgtgtcacccaccattaaatttttaatatcataggtgta

SEQ ID NO: 3364 - DNA, 185 bp, Homo sapien
  misc_feature (1)...(185): n = A,T,C or G
ggcacgagatcttttcatctgaaagacaatgcngggggaagagctccactgagatgcgggcagggaggctgggctcgagccagcccctgctttagntagtgggngagaacagataggtaactctttnacatttcctttatgatctggcacttctccccagctccttccctctgccccccacccct

SEQ ID NO: 3365 - DNA, 184 bp, Homo sapien
ggcacgagtggagaacgccatcagctcgctgcttaaaattaaaccacaggttccattatgggtcgacttgatgggaaagtcatcatcctgacggccgctgctcaggggattggccaagcagctgccttagcttttgcaagagaaggtgccaaagtcatagccacagacattaatgagtccaaat

SEQ ID NO: 3366 - DNA, 179 bp, Homo sapien
  misc_feature (1)...(179): n = A,T,C or G
ggcacgagttaaaataaaaggagtgcaatgagacaaaatctctgggtgaggcatganctgataattctaaaaggaaagttcccagaatgctttgaataatgtcaacatcattgtaatgagtttataacactccaaattttctacttggaaatgtacagcactcttttggatgtgtatgt

SEQ ID NO: 3367 - DNA, 267 bp, Homo sapien
ggcacgagatttttgtatttttggtacagacggagtttcaccatgttggccagaatggtcttggtctcttgaccttgtgatctacccacctcggcctcccgaagagctgggattacaggtgtgagccaccgcgcccggccaggggatttctcctgtgtgaattcgctggttaagtgataattaactgcagttaaaattcaggtcaagcatgtggctcatgtctgtaatcccagtactttgggaggctgaggtgggaggatagcttga

SEQ ID NO: 3368 - DNA, 302 bp, Homo sapien
  misc_feature (1)...(302): n = A,T,C or G
ggcacgagtttacttaggtcttctttgatttgttccatgaacatttgttaagtttatacctatgantctcatttncttttgagcaattgcaaatgatgatgcattttaaatgtaaatttccaggtctttattgttagtatgtaaatttttgtgtgttgatttttgtatcctgcaaccttagtgaattcatttgttgtgggaggttttttttttttttttttgatatgaagtcttgctctgtngcccaggctggagtgcagtggtgcgggtctgggctcaccacaacctccgnctcctggggt

SEQ ID NO: 3369 - DNA, 317 bp, Homo sapien
  misc_feature (1)...(317): n = A,T,C or G
ggcacgagcccacctcagcctcccagagtgctaggattatgtttctgtaattgtaatacatttattgtttttagaaactgtctttgctttagtggtaattttcaataaaaatagaaatagcagtggagttattaaaagagcattagttacatttttccctttttcattatcttcaaatattatatatagtaagtttgacctttttaaaatgtatacttgtatcagttttaacacatacatagattcctgtaactgtcaccactataagggtaaagaacagttaagttccttcanccttgaagtcaaaccccacctct

SEQ ID NO: 3370 - DNA, 310 bp, Homo sapien
  misc_feature (1)...(310): n = A,T,C or G
ggcacgagcttttggtatgctgagtgttgacagagctgcactcttaacatcaagagaactgtcaggagcccagaaccaaccccaggtcttggtctccattggcgagaacacaggacgtggtggttcctgagcagagagggatctgcagatacaggcttggcgctcggggtggtctcgtggccaactcttcatgcccctgccgttgtagtggaacctctacatgttttagtttgcttcacctaaaataatgctgatctagagatagagaaataggggtggttaatttttccagattngagagttgaaagtc

SEQ ID NO: 3371 - DNA, 291 bp, Homo sapien
  misc_feature (1)...(291): n = A,T,C or G
ggcacgaggcactttgtagccatgggaggaaagggactataaaagtgtacaatgttaatggaatgatacggtacctgaaagccttgttttctagtaagaaaatgctaccttgctgtacatacttataaccttgtatttggaaatgagaaataggtttatatttncagatctctcaaaaatcacatcatttgaccaaagantaatttangacacatagaacagattttttttaattnatatttncatcctgaccagcttagttctaataattttnaagttgtgagtggatta

SEQ ID NO: 3372 - DNA, 252 bp, Homo sapien
  misc_feature (1)...(252): n = A,T,C or G
ggcacgaganttagtgcagatgacaaggatgacacggccaatggaccaagatttatcttcagcctaccccctgaaatcattcacaatccaaatttcacagtcagagacaaccgagataacacagcaggcgtgtacgccggcgtggagggttcagtcggcagaagcaggacttgtaccttctgcccatagtgatcagcgatggcggcatcccgcccatgagtagcaccaacaccctcaccatcaaagtctgcg

SEQ ID NO: 3373 - DNA, 326 bp, Homo sapien
  misc_feature (1)...(326): n = A,T,C or G
ggcacgagcactcacttctgaaatggaaacactcagccccaactgggaaggtaaaacagaacagcacagaacgtgtttacttatgtaattaggaagtcagaagggtgctaccttcaggtgtaagcagttccaggagctcaggtgcaatcattagggctccgctttcatctacctctntgccctgttttcccaaactgggttcattctcaggctgggtcctccagagactggcaagacagccctatgagctctgggtccccatcttgctaccttcagaanctagggagagaagagttttctntttctcagcagttctcataaatcct

SEQ ID NO: 3374 - DNA, 300 bp, Homo sapien
  misc_feature (1)...(300): n = A,T,C or G
ggcacgagctcagagagggaaaacttgtccataggaacagagctaatagtggtaggctggggctcaagcctaggactggctgactccaaagctcttcctgtctcccttgctctgtgtgcttctaaaagatacttagtccaagtccaaaatatgctcatttctcttccctcaggtgaagaagtcaaaggaatcttttgaagtgaagaaagtgggtttggacgtgcccttatgctgatgaatcattggagtaatatctgggggtttagccgcatccttggtggcaaggcggtnggggaaagc

SEQ ID NO: 3375 - DNA, 339 bp, Homo sapien
  misc_feature (1)...(339): n = A,T,C or G
ggcacgagctaagaagggggagtcctgaacttntctgaagcccttntccgtaagcnttgaactacgttcttaaatctatgaagtcgagggacctttcgctgcttttttagggacttctttccttgcttcagcaacatgaggcttttnttgtggaacgcggtcttgactctnttcgtcacttctttgattggggctttgatccctgaaccagaagtgaaaattgaagttctccagaagccattcatctgccatcgcaagaccaaaggaggggatttnatgttggtccactaatgaaggctacttagaaaaggacggctccttatttcaattccactcaca

SEQ ID NO: 3376 - DNA, 284 bp, Homo sapien
  misc_feature (1)...(284): n = A,T,C or G
ggcacgagccaaattcaagacaatgtatcatttagacacacagaaaaggaacttgtatgttttccctattatttttctcatttgccaacaatctatagttttaggttatcaaacagatagatcaacttaactggctagtacattgaaaaatcttcctaagaatcctttgttagcataatctatagagataatttctcaaattatatcatcatgatgcatataaactctataatgtataattgtgttttcatttatttaaatgtatgaggncatattgaaataca

SEQ ID NO: 3377 - DNA, 371 bp, Homo sapien
  misc_feature (1)...(371): n = A,T,C or G
ggcacgagttactcttttacttggaggaagtaggttattctgaccttcagttttttcatgtataaaattgggatataaataccctctgtatagatttataattaggatttagtgagatattgtatatgtgtgttaagtctgtgaagcacatactaggtatgtaatacatgaaagtntggtaatgttatnctaattatgccactcattggacaccagtaattgaaaatgtgattttcttggtgctgtggtcatatacaattggagtggttactattgaggatatcagaattcagaaagagggaatttagtacacagtaggaaaccantttttgaagnccaatcaccattctgtacctcagcttatccattta

SEQ ID NO: 3378 - DNA, 289 bp, Homo sapien
  misc_feature (1)...(289): n = A,T,C or G
ggcacgaggctcgctgtatattgataagtgtaagatttgtnttgcatgantaaccgctttgggctggatttgaagtattttgatgttgtgttttgcaaatattgaagttacaataatggcaacagaaaaggaacagatacacagctttacacttagcagaatgttacatttaaaatctgacaaggcgccaagatggtgactgtntcctctaaaccacgaaagagtaagatttgtgcaccctcctcctcttccacctccttcaggagaattaaatgaatcangactttgg

SEQ ID NO: 3379 - DNA, 341 bp, Homo sapien
  misc_feature (1)...(341): n = A,T,C or G
ggcacgagatttacctggagccttggcatttagacatctttganttccttgatttaaagaagaacacaggaaaggaagagcagcgtgccagagatctttnntttgctctttggattccggntctnttcatgaaacgagtggagactaatcaggactggtctttgatgtgtccaaatgagtgtcctggtctggatgaggtttngggagaggaatttgagaaactatatgcaagttatgngaaacaaggtcgtgtccgcaaagttgtaaaagctcagcagctttggtatgccatccattgagtcttcagacgggaaacaggcaccccgtatattgctcttaca

SEQ ID NO: 3380 - DNA, 324 bp, Homo sapien
  misc_feature (1)...(324): n = A,T,C or G
ggcacgagggctcctggaaaggaccgtccacccctccgcgctggcggtgtggacgcggaactcagcggagaaacgcgattgagaaatggaaaagaaaatgaaataaatcagcagttatgaggcagagcctaagagaactatggcaacatcaggtgactgtcccagaagtgaatcgcagggagaagagcctgctgagtgcagtgaggccggtntcctgcaggagggagtacagccagaggagtttntggccatcgcggactacgctgccaccgatgagacccagctcagttttttnagaggagaaaaaattcttatcctgagaca

SEQ ID NO: 3381 - DNA, 310 bp, Homo sapien
  misc_feature (1)...(310): n = A,T,C or G
ggcacgagcctgcagggggaagggcagaaagctaggccctctgctctggaaagtnggcctgaggtttccggcaagttaacccttaaaatggacacctgtcagcccgccctcccctttggccttcccagaatctccttcagtggttgctctcacacctgtgccataacatcatcttccatgacttggacgggcacttccttgacaattcctattggcatcacacgggctacaaattatgctgttttctaaagantttgaacttttttttttttcctttgcttgagacacggttcttgctctgttggccagg

SEQ ID NO: 3382 - DNA, 325 bp, Homo sapien
  misc_feature (1)...(325): n = A,T,C or G
ggcacgagctcaacttttgatcctcagctctgtggttctaagaccacagtgtgacagtnccctgccacacacccccttcctcctaccaacccacctttgagattcatatatagcctttaacactatgcaactttgtactttgcgtaggcggngcggggtggggggaaagaaactattatctgacacactggtgctattaattatttcaaatttatattttngtgtgaatgttttgtgttttgtttatcatgattatagaataagggaatttatgtaaatatacttagtccnatttctagaatgacactctgttcactttngctca

SEQ ID NO: 3383 - DNA, 242 bp, Homo sapien
  misc_feature (1)...(242): n = A,T,C or G
ggcacgaggagatcagatcttntagctggctctctgctgccacagctccgcnganggnagggggtggaagaggaggactaaactcagagctgagaggagaggcaggtgtntgcaggtgcatcacctggttcatgaggtcacccctctgctggctcctcccacttntnatcttggcctcattggcccaaggccagccaacaagacgaccaagacccgggactgggcccgggcgcagacccagg

SEQ ID NO: 3384 - DNA, 273 bp, Homo sapien
  misc_feature (1)...(273): n = A,T,C or G
ggcacgagcctgattccatgttcttggccatgttagccataatatcctgtgcagtatgtttttcctgtgcagaggcaaaaacatattgggcatatgtncccaagcccccagcagtatgacccatactttggagtgacactcctcctaagatttatcatgattaaggagcatgggctccagggacccctaactccacctgacatagaacagttagactctcagaataatgtcattaattataccgttccattggaaggacttccttgtgtgtca

SEQ ID NO: 3385 - DNA, 231 bp, Homo sapien
  misc_feature (1)...(231): n = A,T,C or G
ggcacgagtntgccatgtntggagagttttggttgttgcagctggaggaggtggtgctactggcatctaatgggtagaggccacggatgctgctaaacatcctacaatgccccggacaacaagacaaagtaatgntccagccccaaatgtcaatagtgctgaaagtgagagaccctgattccatcttagagcttagagatcatccaagcacatttggcccaaattgttttt

SEQ ID NO: 3386 - DNA, 207 bp, Homo sapien
  misc_feature (1)...(207): n = A,T,C or G
ggcacgagtatgtccagcaggccacgtttgaggaggctggctggggtcccatctgagatgagtgccggtntggtgcggagttccctgccaaaggagggtctacacagtctcaagatggcctctctgccagggtacacctcagaggggntcttagaggctgcgtatgaaggtggcccgagggcgnctnatntnccttcccaagaagtt

SEQ ID NO: 3387 - DNA, 247 bp, Homo sapien
  misc_feature (1)...(247): n = A,T,C or G
ggcacgagtatactcggtgctttgctcaagatcagtgccttgactttttacattgctaatgcacacacaaaacctttgggtatcatgaaatttttgatgacattattgantatttgantatngcngggtgtttttggtttngtttttggtgactcagcgtataaacctgctttctttgggggacaaaagaaaggtatggaacttaaaacgcagcatgtattnntggctactgaatccaaagatccgt

SEQ ID NO: 3388 - DNA, 246 bp, Homo sapien
  misc_feature (1)...(246): n = A,T,C or G
ggcacgagcaagaagaaatattatgtcaagacttacaagatcgacgttagctccaacggggaagactggttcaccataaaagangganacaaacctnttctctttcagggaaacaccanccccacagatgttgtggttgcagtattccccaaaccactgataactcgatttgtccgantcaagcctncaacttgggaaactggcatatctatgagatttgaagtatacgggttgcaagnttaacag

SEQ ID NO: 3389 - DNA, 276 bp, Homo sapien
  misc_feature (1)...(276): n = A,T,C or G
ggcacgagantgantnttgccgcagcaggagagattgangttagacactagaaggacgttccaactctcaggaacctgggagttgttagcttccccagggccagtcaagaacagactctgcttctntgtgtgcagaatgacaaccttgctccaaagtggaggtgtgcntggactgaccaagaaggctcatcagacctcggtacacaaggaactcaaagaaatgggtaatttatttttcagaatgaggctagaaattanttcattaacactttatcc

SEQ ID NO: 3390 - DNA, 229 bp, Homo sapien
  misc_feature (1)...(229): n = A,T,C or G
ggcacgaggttctttcttcatcataatttgagatacatcctgagtatgactgtntaaccctttntntgtggcagaaaaatatgttttccaggtagtttttactactacagagagtctgtaaataagtgctttaaaaaaataacaaaccaataagatatttgtttcctatataaacattctgngtatttngcacttgaaatccaccaaatcccgatttaaaaaatgcccc

SEQ ID NO: 3391 - DNA, 360 bp, Homo sapien
  misc_feature (1)...(360): n = A,T,C or G
ggcacgagtttcaaaccaacactgaaattctgtggcatcacatatattgggccttgatgtcatgacagatcaaaatcatttgatatccctttctccattctaggttttnntttttttcagtaactgatttaccttgatcacttttcaacttccatattcttcatatagtaaaaggcaaagtgttgaagatactacggtgtggtagtagttgaaaattattgccgtcattatttacatacttaagacatattagcaagttgatccaaaatgggaggccttatagatgtgcttgggggaaaatgaaggggagaaagtagccatacaggagttccaaaggaattccatggcccttcagattag

SEQ ID NO: 3392 - DNA, 183 bp, Homo sapien
  misc_feature (1)...(183): n = A,T,C or G
ggcacgagtcttcgagggaaccaatgagattctccggatgtacatcgccctgacgggtctgcagcatgccggccgcatcctgactaccaggntccatgagcttaaacaggccaaagtgagcacagtcatggataccgttggccggaggttttcgggactccctgggccgaactntggacctgg

SEQ ID NO: 3393 - DNA, 371 bp, Homo sapien
  misc_feature (1)...(371): n = A,T,C or G
ggcacgagcccctgggagagaagagccccttccctgtgtggatgatggttgccagcctgctgcccgccatcctggtcttcattctcatcttcatggngacacagatcaccacgctcatcatctccaagaaggagcgcatgctgcagaagggctccggcttccacctggacctgctgctcatcgtggccatgggcggcatctgtgccctctttggcctgccctggttggctgctgccactgtccgctctgtcactcacgccaacgcgctcactgtcatgagcaaggctgtggcacctggggacaagcccaagattcaggaagtcaaggagcagcgggtgacggggctgctggttgccctgatttgtgggcct

SEQ ID NO: 3394 - DNA, 365 bp, Homo sapien
  misc_feature (1)...(365): n = A,T,C or G
ggcacgagtagtgattggggaattccagtttaaagctcataggaatgtnctggcctcctttagtgagtattttggtgcgatctacagaagcacttctgagaacaatgtctttcttgatcagagtcaggtgaaggctgatggatttcagaaactgttggagtttatatacacaggaactttaaatcttgacagttggaatgttaaagaaattcatcaggctgctgactatctcaaagtggaagaggtggtcactaaatgcaaaataaagatggaagattttncttttattgctaatccttcttctacagagatatctagtattactggaaacattggaattgaatcaacagacttgtcttcttact

SEQ ID NO: 3395 - DNA, 328 bp, Homo sapien
  misc_feature (1)...(328): n = A,T,C or G
ggcacgagtccagcaacactggcctgtctgcctgtnctgggagggctgtgaggatgtcttgcagatgctctggatttctgcggaggcacctccattcctttntggctttttttgcgggggagggctttgggcctntttntttgagggaacaccgtcaaagaaagcctgggagatcgaggcttcagtgagccaggatggaaacgcgtgtcccaagtntccggagcaggcggcagaggcctcagtgcggcaaacacagccccagagcctgtntggcaccagcagcatcttagagccccaggtatatgctgagatcttatctcacgctgtc

SEQ ID NO: 3396 - DNA, 364 bp, Homo sapien
  misc_feature (1)...(364): n = A,T,C or G
ggcacgaggtggagcgtcagtatgtcatcccggggatgtttaaggaagtctatcagaaaatagagactgtgaatgaaagctggaatgccttagcaaccccatcagataagctgtttttntggaattccaaatctacgtatatcaaatcaccaccattctttgaaaacctgactttggatctttagccccctaaatctatagtggatgcctatgtgctgctaaatttgggagattcngtaacaactgaccacatctccccagctggaaatattgcaagaaacagtcctgctgctcgctacttaactaacagaggcctaactccacgagaattcaactcctatgggctcccgccgaggtaatgacg

SEQ ID NO: 3397 - DNA, 331 bp, Homo sapien
  misc_feature (1)...(331): n = A,T,C or G
ggcacgagaaaggtttccccctttnatatctacacattctaggggtagctgacatctgttttcttaataacaacaaacagttcttgccaccaaaaagaagcaaataacatctagtacctgtgggcagttggctaagaggctgtggtattttttgtgtgtatttgctttctacctggggatcagagcaggcctggaataaatgtcgttggtgttgtccactgcaaggcttcaggaggacatagacaaagatcagcctactgagcagagagtggtccaggtattgaatggactcaatatcctagaaggactcacattctagcaggcacttttt

SEQ ID NO: 3398 - DNA, 328 bp, Homo sapien
  misc_feature (1)...(328): n = A,T,C or G
ggcacgagcagatttctgtccttaaaaactcataaaataggctgggtgtggtggctcatgcctgtaatcccagcactttgggaagtggggtgggcggntcatgaggtcaggactttgagaccagcgtggccaacatggtcaaaccgtgtctctactaaaaatacaaaaattagccaggcatggtggcacacgcctgtaatctcagctattctggaggctgaggcaggggaatcgcttgaacccaggaggcagaggttgcagcgagctgagattgtgccactgcactccagcctgggacaacagagtgagactccgtctaaaaaaacta

SEQ ID NO: 3399 - DNA, 266 bp, Homo sapien
  misc_feature (1)...(266): n = A,T,C or G
ggcacgagaaaagactctccttttcccattgcgtgttattgatgcctttntcaaagataaggtggctgtaaatgcgtggatttatacctgagttctctcatctgnttcactgatccatgtgtctgtttttatgccagtaccatgctgttttgattactatagctttgtaataaattttgaagtcaggtagtgtgatgcctccagcttcattctttttgctcagggattgctttggctattcatagtcttgtgggttccatgtaaaa

SEQ ID NO: 3400 - DNA, 198 bp, Homo sapien
  misc_feature (1)...(198): n = A,T,C or G
ggcacgagttgcagcgagccaagattgtnccactgcactccagcctgggtgacagagtgagactccgtctcaaaaaaaaaaaaaaaaaaaanccaangcagtagataatgaaaacattagctaagtgatcttggacagttaatttttgtggaactgtctgcccatctgtgggatggagatgatatcacatagctttag

SEQ ID NO: 3401 - DNA, 211 bp, Homo sapien
  misc_feature (1)...(211): n = A,T,C or G
ggcacgagctgaacagcttcctagagggaaagtacctcttttaaactaagttattatagacagtgaatgaatcctacccttaaaagagatgacggcagggtaagtncaaagtaaaacctccttgctctagtctcttgggagagtattgtaatgaaagcagcgtttacttcgttgttgttgcatttgggtgaaaaatctgagatgctggaat

SEQ ID NO: 3402 - DNA, 229 bp, Homo sapien
ggcacgagtcccactgcaacaggggaaaactttagggtatcctgtctatgatgaagttagaagaagaaacaaaagagatgcagccataaaaaatatataaaacataggagattgggaagacatagggaagtcccctgaaagaataattcaatactatgggccagctacctgggcacaagatgggtcacggggatactgcactcctatttacatgctttaaccacatcat

SEQ ID NO: 3403 - DNA, 168 bp, Homo sapien
  misc_feature (1)...(168): n = A,T,C or G
ggcacgagtttatnagctatctttttccccatgtaaaacttcaggtaaatnctttgcagattttttacttggaagaatgataaaaaaaaaaaaaaaagtnctgaaatgagttgaattcatccacgtgtgtttttgattcacatgaagagtaggacctccctttatatt

SEQ ID NO: 3404 - DNA, 276 bp, Homo sapien
  misc_feature (1)...(276): n = A,T,C or G
ggcacgaggtcttgggaacatctttggaaaaaccaacaaacaatagttctagggngatgagaaaaaaattcaccttacagtgctaagaaagtgcattagaatggaattgccctttccttaaggagacagtttgggctctccccttgccaccggctctggtgttttggcttatgcgttccttcaggttgagctgagcagtntgttatgggaagctgctcaatttccttttattcaattncacctccttcctgaactctaatagagggttaaaagggg

SEQ ID NO: 3405 - DNA, 236 bp, Homo sapien
  misc_feature (1)...(236): n = A,T,C or G
ggcacgaggtggaatgtgattaaaatgtctttagacacgtgaatacaaactcacttgaaaaagcagttcccaagatggaatagacattaattcattatatataatatttattatgtataatattcatgtatataatatttncttatatgtaatgaatatgtngtttgtaaaaccttaggatgcatgctaatcanctgtgatagagtccatataacactgagtgttgtggcaagtcg

SEQ ID NO: 3406 - DNA, 231 bp, Homo sapien
  misc_feature (1)...(231): n = A,T,C or G
ggcacgagctcgtgcgtntaatctttatatttnatatttgattattgaccaaagaattttaatgtcagttttttatccttagaatgggagtnctataaggncagggatttttttttctgttttttaaacagtgcatggcacataatagctgctcaatgaatatttttgaataaacaagtggntaaaccagtatgatgcagttttttttctttaacatagaaagctatgatg

SEQ ID NO: 3407 - DNA, 243 bp, Homo sapien
  misc_feature (1)...(243): n = A,T,C or G
ggcacgaggtctaatgtgtgttttcctttcatataattttttatgtttntnttaatagttattaaaatgatcagattcattaagtgctattcattgatggcaagaaaaataagtattatcagttggctaattctgaccatgaggtgttagaagtgagtgttaccatcagactattgattaaattggttaaatttttngtaatgatgatcatctatctaaagtgctagtaattttaggccgggt

SEQ ID NO: 3408 - DNA, 164 bp, Homo sapien
  misc_feature (1)...(164): n = A,T,C or G
ggcacgaggngacctggggtcagccttaagtaggaagaaattgcagtgtctatcctgctgccatcagcccttcctgctccagctacagttgggccatttgtggccttagtggatggtctgggtggatggctctgtcaatgtcaggcccgagaacagcctgcgga

SEQ ID NO: 3409 - DNA, 240 bp, Homo sapien
  misc_feature (1)...(240): n = A,T,C or G
ggcacgagatcctgaagagattagctgggagtccaataccttttaaagatttantaggagaaacagttgccatctattgcctctgaagatgaccacttaactctttcagctaattgccaaccagaaaatctttgantccacctatgacctggaagccccctttgctttgagatgccccgcctttntggacagaaccagtgtatacctcacatatattgattcatgtcgtatgtatccctg

SEQ ID NO: 3410 - DNA, 298 bp, Homo sapien
  misc_feature (1)...(298): n = A,T,C or G
ggcacgagcttctntttgcttcctcagtagcagaatcccaggcagttgcccagctcagaggctatgttgcctccctgcatttgcggggaggtgtgccgccacgactgaagctggccagggagaccaatgtggaagtgcagtgtgggcttctgaaaagttgtctcgaaagtgaaaaggcagccgggcgcggcgactcatacctgtagtcccagcattttgggaggccaaggcgggcagatcactgaaggttgggagttcgagactagcctggccagcatggtgaatccctgttttctac

SEQ ID NO: 3411 - DNA, 267 bp, Homo sapien
  misc_feature (1)...(267): n = A,T,C or G
ggcacgagcggacaacaggcctattcctgtgcacctgaagtagaccatcagcccagtaccagccctttggaccaaggtcctggagacagtagagaccaccctgggcccagacaggttccacgcctgctagagcccctgatagtaggctcaccaactntggactccattntggacccagcagcagtcatgttacctggctccaaaagcatttggctacaatcccataggcaaactcatttgcctgggaacttgtactgcctgggaact

SEQ ID NO: 3412 - DNA, 228 bp, Homo sapien
  misc_feature (1)...(228): n = A,T,C or G
ggcacgaggnacgtttnacagatcccttccatttcnggagtggggcagtttnagtttcataaagtagctcggncaaaaataattcgctcatcttggcatatatgttgggcagctgccgnagaagagagactgagctatgtgccgtggaggattcaaatctgtctcttctcccagggattgaagttagacacgtacagcaataataagttgaaagaacttatttacacc

SEQ ID NO: 3413 - DNA, 291 bp, Homo sapien
  misc_feature (1)...(291): n = A,T,C or G
ggcacgagcgttgttcaacagatgggagaatgcaaagcaactgctcattaggtggtgtggggatgatgtgctcattgagtgaacaagggaagcagctagctatccaggtgtctaatatcctggggatggatgtntgtggcattgacctgctgatgaaagatgacggctccttctgcgtctgtnaggccaatgcaaatccttttcaggagccaaaaaaacaaatacaaacaaacaaaaaaatacccagagaaaaaactttccttcttccccctttcctgatgatgagtgaga

SEQ ID NO: 3414 - DNA, 282 bp, Homo sapien
  misc_feature (1)...(282): n = A,T,C or G
aattgcccctcaatattatgacatgagcaatttcccacagtgtgaagcaaagagacagttggaccgcatcattgccaaacttcaatccaaggaatattcacagtactgaattcagtgcttagaactgaagttattgagaggacagctttaaaagatgaatganctcaaaagttcgagttgtgctcttcacgttggttcgataatggcctttatttgaaagctttttaatttttctttacagtaaatattccattctgatttcataaaattaaaccatttatg

SEQ ID NO: 3415 - DNA, 279 bp, Homo sapien
  misc_feature (1)...(279): n = A,T,C or G
ggcacgagtctagactcactgagcttctggctcttagtttttnctcacctgtaaaatgggccagtataactacatttgtgtttcctattctaaaaatctttgaggtcagtagccaatttcaatgttcttaaaagccttggggaaattggaaaatcatcactcagaaacgtacccataacaacaaaaatgccttatttatttaggagtcatgggatttatcacacaatcagattacatttgctattccatgctggtaagaaactctggcaatcatataca

SEQ ID NO: 3416 - DNA, 210 bp, Homo sapien
  misc_feature (1)...(210): n = A,T,C or G
ggcacgagctttttctcaacagattcagagtccttgaaacttgcatgantggccagggcacatcttgaagacgcatgacaaagaacctgtggggatattaagatttangtcaggatgattggttcttgttaccagcatcaaaggatcttctcatatcacaaaataatgagattatcccccaacattggtcagcatggcataaaatacatg

SEQ ID NO: 3417 - DNA, 319 bp, Homo sapien
  misc_feature (1)...(319): n = A,T,C or G
caaaaatgacagatacaaaccatttctatcctgagtagtaatctcacacttcatcctatagagtcaaccaccacagataggaattccttattctttttttaatttttttaagacagagtctcactttgtngcccaggctggagcgcagtgggggtgatctcatctccctgcaacctccgcctcctgggttcaagcgattctngtgcctcagcttcccaagcagctgggattacaggtgcccgncaccacgnccagctaatttttgcatttttagtagagatggggtttcaccatgttggccacggttgtttccaactcc

SEQ ID NO: 3418 - DNA, 322 bp, Homo sapien
  misc_feature (1)...(322): n = A,T,C or G
tatgtcaaaaaattcaggtccaattatagagcaaaataaaatgaggcatgattttnanttattcatgaagaataagaagaggcttgataggtacatttccttttctatggcacaggcatgatgatattgggtgtgtagggaagaaaatatcctagcttatactaggctcccagtaagangtatttaattagccaaantaatgtggatatcatttattagtattcaatgttcagatcagcctattaacaaagtgtgaaaggtttcattttttattcagaactgaagttgaaagtaattaatgctgacaaagggaaagaaagca

SEQ ID NO: 3419 - DNA, 283 bp, Homo sapien
  misc_feature (1)...(283): n = A,T,C or G
ggcacgaggttttctgggaattcttagacttcaatgtttcaatcctgctcctataactcaaaccaaaaagttgggggtgtatttggtcttagaagggattattgagtttttgatgggagaaaatatttaagatgaaacagtaacatacatctgcaggattaagtgttaaatttttaaatcagtgaaattgtatataatttttttaatggtataaagtactgangttggcatattaaagaacattgaattttgagatgggaggaattaggattctagtcccatt

SEQ ID NO: 3420 - DNA, 229 bp, Homo sapien
  misc_feature (1)...(229): n = A,T,C or G
ggcacgagtaaaaatatttncncttatttagggagcccttgccacatgcccaagctgggcagatcgctttgtacgtgttgtcttgtgtgagcctcacaaggaccccatcaggtcagtcctgttctcatcttacagatgaaaaattggaactcagtgaggtataataacctattcaaagtctcaaaagccagttgaggaatagaacaagggttaatgcaagtcagtctgg

SEQ ID NO: 3421 - DNA, 329 bp, Homo sapien
  misc_feature (1)...(329): n = A,T,C or G
tnccagtaacctggatggggaaaagcatttcccatagcactccatgtaatatgagtnctctgtgagatgttcatcagtgttttatagaaatggtgttgctgggaaaccaagtttgcacctggaaacttacaatgcactttagcgcagtaagggcttggcatccggtagtgaaaaantgtctaacccagcattgcccaaactattttnacaccaggacctttttctcctttgggatacttatgaacctctcactaatgtcctgtggagaacattttgggaaacactatgttagatagttctttaaggagacaaaacggtaatgaacagat

SEQ ID NO: 3422 - DNA, 248 bp, Homo sapien
  misc_feature (1)...(248): n = A,T,C or G
ggcacgagcctgagctccagtgatccgcctgtcttggcctcccaaagtgctnggattacaggcatgagccaccatgcctggcctaaaaagattttaaaagtaagaaaaaatgtcttttactttatatgttttccatttctggtgttctttattgcctatgagcggttccagattctcatctgccagattttcttcagttttttctcgtcagttcagattttctttctgccagaggacttcctttaatg

SEQ ID NO: 3423 - DNA, 255 bp, Homo sapien
  misc_feature (1)...(255): n = A,T,C or G
ggcacgaggtttttggactgtcctgataattaattccagaggcagttttcagtcctgggtgggcggaggacatctcactaggcaggatcttcagcagaaagtgattctccatccgtcaactcatgcaggaagatgaagaaagcccagataatctccaacttgcattcgtttaggttttggtataccacccacctcactgtcagctgcagggcttngggctctgcctagaatcagaaattttgagccaaacttggg

SEQ ID NO: 3424 - DNA, 272 bp, Homo sapien
  misc_feature (1)...(272): n = A,T,C or G
ggcacgagcttcgctaaataagggagagttgtggctggttttattaagctgccatgggagagtactatgaaggcaacttagtggattgaagagggctggagacagaagttagggagagtccgcagtggacagacaggtaagggcccaagccaggcttggggtcaccnggagggggaaagcgcaaggggaggagatgttgggaaggaaaaatgaccagatttggtgattaattagaaatcagtgcttaggaagaagcatgcaaatatgactaa

SEQ ID NO: 3425 - DNA, 245 bp, Homo sapien
  misc_feature (1)...(245): n = A,T,C or G
ggcacgagccatcctcctgccttggcctcccagagtgttgggattacatgcgtgancaccatgcccaggctctttttcttcacgagctccagataaagtagttagtttctgtgtggaggccaagtatacatttctttcaataggagangcactctccgtgcagtgagagtctacactctgagaagtacctaggactcaatccacctcccatttccccagggaacagtgcctttgctgcttccagt

SEQ ID NO: 3426 - DNA, 278 bp, Homo sapien
  misc_feature (1)...(278): n = A,T,C or G
ggcacgagtggaggccccaaaaggagtggaaatcaatgcagaagctggcaatatggaagccacctgcaggacagagctgagactggaatccaaagatggagaggtgagggatgagaaggacagaagttcaaagagctacagcttcaacaggccaacccttcccataactggttgacctcggagttggatcctacagtgtatcaacaaaaggagccangcaggtttttatttcttgaaacaatttaattnagcagcatgattntaagccaaacccacaa

SEQ ID NO: 3427 - DNA, 238 bp, Homo sapien
  misc_feature (1)...(238): n = A,T,C or G
ggcacgagctgcctgaggccctctagccaacttccccttgtaatctctgtgatagggatctcatttcactccaggcaggggctgcccactgcatgagctagcagcctgcttttccttatttgctgttttatcctattgtaattttcatccacctatagaaccgtgctcccgggcgtggtggtcacaccgtaatnccagcagtttgaaaggccaaggcgggcagatcantttgaggtca

SEQ ID NO: 3428 - DNA, 239 bp, Homo sapien
  misc_feature (1)...(239): n = A,T,C or G
ggcacgagcagagtcatagtttcatctaaatgctacttagctgttttnctttttncttttttttttttgagacagcctctgtctatcgcccaggagcatgatttcggctgactgcaacctccacctnccgggttcaagagagtctcctgcctcggcctccgggtagctgggactataggtgcacgancaccgcaccctggttaanttttgtntttttggtagagatgcagttttcacca

SEQ ID NO: 3429 - DNA, 312 bp, Homo sapien
  misc_feature (1)...(312): n = A,T,C or G
acttactgcatttttgccaactttaaggagacttcctagacctcaganttctcatctgtaaaatactggaacttcattaanttctgtgtagagttccatctgatgctgcccaatctagtgcctgggccttccaactgaaatataagagggaatgtttttggctcaaaaaaaaatatctagataaatgactcactgctctggttcactgatcatacatacatcattgtcatctcctttgattatggaaagantgaaaaaaaattatcttcttaagttacattccaggaaagagccagcagacctaagtatatt

SEQ ID NO: 3430 - DNA, 348 bp, Homo sapien
  misc_feature (1)...(348): n = A,T,C or G
cctttggcaatagtgtcttcgtcagtnattctcaactaatatacttcctctttctacagccccagtacactagagggactgtttttcctctttttcaaagctgtgtcattgacctctgaagtgaagaaattggcccttttagactttgatctgtgagtcccatgtaacagagactctttaaaaaagaagctaagtgtgtgttttgatatgtttatctccttcttagaaaatgaaatgaaactacagcagacttatttttaggagattttaggagtgttctattttaagaaaatgacaccatacaagaacatcttttagttaaacttcttagtactctgcttgtgattc

SEQ ID NO: 3431 - DNA, 311 bp, Homo sapien
gttctttttatggcaattatagttgttcatgtcttgcaagtcatagccctctgacctgcaacaaaacctattttagctcttctggctgggcacagtggctcatgcctgtaatcccagcactttgggaggctgaggtgggtggttcacctgaggtcaggagtttgagaccagcctgcccaacatggggttttggtgaaacctgtttgtactggaaatacaaaaattagccaggcgtggtggtgcacgctatagtcccagctacttgggaggctggggcgggaggattccttgaacctggggaggcagaggtt

SEQ ID NO: 3432 - DNA, 335 bp, Homo sapien
  misc_feature (1)...(335): n = A,T,C or G
agtagacatagttaatatagaaacagatgagcacagctgttttccaataaaactttataaatggatactagaatttnanttttatatagtttttacaaaatactattttnatttttttaaaccattgaaaaatgttaaaaagaggccgggcacggtggctcagacctgtaatcccagcactttgggaggccgaggcgggtggttcacctgaggtcaggagttcgagaccagcttggctaacatggtaaaacctcatctctactaaaaatataaaanttagccgggcgtggtggtgtgtgtctgtaatcccagctacccgagaggcttgaggcagg

SEQ ID NO: 3433 - DNA, 208 bp, Homo sapien
  misc_feature (1)...(208): n = A,T,C or G
ggcacgagatttaggcagtcctcaacctctctaggtatgctgaattaaaaaaaaaaaagantgacatttttaattcccatggcaaatggagttctcctctttnttctgttcctcttcttcaccttgcaatgactgtcattttgtaaaantttctctctgtctctgtctctcttactcacacatacactcacaatgttccttaatatct

SEQ ID NO: 3434 - DNA, 393 bp, Homo sapien
  misc_feature (1)...(393): n = A,T,C or G
ggcacgagcaccccttgcccccgctagaaaggttgttcctgtntacactgaacagttccaaatcacagtaagcacatagaggtcagtgggtttggttcaaatcccagctcacccctcattatatgaccttacacatcanttaacctcccttagcctgttttntttttcttcatctgtgtaacagctaacaatgcatgccacctgccacatatccctcatgggcttgtngtaaaattcagtgagaagatgatgggtttttcagtaccatgtccagcacgtggtacacatgcaacanccacccaatctgatccgatcctgtnggtaacactggcgnctctngttttggagtgagactccctcagtagaggttgtggattaagtactagggatctt

SEQ ID NO: 3435 - DNA, 434 bp, Homo sapien
  misc_feature (1)...(434): n = A,T,C or G
ggcacgaggagatcgcntcantgcactccagcctgggcgacagagcaagantctntttcgaaaaaaaaaaaggcaaacaaatttntctgtatcantttggaattaaaagatttgtgtgtatagattttttnttaaaantagaagaaatagggggagggtccttttntgaaatctgagaatgatagggatgatgactatcaaaacccaggcctgtgactggnttgtttaaaaacaaaacaaggccggcccggtggctcacgcctgtaaatcccagcgctttgggaggctgaggcgggcggttcacaaggtcaagagatggagaccatcctggccaatatggtgaaatacagtctctactaaaaatacaaaatttagctgggcgtggtggcgcgcgtntntagtcccagctactcggagggttnaggcagagatca

SEQ ID NO: 3436 - DNA, 376 bp, Homo sapien
  misc_feature (1)...(376): n = A,T,C or G
ggcacgagctgacctgctgacagtcaccctccctctgctgggatgaggtccaggagccaactaaaacantggcagaggagacatctntggtgttcccaccaccctagatgaaaatccacagcacagacctctaccgttttttttttccatccctaaaccacttccttaaaatgtttggatttgcaaagccaatttggggcctgtggagcctggggttggatagggccatggctggtcccccaccatacctcccctccacatcactgacacagctgagcttgttatccatctccccaaactttctctttctttgtacttcttgtcatccccactnccagcccctattnctctatgtgacagtggttaggaccctttg

SEQ ID NO: 3437 - DNA, 459 bp, Homo sapien
  misc_feature (1)...(459): n = A,T,C or G
ggcacgagcggcagtccaggacctgcaggccccagagtaagtagcacagaaagatattacaggtccacatgtttcanatgtctgcntttcagaaagatattctggcattgtgatgtcatgatactttnttagggacctgttggacccagtggacctcctggcaaagatggaaccagtggacatccaggtcccattggaccaccagggcctcgaggtaacagaggtgaaagaggatctgaggtaagacatcacttatacgtatgtntatttaatttgctacaatcttccaattttcagaaacacagcgcattattgtttaanttgaaatagagagacggaatgcatccactcaattttggaantggaccatggctttaaggcattttcctcacattaaaatgttttttccccattttaccaggggaaatacctttttnaaaatttgtccgggttcccttc

SEQ ID NO: 3438 - DNA, 341 bp, Homo sapien
  misc_feature (1)...(341): n = A,T,C or G
ggcacgagtttgatatcacagagaagatactcggaggattgttggaatgtatatagtttagtaagangtgggtaaganagagggtcttaattactgagcacttattatgtattaggttctttnccagatgtttttacatatataanctcatttcagaaaacttatttaaagtaaatggggccgggtatggtggttcatgcctggaatcctagcactttgggaggctgaggtaggaggactgcttgancgccgggagttggagaccagcctgagcaacatagtgagaccctgtctcaataattaatnataataataataatagtnataatgaagttaatggg

SEQ ID NO: 3439 - DNA, 339 bp, Homo sapien
  misc_feature (1)...(339): n = A,T,C or G
ggcacgagatttaaattatgtcaattatgtttctnccaaattttagcaattgtnagagtgtaagtataatcaatataaatataggaatgtntgaaatacttcacatgtagacttccacaaagatttctcatgaagttagtgtgagataccagggtcttcctgattagtacttatggctgtnacctcaggcatctttttttctccatcagatggaaaaactgatgctctaactctcagatatggtcatagcatccacaacccgagagtggccatttnntggggataactgaggcaaataattgtnttcattgtnataggtgacagtttatttgcaaccag

SEQ ID NO: 3440 - DNA, 322 bp, Homo sapien
  misc_feature (1)...(322): n = A,T,C or G
ggcacgaggaagagcaaaactccatctcaaaaaacaaacaagcaaacaacaacaagaaattagccgggcatggctgcatgtncctggngtcctagctactcgggaggatgagataggagantagcttgancccaggaggcacaggctgcaatgagccaagattgcaccactgcactccaatctgggcgacagagtgagactccaaattaaaaaaaaaaaantttttttttcattaatagactctaagaatatgtgaaagtaaattttttataggcttctccaaatgtntttcactaattantctaaatatgtatttttaaag

SEQ ID NO: 3441 - DNA, 432 bp, Homo sapien
  misc_feature (1)...(432): n = A,T,C or G
ggcacgaggtgaatatctcattntcaatcaccctaaccctggacccactgaaacccttcggagggtattcccgcaacgtcacccatctgtactcaaccatcttagggcatcagattggactttnaggcagggaagcccacgaggagataaacatcaccttcaccctgcctacagcgtggagctcagatgactgcgccctccacggtcactgtgagcaggtggtattcacagcctgcntgaccctcacggccagccctggggtgttccccgtcactgtacagccaccgcactgtgttcctgacacgtacagcaacggcacggtctggtacaagatcttcacaacttgccagagatgnccaacacaaaatacggcccaggttacaatccttttttggtgttataaggggggccatttggaaaagtttatcatgg

SEQ ID NO: 3442 - DNA, 404 bp, Homo sapien
  misc_feature (1)...(404): n = A,T,C or G
ggcacgagctggaatggacagatttttnaagctgggggtcagttccggcccgaggtgtccatggatggctgcaaggtccaagatggccgctggcatcanacactcttcaccttccggacccaagacccccaacagctgcccatcatcagtntggacaacctccctcctgcctcatcagggaagcagtaccgcctggaagttggacctgcgtgcttcctctgacctctgacctcgtggccactctaggcctcatggaggagggaagaggaagaggcaaggggagggtactnaggggcagatggcttccaggagaggcaagttccctgcccaagggtccttggggaagaccccagctgttgtttgcccagtaagaattnggtgnggggtaggagggggntagggtt

SEQ ID NO: 3443 - DNA, 265 bp, Homo sapien
  misc_feature (1)...(265): n = A,T,C or G
ggcacgagcaaaggcaccaggtggagagggcccggcacaggcccaccctggtccaaaccctcacactacagaaaaccccaatggtgctgaaactntcgcccggccacgcctggcccctccccacccaggagggaggtggcacttnttaacctgtacagttttattgtaccaagagactcgccccgcccctgtatcataagcctttaaatggagtcaactttttaattatatatataaagataaatatatataaatatatatataa

SEQ ID NO: 3444 - DNA, 117 bp, Homo sapien
  misc_feature (1)...(117): n = A,T,C or G
ggcacgagtagagacacaaaaaacccttcaaaaaatcantgantccaggagctagtttttgaaaagttcaacaaaattgactgttagcaagactaataaagaagaaaagagaganga

SEQ ID NO: 3445 - DNA, 327 bp, Homo sapien
  misc_feature (1)...(327): n = A,T,C or G
ggcacgagagagccccctctttntgaagttgaaccctatgaccaagcacacagatgtnagtaatactccatgcctactctntcatgattgtggctatacctttnactgtgtgacactcctctattggggaatgccagatgccacttaccagctgtnactctggcttagtcatttaatctccaaactgtgaaaggaggtaatccctacttcattggtttcttgggaagatgagaggaaatgtgtaaaagcagctagcccaaatnttggcatataagtgttcagggttntccgtctccttcacagcttccntgtcagcgttttttgagg

SEQ ID NO: 3446 - DNA, 354 bp, Homo sapien
  misc_feature (1)...(354): n = A,T,C or G
ggcacgagccaggtcggggagcagtggtggccagcagccctcagggatgaaggagggtgtcaagaggtatgaacaggagcattctgctatccaggataagctcttccaggtggcaaagngggaaagagaggctgccaccaagcactccaaggcatccntgcccacgggcgaaggcagcatcagccatgaggagcagaagtcagtccggctggccagggagctggagagcagagaggcagagctaagacgccgtgacaccttctacaaggngcagctggagcntattgngaggaagattgcttgagatggtataaaactgtcttcagagcaatttccattgagggcagcctcaaa

SEQ ID NO: 3447 - DNA, 332 bp, Homo sapien
  misc_feature (1)...(332): n = A,T,C or G
ggcacgagctctgacccaatttnattctaacattgcaccagctgatcctnatactgctattgtncatccagttcccattcgtatgantccaagcaaaatccacatgcaggaaatggaacttaaaagaactggcagcgatcatacaaatcccactagcccattacttgtgaaccatctgaccttttagaagaaaataagataaattcatcggtgaaattngcttctggtaatactgtagcagatggttacagtagttcagactcttttacttctgacccagaacagatcggggagcaatgtaactcggtcaaaaggtctcatttcaggaacgt

SEQ ID NO: 3448 - DNA, 273 bp, Homo sapien
  misc_feature (1)...(273): n = A,T,C or G
ggcacgagaggttcttagacagcaacattgactctncagtgccaaacgaagataggccatgggtagtggcatatttttnctgtggggccacattctttcgctctctttttctttgtatatatcagagagagaagtgtatcatacacttagaacaatgcagaagacacagagtttaaagaataatgacaaacatcccagcacccaccacattcctagtgcctaagaagccccctgggtgtccatatccctttgacacccagagttcactgccat

SEQ ID NO: 3449 - DNA, 297 bp, Homo sapien
  misc_feature (1)...(297): n = A,T,C or G
ggcacgagtnttaaggatgttttcaaaatgtacagtggctaaaatcttgtaagcagtaattttttntttatnatggctgtntccaagtttggtggaaaataatggcaaaacaaaaaatcacatttgagtagttcttagagcaattcctagagatgtatttnttacctggcctttcctctctaccctgtatctttgcattatttaatacttggaaaaacccacatagcattaaaaacaaagtactactgaacaaagtgataaatacatttncttaaatctttcttttctaaccacagg

SEQ ID NO: 3450 - DNA, 278 bp, Homo sapien
  misc_feature (1)...(278): n = A,T,C or G
ggcacgagcaggattggagaagtttggtgaaaatgggggtgcaagagaagcttggntttcccattaactgtcaatacagtcatggttccacctggtatctagaaacctgttcacaattgtaggtttagcagcacacagggtggggtaagtttntctccccatcaggagcagcctctganctntcctgggaccctgagcttcagggaacccaggctgtggcccccctcccccactttggcaatactgtctgcagagggaagnggccggttttactagca

SEQ ID NO: 3451 - DNA, 300 bp, Homo sapien
ggcacgagggccttgggcatccttagcaaccaagagggctggaagaaggagagtcagcaggacaatggggacaaagtgatgagtaaagtggtcccagatgtgggcaaggtgttccggctggaggtcgtggtggaccagcccatggagaggctctatgaagagctcgtggagcgcatggaagcaatgggggagtggaaccccaatgtcaaggagatcaaggtcctgcagaagatcggaaaagatacattcattactcacgagctggctgccgaggcagcaggaaacctggtggggccccgt

SEQ ID NO: 3452 - DNA, 313 bp, Homo sapien
  misc_feature (1)...(313): n = A,T,C or G
gggacgaggattattggacttcttagctagaaaaggccttgtggagagcntgttcaacatatgtnaatttcaggagctcataacaaaagctgttacaaaaaagctcactcataaaactntccaaagaaacttaatattttgttntttgctgtgggctgtgtttctcaactcctgtgtatgtntgcgtgtgtgtgcgggtacgcgcgtgtgcacactttcaagttgagagtctggtttgaccctgaacctatgtgaatgtcaagcgtttgctttttcgtatttnatttggttatatataaccttgctcctgtgg

SEQ ID NO: 3453 - DNA, 227 bp, Homo sapien
  misc_feature (1)...(227): n = A,T,C or G
ggcacgaggagacctcaagcagttcctgaggatttccaagagcaaggntgaaaanttgangtcacagcccctcagcaccaagcagaaggtggccctatgcacccaggtagccctgggcatggngcacctttncaacaaccgctttttgcataaggacttggctgcgcgtaactgcctggtcagtgcccagagacaagtgaaggtntctgccctgggcctcagcaagg

SEQ ID NO: 3454 - DNA, 333 bp, Homo sapien
  misc_feature (1)...(333): n = A,T,C or G
ggcacgagcccatgtgacctcactgaggaaaaaggcatgccaaatgantcccatttatttnnttcataacattctcagagagttctggcagggaaataacagacaaatccttacctttatacagtgctttcctgctaaaagtacattctaantttcaactaggcacttgacaagtgtgtgaaattntgtgagcaagatggagaaacatagattggagagtggtgccgctggctggatgttagctaaggactatactcaaagagcatggattaaagagggcgaggtcccttgtagatgctgcaaaaatctatgtggagtggaattgaattgagg

SEQ ID NO: 3455 - DNA, 300 bp, Homo sapien
  misc_feature (1)...(300): n = A,T,C or G
ggcacgagcgacgacgagcacgatgttgggatgagagtcggagccgaataccaagctcggttccctgantttnatccaggtgctacaaagtacacagataaagacaatggagggatgcttgtntggtctccatatcacagtatcccagatgccaaattggatgantacattgcaattgcaaaggaaaagcatggctacaatgtggaacaggcacttggcatgttgttctggcataaacataacattgagaagtcccttgctgatctccctaatttcactcccttttccggatgagtgggc

SEQ ID NO: 3456 - DNA, 294 bp, Homo sapien
  misc_feature (1)...(294): n = A,T,C or G
ggcacgagagcactgcctgtaaagccctcgcatgagaggccagcctgctagggaaatccaggaatctgcaacaaaaacgatgacagtntgaaatactctctggtgccaacctccaaattntcgtctgtcacttcagacccccactagttgacagagcagcagaatttcaactccagtagacttgaatatgcctctgggcaaagaagcagagctaacgaggaaagggatttaaagagtttttnttgggtgtttgtcaaacttttattccctgtctgtgttgcagagggggattca

SEQ ID NO: 3457 - DNA, 256 bp, Homo sapien
  misc_feature (1)...(256): n = A,T,C or G
ggcacgagcaggatggtcaagctgacggcggantgatcgagcaggcggcgcagtacaccaacgcggtgcgcgaccgggagctggacctccgggggtataaaattcccgtcattgaaaatctaggtgctacgttagaccagtttgatgctattgattttnctgacaatgagatcaggaaactggatggttttcctttgttgagaagactgaaaacattgttagtgaacaacaacagaatatgccgtataggtgaggg

SEQ ID NO: 3458 - DNA, 273 bp, Homo sapien
  misc_feature (1)...(273): n = A,T,C or G
ggcacgagcttggctaggctatagtgcccagttgcttggtcaaacaccagtctagatattgcngtgaaggtatatttnaaatgtgattaacatttaagccagtagactttgagtaaaacagattacccattataatgtgggtggacctcatctgatcagctganggccttangagaaaagactgangtcccctgaggagggaattctgcttcgagactgcctttggactcaaaactgcaacatccaactgctgccagaacttccagcctgccg

SEQ ID NO: 3459 - DNA, 325 bp, Homo sapien
  misc_feature (1)...(325): n = A,T,C or G
ggcacgagatttacacagttatatttatcccctgaggtgttactaataaaggagcatttgcccactaaagggaaccaggaccaaatgacaatgtataacctaaatgantgantttccaatgataacttttttttgagacagggtctcgctctgtngccctgagtgcagtggtgcaatgctagctcactccagcctcgaactactgggcttaagcgatcctcctgcctcagcctcctgactgggtgggactgtgatgaaattttaaatactaaaaagagatataactatcacttcccacgagcgtttctctgttcccatttagggc

SEQ ID NO: 3460 - DNA, 337 bp, Homo sapien
  misc_feature (1)...(337): n = A,T,C or G
ggcacgaggtaaaattattatctatgtcaatattcagcagtcatggttttaaataaaaatttctttttttaacaaagttaaaaaccaaaatgaatacattaaataaaaactaataaattgatagtttgctatttcagatgttgtcaatgttcatattctttttttaaggctgtttgttaaaagttatagtttttacttatgcttaatgacactgattcattgtntgagtcagttatgtaccagtttagtattttagtcagtgacattgtttggtttatattctcatgttcattattaaaaacctgtatagtagatgcttgataaacttttgagttga

SEQ ID NO: 3461 - DNA, 357 bp, Homo sapien
  misc_feature (1)...(357): n = A,T,C or G
ggcacgagccccgctccgcttcgantggttgttttgatgttcctttcagctggtcctatagtacccctcctcaggaatgtntccccagtgcaaggacaaagactgaagagactgctatattgatggactctcaagccaactatgaagttgaaacaaagaaagtgatcacctgaagacacctcctctgctaagaaacacccccaaattgtgcagcttctgccactagaactctcagaacaagagacaatcttttcaagaaacagaaaaactcaataatgacatctagattttcatgagccaagaactttcccttcctcatgtgtattcctctggtttgtacttaaattcatgtgacat

SEQ ID NO: 3462 - DNA, 330 bp, Homo sapien
  misc_feature (1)...(330): n = A,T,C or G
ggcacgagctttagatggtgcaagccccangctttgtggtgttgagcttccatgtggtgttgagcctgcaggtgcacagaagtcaagatttgaggttttggaacctccacctagatttnagaagatgtatggaaatncctggttgcccaggcagaaatttgctgcaaggntggggctctcatggagaacctctgctagggcagtgcagaagggaaatttggggtcggttcccccacacagagtccctactggggcactgtcctccagacccagantggtagatccactgacagcttgcactgtntncctggaaaaagccacagacaatca

SEQ ID NO: 3463 - DNA, 329 bp, Homo sapien
  misc_feature (1)...(329): n = A,T,C or G
ggcacgaggtggctcctaggctggcagcacactgctttgtggcagaagggctctgatatgctctggtctttacctctttnntttaaaaatctaatttggccacctctttatgaagaagacaaatcagacaaattggaaggtatgagtgaacatcatttactccttcaacagctattattgagcaactcctatgttgtattacagtgtcaacattacatctaaattaggtgatgacctctctgggaagaagtcctatcttccagctatctctgaatcctcagggtctgtgcaggatccaagacaaggcaaatggttaagtgtttactgaa

SEQ ID NO: 3464 - DNA, 327 bp, Homo sapien
  misc_feature (1)...(327): n = A,T,C or G
ggcacgagcttcctccctctgctctattatccagatggntttttggtggtggctgtttttgggaacatataggacctgntctgcctggntatacttntgcatttntaggcaaatgcccagtcattgcaaactgacatacttactgggtggaggcagagaacctaaacagctaaactgggttgggtaagggtcagctgaaaagcagtctcagtgctgtggagacagtaggaatnatggggactctagcgaactctgcagcacctgctccatctaaagcggggagctgcccacagatttagctcattactacagggcaggaaagagggc

SEQ ID NO: 3465 - DNA, 314 bp, Homo sapien
  misc_feature (1)...(314): n = A,T,C or G
ggcacgagatcagagagattgtggggnggngggggaggcagaccacctagggttttttgggccatggattttactctgagtgagatgggagcccctggaaggctttgtntagaggaggggtagaacttttttacatgttaagatgatcgtttggacataaaaaggaggtagaggcagaagcaaagaaagtagttaagagtctattgcagtatctcaggtgtcttagtcctttnttgctgctatacctgagactgagggatagcaagaaatttntcacaacacaaatttctcacaatcttggaggctgggaggtc

SEQ ID NO: 3466 - DNA, 269 bp, Homo sapien
  misc_feature (1)...(269): n = A,T,C or G
ggcacgagaaaagntccagacatttaaggaaattnttttcaggttacaggctgaccagagacaataaaaagaccaagaacctcaggaatacagacttcgcaaaattaacttggaaanttcactacacaaatganctgcagccctcaacaagtaacagangcaatccctgaggagagggataatctgatttccagagctactgcagtgtcatattcaaactgtacagtcctcaacacaaaattacaaagcacacaaataaaatggaaaat

SEQ ID NO: 3467 - DNA, 327 bp, Homo sapien
  misc_feature (1)...(327): n = A,T,C or G
ggcacgagatcagatgttacttagggtgggtatacctaanttataaaccttatgtacaagtcagtaagccttagggaaggtgagtntgggtccttcctaatccctctgacgtcatgtcatataggtggctgcctccttagactgacctttgggagaaaaaaaccccagactttganttagtaacagctctaagatggtcatgcagtgagataggaaatcaagatggaagcagagaatctggcatgccaaaaactaacagaaacttagttgaaggcaaagagagcaaggagaacgtttaatacttcattacatcaaatcaacactgct

SEQ ID NO: 3468 - DNA, 293 bp, Homo sapien
ggcacgagcaagaaagtgaccatgatcaacgccattcctgtagcctcttttgaccccatcaaggaatggttgatttcctgcgacctgaaatacacagaaggagtacagtccctcaactggactaaaatcatgaagaccattgttgatgaccctgagggcttcttcgaacaaggtggctggtctttcctggagcctgagggtgaggggagtgatgctgaagaaggggattcagagtctgaaattgaagatgagacttttaaatccttcagaagatgactatgaagaggaagagg

SEQ ID NO: 3469 - DNA, 403 bp, Homo sapien
  misc_feature (1)...(403): n = A,T,C or G
ggcacgagcagcttttataaaatctttaaaggaaacaaatagggcccacatctttatgaataatttagaaacatttttgtatatatatgacaaatganctgttttttttaggctaaagaagaaaagaagaaaatcaacttcttcttcaagtgtttctnctgctgatgaatcagtgtcttcatcatcatcctcttcctcttctggtcacaaaaggcataagaaacataagaggaaccgttcagagtcttctcgcagttccagaaggcattcatctagggcatcctcaaatcagatagatcagaatagggaaagatgagtgctacccagttccagctaatacttcagcatcttttcctttaacccttaaacaagaagtgggaggaaactactgggggaaggcagg

SEQ ID NO: 3470 - DNA, 434 bp, Homo sapien
  misc_feature (1)...(434): n = A,T,C or G
ggcacgagctccagttaaacttcactgccagttaaagtctggtagattttaatcagagaatgaaacagttttaaactcaaaatgaaatgtnttgttataactntntgggttcctgtcctgtagcgttcttagaagtcaatttgggccaggtccagagagtgcagtttgtatgtaatagtctcaacactgcatgcacgtngtgcacttcccacgcactttacaaagtactctgtccagaatctcacatggacctcggaacaaccgagacctcttccagccagattggaggcacccagagtagggtctgggatgatacaggctcttgcttcaggacttctggggaacccttttaagggcctgcttggaactcagaagttggtggctcagccagcagtctctgtccctattctgtgtcagcgttggatatcacacac

SEQ ID NO: 3471 - DNA, 360 bp, Homo sapien
  misc_feature (1)...(360): n = A,T,C or G
ggcacgagaggnaatgtaggctactgggaaaggacagagccaggtctgtttgcctctccctggagtccctgacacttgctgttttggcttgaagcctttggccattaaanttgcctgtntccaggcatgantggcccctgctcagggccaagagagggtgagtnttgcaaaccaaggaagcccaggtaccctgtttgcttccttcagggtctggaccactcctttccctataggccttccagtcggctggagagtgttggtgcatgtttgcatgtttgcacgtntgcatgtntgtgggtggggctnaggtctgggggtacctgggaattccacaagggaattcctctttgcagacatatg

SEQ ID NO: 3472 - DNA, 325 bp, Homo sapien
  misc_feature (1)...(325): n = A,T,C or G
ggcacgagagaacttatccagagtntgaaggacttcctcaaccnggagggggctgatcctnatagcnttgaaatggtggccacacgggtgctagagctctccatcccagcttcagctgagcagatccagcacctggcgggtgcnattncagagcgagtccggagcctggcagatgtggatgcnatcctggcacgtactgtaggagatgtgcgtcgtgccgagcagctactgcaggatgcacggcgggcaaggagctgggctnaggatgagaaacagaaggcagagacagtacaggcagcactggaggaggcccagcgggcacagg

SEQ ID NO: 3473 - DNA, 262 bp, Homo sapien
  misc_feature (1)...(262): n = A,T,C or G
ggcacgagatttgtgctggtgtgttggcggggaaganggatgaaaaatcatgaaatctgagacccaatganttcaatttntnggttcacagatgaggaaagggatgtttctaantgtttaatagaaaggtaaagaggtttgctcagtgtcacatatttggtggcataccaaatgatctnttgaaatgagcacagggctgggagtcaggagtctggattcttccaataactgattccgatagctttcctgtgcccactggcct

SEQ ID NO: 3474 - DNA, 374 bp, Homo sapien
  misc_feature (1)...(374): n = A,T,C or G
ggcacgaggccaattggctgtatcacatggaagttgtacccgtcagcacctgctgagggcttttttgtccaaaccctgacaggtaaaaaatttcctgcagaataaagccagaccagctggctttgaagagaaaccccccagtttgggctgcntttgcntcctctccttttctatgaagaccgaggctttgcccccttgntcgtcaagccgtgagatgcgtgatctctctgcacaagtntctggcaggccgagggcaccactttcagataaaaacatagacctgantggcatcatccagtatccaaggaaaccatgttctctaaaacatgattatgcctttggggngaagacagaaggaacatgggaagccatgt

SEQ ID NO: 3475 - DNA, 295 bp, Homo sapien
  misc_feature (1)...(295): n = A,T,C or G
ggcacgaggggacgcggcggtagcggcggccgttgcgattnattgcnctggttgcctgcggcgtccacttccttggccgcccttgctacactggctgattgttgtgcagccggcgccatgtctgtaagcgagatcttcgtggagctgcagggctttttggctgccgagcaggacatccgagaggaaatcagaaaagttgtacagagtttagaacaaacagctcgagagattttaactctactgcaaggggtccatcagggtgctgggtttcaggacattccaaagaggtgtttga

SEQ ID NO: 3476 - DNA, 308 bp, Homo sapien
  misc_feature (1)...(308): n = A,T,C or G
ggcacgaggaccttggacaggtcagagggtttcatttttggccttcatcttagatgactggttgcttcatttggagaagtgagtnctccttgatggtggaatgaccggntggtgggtacagaaccattgtcacagggatcctggcacagagaagagttacgagcagcagggtgcagggcttggaaggaatgtgggcaaggttttnaacttgattgttcttgaagctattagaccacatcgaggctcagcagtcatccgtgggcatttggtttcaacaaagaaacctaacatcctactctggaaactga

SEQ ID NO: 3477 - DNA, 206 bp, Homo sapien
  misc_feature (1)...(206): n = A,T,C or G
ggcacgagctccttcctctcccagcatgtgcaataaatnaagaaaaaagccccaacatttaaaatggaaagtttatagaaatattaggtgttgggccatgtgcggtggctcatgcctgtaatcccagcactttgggaggccgaggtgggcagatcacctgaggctgggagtttnagaccagcctgatcagcatggagaaaccccgt

SEQ ID NO: 3478 - DNA, 179 bp, Homo sapien
  misc_feature (1)...(179): n = A,T,C or G
ggcacgagaatagctgggaccgcaggcantgcaacaccacacccagctaattttttnatttttnatttttnatttttttttgggacagagtctcgctgtgtctcccaggcagagcttgcagtgagctgagatcgtgccactgcacttcaacctgggcaatagagcaagactccaactca

SEQ ID NO: 3479 - DNA, 312 bp, Homo sapien
ggcacgagggaaactctgtctctctaaaaaatacaaaagttagctaggtgtggtggcgtgtgcctgtagtcccagctactggggaggctgacgtggtaggattgcttgagccttggaggcagaggttgcagtgagccaagatcacgccactgcactctaacctgggcaacagagatagaccctgtctcaaaaaacaaaaagaacaataataatacaaccatgtaaccaatagatctacagtcactaaatgtcttcttgtgattacttaattgtagtgttatagataatcattctgtagacatccaaaccttt

SEQ ID NO: 3480 - DNA, 185 bp, Homo sapien
  misc_feature (1)...(185): n = A,T,C or G
ggcacgagcagatagccaaattctctctaccacattttggaaactatgtgtttgagtctgatcaagcatgatttagattcaaattcagaaaccatgtattagccttagttatgtnccaggcagtcctgcactggttccgttcatgtnaatggctctnttgagccctcaccaagacaaatacatct

SEQ ID NO: 3481 - DNA, 236 bp, Homo sapien
  misc_feature (1)...(236): n = A,T,C or G
ggcacgagagccagtggagagaggcagaagantgggccccgggatatggtgagtaaagccaagttgcccctagacctgggacttgggcaggataatacagccaggggaagcaaccatgtggacaacaaaagagggaacagatggaggtcagctgagggacagtaggctgccatagcatgggaaacgtcactcaacttgggaccaaactntagctaaccaactcccatagggcatct

SEQ ID NO: 3482 - DNA, 312 bp, Homo sapien
  misc_feature (1)...(312): n = A,T,C or G
ggcacgaggaaaaaaagaactcagagacacacatggttttaagaggctgtgactgtcaactctgccccttcctattgantattgaagcctttatgttattgantacattgaatatattgcaaattggaaccccattaataggattctaagaagccttactactagatctggattctaagcctccttgcttgtatgataggttattgtctgagacattaagcaactagacctatgttgggacacttgcttcacaaggtaatgcgatgtattaataatgaggaaagaaaaattgccctgcttgtgctagtgagg

SEQ ID NO: 3483 - DNA, 347 bp, Homo sapien
  misc_feature (1)...(347): n = A,T,C or G
ggcacgaggagacgaggcaatcgatgatgctggaaaagttgaagagagagtttgaatgaaggacaaaccaccgatgggaaagcttgggaggntcacttatagcttgactagcaaaaggctttgggaataggatagaaagcagcaaacctgaactttaggntccaccagatgtctctggagccataacccaacatttcccataaatagtaggttttaattctcctgttatttaggtgcatctctgggacctcctctttctatattgggttttttgtttgttgggtgttttaacttaggatttagcttcaaattccatttcccaagacccaattttatcacattgcctt

SEQ ID NO: 3484 - DNA, 328 bp, Homo sapien
  misc_feature (1)...(328): n = A,T,C or G
ggcacgagaaagaattttggcaattaactatgtaactgagtcccagactctgctatcatctggggtggcagataaaaacacacagtccaaataaaaaacctgattttttattttagcctgaatcacccagatcacagcaggattttncttgaacaacccagacagattgcatccattttntgctttactgtgcttgtggaagccaggctgttagtggtttcttctggaatgggagaatgtatcacaaaaaggttggaacctgaaaaatttctagaatttcattgttctgtgcttcttaataaacaaatgtgacaatacccaaggaatg

SEQ ID NO: 3485 - DNA, 299 bp, Homo sapien
  misc_feature (1)...(299): n = A,T,C or G
ggcacgaggaacaggacttttaatttgtttaaaactctggtaattacttgtaacagtagaaaatagaagtcattcttattttagaaaaagtgacagaagcagtccagtaagattatatgtttctntttctggtaaataccatatatgancctcgaaatgataatatctccagaatattgttttcacccaaatttgagtagatattttaaacacctaacaaagtaaagggctaaaagccattcagatagcagtaaaacattctgtatgatgtgcaataaaacatccaggatcttttttga

SEQ ID NO: 3486 - DNA, 242 bp, Homo sapien
  misc_feature (1)...(242): n = A,T,C or G
ggcacgagcttgagttcaggagttcgagactagcctaggcaacatggtgaaacccatctnttaaaagaaaaaaaaaagaaagaaagaaattagcgaggtatagtgcatagtggtgtacagctgtgatctcagccactggggaggctgaggcaggaggttcgctggagcctggggggtcaaggctgcagtgagcagtgattgcnccactgtactccagcttgggcgacagagtgagaccctgt

SEQ ID NO: 3487 - DNA, 192 bp, Homo sapien
  misc_feature (1)...(192): n = A,T,C or G
ggcacgagcagatgctgaacctggctctgtaacgctgggaagtcttaagatagtcctgtttagactttgcaaaccctgtacctggctttnctcggagattcgggatgctggctcctgcaggcagggcgtgtgggagcctcgtcagaaagttttagaggtttccagcagaagcagaatgaagatggtcttcct

SEQ ID NO: 3488 - DNA, 368 bp, Homo sapien
  misc_feature (1)...(368): n = A,T,C or G
ggcacgagccactgcgcctggcctggntttctctatttntttatgcgaaatcgtctactggcattaccatctctcaaaacattttcctggacttttaactaaagattttttccattgtaatgggcacaagtgcaatttccctttcattttaagagactgtgagaagtaacaaatcaggtaagtaaaattnttaaagaaggaactagcacttaaaaaatataatttataaaaccaagttgcctaagaggaagcgtcactttacaaagactttnttacttcatggcattaatagtttcaggaccattataataccataggtttaaattttntttgggggtttgccgngtttgggggggttggagggacct

SEQ ID NO: 3489 - DNA, 306 bp, Homo sapien
  misc_feature (1)...(306): n = A,T,C or G
ggcacgagtttactttcactctctttagaaaatgtatctcattgactcatagaaactgaattaattgtcctttaaaagtctcaatactattataaataacaaaaattattaaattaaaaaaaaggactaaccctggtgtttgaggcttaactttaaacttcagcaagtcagattatcactttgggtattggaatgttctttgaagtatctggcatacagtccagtcccagtgaaccataaaaactttcctanttggcacacattattgcacgttggtttaataaggattgctttattgcaccatta

SEQ ID NO: 3490 - DNA, 314 bp, Homo sapien
  misc_feature (1)...(314): n = A,T,C or G
ggcacgaggaatttgctagcactttaaatgttggattgctggcgagaatagaaaagcctgtntcccttcaggcaaggtcctgccctgtgcttttntgtgtacccctctgccctgagaatagctgggctattggaggttcacacagtcaataaccactgaactgcacccgtgggtagctctccagtgctgcctgctcatttaacaggtccttatggagatgggcctgatacacaagtgctggcgatcttcaggacaaacccaataaaatgagaggancctaagcttgggttctaaccttcctgggaaaaggaagt

SEQ ID NO: 3491 - DNA, 168 bp, Homo sapien
  misc_feature (1)...(168): n = A,T,C or G
ggcacgantcgagttttgttttcatagatctggcctagcagcttaattntncagccagacctgggtaatcctggagcaagagtactacccctaaattcctaaatgtactaccttaaatgcaaaatatagatgataatgtttaggtgaacatgnctttcagccacaaag

SEQ ID NO: 3492 - DNA, 191 bp, Homo sapien
  misc_feature (1)...(191): n = A,T,C or G
aagcacactccacttctttcacccattttacatttccagtttcgccttacgcaaggtctcttcttcctctgtggctcctccacctgcatgtntccacctgttaatgagacaggaacatgtacactagttttccttaccccaaaaatcaatttgcaaataagaccgagcagcttcctgttcccctcatgaca

SEQ ID NO: 3493 - DNA, 225 bp, Homo sapien
  misc_feature (1)...(225): n = A,T,C or G
caccctcctcctcctcctcttccggccactgcaggtccagggggaacggggttagaaagggacagatttgaaagccattccagcagttttntntggccttgcggttggtttctntntggaagagcctgccgcttcaggaaagtnttaggatgtgaacttccgccttcacctgcccctgacctgctcgttgtgggtgattcacgccatgggaatggttctttacgt

SEQ ID NO: 3494 - DNA, 203 bp, Homo sapien
  misc_feature (1)...(203): n = A,T,C or G
acactgttctcaaggctaatagacgtactgttaattttagctcatgtgtttaaatggattgtctatcaggggaaaaaagtcaaatatgaaattnttctaatgataatttgctgtaattctaaagccaatatgtgaaagagctgtgtaataatatatttaaatactaaaaaatcttttggncattaaccttagatgctgatgtc

SEQ ID NO: 3495 - DNA, 195 bp, Homo sapien
  misc_feature (1)...(195): n = A,T,C or G
caccaccctccctcctttnagtaaaatgaagggcattaggtgttttnatttttgacagctactttcagggtcctggagcctgtnagcttgcttcctggcccttgcctctatgttctaggtgagtggcacctcagataattgatttttgagtaggtaaaggcactactaggcaacgtgaacccagctttccaacag

SEQ ID NO: 3496 - DNA, 123 bp, Homo sapien
  misc_feature (1)...(123): n = A,T,C or G
cccacctgccctgatacagggtaaaantgctaatgactcctttcccagccttgctgccaagggaagcgtaagtntatgccaagtgtagacactgagacacaagtnagacctactgggagcctc

SEQ ID NO: 3497 - DNA, 153 bp, Homo sapien
  misc_feature (1)...(153): n = A,T,C or G
caacaatgtgagtcattgcctcccgggccggccacttgctgatgagcttgtatgcggttttgcagtgaccctgactgcgaagggcaccgctgcgagantgggtgtctacgacccacagcaggatnnatggggacgagagtgcagatgaggaca

SEQ ID NO: 3498 - DNA, 144 bp, Homo sapien
  misc_feature (1)...(144): n = A,T,C or G
ccacggagccggcagcggcgcggnnaggccgtgcggcacctntggaatcctctcaagaggaacagtcattgtttgaaggttcaaattcagctgttagcatggaactttcagaacctattgtagaaaatggagagacagaaatnt

SEQ ID NO: 3499 - DNA, 205 bp, Homo sapien
  misc_feature (1)...(205): n = A,T,C or G
ctctggtgcatttnggtaaagtactgattttnatttcataaaataaatttnnctttaattaattctacacatcagccgaagcacttaaatttgcagttttacccaaacccagacagttggtttcagttgaagccttagtgtggaaggactggattntggcaggagaaattgagttttgtcacagagactaaataactgtgtatgg

SEQ ID NO: 3500 - DNA, 291 bp, Homo sapien
  misc_feature (1)...(291): n = A,T,C or G
ggcacgagtaaagactgaaatttgacatggtggctctttatgtaagtaacctgttgtggaggctaaagtaactccatcttggatgctaatccactatgttgacttgtgattaaccctggttccaggaatgcctctnagatttccagttcatctattgttncttgtgttaagagcacatccttaccataaatcctgcccttagatcaaactcctactcattccctctgaaacacgtgtaccttttccggtggtttataatccctggggtctgggggtgggggggtaattggt

SEQ ID NO: 3501 - DNA, 257 bp, Homo sapien
  misc_feature (1)...(257): n = A,T,C or G
ggcacgagttttttttaggattaaataatttatttaaaaaaaacttttctcataaatctgtttcataagcatatataataacatcatatatatncttaattggagtagaaacgtttttaaaattactgtgaaaaacaagagtgagattccagnaaaaattgtgccctaaagaaatctggtttaggccaggtgcggtggctcacacctgtaatcccagcacttttggagtccgagggcagacagatcacgatgtcagg

SEQ ID NO: 3502 - DNA, 198 bp, Homo sapien
  misc_feature (1)...(198): n = A,T,C or G
ggcacgaggagacactccatgcccatatcagcccattgtnagcccgtngtgttttcctgtatatcacttgcactaaaattagataagggtgctgattttggagctcttggactcccgtgaattaattggcagtcagtgaaggtctgctgtttcctngcactctgctctgggtactntggctttgtaatttaggaattt

SEQ ID NO: 3503 - DNA, 181 bp, Homo sapien
  misc_feature (1)...(181): n = A,T,C or G
ggcacgagggtttctnaggcaatgtttattttagaattggtcttcattctaaaaactgcccgtntgatcttngtattcctttagtggttactgaatgtncctggtttcccctttccccagaacaagcaacagcacatgcagggaatagaatgagagatggcgcctgtaatcttctgcctcn

SEQ ID NO: 3504 - DNA, 196 bp, Homo sapien
  misc_feature (1)...(196): n = A,T,C or G
ggcacgaggtttttnctgtccgcaacactggctcccgagcagcttttgttaaagcagtaggttttaaggnttctcagaaaaaagttttgctggatcctaaagtattgaggatttttccagataaattttgtactcaaggaaagaacacaaggaaatgntacctttattatataatccatcagacagaggattcaat

SEQ ID NO: 3505 - DNA, 183 bp, Homo sapien
  misc_feature (1)...(183): n = A,T,C or G
gagagtttagggtggttttncttttggtgaggggatttgctctggtttcacatccattaacacaaaacatgagctagtcagggcccttgtggtctgcggtaaggggatgcctgtggagaaatgggcctgagtnagtcaggccaagagaatgtcttccttcagaatggagtcaactggataact

SEQ ID NO: 3506 - DNA, 177 bp, Homo sapien
  misc_feature (1)...(177): n = A,T,C or G
ctcatttaacttttttaatgggtctcaaaattctgtgacaaatttttggtcaagttgtttccatnaaaaagtactgattttaaaaactaataacttaaaactgccacacgcaaaaaagaaaaccaaagtggtccacaaaacattctcctttccttctgaaggttttacgatgcatct

SEQ ID NO: 3507 - DNA, 178 bp, Homo sapien
cggaatagtgggttttgctgcaaccggtttattttccttctgttttcacccattctggcacaatctggcgccatcgtccttcttgtgaggccaagcctgaaaatgcgaagagaaggaggcaggaccaaaattgaggcgaatccaggaacctgccaatgggtctccgggtgcggtctct

SEQ ID NO: 3508 - DNA, 272 bp, Homo sapien
gtctaccttgtttatgtccatacttggagggcataccgttcttattaaatgccagcaactcacattttaggcagcagtaaagtcccctagctgtgtccatgcagtgaatctcgttgggctgtaagttagctgcaataaataacattggctctgcactccacttagagaagatgggttcactgtgaatcatgttgttggcggtttggactttaagctgtccaggttgtttatggtggtgtttgccagcatgtagacctctttcaaacaattta

SEQ ID NO: 3509 - DNA, 203 bp, Homo sapien
  misc_feature (1)...(203): n = A,T,C or G
aatttaagggcctcttgcaaaaaagcatacanaattcacattcatatttgctaggcccctccctcttaggacttatttctaacagttttcattcgnaattttatattctttctctaggaacatctgnccctgtgcccacttcagtgttaaccatgtgctgagtgtagcatacccattagcatctgctctttccagcagcaccc

SEQ ID NO: 3510 - DNA, 320 bp, Homo sapien
  misc_feature (1)...(320): n = A,T,C or G
aaaaagtgtatttagccgggcgtggtggtgcacatctntnatcctgggtactcaggaggctgaggtggaaggttcgcctgcttgagcccaagaggttgaggctgcagtgtgccatgatcacgccactgaactgtagcctgggcaatagaacaaggccctgtctcaaaaataagtagtacaaaantaaaaagtaaaagtataaagtttatttactccatcagctgagatttgttttcttctacaagtacaatatttaaaantggcaaatttaaaaacaaactgctccacttgtctaaaatagtaaatatacaaaaaaactt

SEQ ID NO: 3511 - DNA, 347 bp, Homo sapien
  misc_feature (1)...(347): n = A,T,C or G
cacgttnggagggcctcctacacttggattggacttaatcttaaacctctggagttcaagaccttttaaaaagggctaaataaacaatctctacatgtaaaaggccactgactcctacttcctctgtatagagcaactgttgaactcagctgcctgtaggaaaactgaagactttaataacaaactctccaaggtgaaaatgaacacagatagcggtgggtgtgctcgcaaacgtgccgccatgtctgttacgctaacatctgtgaagagagtgcaaagttctccaaacctattggctgcagggcgtggattcttcagtcaccagacttcagcaaaaaggtttttag

SEQ ID NO: 3512 - DNA, 193 bp, Homo sapien
  misc_feature (1)...(193): n = A,T,C or G
agatacttccttcttctgattcttctagcattactcgttggtggcttcagagacagtnctgcctcctcctnagggagggaaggtaccagggagaacctgggaggtcctggagagggccctgtccagttgggtgatcaggaatcaaaccagcatcggaaagacttcccagcaccaagcttgagctgtgtcgttt

SEQ ID NO: 3513 - DNA, 219 bp, Homo sapien
  misc_feature (1)...(219): n = A,T,C or G
caaaccctgaaggacagtgacttattatgtaagtncaattttntaagtncattatgtaaganccttttttttttcataatatgtattcttggctgctatgcgtggttttncaggaaatttaattatcttactgagatgtgaaagcaaaactagtaacagaacttacatttnatttcatgctttcttaaacccgtgcatattctggtgaaacatgtaaaa

SEQ ID NO: 3514 - DNA, 188 bp, Homo sapien
  misc_feature (1)...(188): n = A,T,C or G
ggaaattntccattttcctaagggtgggggctatagtgtccttattcgagagggacttacctgtccggtgggcatagccctaactcctaaggggcagctgctggtcttggactgttgggatcattgcatcaagatctacagctaccatctgagaagatattncaccccataggggatgagaaattatc

SEQ ID NO: 3515 - DNA, 261 bp, Homo sapien
  misc_feature (1)...(261): n = A,T,C or G
cataaacctaactaaatttgctaaaacaacaaaaactttctaatttttactagttttgttttttaaaaagtttgtttccttttaagtgcataacactttaaaatgagctcagctgtattagcagataaacatgttgattcatttggtccagagctactgaatgaagcttncaggagcacagttttgttctttatgccgcccaggggcagaatgtttctctttcctntcctccttatttgangagaaggggactggaataag

SEQ ID NO: 3516 - DNA, 254 bp, Homo sapien
  misc_feature (1)...(254): n = A,T,C or G
ccagattctggaatattatcctatcttggggatgggacccaagtctaaacatgaaattcatttatgtttcatataaactttatacacataatctaagataattttatacaatctttttaataattttgtgcatgaaacaaaagttttgactgtaacttatcacatgagaccaggagtggaatttnccactttntgggntcatgtcagtactcaaaagtttcagattttgaagcatttcaagttttggntttnca

SEQ ID NO: 3517 - DNA, 193 bp, Homo sapien
  misc_feature (1)...(193): n = A,T,C or G
aaaatccaaaacttnaaatgcttcaaaatctgaaacttttgagtactgacatgacccacaaagtggnaaattccactcctggtctcatgtgataagttacagtcaaaacttttgtttcatgcacaaaattattaaaaagattgtataaaatgatcttagattatgtgttntaaagtttatatgaaacataaat

SEQ ID NO: 3518 - DNA, 173 bp, Homo sapien
  misc_feature (1)...(173): n = A,T,C or G
cagccccagagccagcgtcttcatggggaagatgaatggacctgagtagctgaaggaaggcccctccctacccaaagactggaggcttctnagcctcaatttccctgtctgtacagctgagggctctgnctgtccccnactgctatcagtatggaaccccagctggggtcccc

SEQ ID NO: 3519 - DNA, 317 bp, Homo sapien
  misc_feature (1)...(317): n = A,T,C or G
ggtttcaagctcctaggctcaagcgatcctcctgcctcagcctcccaaagtgctgagattacaggcatgagccatagcgtccagcctcaaaggttttcttgattatggtggtcattatacaaatctgcacaggactacatacacatgtgcacacacacaaatgagtacatataacacaaatgatatctgaataagactgtagcattgtcaatttcctggttttgatgtcatactatacctacataaaatattaacactggggaagtggggtgaagggcacacaggntccctctgtaccatttgttgccactttctgt

SEQ ID NO: 3520 - DNA, 156 bp, Homo sapien
  misc_feature (1)...(156): n = A,T,C or G
caacactcagctttggngttagggagatgaatcggagagccttggccatttacagggcagcagctactacccggctccatccagttgttatccttgaggccctgtgttgtcagntcctgttatttttaaagagangccacattttgaaattataaa

SEQ ID NO: 3521 - DNA, 319 bp, Homo sapien
  misc_feature (1)...(319): n = A,T,C or G
tccctcgaatgtggccagtcctggtgcagtctgtcctgggacactcgggtttgctgctgctttgcctaaaatgctcttcctgggtctgcgcagggctgccgctcacttcccgcaggntcaccttccccggccttgcctgaagacacatcccatacctcagtcactcccactggaggcagactcactgtgaccagcaggaactctaggctgtgttccggttgtatccctgaccctgggattngcacctcccgtggcgtgggagctaaagagaggctggtgaattaaaggaactttcaggtttnanttctcagtggtgtct

SEQ ID NO: 3522 - DNA, 442 bp, Homo sapien
  misc_feature (1)...(442): n = A,T,C or G
ggtatttttagtggaaacaggatttcaccatgttggccaggctggtctcaaactcctgacctcgtgatccgcccgntttggcctcccaaagtgctgggattacaggtgtgagccaccgtgcccagccagcaagaccctgtttctacaaaaaatttaaaaattagccaggcatggtggcacctgcctgtaagtgccagctacttgggactgcagtgagctgcagtcatgccactacactccagtgaggtcaaggctgcaatgagctgcagtcgtgccactgcatttcagcctggggtgacagagcaagacccttgtntcaaaaacaaaaaacantgaaaaaatttttttaaatcaaagggttatggcctcaggnttncctgacattaagtaaaggngggccacagntnaattnggaggctttnatttttttccaaggtttttt

SEQ ID NO: 3523 - DNA, 300 bp, Homo sapien
  misc_feature (1)...(300): n = A,T,C or G
ctgagcagaagcacttcagcctcgtctggcatttgatgaatttnattaatgtgtgctatggtaagtctattcccctgtataattttatgggagaggccatgtgcaagtctgaatttaaaaaaaaagaaaagaaaaagccttgtgcagaattattacctactcaatacattatatatatgccagagatggctaaagcagctatatgtcaaggtctgcaaaaacatgaagaagctggcatggaaattaacacgttggtggtctgcaatgtgttcaaagttggtgtttttaatgacacttaaa

SEQ ID NO: 3524 - DNA, 284 bp, Homo sapien
taagttccaaattcacagagcgcacagtcctaacaggctgtcatgcctcagttgtttatttgtgacagtgtttcccacagacttttaattttggaatgataggatgtggtgctctggaatggtgtcccagggttttggagaactgagagtaacctgggaaagcaggttacagtgagagaaagttatgaccaggagttgtaccaaaacgcaggaaacatgatatgtatattgttatggtgcataaaaatacttacaattaaaagtcctgaacctacactacatct

SEQ ID NO: 3525 - DNA, 124 bp, Homo sapien
  misc_feature (1)...(124): n = A,T,C or G
cagggcttgagctgcggcaggggaccctcaaggggagacgcttcccctgaccagagccctgggctcacaggcagctgcacagctnaccagctacacagcccgggctctgtggaccctggcaggg

SEQ ID NO: 3526 - DNA, 384 bp, Homo sapien
  misc_feature (1)...(384): n = A,T,C or G
ggagatggagtcttgctctgccatccaggctggaatgcagtggcgttatcttggctcactgcaacctccaccttcagggctcaagcgattctcctgcctcagcctcccgagcagctgggaccacaggtgcacactgccacgcccggctaattttttgtatttnagtagagacagggtttcaccgtgttgcccaggctggttttgaactcctgagcccaggcaatatgcctgccttggcctctcaaagtgctaggattacaggtgtgagccactgcacccagcccatcttctgtattttctaacccttcccaaggtttacctcaggattgtaattgtctgtggatctgccagatttcccaacagaccatatatttcctaacagca

SEQ ID NO: 3527 - DNA, 289 bp, Homo sapien
  misc_feature (1)...(289): n = A,T,C or G
ctggnctcaagctatcctcctgcctcagccgccaaaaatgctgagattacaggtgtgagccaccatgcccaactaaggaacaaattttaatgggtgcttcttatgtgaaaaacatgggattagacactggggatagaaaaccgaatgacacatagtccttgctgttaggaaatatatggtctgttgggaaatctggcagatccacagacaattacaatcctgaggtaaaccttgggaagggttagaaaatacagaagatgggctgggtgcagtggctcacacctgtaat

SEQ ID NO: 3528 - DNA, 278 bp, Homo sapien
cataattgcaataaattgaccatttctacctcctttggctgagccctggaccttccatgtcttcactttggattaattgtgattttcctgcctcgtttctatgttattttttctaatttctgaaaaataactttgaagtcagtttctgagaagtggctttttttttttccattttacattttacatggtgctgttttaatgacaatattacttttgctagctgtgtgatgtctctgtgctgtaaaaaagtatcccaggggatctgacagacaattagg

SEQ ID NO: 3529 - DNA, 202 bp, Homo sapien
  misc_feature (1)...(202): n = A,T,C or G
gtctcttacaggttttataaattataaccctacctttctaattattctagctgagacctttcctgttccaaaagggagaagaaagaacatccacccaaaaattgagatgagaaaagccaccttcaaggtctaaaggcatttatcatgtgcttgcttccnggnnaaaaattattttccaaaccccaaactgaaaatactcaag

SEQ ID NO: 3530 - DNA, 318 bp, Homo sapien
  misc_feature (1)...(318): n = A,T,C or G
tgacagcactgtgaggcccgtgcttgtnatttccgttttatagatgaggagactgaggtacaaaggcagtaacttgctgaggtcgcgtatctggtcagtggctggttcattggaccccaggctacctaccaggtatatgacctagtctgccaacttaattttctatatgtccaaaagatgtgcttttttaaaaaataaaaaattttttttagagatgggggtctttctgtgttgcccaggctggtctcgaactcctgggctgaagcagtcctcccacctcagcctnccagagtgctaggattacagacatgagccact

SEQ ID NO: 3531 - DNA, 308 bp, Homo sapien
  misc_feature (1)...(308): n = A,T,C or G
aagaaagcncatggctgaattattgactggtatttattaggtctgaggcagatgaccaaccatcctggttttnctggttttagcattgaaaatcctgtactcaaggtaaaccaggatagttggncaccctattaatagaggcccgagtttccaaagtgtcaacagcatttncagttcaggaatctggtgatggtcattctctagtgggaacaaatgcagagagagagaaacttccctaggaagcaggtttcttgagttgaagacattntttaacaggatgcagtggtagcagccatatgggtaacagg

SEQ ID NO: 3532 - DNA, 269 bp, Homo sapien
gccacccccaccctaatcttttattttgcagatgggttctctacctggccagtgccatgttgcctgtttctttactgtaactgtggtgacaaagaaaagggaagatggagcctccatgttgaacatacctggcccccagcactaactccctctctggatatctggaacaaggaggaccttaaacttaacaataaagccaatgatggttctaccagtctccccaaagcctcaagtttaaaagccatatgaactggctgatagtggaaaat

SEQ ID NO: 3533 - DNA, 261 bp, Homo sapien
cttgaggaaggaaccttttggtaagatgtgtgcatagtgtgacagcgcattctatgaatgactgaggaactaaaagaagtcaagacagctggagtttcttgagcaaggaggcaagtggagggagatgatgcagaaccaagcactggctcccatcacaagggccttggatgccataataaggatctggtactttattctaaaggtcttgatgtctattaaaaagatctcaagtacagattttgggaaaagactgtgccagcc

SEQ ID NO: 3534 - DNA, 261 bp, Homo sapien
agtagagacggggtttcaccaggttggccaggctggcctcaaactcctgaccttaggtgatccaccctcctcggcctcccaaaatgctgggactacaggcgtgacaccgtgctccggccacagcgttatttttaataatgtagctagaaggttgcatatcagctcagaggaggaggtgagactggttgaaggtagtcgtggaagtataggaatcctgtgattcttgtgtgcctatgtgtgaactgttgaaaccaaacagcc

SEQ ID NO: 3535 - DNA, 249 bp, Homo sapien
  misc_feature (1)...(249): n = A,T,C or G
tctgtctggacatcttaaaggncaactggagtccggctttaactatttctaaagttctcctctccatctgctcacttcttacagattgcaaccctgctgaccttctngtgggcagcatcgccacacagtacatgaccaacagagcagagcatgaccggatggncagacagtggaccaagcggtacgcnacataggggcctgctgcctgacgccccgcgggacctgtgcaagcacattcaccaagtgcat

SEQ ID NO: 3536 - DNA, 256 bp, Homo sapien
  misc_feature (1)...(256): n = A,T,C or G
ggacagcaagatgctggctgcctggaatngtggggcagcacacctgagaccgagcctgtctgtaggatcccccttcacaaagcccctgtctttccggcagcggctaaatgctcactctncnttgattagcgttattattctcagttgacaaaagaggcttaaggagcttgagtaacccgcccaaggtcacgcgcaagggntgggaaccccgccatgtctggcttttgagnccaagatcttagggatcaccccattg

SEQ ID NO: 3537 - DNA, 353 bp, Homo sapien
  misc_feature (1)...(353): n = A,T,C or G
ccttgatagctcacaactgtctgtagaagaaagtgccgtctccttttccttctgtgggggctcaaggccttggcactctcaatcttatgtgtcatttcaatctttattcccttggctccctaatctggagttggcacttctgtcaaatttcatgctttgtctctgtacacagcccaaattctccatgtcacaaagacattgctcattctagttcctccatcaaaaattcctcctggtgaggtatggtgactcacatctgtaatcccagcactttgggaagctgaggcagacagattgcttgagcccaggagtttgggaccagctggggcaacatggtggaacttcanctctac

SEQ ID NO: 3538 - DNA, 219 bp, Homo sapien
  misc_feature (1)...(219): n = A,T,C or G
aaatttagagctaaaaaggcccttagagggaatctagcccaacctacattccaccctgttacttatgtagaaactgaggcccagagagggaagatgacctgccccaagtggtgagcaagcaccaacctccagactcagcagagtgagggggtaaagcagttcctgtcccacatggncatcttctttcttccacccacaaactccaggctggaagtactt

SEQ ID NO: 3539 - DNA, 305 bp, Homo sapien
  misc_feature (1)...(305): n = A,T,C or G
tatcagagaaaatagcaggtgtataaaaaggtaaacaaggctttttcagattaaagtgggaatcatgtcatggtagtgacattttggagagttcaagtttataactcagactttctttcatgtttttnttaaacttaatgtcctcctagtttcaaatacctgctttagcatgtagattgtncttgaagctatccttgaaacccatcgttgtccttcagttctgcactgcaccatcaagctgtttaattataaaaccaacttgttcctggcttccaggaaggatagttttttggaatataaagctt

SEQ ID NO: 3540 - DNA, 243 bp, Homo sapien
  misc_feature (1)...(243): n = A,T,C or G
atatggggcaatgactgagccctgtctcacccatggattactccttactgtagggaatggcagtatggtagagggataaatagggggcggggagggatagtcatggatccaagaagtccttagaaatagtggcagggaacaggtgtggaagctcatgcctgtaattataaccttcagctactaagacaggtgtggtggctcacgnctgtaattataatcttcagttactaagacagagtccat

SEQ ID NO: 3541 - DNA, 288 bp, Homo sapien
  misc_feature (1)...(288): n = A,T,C or G
gactcttttcccaggaggtcagctccaccaggataggtctttgttggttctttcaccgctgtacctgtgtacaggacagagcctggcacacaccaggtgccagtnaatatttgctgaaggaagtcacaaatagggntcagccatcattactttatcatcatgatcaacaggaaagaccactgtcctcacccaatcccctccaaaaggctttgaagcagatgtcaacattaattcactgtntcaggtgacagctctcatcctgaggccagggttngggggagctgggaa

SEQ ID NO: 3542 - DNA, 254 bp, Homo sapien
  misc_feature (1)...(254): n = A,T,C or G
ctttgctgagagtaagggctcttttcccaggattgttctagatccccagatcactggaaccctgagcatagatactaggctttagcttcctggctaccacagagccacacantctcaggtagaaaaatccctaaactggctgggcatggtggctcatgccagtaatcccagcacttttngaggcccaggcaggtggatcacctgacgtcaagagttcgggaccagcctggncaacatggtgagaccctgtctct

SEQ ID NO: 3543 - DNA, 293 bp, Homo sapien
  misc_feature (1)...(293): n = A,T,C or G
ggatatttccctaacctcactcagtcacattgtaggagccagtgtagctatggaattatcttaggaactcaagcttctaaaactatccatgtagtcaaatctaggggaaaaagcaaataaaaatagtaaaatttngccgggcacagtggctcacgnctgtaatcccaacactttgggaggccgaggcgggccgatcacgaggtcaggagatcaaggncatcctggntaacacggtgaaacctgtntctactaaaaatacaaaaaaatattagcttggcgtaggtggtgcacac

SEQ ID NO: 3544 - DNA, 203 bp, Homo sapien
  misc_feature (1)...(203): n = A,T,C or G
ctttctttcactctcctccagtcctcttgtccccctccccagagcactagtttttttgttttttcagagaaactctttgtgagtacaagcatgcatgtatcaatgtagatatccacctagaccatgtcaacacaacacaatggtagtgtactgtacacactcttctgcaccttctntttttttcacttagtataatatatctt

SEQ ID NO: 3545 - DNA, 236 bp, Homo sapien
  misc_feature (1)...(236): n = A,T,C or G
catccacctcgatgcccagcggctccactactataggggcaattacatgaccttcaaaaagatgtaccagcagaagcagaaagaactgctgaaacagtatgagaagcaagagaaaaagctgaaggagctgaaggcaggcgggaagtccaccaagcaggcggaaaaacaaacganggangccctgactcggaagcagcagaaatgccgacggaaaanccnagatnaggaatcccagg

SEQ ID NO: 3546 - DNA, 176 bp, Homo sapien
  misc_feature (1)...(176): n = A,T,C or G
cccttcgccgctgcataggagggcgaccnctgggcagcgggtgttggcgcggtatccccgccctgcccagcatctgccccacgtttcttcaggctaaactaccgggatcccgggcttnttnctaaagtaaaactngctccggaaaggccaacagtccagcggncagacgggcacct

SEQ ID NO: 3547 - DNA, 298 bp, Homo sapien
  misc_feature (1)...(298): n = A,T,C or G
gagaaacaggcggccaccaagtcgctgaagcagaaagacaagaagctgaaggaaatcttgctgcaggtggaggacgagcgcaagatggccgagcagtacaaggagcaggcagagaaaggcaatgccagggtcaagcagctcaagaggcagctngaggaggcagaggaggagtcccagcgcatcaacgccaaccgcaggaagctncagcgggagctngaatgaggccacggngagcaacgaggccatgggccgcgaggtnaacgcactcaagagcaagctcaggcgaggaaacgagacc

SEQ ID NO: 3548 - DNA, 306 bp, Homo sapien
gagcagtgtggcaaggccttcaagacgcgcttcctgctgcgcacccaccttcgcaagcacagtgaggccaaaccctatgtgtgcaatgtgtgccaccgtgctttccgctgggctgctggcctgcgccatcatgccctcacccacaccgaccgccaccccttcttttgccgcctctgcaactacaaggccaagcaaaagttccaggtggtcaagcacgtacgcaggcaccaccctgaccaagccgacccaaaccagggtgtgggcaaagaccccaccaaccccacagtgcaactgcatgatgtgcag

SEQ ID NO: 3549 - DNA, 273 bp, Homo sapien
  misc_feature (1)...(273): n = A,T,C or G
ctgcaccaccgtctgtcagccaattcctgatttcagtcattagactaagagaaagtcctggncctaataggaataagggtctcacatcaagaattcagtctttaccgggaagtcctgtacttagctagtacgtaatagagcctttccacattctattaagaagtacaggccaggtacagtggctcacgcctgtaaccccagcactttaggaggccgaggcgggatggtcacctgagatcaggagttcaaaaccagcctggccaacatggtgaa

SEQ ID NO: 3550 - DNA, 295 bp, Homo sapien
tggtgttttggaggaaatttcatcttgggctgctccccttcttaccacatctgttgcccagtatccaccacaaagcctgtaacttagcatctgcctataacaccaaacaggttgcatcagataaacaaaaattcttactgtggtaggtgaatattttagcaaacgtaaaatactataactcgaatttacaaactgggtcagaagtgctttctcatgttttggtgtctggagcaacgtgcacatggtcagaggacttcttatttcaattttcttgtttgtttatatttattttatg

SEQ ID NO: 3551 - DNA, 296 bp, Homo sapien
  misc_feature (1)...(296): n = A,T,C or G
tttaagtactactgtggtaactaatcatttttttgttttttttggtggtgtttttgtttttgttttgagatggagtctcactctgttgcccaggctggagtgccgtggcgcgatctcggctcactgcaacctctaccncctgagttcaagcgattctcctgcctcagcctcccgaatagctgggattacaggtgcccaccacaatgtctggctaattttttgtatttttagtagagacgaggtttcacccatgttggccaggctggtctcaaacccctgacctcaggtgatctgcc

SEQ ID NO: 3552 - DNA, 274 bp, Homo sapien
  misc_feature (1)...(274): n = A,T,C or G
tcctagtaaaatggctacaggaaaactgaaagaaaagtttaagcctgagtaggcatagagtaaaaaatgcataatgatgcattattaatataagagtaaggctttttttattttgagtatcctaactccaaacctagtgttcttttcactccattatcctgctgtttatagcaaatcaagacccataatgatacgtctttcatttatttcagttctgccaaggaaagagaaaataccttttaatcccnggggaaaggnttgcaatcaccacatt

SEQ ID NO: 3553 - DNA, 308 bp, Homo sapien
tttcatccccagctgtaattcaagatgaggaagtgttttatcagtcacttatgtatcagcttgattaggtagatcatggctcttttcagaatatttttagtagcttggtttgtagcctttcttagtgtcaggaaattgaaccccatcctgagagcccttgaggagctttgaagctagtactgtgagcattaaactgagcagcatctaggcaattaaaggaaatggattttatatagtttggagtggcctgagcttactttctcttgtgcttgttttggatattgctaaatcaggtgtgtgatgtttac

SEQ ID NO: 3554 - DNA, 226 bp, Homo sapien
  misc_feature (1)...(226): n = A,T,C or G
cgcgancctttgccgcccgcactgctcagcttgcagtcggnattcttcaggttccccctgaaggtttggcctnccccgtgggactctagtgggcagccactcccttggggtgtctgggacctggtggatgtgtcccagtcacatcttatggtcaagaaattgtattaggcaaaagcagtacaaaanagcctctttngtttttcctaatttccataaagcagaaagc

SEQ ID NO: 3555 - DNA, 206 bp, Homo sapien
  misc_feature (1)...(206): n = A,T,C or G
cgaacacttgacctcaagtgaacctcctgcctcagccccacaaatctctgcaattataggtgtgagccactgtggctggctacaatactatttatttatattttagnccaacagatattctagtatataagnaatgtgatgctctctgtacattgaagngttgggctaatatttgtccnggnggntacagaaattgcctgtctgct

SEQ ID NO: 3556 - DNA, 282 bp, Homo sapien
  misc_feature (1)...(282): n = A,T,C or G
cttccagggactcgcagtcctgggtgtcggggctaggtagagggaacagaaagggtctctggaggttgggtgagacccagtgactatgacctccaccaaccctgcagacccaataggtgaccagtgggaagaggaggagggaggcttcaactacgcatggacctggtgaagcacatccgaagtgagtttggtgactactttgacatctgtgtggcaggtgagtggctggntcatcctggtggcggggatggagctagggaggctgagatgcccagagagcct

SEQ ID NO: 3557 - DNA, 299 bp, Homo sapien
  misc_feature (1)...(299): n = A,T,C or G
ccaagatcgaagggagaggcttcccatttccccaggcccattgctgagatgggtccctcttctttctggcaccatggcagatcactccaagccccaggccccagatcctcactcagatcctccagccaaggtaagatgaccacactgttttggggacactgaagggctaccgtccattggaattccgctccatactcttcattatctgctaggaatggtggtattggatttccagacactggggcaagtgnattctttgaccaaagtggttcaggttgcttcttaaagagnaacctttt

SEQ ID NO: 3558 - DNA, 262 bp, Homo sapien
  misc_feature (1)...(262): n = A,T,C or G
cttgaatcatacatcattattgtccagtgaattcaagaccaaatacaatatcgggagaaaatacaaactccctgtgtttaagaataggggattataatggctcaaattggttcatttgatttctaaaaataccatgacctttaaaaattcttttaatagatcatgttattggcagtatttatataaaanccatggatttagaaaggtatatttagctttattataataggatacgttactattttgggaaatatatatattt

SEQ ID NO: 3559 - DNA, 258 bp, Homo sapien
  misc_feature (1)...(258): n = A,T,C or G
tcctggngcggaacctcaaggtctatatcaagacagtggcctgctacccagagaagaccacccgaagaatgtacaacctcttctggaggcacttccgccactcagagaaggtccacgtgaacttgctgctcctggaggcgcgcatgcaagccgctctgctgtacgncctcngtgccatcacccgntacatgacctgactcctgagcaggncctgggcccggttcagcttcccacaaggacttctctgtctggagacag

SEQ ID NO: 3560 - DNA, 281 bp, Homo sapien
  misc_feature (1)...(281): n = A,T,C or G
ttcaaaatgtaattggaacagttatctttgattagacaagcctgggaagagaatgttgaggtgcagagctcaccagccaagttcatgcccctctcgggcctttgtggctgagaagtgggacagaaagatgattaaggtaatgtgtcctccctgtagcattntccagggccgttgtgtagatatttgacttcactgacagaaaagaaaccagggagtttgtagagactgtgcatttttagtataacattttcaccatctgatatggtttngctttgtgtccc

SEQ ID NO: 3561 - DNA, 441 bp, Homo sapien
  misc_feature (1)...(441): n = A,T,C or G
ctcgtgcaatntcggcagangnncnacgaggtcaatttttccagcttctttggaaaattgggaaaaaatgtcaacacagggcttccattccctcatggcagcaatagtctggagtggacagcagctactcccttaagatggggcatgagctctttaattagatacagttcttacctattcccttttttttttcattcctaagcaattttttaaaaaattactgtgcttacttacagactagtgcttttcaaacttttatctgtagatgaagcacctgaggaatcctattaaaatgccaactctgatccagtagatctgggtggggtcngaaattctgcaattcctgaccacatcaaaggngcccatggttcttggtccaaggnccacatttnaaataggcaaaggcagtatataatttcaggtttcaacctttccaggttt

SEQ ID NO: 3562 - DNA, 441 bp, Homo sapien
  misc_feature (1)...(441): n = A,T,C or G
ctttgatgttgaagcccccacgacgttaccgccctgcaaggaagctattttggaacagaaaacttgaagagtctggtcttgcacttcctgcaacagtactatgcaatttacgactctggagaccgacaagggctcctggatgcctaccatgatggggcctgctgttccctgagcattcctttcattcctcagaaccctgcccgaagcagcttagccgagtatttcaaggatagcagaaatgtgaagaagcttaaagaccctaccttgcggttccggctgctgaagcacacgggtcttcaacgttgttgccttnctcaatgagttgnccaaaacccagcacgacgtcaattccttcgtggtagacatnagcgccagacaagcacattgctgtggtttttttgtcaataggngtttcaaaggaantgnacggaaatncccggg

SEQ ID NO: 3563 - DNA, 290 bp, Homo sapien
  misc_feature (1)...(290): n = A,T,C or G
aaaaatagaatgtgtatgcatatatttntgtgtatatgtatatatgngtgtgtgtctatatctctatctatatagacatacacacaggagttattggatttagagttactgctaaccccagaacagaatctgttcttttacctttgagtcttttcttttgtttacctcttttcatctcaaagtgggaaagctccagataacatggtactttaggagtgagtgtctaagcaaaaccancccaatgcgaagtattttnggtgagaactgngaggtgggagatgattntgagg

SEQ ID NO: 3564 - DNA, 285 bp, Homo sapien
  misc_feature (1)...(285): n = A,T,C or G
aatagctatactacactaagatgctattgtaaacagttcatgactagattttgattcggaaatctatactgaccaaggattaatcttaaggattgtataattcattaaagctgtggtctttccatgtggagactgatagaaaataattttgtcccaagtcttatttgctgactttttctgtcatgagtgagattgttgaacaaactgaatatatgggctatagcaagtagctttacagtacagatcttacanttaagttttgctnttnnttaaagtgttgtacca

SEQ ID NO: 3565 - DNA, 364 bp, Homo sapien
  misc_feature (1)...(364): n = A,T,C or G
aaagttgtcctgaagaaatcagtgagtttaatgtcatcncattctcaagtgaattttgagaaggaaaacaaacattggagactgtctgaacaagagaacacattggcacagaggctgtgattagcacatgctgataaggaatagcattctttccccaccggctcagtgtaaattttgccattcactttctttaccagctagtgccttgagagctaaatgtcatggacctgtgttaagtttgtaatgttaatttgccccctttcttcataaagtccacantctttttcctttcatttcataggccnttncccnccttggccaaaggacaaaactttcttaggggtttccccgttgggatttttng

SEQ ID NO: 3566 - DNA, 283 bp, Homo sapien
  misc_feature (1)...(283): n = A,T,C or G
cttgaggtccgtagttgagaccagcctggccaacatggtgaagcctggtctctacaaaaaataataacaaaaattagccgggtgtggtggctcgtgcctgtggtcccagctgctccggtggctgaggcgggaggntctcttgagcttaggcttttgagctatcatggcgccagtncactccagcgtgggcaacagagcgagaccctgtctctcaaaaaagaaanaaaaaaaaaatgaaagngaaaagaaangaaagaaagangtgaaggtttgtcagtcaggg

SEQ ID NO: 3567 - DNA, 389 bp, Homo sapien
  misc_feature (1)...(389): n = A,T,C or G
cagagaagcaccttataggaatataganctttgacatttacaaagttctttcacatgcattgttttatttatcctcacaataactcagcaaagtaagcaggngccacagaaagatgaaatgctttggccaaaggagcacagctagtaagcggcagcactgcggctagagtccggattgtcggcctgtggattgagtctgccaaatgaatagtgatgcaccctaaacctacctcaggttaaagtttgagtaatgggtctaagatatgattaantaacactgaagttaggaaaatnatttgggcctaggtcggttncacaagangaggatgtaagggcttttngtttattttgaaaactgccccactttttaggttaagttagggccagga

SEQ ID NO: 3568 - DNA, 199 bp, Homo sapien
  misc_feature (1)...(199): n = A,T,C or G
acagaaaaaggaaataattaacattaaccaagcccaggtaacagacagagaccttttctctgtaaatattttttaaaaattggctgggcatggtggatgtgcctgtggtccagctattcaggaggctgagtgggaggntcactggatcaccaaaggtggaggctgcaatgagccataatcgtgccactgtcctccagcc

SEQ ID NO: 3569 - DNA, 328 bp, Homo sapien
  misc_feature (1)...(328): n = A,T,C or G
ttgaccttgtgatctgcctcccaaagtgctgggatcacaggcatgagccaccacacccggcttaaaagcaattttaagttaagattacacaatgatcatctttagtatttcctcccaattaaggcatcttatctagattttactttataggaatggtcacattttgtgtctgggactaataacatgctgctaccacccccttctaaaaattatctcatgaaaagctagtgattaattctcttactgaggtggttatcttgtctgtccattaacctctgaactcttcttggncatccatgtgggaattagaaagcaggcagagccaagg

SEQ ID NO: 3570 - DNA, 313 bp, Homo sapien
  misc_feature (1)...(313): n = A,T,C or G
cttgaccagaaaagagttctttctctaggtgttctgagagaagtttgtaaatttggatagtacattctatcctgataaaaccaccttgctgtggtcttgatgtacaaaaaaaaattttttttttgagacagagtcttactctgtcacccaggctggaatgcagtggcgcaatcttggttcactgcaacccccgnctcctgggttcaagcgatcctcctgcctcaacctctcaagnggctgggactacaggcgtgcaccancacaactggntaattttggtatttttngtagagacagagtttcaccatgttgg

SEQ ID NO: 3571 - DNA, 170 bp, Homo sapien
  misc_feature (1)...(170): n = A,T,C or G
cactctgggggagctctngcggggaccacgggccactgctcacccactggccccgaggggggtgtagacgccaagactcacgcatgtttgacatccggagtcctggagccgngtgtcccagtggcaccactaggtgctnnctgcctccacagtggggttcacanccaggg

SEQ ID NO: 3572 - DNA, 343 bp, Homo sapien
  misc_feature (1)...(343): n = A,T,C or G
attatttgctagctgtgttgcttaactttaactccttcttggcccacctctgcaaataaaaattaagtataattatactgatctcagaggtgtcttgatagaataaaacaggatgtttagctgaagcatactactcttgagaaagtaaaaggaaaaataattatctactagaaattattaacactcaagtgcagttttagaagaaacagacaaaataaccttagtgtttgtcagaatgtttggttctggagaccaaaagtcataatccctttttaacccttnaaatagtctggagtcactgtggagttgnctaccccagagnttcaccagncatctttttncc

SEQ ID NO: 3573 - DNA, 249 bp, Homo sapien
  misc_feature (1)...(249): n = A,T,C or G
ccaacctttccctcaccccctcccacccccagccccgactccagccagcgcctccctncaccccaggacgccactcatttcatctcatttaagggaaaaatatatatctatctatttgaggaaactgaggacctcggaatctctagcaagggctcaacttcgngaaatggnaacaacagagntgcanaaaagctataaaaggcaccccnccccctttaaaatgggtttttttttttagggnaaagttag

SEQ ID NO: 3574 - DNA, 196 bp, Homo sapien
  misc_feature (1)...(196): n = A,T,C or G
attttaagtcgttttatgctttaaaaatatttatatttaatataaacaaaagaaacttacttttaaaactcttagataaatttttctnctgcttgcagtttttcacttggctagtgtggagaatgaaaaatgaagtgttcttaaaanaantcaganatggaagtgaaagttaatgtcanttgatgtgttaaatcca

SEQ ID NO: 3575 - DNA, 256 bp, Homo sapien
  misc_feature (1)...(256): n = A,T,C or G
aaaagccagagggggcagagaccactgctgctaccaccaacggcagtctcagtgacccgtccaaagaagtggaatacgtctgcnagctctgcaagggagcggcccctcctgacagccccgtggtctactcggacagggcaggntacaacaagcagtggcaccccacctgctttgtgtgtgccaagtgctccgagccgctggtggacctcatctacttctggaaggatggtgcaccctggtgcgggccgccattact

SEQ ID NO: 3576 - DNA, 254 bp, Homo sapien
  misc_feature (1)...(254): n = A,T,C or G
ctcagacactcgatggatccacccacattcactttcaactttaacaatgaaccttgggtcagaggacggcatgagacttacctgtgttatgaggtggagcgcatgcacaatgacacctgggtcctgctgaaccagcgcaggggctttntatgcaaccagggtccacataaacacggtttcntnttaaggccgccatgcagagctgttgcttcctggncgtggattcccntttngaagctggacctgggnccagg

SEQ ID NO: 3577 - DNA, 353 bp, Homo sapien
  misc_feature (1)...(353): n = A,T,C or G
ctcctgccttagcctcctaagtagctgggattacaggcatgcatcaccacacccagctaatttttgtatttttagtagacacagggtttcaccatgttggccaggctggtcaagaattcctgacctcaagtgatttgcccacctcggccttccaaaatnctgggattacaggtgtgagccactgtgcctggcagtttccttcctttcttatgtcttggatgagtcacttgacttttccaagccttggtttccttgctgggaaaacaggaattatagccggatcaggggatggtcatnagggtgaaataagatcanggatttaggggcagagcctcagggggccaggttgctcc

SEQ ID NO: 3578 - DNA, 342 bp, Homo sapien
  misc_feature (1)...(342): n = A,T,C or G
atttgagtcattctgtgacctataaagtgtttttgtaactatctaattctaatggttgcaaagcaaagcacatgactgtaaaaccaagcaaggtgttttagtaactttttccctgaatacttggtagtttccattgatactattccaaaacaaattctgctgttttaggttgtatatttactttgcttttgttctaagnaaaagccaaggactaaatcaacttgtttttgtgtttcagtaatcagtttaaaatctaagatttnttttttaaattagnctatttaattgaagtgccatgtaattgtagcntggctagtggttaatgtttaataggactggttc

SEQ ID NO: 3579 - DNA, 238 bp, Homo sapien
  misc_feature (1)...(238): n = A,T,C or G
ccattttatatttaaatggatttttcctattaaatattaccatagccttgtttttccaaataggatacatattcaaacatacaacaatgcagtacaaagaaaagagtttttaaaaactcactaactgttaagattttttgcagacctctactttagatctttttttaaattacatattttgtgctgcggtctatttgccggttgntttaattttttccctcagtgatataatcaaatg

SEQ ID NO: 3580 - DNA, 265 bp, Homo sapien
  misc_feature (1)...(265): n = A,T,C or G
caaatgcctccccgtgcacaagtccttggagcagccccttggcccaacgcaaaggcgtttccagaaagtccccactggcggaggaaggtagactgaactncagcaccagccctgagatcttccgcaagtgtatggnttattcctctgacagcagcgtcactccctctggcagcccctgggtcccggaggcgtcgccaagccgagatggggacccaggagaaaagncccggttacgagtcccctggtttttccgggaagatgcaga

SEQ ID NO: 3581 - DNA, 178 bp, Homo sapien
ccggtgatgaaagagacaactttgtacaaaatgatttcagggaccctgatgccccacaaccctgcggcaccacagagccgaccacaagctccagtctgtgtgggatcgatcatgaggcgctccacaagcagattatggagtacaaaagggaggaaaagattaaagggctcgggggcct

SEQ ID NO: 3582 - DNA, 227 bp, Homo sapien
  misc_feature (1)...(227): n = A,T,C or G
ctagcctggttctgaagtgggcaggggtgctgccagagccctctgccccttatgttgagaccctgctttcaggacaggccagccgttggccaccatgtcacattctgagtgagtntcacaggtccctaacaataattttctgatctggagcatatcagcagaatgcttagcctcaaggggcctngcagctgtaatgttttgatttatgatgagaacttatcccgagg

SEQ ID NO: 3583 - DNA, 280 bp, Homo sapien
  misc_feature (1)...(280): n = A,T,C or G
cttttttcatcctaattcagtaagttctcaggcttccaagtcaaatggagaagtaaagtgaggcaacagattcaccataggctttttgaagcatcaaagggaaatataactactgatagtgaaagcccagccatgacccagatgggcttacccttgacaggaactggggaccaagagcctcccaattgccctaactcctgtcattggtattagcaatatctggncagatttagaaccagtcatggaaacttgtgctcaaactaaaagtaggtcatcactt

SEQ ID NO: 3584 - DNA, 251 bp, Homo sapien
  misc_feature (1)...(251): n = A,T,C or G
tgaccctcagatataattctaatatcaccagttggcctttcttgacatctcttttagtcttctctctttttcagaaatgtgagttctttgcgaaatgttttgaactgaattttaggtcattaaattgtgagttttggaatatagtggaagggncatgtgagttttttagattagtagaatgacaatcatttcaatttcnttaagtattttcatcttctgtttttaggaatggtggactcatctttggttaa

SEQ ID NO: 3585 - DNA, 240 bp, Homo sapien
gtggagaggaggagccaagtggttctagaacagtgtccttttgcctagaatgtccctacagcaggagcagctgggcaagactcagaagtcctgattataatcacagattaaggtgaccaactatcccagtttgcctaggactgttccacttttagaactgaaattcctgcaacccagaaaacctctcaatcttgggcacatcccaatcagctttgcaggctttctctatctgacaatacc

SEQ ID NO: 3586 - DNA, 243 bp, Homo sapien
cggcacgagcaaacatttatccattaaaatgtatttctatttagtatattcaatatacatattttattccattgtggaataccgtgtagaatgtttatgatttgaaaagatgctttaaatgaaagccctttagtctgtactgaatcctttaatcatctccctccatctttttttttttttttttttctggtcacagcgattgaacaggagaagcaagcaggcgaatcgtaatgaggcgtgcgc

SEQ ID NO: 3587 - DNA, 301 bp, Homo sapien
  misc_feature (1)...(301): n = A,T,C or G
ctagctcagtgctgagggcttggtatatgcctactgattaatagtgttcatcattcactcatcaaatatttttggttccagtatgtgcaaggcctgtactttgtgctatgggggaaaaagtgacacaaagccaaccttcaaggagctagtgagcccaaaacaaaaattagcagggatttttgtgtgttatgatgactgctatatcccatgtgctcacagagcttacattcttgtcagaggagacagacaataataagataaattgtaaaaaatagnctatgttagattagtaataantact

SEQ ID NO: 3588 - DNA, 103 bp, Homo sapien
attggaggcagacttgatatttcagagttgcatagtaaaagcaatttgttaatttttgtgtactttcagataaactattacaataaagaaaggagcagaatgt

SEQ ID NO: 3589 - DNA, 365 bp, Homo sapien
  misc_feature (1)...(365): n = A,T,C or G
aatttattgtatgaaagtaatacatgtttccaaatgaatgatacagtagtacaatcagttttataggaatgtatgtccccttgctattattgggtattgatctttcaaaatttccctcgtttagaatgcagaattatagatatatcaaatataaatacacatgtacatattataaaagaggttgtcttctgtggaaggtttttggaattacatctgtgtatttttttgaaatttgccaaattttctactaggagtctacattttataagggaaggaagaaaaggtttgttttgtttgtttggntttttgagacagcatcttgctctgttgcccaggctggagtacagtggtgngatcttgggntc

SEQ ID NO: 3590 - DNA, 431 bp, Homo sapien
  misc_feature (1)...(431): n = A,T,C or G
gaaagaagcgtctgtggaggaagttttacaagcgccctcctcatccatttgggtggtgttgcccatatgctacatgtctgtggaccactatgtgtgtttaaagctttttagtaaaacgttactaaaaactatgactcactgtggtgaaaaaggtggcaaaacagtgacaacagtgagtttgctgctgttattatctatgtnagtggtcacgaaagcacaggtagcagctgaggcaaggggagggaagctaggaaaagaatcgcagtnagaaagggatgagaacttccatgtctgtgtttaatgtctggttttatggataaactttgaaactcaagaggcacagttgggnaatttgtaccttgccactttgnttggcttgagagagagaaagctgtncccactgaangtgttgactgtctttnccattcagg

SEQ ID NO: 3591 - DNA, 375 bp, Homo sapien
  misc_feature (1)...(375): n = A,T,C or G
tctaagtagaactctctcagggtttctagaagcatttttgtttaagaaaatattgtggggagagcgggatttttaaatggtggagctcatggtaaacaaaattatgtgtgcaaaatgttaatagagcctttctaatattctngtgattaactctggtgacagttggctgagtgttcttgtttctgcaacgcctgtctttggaaatgtgatagggggcttattgagcagactgcaactggaaatgaggaatgttgacttgaagtctgtaattcacttatacttttctctaaatcctagacttgagtcactcaatgtgagataagtactgcacataaaaatgcaatggatttcacgttatacagtggngtgggtaag

SEQ ID NO: 3592 - DNA, 237 bp, Homo sapien
  misc_feature (1)...(237): n = A,T,C or G
tgtaactagacaggtgatacgcatttncttgccacattaagggaaaatggtgtcatttnntgcagaaaaacaagatacatttnnttctggcctaaatgaatatttatgtgcaaacataggcaactgttaaaggctggaattttcaaaagatccaaacagagacttcctgcatcttctgcctttccaacagaagcggtgatcgtctaagtatgagcctgtggcttcctttgtgcattt

SEQ ID NO: 3593 - DNA, 187 bp, Homo sapien
  misc_feature (1)...(187): n = A,T,C or G
ttcaaaggaaaataaagcanngtaaagagccagagaatgacagtnagctgtttttcacatgagtcatcagaaaaggcctctttaaagaattgacatttgaacagaaaaacgaatcaagggcgtcaactgtttattgcttttattgcttaccatttgaccaagcaattctacacataggattcaccct

SEQ ID NO: 3594 - DNA, 192 bp, Homo sapien
  misc_feature (1)...(192): n = A,T,C or G
ctcatctgtaagatggnnataataaataccactttgctaggcattgggaggatgaaatgatttcacacatggaatactccagcactgtgataaattccatccattcattctgctgccacagatcaagaggagttgaatgatagtgagaccatcattcacntgagccaatccttcccctagtgctacgattct

SEQ ID NO: 3595 - DNA, 346 bp, Homo sapien
cttagattaaaccagttttttcatatgtggttcttacataccacctccttcagaattataggggagcttatttaaaaattaattatccacttcatgaataactttaaggtggcatccacacatccacattcttacagatactgaggtctgatgaccaaattaattcatctttcttaaatttcagatacccgagtaatgctttggcaagtattcccagttatgacgggattctaggttcagcctaaagtcctgatgaagttggtgttctataaataacagaagtacaggaagcagagttgacattcagttgaagaacttttcactgtagaaggggttttggttttcc

SEQ ID NO: 3596 - DNA, 297 bp, Homo sapien
  misc_feature (1)...(297): n = A,T,C or G
caccactgcactaaagcctgggccacagtgcgagactccatctcaaaaaaaaaataataataaaatttaaaaaaaaggcaaganggagcatctgtttaaatttcaaatagagaggaagtnaaggnttngcaggngaagttaatgagtggatatctaaggtttcctgtcagtggtgaaatttgagttannaantctgtgataggcagaatttctaggaatgacccccaagattccacgtgtcctgatcctatgaatatgatgtgatctcggtcccctggattgtattctgttatatgg

SEQ ID NO: 3597 - DNA, 349 bp, Homo sapien
  misc_feature (1)...(349): n = A,T,C or G
ctgacttggctatatttatgttggaaaaaagctctaaaaccagaaataacactagaggtaaagaagggcattatataatgctaaaaggataaatttaatggaaaaatatctaaaatttttatatatgtaatagtataggtctaaaactaaaaggaaaggttgacaactattataaaaagttaaaatagacaaaaccacaaccntagatcagtgcccctctttcagtaactagtagaacaaacaggnaaaaatcagcgaggntaaaggtttgaacaacacagccaccctgacctacttggcggacatagancacttcactcaataatttcagggtatatatgcttttcca

SEQ ID NO: 3598 - DNA, 307 bp, Homo sapien
tgtaagtgcagagcctgcctcactggtaagggaaaaccttggcttgggaggccagccctggcccttgaaggggttggctgtgcccagcccacctggctgcagtgggcagctcatgtctgtatctccaaagtgatgtttgtttgcaaaacaccggctgaactgagctggtgttgccaactcttggcagcactgggccaaaccgaccacataccatgagctcccaaatggcgtgtgctcactgtgagacgtcctgccacaacccacaggagacggaggcagttggcatttggaaccattctattcagat

SEQ ID NO: 3599 - DNA, 402 bp, Homo sapien
gtaaaaatcaatagatacaatgaaagctctttggggtcctgagagcaagaaggttgagaattgctgccctagacagggacatggcccgcagcaaatccagcctgtggttttactggcacaaagccccacctcgtgccactcccactggccagcagcagaggagctgggcagatgactctgtggccggggccagaccctctggttctttatggagtttgccgccccccaccctggactggccaagaccctcttactgtccaaccaagcacaacagaactgtccccctcctgccctgccgccagtctgtgtgtggactccggaccatcgctggaccttgccaagtgtcctctcggtaacaaagggctggagtctgtgagcgtcctctgcgtccctgacccagga

SEQ ID NO: 3600 - DNA, 313 bp, Homo sapien
gcttttaatattaaagtaatagaatattgaagcaatattgtctagcactctgctggacattaagtccgcgggaggagaagtgaacaggaatcgattctttgtcttttaactgcccttagttaggagatgttaaaatacttggcacctctggttatatgtatgttatgtgtgttctcccccctaaaatttctaagcacatttattcacttttaaaatgaatctttaaaagattatagttagtagttatagttaatattctatttacttggaaaaatgtgaataaatggatcttcaaaagattcattttaaaaat

SEQ ID NO: 3601 - DNA, 313 bp, Homo sapien
tcaagtcctattgcttgaaggtcgaccgacatctactggatcatctgtcactcgggtatctaaacaggtactgctgtgccctaaaatagtcgtcttacgctgtcaatgcatcaacatttctagttatttctaccggagcaagttaaactacctggctatactccacaagcggcttgaacacacactctcactaggcgccttgcagtttctggagcccaaccgcatcttctcacatcacgtgcccattatgctgcagcacaaatccaagcgactgcagtgctctcttgaccgtctcaaggtgtttgacggcatg

SEQ ID NO: 3602 - DNA, 380 bp, Homo sapien
gccctgccaatagccacagccttcacggagtatgtccacgcctacttccgtggccacagccccagctgcctggctcgagtaactggggagctgaccatgaccttccctgatggcatcgtgcgtgtgttcagcgggaccccaccaccacctgccctcagcttccggcttgtacacacaaccgctattgagcacttccagcccaacgccgatctgctgttcagtgacccctcccagagtgaccctgagaccaaagacttctggctcaacatggcagctctgaccgaagccctgcagcgccaggcagagcagaaccccactgcctcctactacaacgtggtgctgctgcgataccagttctcccgcccgggtccccagtctgt

SEQ ID NO: 3603 - DNA, 332 bp, Homo sapien
  misc_feature (1)...(332): n = A,T,C or G
gagcgatgtgctgcagcctgatggccagccggcgtaagagtgaagccaagcagatgcccagagctgcacctgccactcgggtaacacgccggagcacacaggagagcctgacagcaggcggaacagaccttaagagggagctgcaccccccagccacctcccatgaggctcctggcaccaagcggtcaccttctgctccagcagccacctcctctgcctcttcttctacatcctcatacaaacgggcaccagctagctcagccccacagcctaagcccctaaagcgtttcaagcgagctgcagggaagaagggtgctcgcccgtncangggc

SEQ ID NO: 3604 - DNA, 471 bp, Homo sapien
ctccgtctcaaaaaacaacaacaacaacaacaaaaaaaaaacacacaaaacagtgacttaattataattcaaaataattattagaccaagattttcactatttttaaccctaataacaaggttctagtcttcatttctctcctagttgaatgactttgggcaaatcttttcatatctagtggctgttttctcctttgtaatgaagatatgtcaaagtttatgagtacaggcttatcttgttttattgtgctttgctttattgtgctttgcagatattgcattttttttacaaattgcaggtttgtagcaacccagaatcaagtaagtctgtcagtgccgtttcccaacagcatatgcttacttcatgtctttgtgtcacattttggtaattcttgcaatattttaaactttttcattattattattatctactatggtgatctgtgatcagtgatctttgatgttactatg

SEQ ID NO: 3605 - DNA, 356 bp, Homo sapien
tgaatgagctgatcaaaaccatcatcatccagcatgagaacatcttcccaagccccagggagctggagggccctgtctacagcagaggaggaagcatggaggattactgtgatagccctcatggagagactacctcggttgaagactcaacccaggatgtgaccgcagagcaccacacgagcgatgacgaatgtgagcccatcgaggccattgccaagtttgactacgtgggccggacagcccgagagctatcctttaagaagggagcatccctgctgctttaccagcgggcttccgacgactggtgggaaggccggcacaatggcatagacggactcatcccccatcagtacatc

SEQ ID NO: 3606 - DNA, 360 bp, Homo sapien
ggcttgaatgacagcccaaatctagagaaggcactcagcaagaccaaccaaaagaaaagctgtgtcgtggtatggggccaccgtgatcagctacctggggcaggatgcttctgagacaggcctttcaactgcttagtgttagtatgtccttgcttatgaaaatggggacactcatcagtacgttaactactaaagaggagatggttctccaaccactccataaaatatgtatgttctgttgttcctaaggctttgataatatcctgtacagattttggtttagttttgcaaatatattgctaataggtcactcttatagattattgcttggcccttcaaactcagtacacacacactgag

SEQ ID NO: 3607 - DNA, 449 bp, Homo sapien
attcggcacgatgcagacccggggcaggggcggatggagcggaacggctaggggtcttgagaagcaatggccacagaagcccctgtgaatatagcaccacctgagtgtagcactgttgtcagcacagcagttgacagcctcatttggcagccaaactcactaaatatgcacatgataaggcccaagtccgccaagggacggacaagaccgagtctgcagaaatcccagggcgtggaggtgtgcgctcatcatataccatctccgcctccagccattccctatgagttgccaagcagccaaaaaccaggagcctgtgcacccaaatctccaaaccagggagcttctgatgagatccctgagctgcagcagcaagtacccactggggcttcctcttctctcaataagtatccagtccttccttccatcaacagaaagaacctggaggagga

SEQ ID NO: 3608 - DNA, 464 bp, Homo sapien
tgatctttccacccactcccctttctcctcttctccactgagaataatctccctgtcttttattcacttcattttctatactcctatttatccattttgattgtttatacctactatttgtattcgaatgacttcatttttcccaccctgtgggtcagtttgtgacttttggaattttccacaggtacctgtacaacttgatatttgaaaacaggattcatcaccatatatccccagcccccgttttctttttaaacaggcctcattgcgtaattcctttgccctgaaaagtgtcaccacctttatatttttaccccagccttggagttatctttttctgctctccattctccatgtccaaaaacttgctgtcagtccagtttttaatcagttttctccttgaggcttgatctcccatttctctcatcccattatagcttttcatgtagatctgaggcccaggt

SEQ ID NO: 3609 - DNA, 397 bp, Homo sapien
ggctgctggcctgttcgatgaccgcaagaatgagctggcccacttggcaactcatggcccagagaatccaaaactggagatgctggaaaagatcctgcaaaggcagttcagtagctctaacagccctcggggtatcatcttcacccgcacccgccaaagcgcacactccctcctgctctggctccagcagcagcagggcctgcagactgtggacatccgggcccagctactgattggggctgggaacagcagccagagcacccacatgacccagagggaccagcaagaagtgatccagaagttccaagatggaaccctgaaccttctggtggccacgagtgttgcggaggaagggctggacatcccacattgcaatgtggtggtgcgttatgggctc

SEQ ID NO: 3610 - DNA, 547 bp, Homo sapien
gacatggctgcagcttcccagggaggagcccaggggcatctccaacactcagcctttccctccggacccttttaaaagattcaacagcaccgtctctctccacttccatcctagaatgcagaatctgcaaagtgccttttgtaaagtttcttaagctatattctaatggatatgggctgacattaacaaggacccatcccagccaaaatgaatcccagggaagaaaaagtaaaaataattacagaggagttcattgaaaatgatgaggatgcagacatgggaagacagaataagaactcaaaggttcgaagacagccaagaaagaaacagccaccaactgctgtccccaaggaaatggtgtccgaaaaatcccaccttggcaacccccaggagcctgtgcaggaggagcccaagacccggctcctgagtatgacagtccggagaggcccacggagagagctggttgttaaaagagcctgggcagggcaggcacggtgactcacgtctgtaatccagcactttggaaaggcaaggcgggtaatcactt

SEQ ID NO: 3611 - DNA, 424 bp, Homo sapien
agtggatgagctggtttattgctcaggatgactgaagtctcaactacggaaccatgttacattcgagcagctgagacagcagctgaagccaggtcctcccgaagcttcaggaagcctgcttgatgctccacggctgagagtgacagagaatccagaatagcttatggatgggtcagttctcgtctcaccacactcccaatatccagcttcctggactgttgtgtagggaagagccacttttttcagttgaagtctgagttcttatgggccatgaccaaggctgctgcttcctcaaaaggcacgaagggggccgcgtgcggtggctcaggcctgtaatcccagcactttgggaggccaaggcgggcggatcacgaggtcaggagtttgagatcagcccggcaaacatggcgacaccctgtctcta

SEQ ID NO: 3612 - DNA, 413 bp, Homo sapien
ggattaggcccctggggcccctgctgctgtgccacctgcccacccaggtccccacctcctgcagcccagagggagctctgcatgtgggacactccctgctggcacagcacaccagatggacatgttggatgggctgtgctttccccccaactgtggccccccaaggaggtccccaagatctccaccccagtcatgctgatggggccttcagcaccagctctgtcctgggtcgatggaggaaatgcatacgccccatggccttgcccttcctggggcatcccacatcgtgccgccgacactgtgtgcccctgggggagtgaaggggccaggggcatttgacccccagcttaggctggctatgcctgagcctgccaacccagtttcagacactcatccttcatccttcctgctgc

SEQ ID NO: 3613 - DNA, 511 bp, Homo sapien
cccagcaacatcctgtatgtggacgagtccgggaatcccgagtgcctgcgcatctgtgactttggttttgccaaacagctgcgggctgagaatgggctcctcatgacaccttgctacacagccaactttgtggcgcctgaggtgctgaagcgccagggctacgatgaaggctgcgacatctggagcctgggcattctgctgtacaccatgctggcaggatatactccatttgccaacggtcccagtgacacaccagaggaaatcctaacccggatcggcagtgggaagtttaccctcagtgggggaaattggaacacagtttcagagacagccaatgacctggtgtccaagatgctacacgtggatccccaccagcgcctcacagctaagcaggttctgcagcatccatgggtcacccagaaagacaagcttccccaaagccagctgtcccaccaggacctacagcttgtgaagggagccatggctgccacgtactccgcactcaacagct

SEQ ID NO: 3614 - DNA, 545 bp, Homo sapien
tcaggtctctttttactagatcatggctgttcttcccacctcatccctctgaaaataaaaatgtattgccctccccaccatccatcatagccaggccactaacttgacttggtgcaagagattcttgctgcgaactttgtagagccagtgtgcagatagaatttggctttgagggttcctgatggctttttagtctttaactgtgtgtgtaccagtctcacatttggcccaaacctcaggattctccctctgcctgtcttacttcatggtactagaagaccttcctcgccactctctccacatgagagagtcagctgccctttctcctgtgcctctgcaggaagaactctcttgcatggcacatctcagctcctcattgagggatagttttctttgataagaaacctggagtccatttactctgacctctctttaaatctatatccagagccactagcccaggaaaaacttgggtgacccgtaatttctcttctcctgctgtccttttgctcttacgccccaccccaactccccttaaattttac

SEQ ID NO: 3615 - DNA, 511 bp, Homo sapien
tgccattaattaaagcatttgataactagaagatcatgttttccaatcaatccatgacgtgtttcctttagaaaaagagagactgaagagaaaatacactcaactcttttcagccttttagcaaagtcactactgtaaattggtccacttttttctttcaaagaaaatcaagctgctatcttcaaggccatcttctcacatgattactttctccagatagcttttcattttccagggtgcctcaaataaagagtgtgtgtgtgtgtgtgtgtgtgttcccacccactaaatctcctgcttggcagagattgtttatgatttctgtgaaagggtctttttgtccctttttgtctaagaagctttttcattacaagcctggaagtcaaggtaagtgccacagggattcgaagatctcttggcttttctccgatgttcacattatctcccagaaaaatgaagtcctacattccctgcaatcagttaatagaagtgacagctgtgagagcttcaa

SEQ ID NO: 3616 - DNA, 435 bp, Homo sapien
ggcatccctggtctctcagggccagttggaggtcccaggaggcatgttcttgatgcctgtggtgcctgaatccaattaactgaattctgaagagtgcatggggtaactgtctcagcctttctcctgtctctgcctctgtcctctgctccaaatcataaaatctcagagctagaagcactttcaagatcattccatccagcgcattcaatttgcaagtttaggcgttgagttccagagagggatggtagcttgctgaggtcccagtcaagcacacttgccattgcctcagctttcccctaaacacggtgtctgtggtcagggttggtgaggaggagctttcctgttttgcctctccttcttcccattggctacacccatctctggccctgctgataccgattcccctgacatttcaggctaagcagcaggaaaggg

SEQ ID NO: 3617 - DNA, 460 bp, Homo sapien
gcaggggctgcagcttctcaggggctgtgacccacaccatctccacggcgctgctggcctttgagctgaccggccagatagtgcatgcactgcccgtgctgatggcggtgctggcagccaacgccattgcacagagctgccagccctccttctatgatggcaccatcattgtcaagaagctgccatacctgccacggattctgggccgcaacatcggctcccaccatgtgagggtggagcacttcatgaaccacagcatcaccacactggccaaggacacgccgctggaggaggtggtcaaggttgtgacctccacagacgtgaccgagtatcccctggtggagagcacagagtcccagatcctggtaggcatcgtgcagagggcccagctggtgcaggccctccaggctgagcctccttccagggctccaggacaccagtgtctccaggacatcttggc

SEQ ID NO: 3618 - DNA, 451 bp, Homo sapien
gtccttggtcatgtcaggagggacaggacgttgtatcaatatgtctggttcctcattaaatttgcaactactcttttagcctttattgtttattttctgactctgtttttttttttctttagccaactcacgccatgactctacttttgcttctatgtttattagttggcattctgtactaagacagctttacccttcttgcctacttatttatgtcagtatgagctcagaagttcttattcaggggcttataatacagtactcttattattttatggttacacagtcccaactttgtcctgtgggaaccctttcaggctggctcttatgttctggtgacataatctcatccttctttaagtactttctttctggtattaacaatatgctccagactcattcttcccgagccccagccccagaatcagctttttctctaaagagccctggt

SEQ ID NO: 3619 - DNA, 471 bp, Homo sapien
ggccctgtgggaggagtctgtgctcctggaccgcaagagcggcaagcagtactccatcgaggccgccctccgctgccggcgcatctctaaggaggagtaccatctgtacaaggacggccacctgcccatctccgagtttgcgctgcttgtagctggggagaccaagccaagctcctcactctccatcggctctatcatctccaagtccccgctcgcctccccggccccccagagcaccagtttcttctctcccagcttctctctcgggctcggtgatgacagcttccctatcgccgggatctatgacacaaccacagacaacaagtgcagcatcaagacggccgtggcaagaacatgctggaccccatcactgggcagaagctactggaggcccaggcggccacagggggcatcgtggacctgctcagccgtgagcgctactctgtgcacaaggcgatggagaggggcctg

SEQ ID NO: 3620 - DNA, 131 bp, Homo sapien
gaatttgcatctgcacagtcagcagagataacaagtgttgaactgaccttgccacatgcttagtgagtgatttgtaattaagtttatagactcagaaggtatattaggacatttggtatcagtagcagagc

SEQ ID NO: 3621 - DNA, 208 bp, Homo sapien
cctcgtcgatgggttcttcctgcagggcagaagggcagattgttaaaggggctgcggccatgaccaccctggtcccatctccggcagtgactcagacccacactgtgccgtgcagctgtgtgcactgcaacccgcttgacggcgcactgctcacttctggggggccctttcagaggcacttttaaagcaaataaaacatttattgttc

SEQ ID NO: 3622 - DNA, 452 bp, Homo sapien
agcaacatgcctgcaaaacatatgataaaaaatacctctgtaagggtttttatttgtccaccttcgatggaaggtaaacatggctgatcccagccaagatgaaacaatagccctttgtctcctcagaacaacctatctccaactctttgtccactgttcttaccccaattaaaacaagaaagcatgtgctaatccttttttaatttttatcaacctgccttggcctcctttcactgtactccattattccttctgtgatgttctaccttcttcaccttttgagaccagggtgagttgggagcagtttgcctaccttcttttagaatctggggcttatcttttagtacaagccattgaataagcctcttccttttttttgctcaaacattccacatccttgtggattcccctgcattgtttgttttatataacatttgatatttgttgtagct

SEQ ID NO: 3623 - DNA, 153 bp, Homo sapien
ctgaagtgggagctgacttctctgttgcaccttcaccctacttagggacactaagggttcctgcctggagaatgaaaacaactccttagatctaatcgttttatttgttagtttaggacattcctccagaatacattaaagtggctttcttca

SEQ ID NO: 3624 - DNA, 433 bp, Homo sapien
agttttctgcacgacctgtacttcagtcaccggaagggaacttcggtgtgctgggcctcgctgaatcacttggattcccacattctgctatgcctcatgggactcgcagagactccaggctgtgcaccctgctcccagcatcactgttcgtcaatagtcacccagtggctcatgcctgtaatctcaacactttgggaggccaaggcaggataatcgtttgagcccaggagttcaagaccagcctgagcaacatagcaagactccaatctctacaaaaaataaataattagccatgtgtggtggctcacacctgtgatcccagctacttgggaggctgagatgggaggattccttgagcctgggaggttgaggatgcattgagccatgatcacgccactgcactccagactgggcaaaagaacaagaccctgtc

SEQ ID NO: 3625 - DNA, 491 bp, Homo sapien
cggcacgaggaaaacatgttctgatatgtgtaggacagagacctggatgtgctttgatcgttaatgaggtggtcacatgagaagtgatacctgttactactgtattgtttttagagtcctgaagtctggaggctagacttcctgaaagcaagtcaagaatatagagcaccttgcaggagttcaagatggcctttggaaccaattatgtatttgtttcctcctacagtggagcagcattcaaatcaaatatttacatattgcttatcactttttctccattttaataatggaatgaactaaaataaacaagaacaaaagaatagtataattatatcagtaacaagaagactcaaaaaagaaacaggagtacctatccctatctgaattttcaagttccccattggatgaccagactggcaaccatttcaaatcccagtctatttcattgaaatttcttggttaagtttaattttctctgggggcatgatctc

SEQ ID NO: 3626 - DNA, 461 bp, Homo sapien
cctgattgtcatagacaaatcctacatgaaccctggagaccagagtccagctgattctaacaaaaccctggagaaaatggagaaacacaggaaataaaattggaacgaagaaaggttaggagagtagggaaggaacaggactgcaaaaatccttctccaccgcacagactgggaacccctcctggcctgggggaagagtttgttacctaccttactatttaaagagccttcactggttctgcatcacccgcccctggacttcttagttgtttctctagcgctgagctatctcctaactttggacctattatcagaaggtgacaagtactggctctttattcattaagctttttttttttgaaccccattctttccttctctgaaagtggtgctataagttttagaatcttttaaatacattccctgggccaacagacccacacacttagccattgaaatgt

SEQ ID NO: 3627 - DNA, 369 bp, Homo sapien
agaactctgaatttcacagtatacttactaaactaagtaaaaatgatacttaaaatacttattttactttctagacctaggctagatgttttaagctacagctctagttcattgtgatatttataatttgaaagctatgagaatagatgtgtgggtgaagccatagaacatatttgcttgaaattcttgagcagggatcttataaagggccagaaataagatgtgtggttcacatagatagtgagcgtaacatctgtattaaacataggagagaagtttataaagggcattggcaataaactctttgttgcagctgttttccaagcagtgtaaatactttttcctgtgattatgtatagccttggaatg

SEQ ID NO: 3628 - DNA, 431 bp, Homo sapien
atggaggactggggaaactaccaattctagacctagtttcttatttagatcccaaaatatgccgcacacaccaaggctcctgggagcctttctagccagaaataagtataatttgtggatacttgtcaaatgaaagatcactaggctaaagctaaagaaagctgaagagaaactaatgttctagatcatgctcactagcaaggagggaaaattttactagttgatagattcataaatctttgtcagcacaaaatctgacaagacattactgtcaatgatgacaaattatttggctctataaatctcttcccctttttaacaaatccagtgtgcaatcggaaaagctctttaggacatcctgcttataggaaacggcctacgtgacctgttaaatctcaccctacttccactttcagtgatgcacttaggat

SEQ ID NO: 3629 - DNA, 406 bp, Homo sapien
aattcggcactagggcagccgaaaccctgactttctcctccacatcatccagcggcaggcctcctcgcagtccatgccctggctggcggacctggtacagtccagcgagggctccctggacgtgctgcccgtgcagtgtctgtgcgagttcctgctgcacgatgctgtggacgatgctgcttcctgggaggaggacgacgagggcgagacaaggagcagaaggccaagaagcggcagaggcaacagaagcagcggcaccgtggtgccgcctgcaggacctgctactgggcccgaaggctgatgagcagaccacgtgtgaggtgctggactacttcttgcggcgcctcggctcctcccaggtggcctcccgcgtgctggccatgaagggtttgtcgctggtgctttc

SEQ ID NO: 3630 - DNA, 269 bp, Homo sapien
cacgggcacgccggccaccaccaccaccaccatcaccaccaccaccacccgcccatgatcgctctgcagccgctggtcaccgacgacccgacccaggtgcaccaccaccaggaggtgatcctggtgcagacgcgcgaggaggtggtgggcggcgacgactcggacgggctgcgcgccgaggacggcttcgaggatcagattctcatcccggtgcccgcgccggccgcgcgacgacgactacattgaacaaacgctggtcaccgtggcgg

SEQ ID NO: 3631 - DNA, 208 bp, Homo sapien
atcgctgtcggcgttgaccggcgagaacctggagcagctgctgttgcacctgaaggtcgtgtatgacgcctacgcggaggccgagctgggccagggccgccagccgctcaggtggtagccacgccagagcggggtcgcctctgggcctctgtctgagcaaacctggatgtgaattcggtggttttgaatgcataaagtgccttgtgga

SEQ ID NO: 3632 - DNA, 437 bp, Homo sapien
gcaaggacagagcatgaacacaggaggcacaaagttctagcacatttgaagacacgcctaaactcttgccattagaaccttcaacatttttccccttttcccaaaatcgtccctttgcttactacatattgtcagtaccgccttcaaccaaaagcatagttaatggatttgatatcaacgctctcaagtcttaatacaccgtgttacctgtgacttcgactgacatatcctttccaggggatcagatgggaagggtgcctgacaggaacactggagaatttcagtcctgatttgaaatgaatgatttaagccaactgatgccgaaacgtggtgtgttcagaggacccgctggaggaatgcagcgttgtgcctctccccatttatcatggtgtttacaaatcctgttagaagttgaaagtaaattatcatcctgctct

SEQ ID NO: 3633 - DNA, 476 bp, Homo sapien
ctagtggattaccaaaatattccagctgatctcgtgctcccaacttcatctgcactagtcttccttcggctccttggacatgctaagctcatttaccttttaggttccctctgcccgcaagatgtttacatggctgttatatcatctagatcttagctaggacaggatcttctcagggagacctttatgaccacccaatagaaagcaaccagggccaggcacggtggctcacgcctgtaatcccagcactttgggaggccaatgtgggcggatcacgaggtcaggagattgagaccatcctgactaacatggtgaaaccccatctgtactaaaaatacaaaaaattacactggtgtggtggcacatgcctgtagtcccagctacttgggaggctgaggcaggagaatcgcttgaacccgggaggtggaggttgcagtagctgagatcacgccactgcactccagcctggtgacaga

SEQ ID NO: 3634 - DNA, 335 bp, Homo sapien
ttgtcggatgctccatggcaaggagaatgctgccaccagacatgtatacatggatccactgtgggcgctaagcctggtgttccagttcactttggtatatacatctgagatgagtgcatgtatagtgtcactcagatttgcttccgacacctctggtttctcatcagctatctcctcgaatgagtgattacctaaactatacgcgacaggcctcaagtgatgacatgggattttgacttcaggtaggagtgaacattcattgtcgctctgttcgaggtaggtttgcaagtaggtacatggtcgtgtattaacaggaggagtggttagttaacatt

SEQ ID NO: 3635 - DNA, 398 bp, Homo sapien
gacacaggccgccctgcagtctctttaggtaggcagggctttgctgggacccctggtggaggccttcacaaaagcactggttactggtttcctgctgggtctaccttgcttctgggcacacctcaagcctcccctgctttctgcagtgccccacgcggttttccctgcacttgctccataattggctgatcatctgtgggccccggggctggatgtcaggcctccattgccctgctcagtttggctgcatttggctgccgtctggggtcctggtcctttgtgcaaatgctttgggattccagttgtgagctgagagagatgatggcctctctgggcctttcctctccctttactgagagctcagtgcttctggggttgaagttggacagaggcctgct

SEQ ID NO: 3636 - DNA, 421 bp, Homo sapien
cagaagataaaatagttttattcatagcctaggtaaagttcagaaatttatattgcactttggcggttatgctgatcctgtgtttggatggggtcacaatagcagggaaggccgaggcttcctacagaaggtcctttgtggcaaatcactatgagaggaaactccatcaaaagtcgccaattgttcatttcatttctactgtgctacggaagcctggttttgttttaagggctaacgtcctaggttttaagcaattttttttgagctttggctacccagctaacaagcagtagaatagtcaactcaaaactacgtctgatgccaaagctctaactctaaaactcaatatagagttttttttctgtgacacctcccctcgtgtctcccctaactgcgactcgcattaactcgctgctggttc

SEQ ID NO: 3637 - DNA, 408 bp, Homo sapien
catttctcatttgtctgaatatcttttatcaagaagatgaaagataagtgttaccaaggatgtggagaaaagggaacccttgcacaccattggtaggaatgtaaattggtacagccattatggaaaacagtatagaggttcctcaaaaaaactacaaatataattgccatatgatccagcaatcccacttctgggtatttaccccaaacatctgaaatcagtttgttgaagggatgtctgtagtctcatgttcattgcagcattattcacaatagctaagttatgaaatcaacctaagcgtttaacagatgaataaagaaaatgtggtatatatacacaatagaatactattcagccttaaaaacaaaagagattctgacatttgtgaaaaattggatggaattttag

SEQ ID NO: 3638 - DNA, 442 bp, Homo sapien
tgttattcattcattcatttattcaacaatcactgaatgactatgataggcagacatcatgctaggtgctaggggacagtgttagacatattttaatggacacattcagaatattacctgggatgaccaattcagctgtatggttttcctcaggatctaatctcctaaaagtgcagtagaaaatctcattagttgttgtgttgattctcagtgtgctggtcacattgaaaagcttctcctctctcttggaattggtggtggtggtcttaccactcaggacttgatggtcactgcttgtccagatgacttcggccttggggtagccctcagcctgacatgtcagttcatgttcagaggtgactggatccacaaccaaaattctttggttgattttgttgtatggggcattgactttcacagtaattcgcttgtagtcggcacc

SEQ ID NO: 3639 - DNA, 117 bp, Homo sapien
tctcgttgagacttgcgtggctaagcttgtggcatgtggggcctccatcggtcagtgtagccctcaggggagcacgggagagaggagaacttgtggtgtgggtccacaccgaggggg

SEQ ID NO: 3640 - DNA, 103 bp, Homo sapien
tgatcacctgcaccgtcttcagccagccattctcgcttacattactgcaggcccatgtattggtttcgttgttccacgttcatttcttccagagattcattga

SEQ ID NO: 3641 - DNA, 421 bp, Homo sapien
ttttttttttttttttttttttagggaagaaaagattctcttttattttggaaacaaatcaaaaggggattagggaatgaagcaccttaagcaatgccgtcttaagacttctttttgagaccttagggctctcgcaggcataactttggctcaacatttcccttctaaaagccaagaatggccagcaagggaaggggtggggaacagagggtgggaggagggagatcaggggaggtcggtgctgaaaggcggttcctgccctcctcagctgctccaccataagaaaacgctgctccggccagcacagggcgcgggagggcgcgtccttctccctggtacataggcattatctcttttttaaaatctgtatataatatatatatttatattctgtatatatatatatttatatatatatatt

SEQ ID NO: 3642 - DNA, 344 bp, Homo sapien
tttttttttttttttttttaaattttattataaagacctttattaggagaaaggacatattttctatttcttacttttattttgtgccttgaaggacttgtgaatgtatagaataattattttttcttactgcttcctctttgcaacccaacctccaccaagtcaatcgtgaaggtaggaagaaagctgtatttctgttacttttaaaaatgataacgagaagaaattaaaacaatggcttaagagaaagaggatgtaaggagtacaaagcaaaacttaacaaagagttagtaaaggaacttgcattgacaattcactcagccatgttaattttatcattaata

SEQ ID NO: 3643 - DNA, 118 bp, Homo sapien
aacattttattagtttttttaatacagagaaaagacctcaaaaaaagttttttttttaaagctacatttcaaacagtatgcaaaggtacaattgaaaagtatgcagcatccttctccc

SEQ ID NO: 3644 - DNA, 294 bp, Homo sapien
  misc_feature (1)...(294): n = A,T,C or G
aacttccaggcacatgtgtaccttgatgaccccctccagcccgagcccagcccagtngggtggctgggtggcagggtagggaacacgtaaaaggcgtgaagtgcctggggattccaagcttccctgaagcaggcctctgtcaaatttcaaccccagaagcactgagctctcagtaaagggagaggaaaggcccagagaggccatcatctctctcagctcacaactggaatcccaaagcatttgcacaaaggaccaggaccccagacggcagccaaatgcagccaaactgagcag

SEQ ID NO: 3645 - DNA, 343 bp, Homo sapien
ggtttacagaacttttatttggattctttccttgtctgttaataatataggctgcacctgggcatcatcgtgcccttcctttttgattctgctgttttgcttttaatcctacaggcatttcttctggcaggagccttgtacacactctgggtggttcatgaccaccacggacttgccctttcaaggcagaagcctgtgattcaaaaacttccattccttccaatcgactattataaaactcattttgtctagtgcccatactcctttaccttaggatcctgggccaactgtcactaaagaaaacaaaccatttcctcctcctgggggaatgtgcttctttcaa

SEQ ID NO: 3646 - DNA, 369 bp, Homo sapien
aatacattattattttaatatattgcttgttaatagctttaagaatactacattctatggtagattattggttatataaaaggtagaaatgtcataagtattataatttccagtctgtaaaacctgtcagttgagtgctttgaaggtactcaatatactcaatagctagttaccctaatttagtttctccacacggtggaggctttaacactctgtgcttctcaggttgctgggtagtttgatgttttatcttatgattcttttatgctgtgatcctgtactttgaatggtaagaaaaagttgcattctttttcactgcttcctttctctattttgttcacacttttgtcattgattagatagttggct

SEQ ID NO: 3647 - DNA, 368 bp, Homo sapien
ggcatctcgtcgtagaggcggtaggacaggttccgcagacgcacaccgcgttctccacgctcttgtcctcgcatttgcccgcgtccagggcgtggttgatagaggtgaccagggcgtccaccagcccgtggcactcccgcatcttctggcgagtggcctgagaggctgagctgaggttcctgaggaagccggtggcgttgtagaagatctctgcctccgaggcgttctgctggatgagggggggacccagcccccgacaacgtcaacaccaggtctgtgagctgctccagcgtgtctctggccaggcggtccttcaggtggtcgctggatgaaaggttccacaggatccctgtgacatttttgcgaac

SEQ ID NO: 3648 - DNA, 230 bp, Homo sapien
gcggccgccatctcgccgtcgtcccgcggggtgcccggggcgttgctcaggccggccaccggcacgggggaactcttcggcaacccgtccatgtcgcccgagcccagggatccgttcacgtggtgaggctccatcgcgctcatggcggccatggggcctccggcgagggccgagcgggaaattagccctgccggcgccctgcccgatggggttcatgatagtgtacatgt

SEQ ID NO: 3649 - DNA, 354 bp, Homo sapien
tacaattttaactcactttattgtgtgtaaatatatatatatatatcctcaagtgaatgatactgttctcaggtttttctatatccaaggtatactttcttatgttttgacattcgtttgattacaacatgcaatttacaacacctgggactacaacaggacattaaacacagttctatccagaggctactacttcttgggtaaggactagtttgggctcctgcactgaacaatggtgtgattattcgatttcacagacaacttcacagcaacacgcaaagcctaagcgtagttttggttagcctgtgttctaagaaatccacttccagataaaaacgtggttcccccatattg

SEQ ID NO: 3650 - DNA, 174 bp, Homo sapien
acattgcagtaaacttctttttaaggtctctgagagttacaataggaacatcatgtgcaaaactgacagccgtccaagggcccagccgacaggactggctctccctgcccgctcggccgggccctccccgagcggggacacactgcagggcttggctgagccctggtggacaag

SEQ ID NO: 3651 - DNA, 342 bp, Homo sapien
gctgtgtagaccctcccccctccaaaaaaaaatctcatcggactgctttcttggtggcggtgggtaaagcaaacgtacattctctcctctcagtactcgttcacctgagccagctcgggtgtcaggttgacagttatgtttttatacaaggcgtcgtatgtgatgtttgcaaagtagttcaggttgttgaggccatccagcccttgccgttcttttgacttcctcagcagagcataccttccaagaaactggacttctcctcgatggtgatgaggaatggacttgtactttcctgtgtcaccctctggccggctcacacttcagattggtaacacctagtgc

SEQ ID NO: 3652 - DNA, 356 bp, Homo sapien
ttttccaattacaaatttattaacccctaaaataatgttatagattcagagaaaattagaagcatagaaaaaaaaaagcaagattgtggtgacatatatgtaattaactgaacaagcaggaagaattcaaaagcatttgaattgagatcctagaattcatagctggtctccctgcccaccaagaaggcatgttaatctggattctttagagataatagaaatgtcttaaattcctttgggtgcagtaaaatggccctagcttgcactagccccattgaaaggtagagattaaattgaagataaccaagcacctgtcattcttcccactgccttctggatcactacaaagaaataag

SEQ ID NO: 3653 - DNA, 297 bp, Homo sapien
tttgaagttaaacatttttgatgtagtttattaggcagaaagaatatatatgaatagttttagtaaaataaaactttatttagatattttcagtgaaagttgcttagttttgttgagggctggcaaaaataaatgccagtaatctctgacatattctttcagggtaattcttatggccacagttcaaaatacatgtattcaatgaggaaagttgctccaagcatcaatgctttaattttaacatcaagatcaaatggaaactggatcccaaatttctcaccattggttaatattccc

SEQ ID NO: 3654 - DNA, 427 bp, Homo sapien
  misc_feature (1)...(427): n = A,T,C or G
ttcggcacgcaggccgcggttgttgaacctgggtgccgccatgcaggatgtggccctggacgcgctggctgtgcagctgctggagccggccgaactggggccggcaataccgtgcaggtggtcgcgtacaagctgggggccgcgctactngggggcgcgctgctggcgtgctgcccaccttctcgtggccgcaactctttctgctcctggctgccacctactggctggccgcggcctggcctgggctgcaccagccctgcggcggctcccacagcagcccccttccgagcagcgtccccacaccgcgcaccttctgcgggacgtgctagccgtgccggggaccgtgtggacggcaggctttgtgctcacctacaagctgggaaactgctgcctctgttgaggtcggtgctgcgcttccgcctcgggg

SEQ ID NO: 3655 - DNA, 408 bp, Homo sapien
accagtcctgggaagtggagtcagttcttcaaccccatctgctgcttcctcctcttcaacatcatggactggctgggacggagcctgacctcttacttcctgtggccagacgaggacagccggctgctgcccctgctggtctgcctgcggttcctgttcgtgcccctcttcatgctgtgccacgtgccccagaggtcccggctgcccatcctcttcccacaggatgcctacttcatcaccttcatgctgctctttgccgtttctaatggctacctggtgtccctcaccatgtgcctggcgcccaggcaggtgctgccacacgagagggaggtggccggcggcctcatgaccttcttcctggccctgggactttcctgtggagcctccctctcctttctcttcaaaggg

SEQ ID NO: 3656 - DNA, 439 bp, Homo sapien
aggaatacatacatcttttatttgctgggtcaagtatcacagtgagtgaagtcctaaaatcttaagagaatttcctcttttgatctaggaggaacattttttgcaaaagctaaacccacacagattcccccaaggcaatggggaaaagacgttaaagtgggtgagttgtatgtcttgatccattgtcaaccattgtccggcagaattgtggggacttaggggacatcggcaaagggacaggacggggaagcaagtacccagctgccagaccaaggatccccggcagggttaggacatggaccagaacagcaggacaagaattgaacgacaagagaggaagtggaacagacgttactctagatgtctgtgctgtcaaattcctcaaagcacagaagtgccgtcaatgcccgtgtgcccctcaaaaaaaaaaaaatcatgc

SEQ ID NO: 3657 - DNA, 366 bp, Homo sapien
gagatggaaaataggatttattgggggaaccgtacaagcagaggagaagcaggggtgcccaggctgtcacagccttgcagtgcatggtgggttccgtggccaacttgccaggggacaggcctgttgctggcactccccccacaattacagggtgggagtgaaggacctcgcggctgcggacaggtccttgttagtaaggaggaggctctgcagtcccggtggggtcatcttgcctctccggactgctccctctgactggtgaagccacactctgtgaagctgtctgacagaaggggacacgcctttgctgcccaggatggacctgggccacccaggatgccgctggcctcagccagggcacgtgtg

SEQ ID NO: 3658 - DNA, 430 bp, Homo sapien
cagaagtgtgtgaacaaaagagctagaagatgacttgtggtgatcagagacagcttcaaaaacaagggtgacatttggtctgagtttgatgtatttaagaaagttgccaggaaaataaggggataaatgccatcaagtcaaaaataaagattccagagggaaaaagacttggcttttgtggcgggggatgggagggtgggaggcgttgataattaaatttagattggatatgttggggatatctgggggacttaatgaatttggagctcagtttactttgtggtaaaatgaggtggaatgcttattctttagaggggggaggagaggtcaggagactgcaacagactgtaagagaatgttattaataaaaatcgtggagatagggagtttagatttggaagagactttagccatcacctacatcaatttt

SEQ ID NO: 3659 - DNA, 434 bp, Homo sapien
atttggaaaatgtcagtttattacacctgtttttagatcttgttattaaatacatgaaaaagaagcacattagtttcataattttttagcattttggtaaactgtttccattggtttcccttataatcctatacattttatgggttttgttgttgttgttgttctgtttttgagacagtctcactctgttgcccaggctggagcacagttgtgtgatctcagctcactgcaacccccacctcccgggttctaagcaattctcctgcctcagcctcctgaatagctgagattacaggcgcatgcaccacaccctgctaatttttgtatctttagtagagatggggttttgctatgttggccaggttggtctcgaactcctggcctcaagtgatctacccacctcagcctcccaaagtgctgggattacaggggtg

SEQ ID NO: 3660 - DNA, 430 bp, Homo sapien
tgtttttttttccataaaaatggatttattgccaaactttaagaaaggcgcttcataagcagaagacacagaatgccaccctcctcaaggaggcaagcacggaatgccaccttcctcaagcacgcaagctaggcaggccctgcacgttctcactcctctcccagaagccagcttcctgcctagggcccagcctgctaaaggatggaaattaatagcatttggtcacttgaggtggccccagagctacttgcctacccaccaggccccagggagagtggctgggcctcaacctgtgacctacatgcagggtctctgcacccacagactctgccctcagtccagctgctgcagttagctacttgacacaggagggaactgaggctccaattcctggcagtaggtggcttggctaacgccccagccagccatg

SEQ ID NO: 3661 - DNA, 332 bp, Homo sapien
tttttttttttcacattaatataatttattaaattcgccatacaaagaatatgccacagacaacaatatcagaaagggaagaaacatggatatcacctgctctgaccccctcattttacaaatgagggaactccctgaaatcccagagcattgttatggacaaagccagaatgtgagcccagtcttgagacacagaaacacacagacttaaggattctggctgcgtgacgcacatagagcctaaacacttaatccacatttgttttgaatttttctgattcctatagtaccatactctgatgcctatctacttctcaaggctgtaggaagag

SEQ ID NO: 3662 - DNA, 409 bp, Homo sapien
tttgagtgagacattgaaagctgtgtttatttttttcagtgactgattttctatgtccatagatgctataaaaactgatcgaagatcaactaaaaattcaattacaatattacaaattcaactgcaggtaccaatattacattatttgacagggataataaaatgagcaaagactggaaatcacagacaataacattgctttctcaattaacagaaaggattcataacatattccttaacggtagatgtgatttgtagagaatgtggaaaagaactattgagaagtccacctgctgccccagactgaggcacattagggtggttgtgggaggagttatatttgagggttccatttttccttagggtattaaaatgcatgtcctggtttgttgtttatttgccattaagt

SEQ ID NO: 3663 - DNA, 381 bp, Homo sapien
cagttttaaatatttatttaaaatccagaggggaaaaggagaaacggaacccattggtgttttaatacactgacatgtggacagagacgtaaacgaagacagcaggaaaacccaagaatgagacagaggccagtggattctggcagcaggagggatccgagcgctgagatgaggcccgagctgctacaaccacgaatttccacgcaaaggtccaaggccggggccggcaggccgaggatacagaattgttggaagggggaacgggccaaagtgaggtattaaatattaaaaataaaatccaattcccaaagagacacaacttttaggagagaaatacacaaatagagactttcacatacattttccccttctataaaaata

SEQ ID NO: 3664 - DNA, 249 bp, Homo sapien
gcaatatatatatataatttatttacattcacgcccgataaaacccctatgtgccccggcggccgggcaaggctgtgtacataaggccaagagtaagtgcgtgaatgcacttaagacaaagtcaggacacgagcttcacatgacaggccccgcgtggcgaccagccagccctggggacgggcacgccacgccacacacacactcaccactgtacagcctgggactcccattgcatattcacaggccccg

SEQ ID NO: 3665 - DNA, 558 bp, Homo sapien
ccagatacattctttattgtatcacaactggtatatgcaacagtgataaaagtttaagtgagggtatgtgaggttaaagcacctagaccttcaagtatctttaaggctaaagcccaaggaaaagtcttttgatttggcaagaggatactcctgggtggggggagaaaggcaggctcagaaggaaaagacaacagcctcatataaatatgacaacagttataatctgagcctttggagagcttgaagttctaatgaaagggttggctggctgctggcatagaggatgtctgtgtcagcaggggcagaaagggttttgtatacagaggaaacagacaggacgtggatgagttggaagcaccgagagcaagatcacagagttatgagaaccaaggggaaagtaaagagctttgctttgaagacacagaggattccttttttagactggaaggaaaaaggaggagctaatttggaaaatacaagaaaaaaataccagttgacagaataagatgacataagtggatgcagcactattttaaggcagctcctgcagagaggagt

SEQ ID NO: 3666 - DNA, 418 bp, Homo sapien
tgagggatgaccagggagtgactagattgctgtgatgtaagaatgaacagaagagcaatacaagatgggccaaacctgaagggaccaacactagtgtgaaagataaggcttcaggctataaatcaggggaggttggggtggacctggagagaaaatactcctgttataaaacaaaaaggcccacatatggtaggtgacagcttagttaggaggaccaaggggccactgaaaggggctctgtggggggaaaactgtgagagagggaacatgtgggcagggataaaggcagcctttcactgtgctgactgaaaactgcaaacaagctacggttccttcccctaagtttaaggtccccaccacgtcctcgccaagtctgtacacagatttgaagatgccaaacgtcccaactttccctcgg

SEQ ID NO: 3667 - DNA, 176 bp, Homo sapien
tgaacaataaatgttttatttgctttaaaagtgcctctgaaagggccccccagaagtgagcagtgcgccgtcaagcgggtgtgcaaggcaacagctgcacggcacagtgtgggtctgagtcactgccggagagggaccagggtggtctgggccgcagccctttaacaatctgccct

SEQ ID NO: 3668 - DNA, 172 bp, Homo sapien
acaagggcaagaaaggcaccctcgaaaaaaagaggcccaaaacttcagacaaggcaaatcccaggatagcatatgaggacccccgaagcctcagagaagggtttctggcgtaaacaatggttaggctgccaaaggcgggtccaaaaccggcaccaggggcaggcactcccaa

SEQ ID NO: 3669 - DNA, 86 bp, Homo sapien
ggtcctgcatgtgctgcacgcgcagcgctctgcctcctccacgaagggccgcttctccgccagcgtcagaccttccacgacttgcc

SEQ ID NO: 3670 - DNA, 418 bp, Homo sapien
attcggaacgaggagcgattcttctgcctcagcctcccgagtagctgggactacaggtgtgccaccacgcctggctgatttttgtatttttagtagagatggggtctcaccatactggctaggctggtctcgaattcctgacctcaggtgatccacccacctcggcttcccaaagtgctaggattataggcttgagctactgcgcccggcccatggtgtttttctttagggctcttcctacagccttgagaagtagataggcatcagagtatggtactataggaatcagaaaaattcaaaacaaatgtggattaagtgtttaggctctatgtggctcacgcagccagaatccttaagtctgtgtgtttctgtgtctcaagactgggctcacattctggctttgtccataacaatgctc

SEQ ID NO: 3671 - DNA, 498 bp, Homo sapien
gtttaggccacataaaattgctgtttaatgtagtcgatggaagactttaaactatgcttctagcttatttttccctcattcattcagcaaatctctattgagttcttcagtgagaaggagcaggcactgggcctggaatggaaggcgggaatgaatgggcctctgatggtgagaggtgacggggtccctcagctgtgagatgcaaggggcgccttgcagcctccataatatacatttgactttgcaaacgtctagacatgttttctgaacctttttcaggacatttcaacctcgggactattcatattagtggcctgagaggtgtttgttgtggggccaccctgtgcatggtagaatgttcagcagcattcctgccatccatatccattaggtgccagtagcaccccgctagagctgtgaaaaattctctccagacatagtcagatgtctcctggggccatatcacccctccgttaagaaccactgatgtcttttaca

SEQ ID NO: 3672 - DNA, 423 bp, Homo sapien
acaggtcttccctgaagattcagcagtactctctcaaaggtttgacagtactcttgtgggaaatcaccaaatgctgtcatagttttgttttaactgtctccttgagggcagagggaagggtgagagaaaatctgttttcatgggtatttgtagtacagcctttttttctttcaagtggctgtatcaaattcactggtcttactaatcactgtctttaccagtgagtacaaaaagttaaggcaactaggacaggtactgctctataccaagaagagaatgattctttggaaattgttatttttaagcttctgttaatttttccagaagtttagtgcgtttcttttccatactttctcccctaattcttttatttgaagaagagaacttaatggcaaataaacaacaaaccaggacatgcatttt

SEQ ID NO: 3673 - DNA, 341 bp, Homo sapien
cggcacgagggtttgctgactgctggtctggagatgaagcggggtcccagcctggtgggcccagtgccttcaagatccccttcctcattcggcagaagataatttccagcctggacccaccctgtaggcggggtgcgactggggactctggcccagaaactccacctggacagccatctcagcttctttgcctccaagcccagccccacagccatgatcctcaacctgtgggaggcgcggcacttccccaacggcaacctcagccagctggtgcagcagtggctggactgggcagcagacgctggctcttcacagtgtcggaggctgagtgctgaggccgg

SEQ ID NO: 3674 - DNA, 235 bp, Homo sapien
cggcacgaggaaaagatacccaaaggtcaagaacacagtgattttattagaagtttcatccgcaaattttcttccatttcattgctcagaaatgtcatgtggttacctgtaacttgaaggtggctacaaagatgactgtggacgtgggttgcactggccacccaaggatgtctgccacacctctccaaagccctccctacctaccaagatatacctgatatattccaccaggata

SEQ ID NO: 3675 - DNA, 459 bp, Homo sapien
ccgatccctagtgtcgactatgcgagatctgattccggagctgccatgattgaagtggtagcagactcagccggggtcctgtatttttggctggggaggcgctggagtgtgtagtgaccgtcaccaacccccttccgcccacggcacttctgcatccagtgaggccctggctgggcagtgcccaaatccactgccagttccatgccagtgagagtcgagtagcactgcctcctcctgactctagtcagccagatgtccagcccgacagccagactgtctttctgccacaccgaggtgagaggggccagtgtatcctttctactccaccgaaaattctattctgtgacctgaggcttgatcctggagagtccaaatcatactcctacagtgaagtgctgcccatagagggaccacctcctttcggggtcagtcagtcaagtacgtctacaaactgaccat

SEQ ID NO: 3676 - DNA, 420 bp, Homo sapien
ctcccaggtcacactgattcattcttaacaagatatttatatgttattaaacaggtggttctttttatttaaccagttatttttattattgagtctgtccagataagttatttataatgggcattactgaatttttaaaatgccgattacacccaaatattgtgcacatttaataatcagacaccagatttttagctctgtactcctaattaagggacatgtatgtggccttgcctagccctttggtgataagtacttcctctaggaaatgtacgataggtagaattgtggttccctaaagacaagtacataaaggtgaccctgatgaaaccttgaagttctgaaatttaactgcctaaaatgttctccttagatgtgagagaaagagaaatcaggaaaattaattctcttgggggaagg

SEQ ID NO: 3677 - DNA, 206 bp, Homo sapien
cctcgtgagatgggttcttcctgcagggcagaagggcagattgttaaaggggctgcggcgagaccaccctggtccctcctccggcagtgactcagacccacactgtgccgtgcagctgtgtgcttgcaaccgcttgacggcgcactgctcacttctggggggccctttcagaggcacttttaaagcaaataaaacatttattgttc

SEQ ID NO: 3678 - DNA, 309 bp, Homo sapien
acgtaggatgaaaagattcttctgtgtttataaaatataaacaaagattcatgatttataaatgccatttatttattgattccttttttcaaaatccaaaaagaaatgatgttggagaagggaagttgaacgagcatagtccaaaaagctcctggggcgtccaggccgcgccctttccccgacgcccacccaaccccaagccagcccggccgctccaccagcatcacctgcctgttaggagaagctgcatccagaggcaaacggaggcaaagctggctcaccttccgcacgcggattaatttgcatctg

SEQ ID NO: 3679 - DNA, 484 bp, Homo sapien
aaatgctctttgtacaggtatctttgactcccctcccaggacacaagagtgatgctatggactcctgaggctgggacataaaaggccacatggcttctgcctagattgcttgagatgtgctcccttggaagccacatgcagaggccacatgtgtgccagttaatgacagcagctgataagtgaatgtcttcaggtgaccctagcctacagctgctaaatcacgcctcagacaccggggaacagatgaggcttcccccactgagttctacccaaacagtgggtttgccaccacccagctaatttttgtatattttgtcaagatgggatttcaccatgttgcccaggctgctcttgaactcctggattcaagcaatccccttgcctaggcctctcagagttctgggatttcaggaatgagacaccgtgcctggcctgttttgttttttaaaaacaacagtattgagacataattcagacactatac

SEQ ID NO: 3680 - DNA, 565 bp, Homo sapien
atatttcagatataagatttcagttctcagtgagtctaagtgacagaaggaatggagaccctcttgggcctgcttatcctttggctgcactgcaatgggtgagcagcaaacaggaggtgacgcagattcctgcagctctgagtgtcccagaaggagaaaacttggttctcaactgcagtttcactgatagcgctatttacaacctccagtggtttaggcaggaccctgggaaaggtctcacatctctgttgcttattcagtcaagtcagagagagcaaacaagtggaagacttaatgcctcgctggataaatcatcaggacgtagtactttatacattgcagcttctcagcctggtgactcagccacctacctctgtgctgtgagggacaatgacatgcgctttggagcagggaccagactgacagtaaaaccaaatatccagaaccctgaccctgccgtgtaccagctgagagactctaaatccagtgacaagtctgtctgcctattcaccgattttgattctcaaacaaatgtgtcccaagtaaggattctgatgtgtatatc

SEQ ID NO: 3681 - DNA, 398 bp, Homo sapien
gtagaccagaccgcgacaggccagaacacgggcggcggcttcgggccgggagacccgcgcagccgtcgggggatctcagtgcctcactccccaccccctcccccgggtcgggaggctggcgcgtccggcggagggttgaggggagcggggcaggcctggagcgccatgagcagcccggatgcgggatacgcagtgacgaccagagccagacccagagcgcgctgccgcggtgatggcgggctgccctgccctgggcgagtcgctgagcccatcggacatgaaggtgaagggcgagcgcggcgaacagggacaccggccgggcccgggcgagccaagggcagtcccgtatccggcggccgatgaacgctttcatggtgtgggctaaggacgagcgcagg

SEQ ID NO: 3682 - DNA, 415 bp, Homo sapien
ggtgaagggacctaagctggccaatagccctctgccccagacatgggatgtggatccttgaggtttctggtgaaatctgcacatctgtgtttttatatctgttccctaccctgtaatccctaccacgtgcacttgttctgtggttttggtctcttgtttaattgcacacaagtaatactactgggtaaccagaatcaggtgtgaatgtgttgagattttttactgttttgcatgataggaaaattgagaaagaatacgtataaaagatagagaggcataacatcaatgcagagttggaagttggctcccaagggctgacatggtgtgagtgtgtgggtgtgtgataagcttctcatccctgcatagatgcagtattcttagccttagtagaaaaacctggtttagtggtttaagc

SEQ ID NO: 3683 - DNA, 473 bp, Homo sapien
gtgtgtttccagaaccccaccacactgccagatcctaaaggaaaattcgaggttttctcctccccaaacttccattcctgtatcataagacccagatattcaaaatatttcttactcacagcaaacagcccaccagccattgttggagacctgatgacatcgacgggggattgcatccgtatcctctccctttcagggactgtgtgccacgtgaacaccagcctccagtcgaaaccgccgatctggggctcccggagttccccaggtattcgaaggtgttccagtcgatcacatcaatcaccgggcacaccactgccgactcctcttcatggatcctctgcagcagcggctccagcacccttcgtggcactcacagtgacagtccaggaaggtcagaacatcgccctcgccgcagacgcccccagcagccgggctcgcaccaggccctctctcttgttggcgcggatcaggcg

SEQ ID NO: 3684 - DNA, 627 bp, Homo sapien
  misc_feature (1)...(627): n = A,T,C or G
ttttttgagacggagtctctttctgtcccccaggctggagtgcagtagcacgaatctcagctcactgcaacctccgctcccgggttcacaccattctcctgcctcagcctcccaagtagctgggactacaggtgcccgccaccgcgcccggctaaattttttttgtatttttagtagagacggggtttcaccatgttagccaggatggtctcgatctcctgacctcgtgatccacccgcctcggcctcccaaagtgctgggattacaggcgtgacgaccgcgcccggccccctcctccccaatttttcatacagttgcccctatacaatatacacacccttgagggcaggtagaagtccagnccacctgcggccagggacgctgtggggaagcatttttctcctgagttgctaagaagaaccctgatgggncgtttagcagaaggaccacaagaccagccagggttccaggctggcagcggataaggccagagagatcgctaggccccagaaagcccctaatttcagtcagggtgggacagagggcttcgacataaaatggaagcaagccttgagaaggaaccaggagaccttggagccctaaagttggggccagccgggaaatggg

SEQ ID NO: 3685 - DNA, 278 bp, Homo sapien
tgctctagatcataattgtaaaaaatattaagtcataatctgttacactaaaatttgtcagccaaatgttagatgaaatgtctgcactgtagtctcagatcactgtcacgtatataaattgcttcttcattttaatttgtagaagtactttacagtaggaaacgccagtaaacaacttttatactgttaaaaggcttttttccccttcctaaatgttttaattgtaccatagtgttttgctcactgaagaagcttcttatggaccttgcaactttgtt

SEQ ID NO: 3686 - DNA, 272 bp, Homo sapien
ccaggtacaacagcaggttcttttccaattcctcaaagcgctgcatggggtgggggcagagacagaagagaatgtaaacattgggttccaccccctggagctcaagggaagacccttacccagatagggactaactgggggggtggaagggaacaaggtgaaaggtatgggtcctggtgagacaaaagcaggggggcctgagaacacaaagcaaggtgggtttggagggagcacagcagggtgcaggaagggagatgggggacatttcctat

SEQ ID NO: 3687 - DNA, 355 bp, Homo sapien
ccagaagtaaggtaactttactcagataaaacacagatggtagcagatagaggccacaagctcatgggatgccattccagagggcccctcacccacagaggagcccctgtaggaaggaggcccaggccccatccgcacagcaagtcccggtgaggggctctaacacacccccactccagcctctggtcatggacacagcccatagcgggcacagcatcatgatggaatggactctgcaggccacgcatggctcctgggaacccccagcccctcccttctcctcccagcctttccagctgtcttcccaccaggagggctcggaggtcacagcacggaacgtcttccaagagcccct

SEQ ID NO: 3688 - DNA, 399 bp, Homo sapien
gtaggcggaaaccaaaaatgctgaacatcctacaatgcaggagatggtacacacaaaatgctaatagcaatgacctcaagaatggaggaaaggacaattcatctcttgtcagttttacctgcaccaggcagtgtaggacagagattcacaaatgaaacaggacattcatatcaaggtgacagagatattcagggagagatttttaagtcacaaggtgcctcttgcagcctcccttaacaaacttaactgccaaaagtgaccagaccagccgctgcacatccactgggcacagcacgtgctttttggggccaatgcttcaaaataaacccaagcattagctagaggggggcacttaccaatccgcccgatcttcatacccgagcgggcaagggctctgag

SEQ ID NO: 3689 - DNA, 209 bp, Homo sapien
ttttttttttttttcatttttctaaacttttgtttatttttatagcaatcgtcatgtttagagaagtaaataacacatttaaaaaccttctcagggccaaaggatgccagagtatttacaaacacatggaggaagggcggcaagacatgaggggctggggctctggggctaggactctacccaggaccccgccccaggccctgagccaa

SEQ ID NO: 3690 - DNA, 361 bp, Homo sapien
ttaacaggagaactggaaatatctaagagtaagaagtgtaaacaatagaaaagaggtagggtttagggttctcatcttgggatttccccaggtcttcaagcttctatccttcctgggttctgggtcatgggcctccagattccggccgttagtcttgagatacctttttcgcttgggtcctctatccatctaggtaggctttgtgacaggggccttccatccttgggttgtaggtcttccagctacaaccctgggctaatcttaggtcgttggccttgtgtcacaagtctcagttcttaggccttccatgtgtcctgtcccaggtcttaagacttctaactcaagccttgagacttccatc

SEQ ID NO: 3691 - DNA, 623 bp, Homo sapien
ttttttttttttttagacaaaccacaactgtttattggtgaaagactcagcttcctcatgtgctcgctgcaaaataaataaaataccagatgctagtatcgtacactatttacaacctgcagctgaccaagcaggtcctgaagccttctctgtggaccagtactgcactcttctgaggctacgggagaggtccagcagccgggccagggactaaaaggaaacgaaggatctgttttatttcgagctcgggggcaggctgcacttctcgcagatctgaacgggcagcatgtgagtcaaggaagtactgtttatggccaccagcagctgcaacttgcccatacagtcctccagcgccgcctccgggtggtctcccagtcgcaagtccacgggccgcgagacccgcagcatgggtaccgccagcgccaggcagcagatcgcccaggaggaaggggagtagctggtgaaggcatagtcggccaactcagctctgccccccccgggccaggcttgcgcttcagagctcggaggcctagcttgcccgctcaagcgacgtcgtgaaatgttcaggaagagctattgtgggcgcccaaggttaattcacttgtcagcagattcatcaggtt

SEQ ID NO: 3692 - DNA, 396 bp, Homo sapien
aaagtgctgggattacaagcatgagcccagcgcctggctgtatctttcattttacccaagtcactttacccaagtaagtaattaggggaaacctgagtcttgtaccacctgttcatttggggaactgtgggaaacggagccaacggacctaagtgccctttgacagtgagtttcataccatttcagtagtgtatttctttcttaatctgaataaaccagaatgatactctcagcacagaagaataaagggagcgagtcattaacgttttttttttaaacctttatgatgacttccttatgaattactgaacgaacactggaatgggactcaggtatcctgaggacatctctcaactctggccttagttccccctctgtaaaattagggtgccaact

SEQ ID NO: 3693 - DNA, 394 bp, Homo sapien
gcctcaggttgctgtctctctccttcccactatcgtccgcacagcactgccaacgtccccacaccctccaggaagttcaggtcgccatcataaacaactctatgtgcaaccacctcttcctcaagtacagtttccgcaagacatctttggagacatggtttgtgctggcaatgccaaggcgggaaggatgcctgcttcgtgagtgtccctgccaccactcccagcccaggaaagcatcctgtgtccctgtgccttatttgaccctcatgccaaccccgggaggtggagactgttgccccactctgcagatgcagaaacggaggcttggctgctgcagggggaggaggaggatgtgcacccagtctacccagccccatagcccttcccactctca

SEQ ID NO: 3694 - DNA, 373 bp, Homo sapien
tttttttttttttttttttttgaagaatgccctgcaaggcatcaactggaatgtgtttattaccaaacaagacagaagagaaccagggcctgacttggcagtggcccaggctgcatgggctcaggtaggctcagaccggccccaggagtgggagagcccagagaagagggaaaaagagtagtggccaggaggggtctggctgggacatgccactctgggccatcagcttctggatccactcaaagtggtggctgatattggtgtagacaccgggccgattgggcggaccacagcccactccccagctcacgactccaatctgataccacagtccattcttgttacaggccaaaggtccaactgagtcaccctg

SEQ ID NO: 3695 - DNA, 398 bp, Homo sapien
tgtaattttacgtagttgtaattatagtaaatccttttgaagcttataacaaaaactttttccaatttttaaatcatacactttcaaatcagaaaattagatacttaaaacttacagcctagtggtacaaattctgcttgagctgtcctagaaaatcaaactggcaatttgttttcatgctaactacaggaattactatcttcataaggcagagattctctatttcaaactgatacctgatcaaatagtggtgaagccccagtatcctatctgttattctccctaggaataaccaggcagtggaatgatggaaacggcagaaaatatctctagagcaaaacatgcaactgtttttattgtccaagtcgattggggctttcaaaggcaaatgttttcag

SEQ ID NO: 3696 - DNA, 126 bp, Homo sapien
ctccaactcaatcacgctactccccatatctaacaacgtttagatctaatgacagtttgagcatacaaaactcaccaataccacccacactcagcgcccttgcccgttatcgaaccatctcccctt

SEQ ID NO: 3697 - DNA, 150 bp, Homo sapien
tcatggctaatacagtgaagccccgtctcttactaccaatacgaaaaaattagtcatgcgtggtggcggtcacctgtagtccgactacgcgtggcaatggacaggagactggtgtgaacgtgggaggaggactcggagtgagccgatatc

SEQ ID NO: 3698 - DNA, 99 bp, Homo sapien
gcgactgcagaagcgaaaggagtactctgagatccagcagaaaaggctctccatgactcccgaggagcacagagcgttctggcgtaatgtgcagttcac

SEQ ID NO: 3699 - DNA, 212 bp, Homo sapien
cgtgcgacgcactgtgactcacacaagaggccatccacgtaattcattgagctcatattcatatcgcatggtagagtacacatctgagactcactgagttgctggaccggggggtgacactgccacggcctgactgatgtacttgtgacgtctatcatctcaggaacaacatctccgatacagaggcgactcttctgccgacctcgagaacc

SEQ ID NO: 3700 - DNA, 519 bp, Homo sapien
gggtgacgctgggcctgcagcgcggacgagaaagcagaacccgcagagtcctccctgctgctgtgtggacgacacgtgggcacaggcagaagtgggccctgtgaccagctgcactggtttcgtggaaggaagctccaggactggcgggatgggctcagcctgtatcaaagtcaccaaatactttctcttcctcttcaacttgatcttctttatcctgggcgcagtgatcctgggcttcggggtgtggatcctggccgacaagagcagtttcatctctgtcctgcaaacctcctccagctcgcttaggatgggggcctatgtcttcatcggcgtgggggcagtcactatgctcatgggcttcctgggctgcatcggcgccgtcaacgaggtccgctgcctgctggggctgtactttgcgttcctgctcctgatcctcaattgccaagtgactgccggggcctcttctactttaaaaatgggaagcttaaccagaaaatggcggaacctgactaagtcatt

SEQ ID NO: 3701 - DNA, 304 bp, Homo sapien
tgtgaggcacagaaaatctttattgccacaggaagcaagtgcattcgtcccacctcaccaacagcttgaagagtcacaaaaacgtggacatcgcacaataaagtgtaagagactcggggagaaatggtcccttggactatattggctgtaatactgaggtaaccaattgaccttgttcagtgaaaatacctctaacaaaatgaaaaaatcaactaattataacttccaattcacatatacaattcaaataaaaatatatattatttgctttaatgtatagcaagtttaatacattagtgtttac

SEQ ID NO: 3702 - DNA, 416 bp, Homo sapien
tctgtcgctcctgcccagttcctctggtcccctcctaggtgctgtcctgaatggcccgttgtcatcccaggggtgactcctggtgatgggagtcagcagtttcagattcttacactccatagctccccttaccatgaggtggagctggcttccttttccctgtcttcagccctccctgtctcccccacttcctggccagggctctcattctggacctgtgttgtaattgtgtacagaggatggcgttggcctggggtgggggtgctcgctttgtcttctgtcctttggttctccttccataatgctcctgtacccagtttatttaaggggacatgcactggaataggaaatgtcccccatctcccttcctgcaccctgctgtgctccctccaaacccaccttgctttgtgttctca

SEQ ID NO: 3703 - DNA, 309 bp, Homo sapien
gccctcagagcccttgcccgctcgggtatgaagatcgggcggattggtaagtgcccccctctagctaatgcttgggtttattttgaagcattggccccaaaaagcacgtgctgtgcccagtggatgtgcagcggctggtctggtcacttttggcagttaagtttgttaagggaggctgcaagaggcaccttgtgacttaaaaatctctccctgaatatctctgtcaccttgatatgaatgtcctgtttcatttgtgaatctctgtcctacactgcctggtgcaggtaaaactgacaagagatgaattgt

SEQ ID NO: 3704 - DNA, 284 bp, Homo sapien
gagcccactgaacagaaccccacggctgccagaatgttccctgagcccacactgtggccagtgggacagtcctggtggctgacatcagcgtccatgcttggctcagggcctggggcggggtcctgggtagagtcctagccccagagccccagcccctcatgtcttgccgcccttcctccatgtgtttgtaaatactctggcatcctttggccctgagaaggtttttaaatgtgttatttacttctctaaacatgacgattgctataaaaataaacaaaagttta

SEQ ID NO: 3705 - DNA, 307 bp, Homo sapien
tcatctcctgcaccgagggaacaatactcgcaacttatgaggcttcctccacctaacacttgccatccacaaccggcagagatgatctctgcacaggatatcaaagctctgtatgagtctgaggatgagatcaagcttactcggcatcacatctacatccagaatcgggatacgatcgacagctgtgagtgagatgcatcattataccccagtgtatgacaacagtcatgacatctctaaatgtggtcagaccgtcgattccttatgtactatgagtgagtaagtgccatatggtgtactccaatac

SEQ ID NO: 3706 - DNA, 396 bp, Homo sapien
tccctttctactcacctttgagtatttcagcctcttcatgaatctatctccctctctttgatttcatgtaatctctccttaaatatttctttgcatatgtgggcaagtgtacgtgtgtgtgtgtcatgtgtggcagaggggcttcctaacccctgcctgataggtgcagaacgtcggctatcagagcaagcattgtggagcggttccttatgccaggctgccatgtgagatgatccaagaccaaaacaaggccctagactgcagtaaaacccagaactcaagtagggcagaaggtggaaggctcatatggatagaaggcccaaagtataagacagatggtttgagacttgagacccgaggactaagatggaaagcccatgttccaagatagataga

SEQ ID NO: 3707 - DNA, 455 bp, Homo sapien
tcggcacaggcttcttgccctctcctgggaagctcccgattcttcttggcccttccttcccttccacagtccctctccaccctaagcccagcgcgccgcctcccccctccttcccggcaagtgacggcggaatcccgctgtaagctgctcagctggctgatcccggtgcaccgccaattcggcctctccttcgagtcgctgtgcctgacggtgaacactctggaccgcttcctcaccaccacgccggtggctgcagactgcttccagctgcttggggtcactccttgctcatcgcttgcaaacaggtggaggtgcacccgcgcgcgtgaagcagcttctggcctctgctgcggcgccttctccggcagcagctctgcaacctcgattgcaatcgtgctgcacaagctgcacttcacctgggtgcgcctacattagcttcttcatggagcatttca

SEQ ID NO: 3708 - DNA, 371 bp, Homo sapien
ttaccttttgatacttttaatacttcacaatttttgccaattaaaacttaaaatattggtagatttctctctctctctctctctttctgtatttatttctttgacattgacagttgatttactaattaatactacctccaaattatgcctctgaaaatatatttatcaaaaaatgataataaaaaatagtatgcctctaagtttttcatcaatccacgctgctaagatttagataaactatttttaaaaagaactctttaaaacatttaaatatatttgattttatacatttaaatataactattaaaaatttaagcaaaggaaacttagcagcaagtcttcctagtattttcctggctggattctaagtt

SEQ ID NO: 3709 - DNA, 383 bp, Homo sapien
gtagacacagcgtttcgacatgttgccccaggctggtcttgaactcctgagctcaagcagtcctcctgcctcagcctcccaaggtgctgggattataggcatgagccactgtatccagcctaaatgttcctctttttataaggatagccgtcatattggattagggcccacactaacgacctcattctaccttggttacccctggaagaaccctatctccaaatgcagtcacattctgaggtactgtgggtcaggacactgatatatctctttggggacacaactcataacaccaatagaatcaccattggagggctgttcttcccttaggggcctcagggctgctcggggaagcccttgggcaagggttggggggcagaggg

SEQ ID NO: 3710 - DNA, 286 bp, Homo sapien
ttttatatatttttttttttcaaggtggagcagaggagctttattagagggacagggtgaaacatatttacaccggccgagcagggaccttaagaagcaggcgtgggagcagggtcccagctcagacgagttccaccttggcattggggtacaccgccaccacgtcgtagccctcgggcggcttcacgcgcgccttggcgtggctctcacagtagagccgctcgtccagaaagaagtaaccacgctgcttgaggttcaggccgcagtcactgcacatgaagccctc

SEQ ID NO: 3711 - DNA, 272 bp, Homo sapien
ttgccggacccgcagcgccagctccgtttattgaggccttcggcgcgtggagggcgggcctcctccgtgacccagcggcggccaggcgcgctcccttctccaagtcctgggccctccggggagcgcgggctgcgtcgagcgaggggccgaggtcaccaacaagtctacagaacgaggcgcgtctccaggctctaccgcggccccgctggttctcctccccgcgcagggccaggacgggccgcgctaggagtccctggaggccggggcgcgca

SEQ ID NO: 3712 - DNA, 154 bp, Homo sapien
aaaaaaatttttttcaaaggaggggtaaaaattggccctagcggaaaccggggaatcccgttccaattccaaaaaacaggggggttaaaaaaagggccctggggacaaaaaaagttgggaaaagttccggggaaaatgccccaaaagagtggcc

SEQ ID NO: 3713 - DNA, 312 bp, Homo sapien
gttgaaagcatttttactggaacctcaaaggcccaccatgtggggagcaattattttttaatacccactgggcaggacacgccggtgcccccaaggccgcagtagccattggggttcttgctcaggtactgctggtggtagtcttccgcatagtagaaagtctgtccctcccggatgtcggtagtgatggggccgaagccgtgctctgaaagaaccttttggtagttctctttggagctcagggctgcctccatttgcttggcagaggtcgggtagatggccgagcggtactgagtgccatgggtcgttccc

SEQ ID NO: 3714 - DNA, 244 bp, Homo sapien
ttttttttttaccattttcctccctttaataaaaatttttccatttttttccccaaaattttatcctaaaaccaaccggaaaaaggagggaaaaaaggaaaaaaaaatttatgggaacctccaggtttcagttgggaagaaggaggggggacctggaaccagggcccccggccccccccgagaaattccccacccccggagcccccctcttggggggtcatcagaacccaggaaaggccccccc

SEQ ID NO: 3715 - DNA, 234 bp, Homo sapien
aatgtagtcgtcgtcgccgccggcgcgcgggcaccgggatgagaatctgatctcgaagcgtctcggcgcgcagccgtccgagtcgtcgccagccaccacctcctcgcgcgtctgcaccaggatcacctcctggtggtggtgcacctgggtcgggtcgtcggtgaccagcggctgcagagcgatcatgggcgggtggtggtggtggtgatggtggtggtggtggtggccggcgtg

SEQ ID NO: 3716 - DNA, 272 bp, Homo sapien
agcattcaataaatatttattataattaaaagaccgtagcaatacccccaccaccaagacccttcacccagaaatagagagattggaattgtaaacaccgtatccagttctgaccaccctgaaagccagggcatcatcgcgcccgttttgtcctaaatgaagggctcccggacaatgtcctgaaagtggcagatgacctcatcttccactgtccacagggcacagggcagaccggggtgctctatggggtcctggccgatgcccctcgtgcc

SEQ ID NO: 3717 - DNA, 359 bp, Homo sapien
  misc_feature (1)...(359): n = A,T,C or G
tttcacaaacaaaacagtgattaaattttattcctttttgagttgttttgtttttatttttaaatgaagtttccatctgtacacgttaagaaaataaacaaaacaacaggaagccattctctgtgtatcctccttggaggcaggaaggatggatctgccgatagcgacacaacagcacacagccagggctcatgggagtgagtgcccgtcacctcacgaaggtcatgggcctaaaacatacggaggctccatagaaaatgctccagctggctttgcagtcatgcataaaggtgaggacacttaattcaaggcatctngggggctgggtgtcaccgcacaatgaagaggtagtgcccatg

SEQ ID NO: 3718 - DNA, 221 bp, Homo sapien
acttttaaatggacatggttttatttttaatgtttttaatctttaaagttttgtatattgacagtcctttaaaaaaagtacactatcatactgtacatgggatctttacatacttttagcatgagcggtaatcttttaaggttctcttaactctaggaattgtggttggccagcatgttatcttgaccagacacttctgaaaatctgctttgtgtgtctta

SEQ ID NO: 3719 - DNA, 173 bp, Homo sapien
attgatataaaacagctttatttgagggtcctagtctgtgaggggtggacagataaaagaggtatttgtgatagggcatgaagaccttaagaccctgagggtgctgtgaacagggaacagtctgatatctggaaccaaagggcaaggaaaggtcctggggctgaagtggggac

SEQ ID NO: 3720 - DNA, 205 bp, Homo sapien
acaaaccacaactgtttaatgggtgaaaagaattaggttcccccagggcccggtggaaaattaattaaattcccggtggcaattatggtgaccattttcaaactggaacttgccaaaccaggtcctgaggctttccctggggacaggtaaggcactcttcggggcccaggagaagggtccaaaaccgggcaggggcccaaaagga

SEQ ID NO: 3721 - DNA, 292 bp, Homo sapien
tcatggctgagacataagagaacaagcttgtaatttcatgcttgggcattagatgcatttttggaaagcagtgatcagtaagtatgtgtgctttcagaaaggaatgcttgcgttctgctccaggctttgtcgataatgaaggattcaggagaattttggatggaggtctgaggtagccagaatagttgtaaagagaaattgcttccgacaaagggataatgtgaggaaaggtgctcatttaagatttgaaagatgtgatgtagtgaaccttggcgacttctcttaagtaatg

SEQ ID NO: 3722 - DNA, 341 bp, Homo sapien
  misc_feature (1)...(341): n = A,T,C or G
tccttttaagacagaaaaggttggctggatttaaaagcaaaaatgaattcaaattgtgacttttatgaagcaaatcctactttcaactgcacaaatcactcctttgttagattttcagagtagatggtaatgtcactaaaagctgtttacagcccagcaggtgtgttttggtttaaaaggatgtgctttccttttaaactcgagtattcaattaccttcccagccgcagganaagtgtgagctagggaccaagcgagcttcagaggcagctctgaagatgcaggcaggagggagtggggcagggggagctccacaaggaagagcaacaggggaagcaatgc

SEQ ID NO: 3723 - DNA, 330 bp, Homo sapien
cattgtattttttaaaaactgtaggcttttcctattcagttaagaggtagacaaatgaacatggaaggctgtcccatttaacttgcccaaagttcacattccacttcattcatccatcccacactgccagaaatcttaaagaaataaccaagattgccaacaggctttttctttcttacttcttcttagcaataacagtcaataaactgcttgcaaaaaagttactaatttaaattttcactgtgttcaaagaacctcatccctctaagaagctcccgaatatgaccatagatcctgccactactgacaggagggcagagtaccaaggac

SEQ ID NO: 3724 - DNA, 316 bp, Homo sapien
gatcctgaaagtcttttaattaaagaggcataaataatcttagaatcccaggaaagatgtcctaatcagaaacttcaaagataattatttgtggacccctctagaaacagtcttgaaagaaacagaatccagcgaagatttttggatcaagttgacaactgtgtttagtagacagtctatgcttatctatggaacaagatgtagatgaccaaaccttcagattctcatgctttaatctgaatgcttttgttcattaccttttaggtattttcttctgctgttgggtgtgtgtgtgtgtgtgtgtatgcacatatca

SEQ ID NO: 3725 - DNA, 338 bp, Homo sapien
agaaaagtaactttaattttcttatctgaactgttatatacaaagatgatcactttcagagtaaaattaagaatgaccagaataattttacaaaactttccaagaaacaacacagttaaatttatagaatatgcctaaaatataagaatattcaagtgaagaaatattaagctagtgctcagaataccagactatggagtggggggcgttgcagggcagaagttgctttttgagatctttcttgccttaagcctgaatgcttcatgttcccaaagaatccaattatgggaacaaaaattccctcatattcagtttcactttaaaatacaataaacagg

SEQ ID NO: 3726 - DNA, 149 bp, Homo sapien
ttcaccattttccccgtgaaaaggggatacatagcatattgatcaagcgttaagaagaaaaagggttttgtggacatcacctcggggggaaaaaaaactggatatacccccaaaaagaagcgcccaagtacttcaagccccttctcgtc

SEQ ID NO: 3727 - DNA, 142 bp, Homo sapien
tcacctcctccacagcggcctcctcaaattcggggtccccctaagatttttgatccaggcattgctcgtacccggataccaggtccttcaggtatatttccgacacggtgaactccaaaatgtgcaagcccttgaccgtgta

SEQ ID NO: 3728 - DNA, 142 bp, Homo sapien
agtgcgttgcgctgcggggcccccgctcaaggcgaggctcaagggcgtgggtcctccggttaagagcctttcttcgcgactccaggggcagtgactgcagcgcagctcgtggcgggaacaagcgcagggagttcgcgcctgc

SEQ ID NO: 3729 - DNA, 465 bp, Homo sapien
aatagttattatttattaaaattacacaatattccagttacactttcaaagactttacatgtaccaaacatttaatttccatgatagcagtctcaggtagatgtgattatccttatgtacaaataatgcacatagtgtctgtgtgctggacaacgcacaggggtagtgagcctttggcccagtgtctcacagggaggagggcgggggatggtggggacaactggtagagtgggtggcatgaccaaaggctttctcacgtgttacattagcagggttattccacagatgccacggagtaaagacagaatggtactggtagtctttatgtattcattaaactaacccacacaataaaaacatctacaccaaaaacaagatcattcagaaaaagtgatttttccactcttcaaatttgcctctagaatgacttctgatattctgtaagcagaagagtgatcagtgggc

SEQ ID NO: 3730 - DNA, 344 bp, Homo sapien
gcggccgcggggtcagcggagggcgccggcactccggtccccgccgctccccgtccccgctgctcctatcccctgccgcgtccccggcggacgggctatggcgccacccgcggcctaggccggaccgtgtgggccgtgagatgaggacggctgggagacgcgaggggaccgcaagcccggaagcccctggtggagaagaagcggcgcgcgcgattcaacgagagcctgcaggagctgcggctgctgctggcgggcgccgaggtgcaggccaagctggagaacgccgaagtgctggagctgacggtgcggcgggtccagggtgtgctgcggggccgggcgcgcga

SEQ ID NO: 3731 - DNA, 453 bp, Homo sapien
  misc_feature (1)...(453): n = A,T,C or G
gcactcggggcacttgaagggccgctcgcctgtgtgagtccgctggtggcgcacaggtgcgaggggcggctgaagctcttgccgcacaggtgcagatgaaggagacctcatgcttgcccgcgtgcacgcgctgatggatcaccaagctgatgtgcaggcggaactctgtcttgcactcggggcacgtgtagggccgctcacccgtgtgcgtgatctggtgtttggtcaggctggacttgtggctgaagctgctgtcgcactcggggcacttgtagggcttagggccaccgccgccgctaccagagctgggtgacttgggacgcggcttgagccgtgcttggggttgaacgtgggcccgcgttccggtgagacgcagcctccgcgcacgctnggaatgcgcttgtgccaccttatgtnntgcttgtgccggaagctgatttcgaattcgggcaa

SEQ ID NO: 3732 - DNA, 339 bp, Homo sapien
ggaggcagcagcccaagcaccagccgcgcgcccatcccgcggtccgcatcctcagcatcttctcctgctgctgctgctactgctccttctaaccacagccccctcggcgcccccctcctccggggccggccgcctgccctcccccgagtcctctcccctctcccggaaaggaaggagcgagagggaggggagggagggggcaaaagcggcgtggagagttggccgggaatgggggtgggagggcagcgatagatgcttctttttttcctcctgcttcttccgaaagttattgtttcataattcatgcaatgggtgctaatcgcccgctcgcctgccgcc

SEQ ID NO: 3733 - DNA, 366 bp, Homo sapien
tttttttttttttttttagaaggaagatattcagggtttttatttttattttttgagtctgggtctcgctctgtcacccaggatggagtacagtggtgagatcatagcttactgtagcctcgacctcccgggctcaaagatcctcacacctcagccttccaagtagttgggactacaggcatatatcatcatgcctggctaaattaactattttattttaagagatgtggtctagctatgttacccaggctggtctcgaactcctggcttctagcaatcctcccacctcagtctcctgaatcactgggattacaggctggggcatcatgcccagctctaggtttttaaaatgtaggcaaggaggtc

SEQ ID NO: 3734 - DNA, 132 bp, Homo sapien
gtacttatggaagaaaccaaatattatcggtcaagacgatgggcaaacttgcacaaaagtagcaaacgaggtagcaatgacccaggaaccatactcgaagtggtgaaaaacgccgcagcggcacctgcatgc

SEQ ID NO: 3735 - DNA, 354 bp, Homo sapien
tggaaaggttcaaattcaatgaaggtggggagagctgtgcttgcccccacagtaggagcagcctgtggttaggtgagggaaggacaggataacagaaagggctttctagagaatcagttgcgaacagggccatggaaattccttctatccctcttaacttagtgtcaacaaaaagtctcagtgcagacaaacccactgaacttaatttgggagaaaaagccatggagaagaccctttagaatgcacttccaaactagaaaccaaacggggtgcctgcaagggggtcgttctccttgtctttagaaaaagggaatcgagaagaacctttagaatgaacctccgaactacaattag

SEQ ID NO: 3736 - DNA, 249 bp, Homo sapien
  misc_feature (1)...(249): n = A,T,C or G
cgccagaggaccctctaaatccccttgtagatttaacttttaagccgaanangaacanctcttntgnacagctannaaaagacgcttggtgnananaggtaaaaagatttaacacccagantaggcctaaaancanccaccaattaacgagancgttcaagctcgacacgcagtagcgtagagaaatcgcaaacgagtgtaagcgtaacgtcctgacacccaattnnagcagtctatcaccctgtagaa

SEQ ID NO: 3737 - DNA, 137 bp, Homo sapien
  misc_feature (1)...(137): n = A,T,C or G
tacaacgcttcgctgaggccataaaactcttcaccaaagagcccttaaaacgcgccgcatctgcgatcaccctctagatcacctccccnaggtgatctgcgcagatcnctcttctactatgaacccccctcgccata

SEQ ID NO: 3738 - DNA, 139 bp, Homo sapien
ccagcttaagcgcctggcaccacgtccccctttccccaactcgctgaagaccgaaaagcccgacaccaatccgcctgcccaacatttccccacggaggattccaaatgggacccgccctggtaccccacagttgaagcg

SEQ ID NO: 3739 - DNA, 172 bp, Homo sapien
  misc_feature (1)...(172): n = A,T,C or G
tgactcccgagtgaagctggagctgcgggtggcggccccagcgcgctgcagcatcagncggtctggcaccacggtctctntcactncgagcgtcgcgggtngggtnggcggaccagacgancctnaggtcggnctgtccancatgggtagtgacggccgtctcangnccaag

SEQ ID NO: 3740 - DNA, 423 bp, Homo sapien
tttgagatggagttttgctcttgtcacccagactggagcgcaatggccgaatcttggctcactgtaacctccacctccagggttcaagcaattctcctgccttagcctcccgagtagctggaattacaggtccctgccaccatgcccagccaatttttgtatttttagtagagatggggtttcaccatgttggccaggctggtcttgaattcctgacctcgggtgatctgcccaccttggactcccaaagggctgggattacaggcatgggctacagtgcctggcctgcttattttcatcttatgaaataatttgcatgttagaaacctggggaggcccaggaattccatatcctgaggtgctttctgccagtgactctatgattctagagcagaagggtgtacaatctccctggcactccta

SEQ ID NO: 3741 - DNA, 530 bp, Homo sapien
tccctctagggtggctgtgatggctggagatttcatttgcagagaagcactattggttagataatccaaaacctcctgtagtttagctgatggagaaaactgaatattttgaggaagctggctacaagctgggcagttttcctttctttctgcttcaaatgtgtatgtatacagcccatctacatcattaaacaccaagtaattattcaagggaatgtatgcacttgtggctattttaaaaacctcagtggcacacacagctgcaatgactgcatttgtggaagctactgcaggaatgattctttttactaccccttgagtgagcctatacgtaacacccctaatattatattgtgatgctctctctagggatttttggaaaatccattgtatatgttcaggatcatctccatctaatggaaccccttctccaaaaggctgctccttagggccctgcaacatccttacatactcaatacagtgttctggtagcctggcatagatgcaatggtgcacatgggaaaattaac

SEQ ID NO: 3742 - DNA, 359 bp, Homo sapien
ttttttttttggtcgtcttggtgtattttatttctatttgcaactgtactatagggctggccatatagtatttgataagtgaacaaatgagtgaatggatgaatgatgagtgaatgaatgaatgaatgaatgaatgaagtcttctttgacgtcccctgtccacagtgatcttctgagaacctctgcagcatttcctttgtgtagcctcctttggtccttagcaacaacgttgtagcaattagttgtttgaatgtgtactcagcttaagttctcgactgcagggtaagcaatttgccagtctagagccaggtggggagacattgcttgggaatcagatcgacctggttccaatcccagag

SEQ ID NO: 3743 - DNA, 241 bp, Homo sapien
ccagttttgtccaaaataatttatttaccagccttacaaaaaacatgtcggcaagagaagaatcagtcccgtaggagcaggcaaacctctccttccttccggtggctcccctaggacctgccggagagtggagagtccggtgggggggtcccaagcccagggtggacgaggaaaaggtcaggaaatagaggattgtcctgagccctcctggccatgggggccgacccagtgggcactgagg

SEQ ID NO: 3744 - DNA, 207 bp, Homo sapien
aaagaaccaatgtttttttttacttaaatagattcaataaaaagaacaaacacacacaaacacaaacacgtcttaaaataaactctttagagactaagtgcgtgtttcttttccacagtacggtgcagagaggggagggcagggggcgggggtccccttcccaatgtccccgcgggcttgagtaccaggcggcggggccagctccgc

SEQ ID NO: 3745 - DNA, 178 bp, Homo sapien
  misc_feature (1)...(178): n = A,T,C or G
cctnngagagcgctacagagnccagantgaannggtccngtctgtgcctcacactgtggcgtnagcagccccaccngcgcagcctggtcatgttactncatgtggtgnccngcctcccggngatcatntcatggaattccantcggctctgctgcaatcatgagcgcgtnatntctcc

SEQ ID NO: 3746 - DNA, 190 bp, Homo sapien
  misc_feature (1)...(190): n = A,T,C or G
ctccagccctacgnacagtngncnngggatcnggtccctggttgctgtcttccagaggtatnctgnagagnatngttataactacactctctgcganacanagttcctaagcgtcatngatacanaactangtnccttcacaganaaccgnagnnaccctgntgtcctttaccgcatngtgaagaggctg

SEQ ID NO: 3747 - DNA, 258 bp, Homo sapien
  misc_feature (1)...(258): n = A,T,C or G
accatcctcattgtagctgtcttcacggccaacacttatgggaatgttagnggngggcgatgcatgntntancagncctcctganccnnctggangangacagncgtgcgtnctgctaccnaananngatgtctgtcgctnnnccttgcatgtagngagctgnngttactgccggnccctncgtacagaggaccgccantgnantgacantgtgnatacaggcanncaangtttctcccgggcgaacactttccctcg

SEQ ID NO: 3748 - DNA, 551 bp, Homo sapien
  misc_feature (1)...(551): n = A,T,C or G
gctgtgcgcctggnagtccgccattgcagatggctagcancgtgngacagctggccattaatgatgccaacgccaagttgtcgcgagcgtnagnccggcctgcggcatgcgagagcaggacattgctcggcagtgggtgaggtaccangagctgatgaacggcaanctgggcctnnaggtcganatcnggagctagagnaangtgctngagggcnanngnaggcnnctgnagtctcnnatgcggaacatgantattcagacnaggacgaccggcnngtatgcannntnntgtgangtcnncctatgngnncctcacgggggccngcctcanctagancgtgnggtccagctgtnnctctngggcgnncgccanctccttcanccncacgaggtgctccannnccntnnttttgaagaagatgcgnacacgtgatggnaagctgntgtctgaggcctcggacntcctgcccaagtggagagggnggcacccctcccagcctacccctggtncgctgccccagaggctgcnaggngnnccgcgatncagngta

SEQ ID NO: 3749 - DNA, 217 bp, Homo sapien
  misc_feature (1)...(217): n = A,T,C or G
ccnntagnggaanngacgtgatcgcctcccaagtgncgnattggtgancangaatttnagncgctcatncnnatcgcngatagatctnnncgacgnaactgncgagccttatcgatacgctgctctgagaganaagtctaaaaaatacgncgatgtggagntgtgccgncgtgagtgtcacangttacgcctttgcgtantacggtagtcgggactt

SEQ ID NO: 3750 - DNA, 239 bp, Homo sapien
  misc_feature (1)...(239): n = A,T,C or G
cgtcatcgacgccactaacntcttcgccagcatatatatggctgttgctcattttcgaggctaagccagtagggtcatcatgtctgccccctcttgtnaggccccatgtgcctcgtccatgtggaccatgagaattatgacagcaacctcaagatcgtcaggagtngctcctggaccaccaactgcttagaagcctgnccaanatcatgcatgacgactttnatatacttgaaggactc

SEQ ID NO: 3751 - DNA, 110 bp, Homo sapien
  misc_feature (1)...(110): n = A,T,C or G
atggnagccacaggaaatanccctgcgtagcnctaatccaggcctcacgccagtactagggctcctccgagcancagcangcaaatcancccaagtanntctccacccct

SEQ ID NO: 3752 - DNA, 250 bp, Homo sapien
caacaccctcctagccttacgacgaataatgattacatttgaagtaccacaacgcaaccactacatgaggcaatcgaccccttagtagtgccgcttctaccctatagccccccgcctcatcgcgttctccgagaaagtcttcttagtatctattaccggcggacgagtggatctagaagttgcgcgcctggtacccgtaccatagggccgacaaacaactaaccttccactagtgcttatgtcatccgtc

SEQ ID NO: 3753 - DNA, 394 bp, Homo sapien
ttttatatcttatttcttcacatatttcgtctctctgttgaaagattttatccttatttgactcttcactttttttactttcaccagaaatttgacgttcctttaaaattaaaggtcattgaatgtcttttgaacacctttttctcaactgaagtcttcctgaatgcctcccctttctgatgaaaggatcctgagtgctgctgttgctctgccctgttcccatgtgcccactcccttccgtacacattttgcaagactatactctttattttagtcaaattaatttaaaattgctccctgggtttctgctctctcatggccctgtccctcaaaaacttctgtttactttttctagctgttttcatctaatttgtttaaaatgtatgatggatcc

SEQ ID NO: 3754 - DNA, 316 bp, Homo sapien
tttttttttcactcatttagcaaatatttattgaaaccttgatatatggccaggagctgtctttggggctggggatacaacagagaacaaaccaggtgttgtcattcccagagtcacaatatttcaaggcagaatttgaatccaggtctcactgatttcgaaccccaggttgattattaagtgacagcatctcctgtagtccaggaggcccaaagaatgttcgtagagggtcttggcttagggtttcttattaacagagtgaacaggaaccaaacaccaagtggaaatggagggtgatgggctgtggtgggtgggt

SEQ ID NO: 3755 - DNA, 503 bp, Homo sapien
agctattatgatcattttatttttgtgattattccccacctctaagtctctcagaggataaaagcctgtctgccagtctcctccggccccagttagtcatcttcccatcttccttcagtctcacttagagtccttatgctgcaatctaggtcaccctcccccaacacacacacacacacacacacacaggtcagcagggcctcagacacagaaaaaagtttaattctgctgcggcggagggtcccggctccggtagagagggggatttggttttggattttgttcgtgtggggatttatttgggagagtctggtccttccagtgggacctgcccgggagaatgagtaaagagaagaaatcaggagagacagggagactagacaaaaccagggagggccgagggacaagagacgacaggacagagagaaaggagaggcaaatagggaaagacaggcactacagagagacgacaagagggcgggatagagacaaacgagggaaac

SEQ ID NO: 3756 - DNA, 641 bp, Homo sapien
ttttttttttgatacaactagcaaatgttcattggtttacaacaaacccaaaatactcatcaaatatgggctgttggatttagaaaaataagattcttgagcgattccagctgcatttgtttatacagaacacatttactcaggaccctgcagtgtcagcttcgttctttgggtatgcagccttctatctggatctctgcaggccagccagaatatctgttgttcttagcatcagagtggttgatcttttctctctgaatttcggaagggagttccaagccttttgctgcaataaatacccagctagacctgaatttcatgttcctgatttctttacttccaagtgcttctatggcattcttggcatcgttattcagtcttgtgcttccgtcgtcataggtcaccatgaagagcagggattttggagcagcactctgaataaactttgtcatcggtccagagttatcgccttcatacatatcaaaacatcgtgttgctgtcacattcccagttacatagttgacaatggcaatgtttattcctctggcaacatttcccagctgttctcccataagtaggttatcctcaaagcagattttggcgtacttgcttctgccacctccgctgagtaacctgtaggc

SEQ ID NO: 3757 - DNA, 633 bp, Homo sapien
aatttataaagacaaggggtttaattggctcatgattttacaggctgtacaggaagcatgggtagtgtctgctcctggtgaggggctcaggaagcttccaatcatgctggaacgaagggagaacaggtgtgtcacacggctagggtgggagcaagactgtgagggggcaggtgcacactctcttaaacaaccagatctcctgtgaactcagagtgagaactcgctcactattgccaaggacagcaccaagccattcatgagggatccgttcccatgacccgacccctcccagcaggcccacctccagtactggaggtcacatttcaacacgagatttggaggagacaaaacatctaagccctatcggcgcctctctgctgtatgtagctcacctctcatgatgacagaacagactaactcaggctactgaagaatatggccataaattactgtgcaccatggattatactggtcaagtttcagggcaatcacagtcctggtgggaaggatcccagcaggttaatgataggcctggggggcttgaggaaggagtgtcacttggagaagaaccctcaagacaggagagcaagataaaaaaaggagctgggacgtgtcacaagcaactcatgtaat

SEQ ID NO: 3758 - DNA, 588 bp, Homo sapien
gctgtattttccctctattttattgtttgtccttgggaatggtccaaaaattttgctacttcactttttatagaaagaggaatttaaagtgtttctatagctatatatttacaatgaaaaatcattcagatagttcagttcacaatgcaactgaccatctagcagcttgagttcaaggtttataaacacaaatgcctaccagcctaagcagataacctgaaagagaagtgggatggtgaagggcgggttggcttaggttgtatgaatgcagaacagggtagagtactctttctaaaagtggatatcaccattcagcaactgaagattttatgccatgcaggaatataatagggtttatactgtcagattttcaattgaagtcagaaatctgaatgtctgggaaattcttgattcttaaatgttggcataaacttaaataataaaatgctttgtgggccaaacaaaacaagcctatagactaaatgcagtatatagactggcagtttgcactcagctttagttttatcctatcacttagatattctaagctgaccaacacagcctaggtaagaatattataaactacaa

SEQ ID NO: 3759 - DNA, 591 bp, Homo sapien
  misc_feature (1)...(591): n = A,T,C or G
tgctaactagatgctcattttatctttttaaaaatatgtatttcagttgcacatgaaatgtactttgaaagaatgagctccaaagttctggggggctgagacaggcgggctgagtgaaatgatgaagaaacagtggctttcagtgcgggccaagagagtagtgagcaatggtcagttattgagctgtggagtgccttcaacaagggtttttagacacatccatctggtgcctcatcccagaacctcacaggcctagggacctgaaatgctccccatgacaaggcaaacttcatatcctcacatgctgagacagactcaactttcagtctggaactgggctgggtgtctgtcagtccacgccacccatatccggagtacatcagagtctgggttcagtggcagccactttcgctgccctctcctgccccacacctagcgctctgcctggcccctttgctgtgggcgtgaaaatctggcacccggngcgacagggagagagctcagtctgcgtctgctgctttctgtttgattcatcactttccccttcaccctggagcccacgttggctgtggggcactaactggctcctga

SEQ ID NO: 3760 - DNA, 154 bp, Homo sapien
  misc_feature (1)...(154): n = A,T,C or G
gggtggtcagctccatgggctacaaccgctcgactcgctgtnccncccagnccncgacaggcgcatacgtgccttngatgatggccaaacgcncactcaggctcagggagcttgggaagagcaggtataagtaaaggaatgcagccaggaccgc

SEQ ID NO: 3761 - DNA, 175 bp, Homo sapien
cgccttcatacatatcaaaacatcgtgttgctgtcacattcccagttacatagttgacaatggcaatgtttattcctctggcaacatttcccagctgtatccccataagtaggttatcctcaaagcagattttggcgtacttgcttctgccacctccgctgagtaacctgtaggc

SEQ ID NO: 3762 - DNA, 524 bp, Homo sapien
acacttaagtctgtgcattttattacatgtaagtaacacctcaatctgaaaagtatcagggcaacaccacacactgcagaggggcagggctcctccggcagttactcacttcccttgaaacagaagctcaaacatggagtagtcttctgtgactaaacttgttttccgccctcccaacttccaggaagaaccttcttctgaataggatttgaggtaacttaggaaactgctctcaatacggaattttaaagttggtgaggaagtcgacagaaggggaagtcacagtaggaaaatcaaggtactatcaggatgaagtcagcacgcagagcaaggccagcgaggcccaggcgccaggccttggtccctgcccacctcacccaggccagccagacagcacggactgccctacaaggtcacctcagagagatgggggtgttctctcactgctggcttttgatgagcccaggagcgtcagccttcactatcctccctaacaggcatttggggtgcagagatgctgacgc

SEQ ID NO: 3763 - DNA, 211 bp, Homo sapien
aggcttcttcaaggagaagttgtcacctccctaaacttcaccacagaagttagccaaaaatgtgggccgaatgttcaactaattcaccatgtcacttgacaacaatgcagatctgcagcccatcaatgccttacaacccttcttcaaaacgcgaatgaacgagccttcctgtgacacaaattcctctcctgtccttagtgaagccccccca

SEQ ID NO: 3764 - DNA, 392 bp, Homo sapien
ggtaacccaccttgaccataaattggcttttcatagtgctcagatgtttcataattcttcccccaaaataatgaagtttgcagtttaacaactttttttttgaggggggggggtctggctctgtagcgcaggctggagtgcagcggtgccatcttgactcattgcagcctccgcctgccaggattcaagcaattctcctgcctcaggctcccgagtagctgggattacagacacccaccacgacgtccggctaatttttgtatttttagtagaggagacggggtttctccatgttggccaggctggtctcaaactgacctcaagtgatctgcccacctcggcctcccaaagtaaaaagtactagaattataggcatgagccattgcgcccag

SEQ ID NO: 3765 - DNA, 401 bp, Homo sapien
  misc_feature (1)...(401): n = A,T,C or G
atgagctgccgcagcacttgcaatcccagttgggcagctggtccgggaagatatgnaggccagtaatgtaccagaaccccggttgcccgggggaagatgtcccccgagggctagaagagccccccgcccctgcagctaggaaaccccgcagtgaaaaggttggggccttccgtgaacggtgagcggcacctgagcgagaaccgcggggcctcgagccagcagcagcggaaccggcgcggcgagggcccttcacatgcatggagtgcggcaagagcttccgcctgaagatcaacctcatcatccaccagcgcaaccacatcaaggaggggccctacgagtgcgccgaatgcgagatcagcttccgggaaaagcaacagctccaggtgcaccagcgcatccac

SEQ ID NO: 3766 - DNA, 141 bp, Homo sapien
agaaagtgatcagaagtagtaaactatctttgaggaaatactgtaaccccagaatatttcctcttgacttctttttgtaacaaggataatttagggatttataaagttgtaaggatttcactgttttcggactgcctataa

SEQ ID NO: 3767 - DNA, 381 bp, Homo sapien
aaggcacggactctgcggctgcgaacccaaacttgggcaccgcacggctggcactgctcagccttcgcccccgtggcgaaaggctgctgcggtttcaggcggctgcttcgtgactaatgaccttgcgcagagttgttaagaaaaaagagaaacccgcgctctccggggtgagaagggactgactctgggcgtctctgaagatggctcgggcttctctttggcgcgccggggggaccctgacactgaccgctctgtgacgcgagtagtctcccctgcaccgtgcccgaagcgacgtgccgggggatttttcattctcgatctgttgactggctcccccgctgcatgagcagagtcggagttgagactggcttgttgctggcc

SEQ ID NO: 3768 - DNA, 342 bp, Homo sapien
gcttcattggcttccaggctggttatgggtttctggccagagtctattgtcatatgtggcctggccattgtccagttgtatgttcagtctcttggaaggaagggtattgactctgagaggggccaccatcgctggaatgggggacacacagtacttcctccagctgcctacacccccctagggtcagtggcgcctgcctgtgagggtgagcccaatggctagagggctctgctccaagtcattgcttactacacccacaaacattcttcgttctttaaggcctaacttaaagcccagatcctacaggaaaccttgattagacccctctctttattaggcttc

SEQ ID NO: 3769 - DNA, 396 bp, Homo sapien
gttagaacccactctggcatcgacctttcccggtatgagtgccagggagattgtacacccttctgctctagaatcatagagtcactggcagaaagcacctcaggatatggaattcctgggcctccccaggtttctaacatgcaaattatttcataagatgaaaataagcaggccaggcactgtagcccatgcctgtaatcccagccctttgggagtccaaggtgggcagatcacccgaggtcaggaattcaagaccagcctggccaacatggtgaaaccccatctctactaaaaatacaaaaattggctgggcatggtggcagggacctgtaattccagctactcgggaggctaaggcaggagaattgcttgaaccctggaggtggaggttacagt

SEQ ID NO: 3770 - DNA, 133 bp, Homo sapien
atcgctgacaatcatagtggctatatcatcaaagctactagtagccccttttcacgtctgagtcccagatgttagacaaggcaaccctcagacagccggcctgctacttctcagatgacagaacctaggcgca

SEQ ID NO: 3771 - DNA, 158 bp, Homo sapien
ccaagcggatggcatccatggccacgctgctggcccgggctggcgtctcttgctgtgaactggctgaggaggacttcctggcggtctccccctcggatccacgctaccatgaggtccactacatcctgctggatccttcctgcagtggctcgggtatg

SEQ ID NO: 3772 - DNA, 127 bp, Homo sapien
cacttctagatggttcctggatcctgtcttcagcgtatgttactttagagcacgtttgcccatagtgttgaatgcaatatgcgtttattccgaaagatcatatccattatagcgtcactgtagaagg

SEQ ID NO: 3773 - DNA, 142 bp, Homo sapien
ctcccggtcctgctcacgccgcggcagctttgacgcaaccagatccggcttctccatgaccttctcttcatcctcctactcctcctcgggctacggccgccgctacgcctgggggtcttcggcttccctggggggccctgaa

SEQ ID NO: 3774 - DNA, 411 bp, Homo sapien
aggagaatagaggagctgctggctgagaaaatggctgttgatggtgggtgtggggacactggagactgggaaggtcgctggaaccatgtaaagaagttcctcgagcgatctggacccttcacacaccctgatttcgaaccgagcactgaatctctccagttcttgttagatacatgtaaagttctagtcattggagctggcggcttaggatgtgagctcctgaaaaatctggccttgtctggttttagacagattcatgttatagatatggacactatagatgtttccaatctaaataggcagtttttatttaggcctaaagatattggaagacctaaggctgaagttgctgcagaatttctaaatgacagagttcctaattgcaatgtagttccacatttcaacaagatt

SEQ ID NO: 3775 - DNA, 235 bp, Homo sapien
gggctggaaggtgtacgcgggcaccagcaacctgcaccagttgcctgagcagcctccattgccgagatcatcatcaacagcaattacaccgatgaggaggacgactatgacatcgccctcatgcggctgtccaagcccctgaccctgtccggtgagggaatctgcactccccgctctcctgccccccagccccagcaccctctgcagccctcgcacttgtcagcatctgtcaact

SEQ ID NO: 3776 - DNA, 307 bp, Homo sapien
cagagcgcagacaccctcttccctggagacatcaacttcaacgtgtcaggcctcttctcagctgttaccctccaggacacagtcagtgacaggctggcctctgaggaacttccgtccactgccgtgcccaccccagccaccaccccggctccggctccggctccagctccagctacggccccagccttggtttcagcagctaccagggaaaggccagagtctgaggtgcctcccagaccagcctcccccaaggtcaccaggagtcccccggagacagctgccccagtggaggacatggctcggagga

SEQ ID NO: 3777 - DNA, 429 bp, Homo sapien
tagttatgatttttattatattgtttacgtgatctcatttaagtcctttgaagaagacataaatatcccatcgttattgtcatcatggccttccagggtaccccccttccagacctgagcccaccccaacgaagtctcagccttggccagcctccccactcctctaactgggcaggaggctcctgagtgcgtcatgttggtatcattcctgctctgtccattgcgcttggcccacccaccttggctgtccaggccgatgtccatgacgccatgcttgaccttcatgtgccggctcaggttgcccttgagattaaacttgctggagcagtacgggcacttgaagggcttgctgccggcgtgcaggtgcatgtggcccagcaggttgtacatgcggttgaaggactttccgcacaccttgcaatttgatgg

SEQ ID NO: 3778 - DNA, 521 bp, Homo sapien
cattcctggtccggtcgggtctggcttggggtccccctttctctgtttccctcgtttgtctctatcccgccctcttgtcgtctctctgtagtgcctgtctttccctatttgcctctcctttctctctgtcctgtcgtctcttgtccctcggccctccctggttttgtctagtctccctgtctctcctgatttcttctctttactcattctcccgggcaggtcccactggaaggaccagactctcccaaataaatccccacacgaacaaaatccaaaaccaaatccccctccctaccggagccgggaccctccgccgcagcagaattaaacttttttctgtgtctgaggccctgctgacctgtgtgtgtgtgtgtgtgtgtgtgttgggggagggtgacctagattgcagcataaggactctaagtgagactgaaggaagatgggaagatgactaactggggccggagagcactggcagacaggcttttatcctctgagagacttagaggtggggaataatc

SEQ ID NO: 3779 - DNA, 644 bp, Homo sapien
cgtgtgtctacacacattcaagaatagtcacctacttctatatctatttatatacatacgtattgaaaactttgagttcacattgacaccttcaattcaatcctttgaggttaatctagtctccctttccatctttgtaacttccttctctcatagaaacctgacttccataatcctaaataatttgttcattcttcctccctccctcaacctcttgacatgccagctgctttctcatcacacccagtcccaaatatgccaaataaatccgcagtcatagcagcgctggtcctgaccacaccaatccctaacatcctccccagcctggagcctggaccatggcagctgaatctttgaccccagtgatgtcagtcctgagcacaccattggaatcctaggctcctgtcatctggctggaagagagacaaattcacaaccttttgataatgagcaattattgaatactcactgaatttatcagagaaagtttaaaagtgtacgattatacatatttaccaggaatgtttaaacatagacatttatgaaatttatagaaaatattgaattgtggttctcactttttggtcttggctgtaacaatttttaaatattaatacttcctacaataactgtatcatgctatt

SEQ ID NO: 3780 - DNA, 573 bp, Homo sapien
catctgacacctatgcctacaggttactcagcggaggtggcagaagcaagtacgccaaaatctgctttgaggataacctacttatgggagaacagctgggaaatgttgccagaggaataaacattgccattgtcaactatgtaactgggaatgtgacagcaacacgatgttttgatatgtatgaaggcgataactctggaccgatgacaaagtttattcagagtgctgctccaaaatccctgctcttcatggtgacctatgacgacggaagcacaagactgaataacgatgccaagaatgccatagaagcacttggaagtaaagaaatcaggaacatgaaattcaggtctagctgggtatttattgcagcaaaaggcttggaactcccttccgaaattcagagagaaaagatcaaccactctgatgctaagaacaacagatattctggctggcctgcagagatccagatagaaggctgcatacccaaagaacgaagctgacactgcagggtcctgagtaaatgtgttctgtataaacaaatgcagctggaatcgctcaagaatcttatttttc

SEQ ID NO: 3781 - DNA, 611 bp, Homo sapien
cttcgcgtccaccctgcactgggtacacacaggtggaggcaaggccccaggcatgctgcttataaggtatctgtatgcgtccttcaattatctgtacaaatttcacattcactccatatttttctacatgtttcttccatgttgacagttggaagaccttcaagcagcccctggtggctgtttttaggtcttcagctgcagttaggctgttccacgcatgagatcgtgaaagagatcatttctcgctcggtctaacagcagggccctgtggtcagtcttcctatcagactttctgaagggttgggaataacagaagggtatttttaacacatgagagaaaactgccatctgaatgctaaacatatttgtccccaacaccccagagtaacaaatgaaaagaattacatgagttgcttgtggacacgtcccagctcctttttttatcttgctctcctgtcttgagggttcttctccaagtgacactccttcctcaagccccccaggcctatcattaacctgctgggatccttcccaccaggactgtgattgccctgaaacttgaccagtataatccatggtgcacagtaatttatggccatattcttcagtag

SEQ ID NO: 3782 - DNA, 636 bp, Homo sapien
gattcggcacgcggggagtacagtggtgtgatctcggctcactgcaaccttcgcctcccaggttcaagtgattctcctgcctcagccttccgagtagctgggactacaggcacctgcaaccacgcccagctaattttttgtatttttagtaaagacggagtttcaccatgttggccaggctagtctcgaactcctgacctcaggtgatccacccgcctcaacctcccaaagtgctgggattacaggtgtgagccaccacgcccagcctcttgtgaaatttttttctcagaatagcaatagcttatccaaagaaagctagtgtacatcttccaaagcttttaaaataaaatagaggaggagttacacttgcagaatgtatatcttctgggatgcttctccctactccactggacactgtttgaaagtttgtagtttataatattcttacctaggctgtgttggtcagcttagaatatctaagtgataggataaaactaaagctgagtggcaaactgccagtctatatactgcatttagtctataggcttgttttgtttggcccacaaagcattttattatttaagtttatgccaacatttaagaatcaagaatttcccagacattcagatttctgac

SEQ ID NO: 3783 - DNA, 357 bp, Homo sapien
cgtgaatgttccctcttggctgtgtagacaccagcgttgccccccgccaacctactcaaccccttccagataaagacagtgggcactagtgcgtttgtgaagtgtatctttaatacttggcctttggatataaatattcctgggtattataaagttttatttcaaagcagaaaacagggccgctaacatttccgttggggtcggtatctagtgctatccattcatctgtggtcgttccctctttgaagatgtttccaacagccacttgttttgtgcacttccgtcctctaaaactaaatggaatttaattaatattgaaggtgtaaacgttgtaagtattcaataaaccactgtgtt

SEQ ID NO: 3784 - DNA, 584 bp, Homo sapien
gtgtaggatgccttcagaatatccgagaagcagcattggggtgtctggagatgcaaatgtgaccatgtggggacacagtccaaaggcaacccttgaggtagagttgtgaagaccactctcctagacctgagtgctggcgacaacagtaccgggcatctgcagtgtgtaaactagtgccaggtgctgcacacacgtggtcataaatccatctgttggcacatcagggatcccttccttggcccactgtatggatgaagggactgaggcttaacatgcccaaggtcacacagccagcagctggccatgctggagtttgaacctagtcctctgacatcccagtcaggagaggcgtgacgaggctgccgaggccaaatgcagcccagggcctcaaccccccagagggcctcaggagccagttaggtgccccacagccaacgtgggctccagggtgaaggggaaagtgatgaatcaaacagaaagcagcagacgcagactgagctctctccctgtcggcccgggtgccagattttcacgcccacagcaaaggggccaggcagagcgctaggtgtggggcaggagagggc

SEQ ID NO: 3785 - DNA, 575 bp, Homo sapien
aattcggcaacaggacggcggcacatcaaccccgccatcaccctggccctcttggtgggcaaccagatctcgctgctccgggctttcttctacgtggaggcccagctggtgggcgcattgccggggctggcatcctctacggtgtggcaccgctcaatgcccggggaatctggccgtcaacgcgctcaacaacaacacaacgcagggccaggccatggtggtggagctgattctgaccttccagctggcactctgcatcttcgcctccactgactcccgccgcaccagccctgtgcgtccccagccctgtccattggcctgtctgtcaccctgggccaccttgtcggaatctacttcactggctgctccatgaacccagcccgctcttttggccctgcggtggtcatgaatcggttcagccccgctcactgggttttctgggtagggcccatcgtgggggcggtcctggctgccatcctttacttctacctgctcttccccaactccctgagcctgagtgagcgtgtggccatcatcaaaggcacgtatgagcctgacgaggactgggaggagca

SEQ ID NO: 3786 - DNA, 175 bp, Homo sapien
ctacaggttactcagcggaggtggcagaagcaagtacgccataatctgctttgaggataacctacttatgggagaacagctgggaaatgttgccagacgaataaacattgccattgtcaactatgtaactgggaatgtgacagcaacacgatgttttgatatgtatgaaggcgat

SEQ ID NO: 3787 - DNA, 644 bp, Homo sapien
cgttaccaaaaagtcctgaccctcaacctcgatcaagtagatttccaacatgccggcaactactcctgcgtggccagcaacgtgcagggcaagcactccacctccatgttcttccgggtggtagagagtgcctacttgaacttgagctctgagcagaacctcatccaggaggtgaccgtaggggaggggctcaacctcaaagtcatggtggaggcctacccaggctgcaaggttttaactggacctacctgggacccttttctgaccaccagcctgagcccaagcttgctaatgctaccaccaaggacacatacaggcacaccttcaccctctctctgccccgcctgaagccctctgaggctggccgctactccttcctggccagaaacccaggaggctggagagctctgacgtttgagctcacccttcgataccccccagaggtaagcgtcatatggacattcatcaacggctctggcacccttttgtgtgctgcctctgggtacccccagcccaacgtgacatggctgcagtgcagtggccacactgataggtgtgatgaggcccaagtgctgcaggtctgggatgacccataccctgaggtcctgagccaggagcccttccacaaggtgacggtgcagagc

SEQ ID NO: 3788 - DNA, 526 bp, Homo sapien
gacatcttggttctgactcggcccgtcacacggaacgaacggcactcttaccaggtttaccggcagccaatcccagtccaagagctagtcctagaagacctgcaggatggagatgtgagaatgggaggctcctttcgaggagctttcagtaactcagagaaagctaaaaatatctttagaattcgcttccatgacccctctccagcccagtctcacactctgcaagccaatgacgtgttccacaagcagcagtggttcaactgtattcgagcggccattgcccccttccagtcggcaggcagtccacctgagctgcagggcctgccggagctgcacgaagagtgtgaggggaacacccctctgcgaggaaactcacagcccagaggagggcatccacagtttccagtgttactcaggtagaagttgatgaaaacgcttacagatgtggctctggcatgcagatggcagaggacagcaagagcttaaagacacaccagacacagcccggcatccgaagagcgaggga

SEQ ID NO: 3789 - DNA, 630 bp, Homo sapien
  misc_feature (1)...(630): n = A,T,C or G
cattcggcacgacgggagcagccccccagccccctggcgcgagagcctgggggtccgcctggcagcttcctgacctcccgtcggccccgcttacctctcacggtgccctttccacccacctgggctgaggaccctgggccagcctatggagatgcctcaggcccagagccagcacgagacatccgctgcgagttctgtggtgagttcttcgagaaccgcaaggcnctctcgagccacgcgcgctcccatctgcggcaaatgggcgtgaccgagtggtacgtcaatggctcgcccatcgacacgctgcgggagatcctgaagagacggacccagtctcggcctggtggacctcccaacccaccagggccaagcctaaaagccctggccaagatgatgggcggcgaggtcctggcagctcactggaagcccgcagcccctcggaccttcacatctcacccttggccaagaagttgccaccaccaccgggcagccccctggggcactcaccaactgcctctcctcctcctacggcccgaaagatgttcccaggcctggctgcaccctccttgcccaagaagctgaagcctgaacaaatacgggtggagatcaagcgggagatgctgccggggg

SEQ ID NO: 3790 - DNA, 486 bp, Homo sapien
aacgagctggcggagtttgcccgcttacaggaccagctggaccacagaggggaccaccccctgacgcccggcagccactatgcctaggcccatgtggtctgggcccttccagtgctttggccttacgcccttccccttgaccttgtcctgccccagcctcacggacagcctgcgcagggggctgggcttcacaaggggcagacgtggagggaagaggatttttataagagaaatttctgcactttgaaactgtcctctaagagaataagcatttcctgttcttccagctccaggtccacctcctgttgggaggcggtggggggccaaagtggggccacacactcgctgtgtcccctctcctcccctgtgccagtgccacctgggtgcctcctcctgtcctgtccgtctcaacctccctcccgtccagcattgagtgtgtacatgtgtgtgtgacacataaatatactcataaggacacctccaaaa

SEQ ID NO: 3791 - DNA, 447 bp, Homo sapien
aggccactgggtaacaacagaagaaaaccttcagttggatcctccagatagccactgccttttcctcaagggagcaacgttagctttcctgaatgatgaagtttggaatttgtcaaatgtacaacagggaaaatatctttgtatcttaaaggatgtgatggagaagttatcaactggtgttttcagacctcagtcggatgaacatattccagtatttgaagccagaattttctttggaaattgttgagaaaaaccaaggaagataaaacaagttgcatttttaagcacgtttctctgctaagacaagatgctcagttgacacatttgaaaagtgtttgaaaaattcttgtgcaaatgatcaagataattctataattaacatcttaagggaatttttctaaaaaccttttcattgtttctatatattttgcccctgctataaaattc

SEQ ID NO: 3792 - DNA, 202 bp, Homo sapien
cagacagggcctatttgtattcagccttgggtttatccatctccggatcttgatccgtgaacttcttgacactctcctggtcctgctggacgcctgacacaggtagtttcatggggttctggtgctccttggcatcctttgccccgcaactgccaccaactatccagaccctgtcgaatttaattgccaatactgggggttc

SEQ ID NO: 3793 - DNA, 364 bp, Homo sapien
ttggaaaaatgaaaacaaaacaaaacccaaaatccttgagctctaccctctgggacccctccctgcccaacctcccacaaaaaaatttacagcgctacagttataacacgtgatgttcacatctgaaaccattaactttcaacacataaagggggggagttgaggacctggggttcacctacgagaacaacggtgggggacaggcagagcacggacaagaccgacaggtggggtgaggaagggtccagacatctccattatcattaaaaaataaaaagtgagtggggaaaaaaatccaaaaactaccccattgaaatggccccagtaggggatttgtccctcccctctggagacagacacccct

SEQ ID NO: 3794 - DNA, 555 bp, Homo sapien
caggagttcagtggcatgaccagggctcactgcaaccttgatctgggctcaagtgatcctcctacctcagcttcctgagtagctaggaccacaggtgtgcaccaaccacacccgactaatttttgtagagatgagatcccactatgttacccaggctggtcttgaactcctgggctcaggtgatcatcctgccttggcttcccaaagtactgggattataggcttgagccaccgtgcctggcctgtgatcagaattctcatttttttagtcactaaaaatgctggggggcactccattctccattatgtgattagttcacattgcatgcttgtatcaaaacatcatatataccccacaaatatatacaaaaaactttaaaattttaagtattaattgctcaggaaaaaattaaaatgctggggtgctgaaatctcaagggccccattacaaaactccttaggaacctcgccctctctctgctgtaaggactggttccagaatgagagaatttaaaagacattccccccccaaaatgttcataatgtcaccccgga

SEQ ID NO: 3795 - DNA, 554 bp, Homo sapien
aaaacaggtagagaggcactttggaagataaacactcctcagaatgggagctagcagtgtaattccacaaggcacagaatgggcattcactgcatagcctgactggaagtggagcatcctttgtgagaaaaggaaacctctgagacagtgaatatgttcccattttgaaaagcttgatgcaatcaaaatagaagaaagagcaccgctgaagagaataagagaagagatctttgttttgtttttgcttgtttctttgtggtagtgacagcgtatttcatgtaggaacctgtgacaaagctccccataataaacatcagaaagtcaaggatgatggttttggccaaggagcaaatgacacatgccacagctctcctggcaggtccccttttcgagattgtgtcctcccggataggactctcaagcagctgcaacaggcatcttccagctgggaaaggccacttgacctctttttctctttcgaaagccgggcagctgtgagtccaggcttgtcactcctgggtgcaggctcaggaattgaaggcgggtctgccaag

SEQ ID NO: 3796 - DNA, 445 bp, Homo sapien
caggtttgtactacagaaagtgccagttaatttccaaggaagatgttactcatgatacgaggcttttctgtttgatgctgccaccaagcactcatcttcaagtgcccattgcgaacatgtttacctcaagctacctattacaggtacagaaatagtaaagccatatacacctgtatctggttccttactctcagagttcaaggaaccagttcttcccaacaataaatacatctactttttgataaaaatctatcccactggactcttcacaccagagcttgatcgtcttcagattggagattttgtttctgtaagcagtcctgagggcaattttaaaatatccaagttccaagaattagaagatctctttttgttggcagctggaacaggcttcacaccaatggttaaaatactgaattatgctttgactgatatacccagtctc

SEQ ID NO: 3797 - DNA, 224 bp, Homo sapien
cggcggcgtggactggatgaggaagctggccttccgctaccggcgggtgaaggagatgtacaatacctacaagaacaacgttggtgggttgataggcactcccaaaagggagacctggctacagctccgagctgagctggaactctcacagacctctggctgacccactccctgaaggcactaaacctcatcaactcccggcccaactgtgtcaatgtgctggt

SEQ ID NO: 3798 - DNA, 150 bp, Homo sapien
ctcagcagcctgggctcggcattccgaagctgactttctataggcaattttgtacctttgtggagaaatgtgtcacctcccccaacccgattcactcttttctcctgttttgtaaaaaataaaaataaataataacaataatacggggga

SEQ ID NO: 3799 - DNA, 514 bp, Homo sapien
  misc_feature (1)...(514): n = A,T,C or G
agcaaccctctaagacgcactgcaccatgtgtagtggcgcatcagagaggggatgtgagtaggaggaaaggggtctgtaaagcgggagaacaaggctagcctccccctaacaatcctagactgagacgcatcaggcgcacgccgcaagaggcggcgaggtgacaagtttggagtgcgcccccttcagtactgcgcgttctaagacttttggcggagactttcttggcaaaacccattccccaaagctacgcttcccctgctgagatagcccctacccccacctccacaggctgggacagccccgtccccaccatcctcctcccaagccaattaaatgatcacagcacgcgtgacagttaccggctggagagccnnggtgtggaccgggagcaggggaccgtagaaccgggccgcgctcctcccctcctagagttcgtggaggcgcacagagggccgtccctcttccggatgtcggactaagcgaacagcgcccccactgccggccggtagcagc

SEQ ID NO: 3800 - DNA, 552 bp, Homo sapien
gtcatcttcattgcagacaagctcagcatcctgtccaagtgctgccacgcgatggtggcgctgatctaccccttcgcctggcagcacacctacatcccggtgctgccacccgccatggtcgacatcgtgtgctcgccgacgcccttcctcatcgggctgctctccagctcgctgccactgctcagggagctgccgctggaagaggtccttgtggttgacctcgtcaacagccggttcctcagacagatggacgatgaggactccatcctgccccggaagcttcaggtggccctggaacacattctggaacagaggaacgagctggcttgtgagcaggacgaagggcccctagacggcaggcacggtccagagtccagccccttgaacgaggtggtgtctgaagcctttgtccgcttcttcgtggagattgtgggacactactctttgttcctgacgtcgggcgagcgtgaggagagaaccctgcagcgggaggccttccgcaaagctgtctcctccaagagcctccgccacttcctggaggtcttcatggag

SEQ ID NO: 3801 - DNA, 538 bp, Homo sapien
  misc_feature (1)...(538): n = A,T,C or G
ctagaggacctgcttaccagagtggacgagttcgtgggcatgctggacatgcttcgcggcgactcgtcccacgtcgtcagcgagggcgtgccgcgcatccacgcgaaggccgccgagatgcgcgcatctacagcaggatcgaccggctggaggcttcgtgaggatggtggggggccgcgtggccaggatggaggagcaggtcaccaaggccgaggcgnngctgggcaccttccccagggcgttcaagaagctcctgcacacgatgaacgtgccctcgctctttagcaagtctgctccctcgaggccacagcaagccggctacgaagcccccgtcctgtttcggaccgaagactacttcccttgttgcagtgaaaggcctcagctctgacggcctgaccactgcggcaagaggaccccagctggggtgcttacctccagtatgaagtgaattgcaaatcctgcttatggacatatatgatgttggagtgtgggattttaaagtttactttctacaaactctccgtagtatattcatgat

SEQ ID NO: 3802 - DNA, 387 bp, Homo sapien
agttgatattgacataaatgttattagcctactaatttggaactgcatttctcaacaatgctggcaacatcttccgtacttagcataccaagttgtaggggagagactgtgtatatattttttaaaagcaatccaatggatttgtttttgttcatattttgaaaacaactcgaaggatttttcttattttagaaggtagaaaatatgtggacctgtgttttaaattaatatgtatttataaattataacattgaatgatacaacagagctctaatattgatgttctcactttctgatatttaatttttataaatgtttttgtaagtaactaattgtagtattgcttttaaatagttttaaaatctatctcaaataagttctgcccag

SEQ ID NO: 3803 - DNA, 415 bp, Homo sapien
aagcaggattccagattttattttttagaagattgaaaaaacacacccaggacaacatttctttgatcaataaactttcaggaaatggaggaagctgttttgggacacattcaaagctagttaacttgaacttggaaatagggttttgacaatccaactatgggaaacaaatctctgaacaaattttaaatgaaacctcacccccccaaactgttcaagtggcagacaaaataaattaccataaattatatgccaacacaccttttaaaaaacaacaacagcaacaacaaaaacccaggagtctgaggatttccttagctcctccaggaagtgtgtaacactgcttctggcctgcaggctggggcggatcagggacctgtcacacgtcaggatagttgcagtaatataccgcgga

SEQ ID NO: 3804 - DNA, 428 bp, Homo sapien
tgaataaagatgaagaggacagcaagctccagacaggagctgggactcaacccagatctcttaagtcctgcctggtggctccttaaaagtccagaagtgttgccccaagccctccctcaacatctctgggaaccgcagctgcagcacgatgggggttcagtgcccctgtttgccccttacccagctgtggtttattctgcttgtatgtctgcacaggccggatgctcgtgttccttgtcttattctccatttactcagtcactggggctcactcccgtctgatgcactagccaagattgccttagtgtgctccagaaaagaaggccaaatcccaggcattgtcagggcagcagactctacaggataggcttacctttcccacctgtgtggctagcacttcacagtttacaaattcctcccacctccac

SEQ ID NO: 3805 - DNA, 272 bp, Homo sapien
aattcggaacgaggaaaattcttgtgttggaaacttagttcccaatgtaatgatactggcaggtgtggcctagtggggggtgtttagatcatgagggcttcagctcatgaatggattaatgttgatatctcaggagtgagtttcctcttgctctctgtagccctctctcttgccacatgatgacttccaccaggttatgaatcaacaggaaggccctcacaagatgtggaacctcaatcttagacttctcagcctccagaagtgagccaaat

SEQ ID NO: 3806 - DNA, 161 bp, Homo sapien
aatttttcgtccaaagcgggcaagtggacctggctagcgggccggctcgatcacattgcagttggtccgccccgacatcaggcagtcctgcatcttgctcgcggccgtgagatcacgcgcgaccacaggccgaccgccagaatggcgcagcaatgatcagt

SEQ ID NO: 3807 - DNA, 423 bp, Homo sapien
tgggagtagtcatgcttgctggtctggctgttccggacaaggtagctacactccttgcagagtcgcagcaggttctcggcgtctcctctgctgatggctccgtgataccatatttgcttctccagggggacggcaggatccaccctttctcctaggatcccgcagaactcagggctcccatgtttgataggcttaaagccccctccagggcacgaagctggcgccgcggtcccgcgaaggtgagggggatgactgccgcttctcgttgccattaaactgtgctgccagggctgggatggtgacccggttccactcccaaggctggtcgtactcatcggcgggcctgtcgtcatcctggggcagcttgctctcccgcagtcgggggctgactgtgctctccgaatccgagtcaaaactttggcc

SEQ ID NO: 3808 - DNA, 178 bp, Homo sapien
tagcccacactccgactgcgtctctgagaccctcatcaatgatcatcatactgaatctatcccacttatactctatctccaacacctgtatctagctaaacttcttaatacttaggctctgcagatatatatctctgccctatcacattgggagacaaagtcgcctaccatagtcttt

SEQ ID NO: 3809 - DNA, 531 bp, Homo sapien
  misc_feature (1)...(531): n = A,T,C or G
ttagaataaatagaactttattctttatccagtagatctcagtggaaagcccaacagtaacaggtgcacccacgggctccaggggaaggggccccaatcccctggtgnaaggagagtcgggcgcagagcaggctcccccagctggggtgacaggggtgaggggagacccccctgtaggcccgtcctgcggggtaaggagggggcacgggggtgggacaggttgggggtggggggcaggccagggaaatgagaggaactcgggccaagtgtgtgtcggcccatctactgtccagtgtgtgtgtgtttgtgtgtgtgcgcacgcgcatgtgctgtggtgtctgcgggccctattcgggtgcatgtggctgaggccggtcagtggccacatctctggagtctcacaagctgcctgcataatattgtgcttccaaatgctaatgcgaactccattgtaatcagcccgatctctcagtcataacaatctgggttcaagatatcccgaaggaagattcggctaccccgttggatctg

SEQ ID NO: 3810 - DNA, 360 bp, Homo sapien
ccgcattccaacgtctccgactggtccgagggcgtctccagccctcccaccagcatgcagtcccagatcgcccgcattccggagccttcaagtaaacggcgcgccccacgagaccccggcttcctttcccaagccttcgggcgtctgtgtgcgctctgtggatgccagggccgaccagaggagcctttttaaaacacatgtttttatacaaaataagaacgaggattttaattttttttagtatttatttatgtacttttattttacacagaaacactgcctttttatttatatgtactgttttatctggccccaggtagaaacttttatctattctgagaaaacaagcaagttctgaga

SEQ ID NO: 3811 - DNA, 377 bp, Homo sapien
cccccaaacatcgtcccagaggacagcagccaaagagcctcctggctcagagccgtcagctttcgcgttcctgaacgcctgacccgatggcctggccctggagtcttcagcttcagctgctgtctggggcggtctgtgcttcctgagcagcctcaaccgtagctgctacagtctccaggcagcttgacttgagaggacgaccctagggctacctcagtttcccccatctcctctgccagaggtctggctatttggacttgaatccctacgagggatggcaggtggcagggcttcagaaatgtcgatctcagggctctcagggggcagtccctgcctgtcttgccctcagacatgaggtttcttgtatgaatgcggaa

SEQ ID NO: 3812 - DNA, 358 bp, Homo sapien
tagcttggaatattacgtttactttaatccaagtctaggccttttaaagggtccttaaaattaaagttcagaatgtgaatccctttgacatctattacaggtttataggacctttttggttgtgattactgttttcaatacgattgtataaatgaagttaactttgtcagaagttaaaatggaggtcataggagttcctggagaaatggctctcctgtttctttcattaccccactgaagttcaccccagtttctggccacaagaatatgagaaaggaaccctgttgttttccaagggaaatcattcctctctgtccccactgttgattaactaaagtcctggacaccttccttcctc

SEQ ID NO: 3813 - DNA, 397 bp, Homo sapien
gtttcccgtgttggccaggctggtctcgaactcctggcctcgggtgatcctcccacctttgcttccgaaagtgttgggattacaggcgtgaggcaccatgcctggcctagaaaaccctttatctggagcttttaactttattcaagatcagaaaggttatgctaactttttagtaaaaattcaactcaaaaatgggtattttcctcaaaacttgcccttatgacctgcagatcctgtgccccagaaaccgtgagatgtctcaattcccatgcaggcaaaggaggggagcttcacactcagcagacctcatagctgttacaccaagtgggtacctctttacatcttatggtatttcccccaaaacaatgctgaaaatactgttctttggtagatatat

SEQ ID NO: 3814 - DNA, 356 bp, Homo sapien
gcaatttgagagggcccacctatcatggggattattattgatcactttgtgggccgtgccctgtcccagctcctctcccatgcacccctgcaattacagaactgctggtgaggacactggagtaatatacccgtctgtagaagactctcaagaagtgtgtaccacctctttggcgacgggcccaccatcccagctgatggttcctgggaaggaaggtggggtaccccttggtcccaaccagcctgtccatggtacccaggctgaccaggagagactggcaacctgcaccccttctgacagaacccactgtgctgccacacgctccagtagtgaggatactgaaaccgtatcaaaca

SEQ ID NO: 3815 - DNA, 376 bp, Homo sapien
ttaagcatatgcacactgtgggggaaaaggtgattgtagattttgctgggtccagcaaactccgcttccgattgggctaccacgccattccgagtatgagccatgtacatcttcatgtgatcagccaggattttgattctccttgccttaaaaacaaaaaacattggaattctttcaatacagaatacttcctagaatcacaagctgtgatcgagatggtacaagaggctggtagagtaactgtccgagatgggatgcctgagctcttgaagctgccccttcgttgtcatgagtgccagcagctgctgccttccattcctcagctgaaagaacatctcaggaagcactggacacagtgattctgcagagcctgagc

SEQ ID NO: 3816 - DNA, 181 bp, Homo sapien
tatcgttgtagggagtgcgtagaggtacaagccacgcatagtgaacatctatggccgagtactttttcatatttggtgctcgatgttgtctgacagcggtggtcagttctgaatgcagattacaatatactcgtaagatggtcgaggcgtcgtgagacttccgacgtgggcaccaggagtc

SEQ ID NO: 3817 - DNA, 496 bp, Homo sapien
aagagccgcctgcagctgctgggggccacttgcatgttcgtggcctctaagatgaaggagaccatccccctgacggccgagaagctgtgcatctacaccgacaactccatccggcccgaggagctgctgcaaatggagctgctcctggtgaacaagctcaagtggaacctggccgcaatgaccccgcacgatttcattgaacacttcctctccaaaatgccagagcgggaggagaacaaacagatcatccgcaaacacgcgcagaccttcgttgccctctgtgccacagatgtgaagttcatttccaatccgccctccatggtggcagcggggagcgtggtggccgcagtgcaaggcctgaacctgaggagccccagagtgatcaagtgtgatccggactgcctccgggcctgccaggagcagatcgaagccctgctggagtcaagcctgcgccaggcccagcagaacatggaccccaaggccgccgaggaggagg

SEQ ID NO: 3818 - DNA, 128 bp, Homo sapien
ggtttcacagggaccatatcacccttgtagatttcatctcatatgatgtccattatacagaccgaatattttagtccagctgccagtgatgccttcacaagacatgaatgacttcatctacccgcttt

SEQ ID NO: 3819 - DNA, 260 bp, Homo sapien
tatggctccacatccaagctctaccattcactagttttgcttttcacccaacccctctgtgcctcggtttccttttctgttaaatggggatatctgttctgtttgcctctgagggttttgtgaacattaaatgtgtgtgggaggactttttaaacttaaagtgctatatacattttaagaggtgttagttactgctccgttgttggtcagctgagataaatcttcagtgttccctggatcctggctctggagtgaagaag

SEQ ID NO: 3820 - DNA, 181 bp, Homo sapien
aggccctgaagcagcacgcctgcgaatccggagcatccactatgaggaggccacagggcccaaagaaaacaggcccagactccgagagctgtgtcgccagaggctgagtccagaggtacgctccaaggagcagaagctggagctgtaggtgctggagcagttcctgggcgcactgccccca

SEQ ID NO: 3821 - DNA, 300 bp, Homo sapien
cagagcttttctttgtttttattttaaaggaaaaaaacaaaaaagaacaaaaaaacaaaccaaaaaaaaacagtgcaaaaacccattttccagtgtcagccttggccgtgcccgcacccaggccaccccagctgtgagcctgactcttcctcccactcagcaccccctcccccctcatgcatcccctaggggctggaggctccacttccctggagggccagatcccaggaggaactgtggggtggaaaaaacggaggggggggaacagccccagatccacctgccccccaggtctccagc

SEQ ID NO: 3822 - DNA, 442 bp, Homo sapien
caacattaaattcagtaactttttttattactgaaaaatgacaagccagatcagttcaactctgaccatcatacagacacaaatatcttactaaaataaatactaaatactaaccagcagggctgagccaaggatgagatgagtgaggtacctgccttgggacaaaatttaaggggacatccaaaaaaaagagggggaaagaaagaaaagaaaaaagaagcaacaaaaaacctcaaaccaaaaaactcgataatcaagctaaatgatattttaatgcaatatttaaaaaaataaatgcaaaaattatgatgaacaaaatatcaaaatgttaaagacaagatcagtaacagtgccttgccaggccatattgcagcctcagccaaaaggaaaaatcagtaacattcatcttatcttttcctaaaaatttgatttttttgttgac

SEQ ID NO: 3823 - DNA, 273 bp, Homo sapien
tttatgtgttgtcgtgcaggtagagggtttggcattattcatgtttctgatcaattctatgcaactctcatagttcctgttactttttagcattagctgccaaatgacttcaaaaggctggggtgggtgacttgactgtgagactggattataacatggacaaatcttattttgcttaatgtgtttgtgtgtgtgtgtgtgtgtgtgtgtgtatgtatatatatatatataaatatctttcccaatatgccccgttgacagtgtttaaattcc

SEQ ID NO: 3824 - DNA, 617 bp, Homo sapien
gaagctgggagtagatatcagggagtagaaagctgttgagttacgtgacccgattgatttataacttgtatgcttaacccaggagtgatttctttctgcccctcccacccccgcccccagaaaaaactcgagatttatttttaaggagacctggccaggccagcactgtttcccttccagcacctccacctgttcatggaatccactccatccacctctatcctgcaccttcttccccacccttgctgagttccgaacttcttcactgtcttcaccagacttttcttagctggagtgtggctttgagatcaggaagagaagccacctgaaaaatccaggggctgagggtgaagaagccacgtaccattaccccacccactcccccagcaggctgcacaaatctgtcgtgacttcttgttaagtgatgagtactgcaaggtcctatttatatgtaagtatgcaaaaaatgtctggaaggaaagataaatagcacaagagtaatagttatctcagcaaagtaggatacaggtggtttttatgttcttgcctaactttctaaggtttcttttatatatattacttttataataggggaaaaacccaataaattattttac

SEQ ID NO: 3825 - DNA, 584 bp, Homo sapien
taagagccaattacagacattacccaaagtatttctgtatttcctgaaaacaaggatatattctatgtcacagccacagtacaacccagcaaaatcaagaaattaataaatacaataataccatgtaacttacaatctcattcagctttcatcaaccattccagttgggtggaggctgatcatctctctgccattttcataagttatgtcatagattttcacatctgtcacatcattcatttctccaaagagccttagttccttttagtaaggaatggtatttagaagccaagtttggatgctaggtgtgtttattgctactgagatgtcattatttccagtctatttcagtgactagacctagcaaataaatgaatattgatatacacacccattcatctatatttctatgaaatatatttaaatatgtgtgcatatagatgtgtatatgtatatatagatctatgtatatgtgagcatatatatgtgcacatatatcaaaatatatatgtatatataaaatatgagttcacaccaatacctcaaattccaatccaataccacatattttcctctagtcttcc

SEQ ID NO: 3826 - DNA, 541 bp, Homo sapien
agccttataagtgtgacaagtgtgggaagggcttcaccaggagctcaagtctgctcatccatcatgccgtccatacaggcgaaaaaccttataaatgtgacaagtgtgggaagggctttagtcagagctccaaactgcacatccaccagcgagtccacactggagagaagccctatgagtgtgaggagtgtggtatgagcttcagtcagcgctcaaacctgcacatccaccagcgagtacacacaggagagaggccctacaagtgtggtgagtgtgggaagggcttcagtcagagctcgaaccttcacattcaccggtgcatccacacaggagagaagccttaccaatgctatgagtgtgggaagggtttcagccagagctcggatcttcgcatccatctcagagtccacactggagagaagccctatcactgtggcaagtgtgggaagggatttagccagagttccaaactcctcatccaccagagagtacatactggagagaagccctatgagtgcagcaagtgtgggaagggcttcag

SEQ ID NO: 3827 - DNA, 101 bp, Homo sapien
ctccaacttcacttttgctcctagcacgattatactttgaccagggacatgctgataagccctgattcatgtatgtctactggactcagctaaaaattttc

SEQ ID NO: 3828 - DNA, 148 bp, Homo sapien
cccgggcatcagctgttcctggcacatcatcgcgcccccggaccagggcatcgcgctgaccttcgagaagtttgacctggagccggacacctactgccgctatggctcggtcagcgtgttcaacggagccgtgagcggcgactcccgg

SEQ ID NO: 3829 - DNA, 242 bp, Homo sapien
cctcgtcggagctcgaatctctatttgtgtgaggttgaggaggatttgagaaggaagtgaaagctcctagcatgtccccattaccagtcccctgcctgtctctcctatctcaactctcatagcaatagagatcagattttaaattttgaccatgcccaattagtttagtttcccaaggtcatcgtgtaatttctaccatagattatctagtcacatctctcctgagatcactttcccatttc

SEQ ID NO: 3830 - DNA, 174 bp, Homo sapien
cacccccactcccacggacactaaaacgctaataatttattagatctaaagcccctacctccccagcccctgctttcattaaggtatttaaacttgggggtttcactgctctccccccatgatggagggagggagccccccaacctcagtgaggagagccccgagccggtcccg

SEQ ID NO: 3831 - DNA, 226 bp, Homo sapien
gctaattcctgaaagaactgtttggaagtattttgtccagctttgcattgcattggaacacatgcattctcgaagactcatgcatagagatataaccccatctagtgtgtacattacagacactggtgtgataacacttggatatcttgcgcttcgcgtgtttcacatctcaaaccacagatgtgcacactctagagtggacaccccattacacgtctccccagag

SEQ ID NO: 3832 - DNA, 420 bp, Homo sapien
cagcccgtaacagctactgacacccgctgttgcccaggcggtctgtcctcagccaagagcaaacccgagaaaccgcagcccctaaacacccagggaagatggattgaaagaatacgagacgccgcgtgcagtggctcacacctgtaatcccagcacttcaggaggccaaggggggtgcggatcacttgaggtcagcagttggagaccagcctggccaacaaagtgaaaccccatctctgttaaaaatacaaaaattagccgggtgtggtggccggcgcctgtagtcccagctacgcgggagactgaggcaggagaatcgcttgaacctgggaagcggaggttgtggtgggctgagatcgccccattgcacttcagcctgggcagcaggagcgaaactacaactcccagaaaagaaaatct

SEQ ID NO: 3833 - DNA, 408 bp, Homo sapien
tgggatgcttgagaagattatttagtcaagaaaaaagaaagacaaatcaacaatatgtcaaaaaattcaggtccaattatagagcaaaataaaatgaggcatgattttgagttattcatgaagaataagaagaggcttgataggtacatttccttttctatggcacaggcatgatgatattgggtgtgtagggaagaaaatatcctagcttatactaggctcccagtaagaagtatttaaatagccaaaataatgtggatatcatttattagtattcaatgttcagatcagcctattaacaaagtgtgaaaggtttcattttttattcagaactgaagttgaaagtaattaatgctgacaaagggaaagaaagcagaaagagattgagaattagaggaagagaagtgg

SEQ ID NO: 3834 - DNA, 339 bp, Homo sapien
attcggcatgaggggcgctggggagttggaggaagagctggaggaggagcagacaactcagagctgctcaatgaccgctaccgcaagctgctcctgcaggtagagtcactgaccacagagctgtcagctgagcgcagtttctcagccaaggcagagagcgggcggcaagctggaacggcagatccaggagctacggggacgcctgggtgaggaggatgctggggcccgtgccgccacaagatgaccattgctgcccttgagtctaagttggcccaggctgaggagcagctagagcaagagaccagagagcgcatcctctctggaaagctggtgcgcaga

SEQ ID NO: 3835 - DNA, 365 bp, Homo sapien
gcatggaggggaagcagcatggggacgtggtgtccgccatcagggctggcggggacgagaccaagctgctggtggtggacagggaaactgacgagttcttcaagaaatgcagagtggtcccatctcaggagcacctgaatggtcccctgcctgtgcccttcaccaatggggagatacagaaggagaacagtcgtgaagccctggcagaggcagccttggagagccccaggccagccctggtgagatccgcctccagtgacaccagcgaggagctgaattcccaagacagccccccaaaacaggactccacagcgccctcgtctacctcctcctccgaccccatcctagacttcaacatctccctg

SEQ ID NO: 3836 - DNA, 121 bp, Homo sapien
caaaccagggccaaaattatggatattggtcacccagtgatcataactaggcttgaaaatcactacacatattttctgccttgagtgaacatttttagaggaaaggttatgccatcttttt

SEQ ID NO: 3837 - DNA, 266 bp, Homo sapien
cctggtgatggtagcacaaggtacgcacagaagttccagggcagagtcaccctgaccagggacacgtccacgagcacactctacatggggctgagcagcctgagatctgaggacacggccctgtattactgtgcgagagactttaccagctcgtcaatccgcctcgactggtacttcgatctctggggccgtggaccctggtcactgtctcctcagcctccaccaagggcccatcggtcttccccctggcaccctcctccaagagc

SEQ ID NO: 3838 - DNA, 247 bp, Homo sapien
gaagatctaattcctgagaacactggtgtttctctttctccagtgcactaattttaatccccagtgatttatcctcatcacgcattacagatacctctctctgtacatgcgtaatctgctctttggcatcagtcagtttctctttcaggtgagcataatcttcttccttcctctgaagatctgcgttcagaaactggggacgagaagagattgcacagaggtcccccttcaaaatttctgggtcttg

SEQ ID NO: 3839 - DNA, 585 bp, Homo sapien
caactactacgatacttatgaaaggcccagacctgggggcaggtaccggcccggatacgcactggctacttccagtacggtctcccagacctggtggccgacccctactacatccaggcgtccacgtacgtgcagaagatgtccatgtacaacctgagatgcgcggcggaggaaaactgtctggccagtacagcatacagggcagatgtcagagattatgatcacagggtgctgctcagatttccccaaagagtgaaaaaccaagggacatcagatttcttacccagccgaccaagatattcctgggaatggcacagttgtcatcaacattaccacagtatggatgagtttagccactatgacctgcttgatgccaacacccagaggagagtggctgaaggccaaaagcaagtttctgtcttgaagacacatcctgtgactatggctaccacaggcgatttgcatgtactgcacacacacagggattgagtcctggctgttatgatacctatggtgcagacatagactgccagtggattgatattacagatgtaaaccctggaaactataccctaagggtcagtg

SEQ ID NO: 3840 - DNA, 399 bp, Homo sapien
tttggagagtgctcaatggacgtagttattattatcatcatcagcacagtgcggggcacatggtgggcattcagggatgatggcccttgtgtcacagccgacactcttgaccagtgagtcctctctcctccctttgttgactcctgaccgtccacaaatgaggttcagaatcctccatccagcatcttccctggtcacatggtcccaaccttttgctccacccccttctctgttccccccgcagtccatgctccagccatcctgactctgtccctggatttctggcttactgacacctgagcctgtgcacaggccctcccttctgtatagagcacgcttcccatcttgtggacttgcttcccatcttgtggactcggagggttccgagcagccgttgag

SEQ ID NO: 3841 - DNA, 492 bp, Homo sapien
  misc_feature (1)...(492): n = A,T,C or G
gcggccgcgcaattcgcgcaaaccagcggcgtgcgtggacctggaaagagttgaaatacgagcgctatctcggngatttctgggccgaggctttatggcatttgtgcggggaattccccaaccaggccgaataccataactggtatgcggaacctgcgccgatctggaggccatgaacatgggcctgccgccttcctcattgggtgtcaacgctgaagccgcgctcggcatccccccgcttccacggcctgaaacttgctatactgcgcacgtaatattgacgacaacacccatgaaaatcggtctgatcgcccccttttttatgccggaaatcggcggcgcaaatctgtattgttatgaactggcacgcgccctgggtagcctgggccacgaagtccacgtcttttctattcccggcgcactggaagacccggcgtaccgtttgcatcccatcctcacccgaaaactggagcatgacattccggtgttgct

SEQ ID NO: 3842 - DNA, 405 bp, Homo sapien
ttttttttttttctttttgatgaaaatctttaatttttatttagttatacttgtacggacacgtgtatatacaaatacagatcgtatgggtttgtttgtgtgtgggtttttttttttttacattttcttttacgtttatataatgtcagcatttcaaaacagcactcgatgagtaagtgcaaaggaactgcaaagcagggcagtacaagcacaggaccacacggagctggacttcacacccagacgcacacacaatgagtggcttcaatggggtgtcaagagtaagcatggagagcggattttgactcatgggtaacctccgacatgccagcatctattaaactgtacagacaatgggagcaagcccattgtagggagatttgtctcacatcctagcagccctgg

SEQ ID NO: 3843 - DNA, 370 bp, Homo sapien
agagatggggagtcgccgtgttgctcaggctggtctcgaactcctgacctcaggtgatccgcctgcctcggcctcccaaagtgctgggattacaggagtgagccactgtgcctggcctatcccacttggtttttgactgaaggggaagtgtagaaatatattgatttgtgatttctggtgtcacctgtgttaccaaaaatcaaaacaaatcttgtttatgttttattactattattatttttgagacagagtctcgctctgtcgcccagtgtggagtgcagtggtgtgatcttggctcactgcaaactccgcctcccaggttcaagcgattctcccacctcagcctcctgagttgggtcctacaggcgca

SEQ ID NO: 3844 - DNA, 470 bp, Homo sapien
acacttaagtctgtgcattttattacatgtaagtaacacctcaatctgaaaagtatcagggcaacaccacacactgcagaggggcagggctcctccggcagttactcacttcccttgaaacagaagctcaaacatggagtagtcttctgtgactaaacttgttttccgccctcccaacttccaggaagaaccttcttctgaataggatttgaggtaacttaggaaactgctctcaatacggaattttaaagttggtgaggaagtcgacagaaggggaagtcacagtaggaaaatcaaggtactatcaggatgaagtcagcacgcagagcaaggccagcgaggcccaggcgccaggcccttggtccctgcccacctcacccaggccagccagacagcacggactgccctacaaggtcacctcagagagatgggggtgttctctcactgctggcttttgatgagcccaggag

SEQ ID NO: 3845 - DNA, 247 bp, Homo sapien
tgagttacaggggattttattaattataaaatgcaatcaatttaaattacgtaggtttaagactagtcccttggataagccccaagcgaatttgtcttcagattattaaaattagtgctgtaaatcagggtgggcaattcacagcctttctgaactgactgaactagagcttgcagtgaagtgttctgctgagactgagcaccttacagatatttttctccagaagatggtgctgggtaataaaatc

SEQ ID NO: 3846 - DNA, 435 bp, Homo sapien
cacaggcagacttcagctgtacaataacaggtgttttgtttaattaaaattatactgttctgcagcatttagacatttgtcacatttcattagctttgacaaccatactgtaacattaaacctagcattccacaagagaataaatataagattgaaactgtaaaatatatgcaactgtgtgttatttgtaggaaatggtcactagaaagagcaaaagattattcaggtatacaggttttttttcattgtttaggattttaactcaaaactttatgtagaacatttcagtatatttgagttgaatatttttttattaactatttatttgctagttccataaaccagctctttaacatagcttatagtaattgatattttcttagaataagtacagagcaatatatcattaaagggctatgaaggggcaaaagaaat

SEQ ID NO: 3847 - DNA, 420 bp, Homo sapien
tgaaagagtcaaatatgtaattacagaattgaaacactgtgttaattcacaaagtatagtaaataataaacattaaaaatttcccaagtaatgatgacttaagcgttcaaaatccagttatgtgctttgttattgaaaacagtccaaacaaaaattcttttgttgttttctgttctctttttcaaaatacataaatcctactgaagttagtctattttttcccacttcagaacaccaggcactgatttatccattgggagttttgctttgccttctaatacggtgaaattgtgcagcctgagcgatacgcatgatgtcctgtgtagcgaatgtcacagcgcacaacattgttggtatagtcagattcaggaaccaggtagctgggttttacactgacctttaggatatagtttccaggtt

SEQ ID NO: 3848 - DNA, 445 bp, Homo sapien
  misc_feature (1)...(445): n = A,T,C or G
ttcggaacgaggcgggcagtgacacagacccggacatggccttctgtaagagctttcgagacaagggcatcttcctccatctgagcaatcagcatgaatttggccggctcctggacnttccagatacgacacggagcacctgcaccccgacctctggcagatcttcgacaaccccgtcgactggaaggacagtacatccacgagaactacagccgggccctggaagggaaggaatcgtggagcagccatgcccggacgtgtactggttcccactgctgtcagaacaaatgtgtgatgagctggtggcagagatggagcactacggccagtggtcaggcggccggcatgagcgcgggcgnctgatgaactttgtggttcgctaccggccagacgagcagccgtctctgcgcancaccacgactcatccaccttcaccctcaacgtt

SEQ ID NO: 3849 - DNA, 322 bp, Homo sapien
  misc_feature (1)...(322): n = A,T,C or G
ggattaggctccctggggcccctgctgctgtgccacctgcccacccaggtccccacctcctgcagcccagaggagctctgcaatgtgggacactccctgctggcacagcacaccagatggacatgttggatgggctgtcctcnccccaactgtggccccccaaggaggtccccaagatctccaccccagtcatgctgatggggccttcagcacagctctgtcctgggtcgatggaggaaagcccagccccatggccttgcgcttcctgggcatcccacatcgtgccgccgacactgtgtcccctggggagtgaaggggcagg

SEQ ID NO: 3850 - DNA, 430 bp, Homo sapien
ctgccctccgccccgtccccccatcccgtttccctccaggtgttgttgagggcatttggcttcctctgctgcatccccttccagctccctcccctgctcagaatctgataccaaagagacagggcctggcggcagcacgagcgaccagagtgctcctcagccctctcttgccaaaaagcacaagatgttgaggcgagcagggcaggccccggggagcgggagcatctttctatgaatctatttttcttcagactgaggccttttggtagtcggagcccccgcagtcgtcagcctccctgacgtctgccaccagcgcccccactcctcctcctttctttgctgtttgcaatcacacgtggtgacctcacacacctctgccccttggctcccactcccatggctctgggcggtccagaaggagcaggccctg

SEQ ID NO: 3851 - DNA, 329 bp, Homo sapien
cagtacctgtggattttcagggactctgtttttctccggtgccttagcgacaaagcagcactttgtattattttcaaataattagaaaaacagttttcaactcatcctttccattcattgctctcagagttgtggtcactgacttttcttttgaagaccgcctccaccaacacccccgtttgcctacaccaccccccttttacttagtatgtttattttttgtgtgtctcttgccttcctcccacgttttatttcccctcagagctgtgaatgggcaggtctgtctctggtttggcatcactgagtttttcccatgcattggccccagg

SEQ ID NO: 3852 - DNA, 423 bp, Homo sapien
tcggcacagggagtgggagggggccttcctccagggaatgtgactctcgcaggccccagagctaaagacagcggaaatagagcccaaggagcatggcagctggagggaaggagacgactacactcatctgctctgcccgcggcactccagaccccaaactcagctggagccaattggggggcagacgcacgagccaatccccggacggcaggttgggtgagcagctctctgaccctgaaagtgaccagcgccctgaccggaatggatctcctgtgaagcctccaacccccacggaaccaagcgccatgtcttccacttcggcaccgtgagcccccagacctcccaggctggagtggccgtcatggtgagcgtacagcgtgggcctcctgctcctcgtcgttgctgtcttctactgcgtgagac

SEQ ID NO: 3853 - DNA, 129 bp, Homo sapien
ctggtcctttctccccttccagacctattggctatgagtcttgtctagcctaatttacctgcaggctgagcaatatcctccctttacacaggattactccccagggaagagccaatgttttccacccat

SEQ ID NO: 3854 - DNA, 416 bp, Homo sapien
tagtccttctgtattttatttagttacacacaacattaaaaacccaataaaaaagaaaagaaaaatataactcttccaaaagtcgaatttttgattggtccacacttgccctctgtcccaagatccttttttccaggatctaacataataggtctagttttacattcttttttagtgcactgtttatattaatattggcttgtaaatgcttggctgtgatagacagcatgtgaagctccctgtgatctctgagtggctatggtcttgaatcctggggatgagcactaattttcattgtcattactctattgcacaattacttttccttgtattgctaataagcagcttgtctctggttatacactctcacctagttggatttttttttccactggagtaagaaaagctacatgaag

SEQ ID NO: 3855 - DNA, 482 bp, Homo sapien
gtccttctgtattttatttagttacacacaacattaaaaacccaataaaaaagaaaagaaaaatataactcttccaaaagtcgaatttttgattggtccacacttgccctctgtcccaagatccttttttccaggatctaacataataggtctagttttacattcttttttagtgcactgtttatattaatattggcttgtaaatgcttggctgtgatagacagcatgtgaagctccctgtgatctctgagtggctatggtcttgaatcctggggatgagcactaattttcattgtcattactctattgcacaattacttttccttgtattgctaataagcagcttgtctctggttatacactctcacctagttggatttttttttccactggagtaagaaaagctacatgaagcaagtagaacagaacaacttgttccctatgtgctggccattggcctgcgtgggcatccagcctaccat

SEQ ID NO: 3856 - DNA, 483 bp, Homo sapien
tttcatgctccaagggtttattaataacctctgccagagactctgcccccagggagcagcctccccatggccgtggtgcaggtgtgcagcaggaaggggatggcgacacagatgaccacgtcatcgtcttctgagctgtggttattctttgaaagggcaggaggaagtcccactgctctggaggtgtggaagggtgggagtctggtcttcctggaggcggaggtgagctagaaacggcacggctcttccatctgtttcaagtccagcaagtaccataggtgcctgggcaggggcctgaaagccctgatgaatccctgcatgatctcatcgtcctccaccaggactctggccaggtactgcgacatcatgctctggatgggggtggtggtgtcctgtaggcagagaaacaggaaattgtcgtagtcagtatcgagcagcgtggcctcgttcgccaccgtatagttgatcttgaacttctttgga

SEQ ID NO: 3857 - DNA, 342 bp, Homo sapien
tgctgttttctcaaggtctttatttgaaaggaatgtatacaatataaggcattcaactgatatctacctaccttatctatatattacttccttatgaacagttctgtcaccaggccaaatgtggccaaattagcttgcacaaaatccaaacccttgtgcctgacatgaacattctaattttgtgtttcactaagctttataaatatatttcttctatttaatttactacgtctcttttcagtaccaataaatatgttcgtctgctgtatttctgttcgtatttctgagtttgtaagtaataaagtattctaattagaacatgaaaaacatgatattaacatc

SEQ ID NO: 3858 - DNA, 106 bp, Homo sapien
ccgcacgcacagcggtgtatagcgctaccgctgcctcgactgcgtgaagtccttcagctacggttccatcctgtttcagcacctttgcatccacactggtgcgcgg

SEQ ID NO: 3859 - DNA, 534 bp, Homo sapien
tggcaaataattcttacttttcccaggactgtataacaaatttaaaaaattaaattcttgttatttctgagtatcaaaaccaattttatttacattaacatattacattgttactgtgtggataaatgtgaaatatattattaaaatcagaacacttaaatgtaccattatttattgaattagctgtggaatttaatttactgaaatcctctaatgaaacagcactacaggaaactcccctctcccctaggtttattttttcccccctcaaagccattatatcttaacatataaagggaacctgggagtagagggattaatatctttttgtaataaatatggtttagttctaaattggaacatccagataccaatatgctcactgaagtcaaattattttgtaaactgcaggtaccacaaagaaattggatctgcattactatgaaaattccaatgccatgataatccataccaccagtatagcagcaattctaacagcccccctactgtcatactaatgcaggctgaccagtc

SEQ ID NO: 3860 - DNA, 416 bp, Homo sapien
acttttcaattttattgtataacttttcattaaagtgagaaagccattatattcataagacaaacacagtatcaaagaagttaaagtcattaggtaatgaaataacaatcatctcaaatttggatgcacatgctcaataactttttctctcagcctaaatgccttattgacagggaaaagttatatgagaggaaaacaaagtggcaagaaaactgcactggcccctcaggacaaaaactcatcagggaaagattcaaatgttttaaagttctgcaaaagcaatatgaaaaaccaaagtccagcattgggggcgggtaaaggtgggtttgtgaataggaagaaaggctggaagtttcagctcccttacagagtacctggaaaaaagacactgattagtaattacatgagctaaattc

SEQ ID NO: 3861 - DNA, 440 bp, Homo sapien
ttaaaaagaacttaagtataattttattctattctgcatcaatgccatacacacacaaaaaaatgtttggatcacttaataagttataacattctatgttttaacattaataacaaggacataaatgatcatttcctgagttaacagtgcaaggtaaaatttaatctgtattgctaataagacattttacagcatagaaacatgatcgaagtgatcatttactttatcatgtcataaaacacaagtgcttattgtagaacagtgatataatttaaatggcaaggaaatttgtgattcataacaaagaatcctgtatgtatttgttgccatgattaactttccaggtcaaatatcagtagtaaaataagttgtggtacaaaagaaagccaagaagttacctgtactgaaggaacatttgatttcatttaagaaactgaagg

SEQ ID NO: 3862 - DNA, 123 bp, Homo sapien
ttcctttcccccgtattattgttattatttatttttattttttacaaaacaggagaaaagagtgaatcgggttgggggaggtgacacatttctccacaaaggtacaaaattgcctatagaaag

SEQ ID NO: 3863 - DNA, 121 bp, Homo sapien
tcctgtggagaaatttcactttaatgcctagacccttcagggacttattgtcaccgctgtgttctccactggggagtgtttccccatacacttggggtcggagatctaaaagagatttggg

SEQ ID NO: 3864 - DNA, 614 bp, Homo sapien
taaaatgtgaaaggagttctttttaatacccagggtaatacaatatccaagatataacattaagtgataaaaaacaaagtgtatgacagtatagatgacatcctacttatattttttgaagcccgcagattttatatgtatgtttgtgctttacatgcctagagtatctctggcagtgtgtgtaagaaatggatcaaaacagttgcctccagggagaggtaatgggtgccggagaagagagggaggcttaggttttccactagatacctatttgcgctttttaaattttgcaccatgtatgtattaagcattaaaaataactgagtttaaattaacagaaaagaaaagaaaacccagtgagcctatgaagtgttgattctcattttggtttcttttttcttttttttaaagatgaagattaagtttgttttatttattcttgattcctcttttgcctttcaaagtcatggtcatatattaagtaggagattccaggttctaaagtaaaatatcgaactgagatgacagcattagaaaaccaggcccaggacctgggattctgggctgagacaaagaactcaatcccaaaacacaattttctgataaattagaac

SEQ ID NO: 3865 - DNA, 311 bp, Homo sapien
  misc_feature (1)...(311): n = A,T,C or G
gcggggctcggatgcaatcgggacctcctcctggactgggccggggcggactccgggacccagggcgccgggagcggcgctacctgcgagtcgagttagcgttgtcgccgaaccgaagtgagagggcacggggaagggtcaaagagcgtgccgaagcgctggagggagcttcacggacgcgagctaggcaccggctcgcctaatccggtactaatccggcttgctgcttcccgtccaggcctcgctcgccatgggggaggtggagatctcggccctggctnacgtgaagatgtgcctgcatgctgcccggt

SEQ ID NO: 3866 - DNA, 173 bp, Homo sapien
gacaggcggacagggccggggtcacgtgggcccggcgaagtgtccctcggtccctccgcccgccacgtaggcactgcccgccccctccccggcctgctaccccttggttccgccgccacgtcaggccgggcgcaacgcgacggggtcggcggccggaataggcaaggccaggt

SEQ ID NO: 3867 - DNA, 104 bp, Homo sapien
ctggagccaggaggtcaaggctgcagtgagctgtgatcacaccactgcactccagccttggcgacaaaccaagaccctgtctcgaaaaaaaaaaaaaaaaaacc

SEQ ID NO: 3868 - DNA, 453 bp, Homo sapien
ggcttctatccctaaccctttcctacctttcctctccgtcaacatgtcctcatactgaagacaaacttgtttcaatgatagtcttcattttcaaaaacaaaaaggcaggcagacagaaataatgatgttttcttgcactaagaaggtactacttgtacacatatatcaaaacctcattctgcaaagtttttgaaggtttcaatgggaaatttgattttattacaaaataaaacattttttaatgttaaagtttatatattccatgcttgttttctcattcactggcatggatgatcaggagctgcctatatatgaaggcagaatcagactatcaggaaaggagctggccagggccacagccagtcaagatctctgagcaacttagagacattggtgtcattatatgaagcttgcatttaatacatttatacataatacatttgtacatttaat

SEQ ID NO: 3869 - DNA, 464 bp, Homo sapien
atagaggtggggcttgtggtacttaacacttgtagccatcaactgactgagaccttgggctaaataatcaattgtgctgatattacatctcgttatggaatgttcctaaatatgccaggtagacaccagcccaagtaccctcctccagaagtctgtgactaccttgtcactactttaggcccattccacaaagcccatctctggtttgagaattcattttgatctgtatctacaccacccaaagttaggcctcctataatgtccaaaacattcctttcagcctttttatttcttactgtactgtctcttactgtactgtctatctgcagtaattgaggacccataaaatttagataactacatgtctttgctcttagaattgtcactcagcataatgagcatttagcgttgaaggcaatgtactgttttgtgttgatctatgtaaaagaatataattctttttt

SEQ ID NO: 3870 - DNA, 415 bp, Homo sapien
ctcaggaagcctccaatcatggcagaaggcaaagggggagtgagctgtctcacatggccagagcaggaggtagagaggggaaggtgccacacacttacaaacaaccagatctcaggacaactcactcagtatcaggagaacagcaccacaaaattgtggttaatcattcatgagaagcctcccacgacccaatcacctcccaccaggccttacctccaacatctgggattacaattcaacatgagatttggtgggaacacagatccaaaccatatcacgcacaaattgcaattacttcacactcacgataacccattaatctgtgaaggattaatctgttcatgaaggcagggcctcatgatggaatcacatcttaaagcccctacgtctgagtactgttacattggggatttag

SEQ ID NO: 3871 - DNA, 140 bp, Homo sapien
  misc_feature (1)...(140): n = A,T,C or G
gagncctcgatcctccctnnganagacaggccagtaggagtcttagtgtatttcttaacctttnctgtgtagngntctgtgntntgtgtaaatgagtntttcttcttcatncttttgcttgcaatntagtcaataaaacc

SEQ ID NO: 3872 - DNA, 235 bp, Homo sapien
  misc_feature (1)...(235): n = A,T,C or G
ccantgcaggctcgtnnctgttnacttcccaggnctgttgnagccaccaatcaagggnattgaaacacagtcctncagngcacnagccagacacacctttatnnctnnnnctctccntnntggtgtgngcccancgcctcgagagaccagtcgcttttactnctttntagtnactcntngtctccagggtntcttcctnggaaaccagngcccccgtgccccaccgcttccatgg

SEQ ID NO: 3873 - DNA, 220 bp, Homo sapien
  misc_feature (1)...(220): n = A,T,C or G
gtcaaactgggcccttattcncggacttcaacggattagccaaacaatctcataggggattaccctaagcatcaatctggtgtgaacgttagtgagaaatggctcctttaagctctgcaaccttttgtcggaacacaaagagctctcattagaccggggatcattaacggtggccataaaatgatttgtttgcccagtgtcacagagcaagcccaccccc

SEQ ID NO: 3874 - DNA, 225 bp, Homo sapien
  misc_feature (1)...(225): n = A,T,C or G
gcaggtggcttccggtngccgcacgtggccagagcgtgtcantgntnnagctgacctgccgtgcgagaggacctgcgaaatatgagcacatcaagaaggtggtgaagcaggggcgnagnngcgcctcgangcatcctgggctacactnagcaccaggtggtgtcctgggacgtcaacagcnacacccactcctcgacctgtnaggtgggcggncattccctcaac

SEQ ID NO: 3875 - DNA, 140 bp, Homo sapien
  misc_feature (1)...(140): n = A,T,C or G
tttgagcgactgtcattctatcggagcaggatttccaggtggatgtccgtttcatgctgtgagcgatcagacaagctttacattgtaccggtgggggtcanaagttgaggctaacgttggaatatcagggcattaagaaa

SEQ ID NO: 3876 - DNA, 148 bp, Homo sapien
  misc_feature (1)...(148): n = A,T,C or G
aaatatttacgatttcctgtaagagtnctncagtgctaccaaatgagtgccacagcatgggtgcaaggtcggcaacacagtctcgcgtcttgcttagctccancagagcattgtcccgagtcgcggnactgnacagctcagtnatcca

SEQ ID NO: 3877 - DNA, 358 bp, Homo sapien
  misc_feature (1)...(358): n = A,T,C or G
catgctccaagggtttattaataacctctgccagagactctgcccccaggagcgacctccccatggccgtggtgcaggtgtgagcaggcaaggggatggcgacacagatgaccacgttanncattctgagctgtggttattctttgaaagggcaggaggaagtcccactgctctggaggtgtggaagggtgggagtctggtcttcctggaggcggaggtgagctgttgggtttacaggtcactagaaacggcagcgctcttccatctgtttcaagtccagcaagtaccatagtgcctgggcaggggcctgaaagctganntgaatccctgcatgatctcatcgtcctcccctcgtgcc

SEQ ID NO: 3878 - DNA, 195 bp, Homo sapien
aggggtacagatcagaagagatctgtttagttccctactaaatctccagagcctgaacaatgcctggacacagtaggcgctcaaaacctgttgttagtactgggaatgataatgagtgttgcagcctctggtgggtattagccccatttttgcagatggaaaggatcacagaatgtgtctatagcaacctcgtgc

SEQ ID NO: 3879 - DNA, 395 bp, Homo sapien
tcacaaagccaagatttattttttgaacaccgagtacaattgacaaatctctaacaagtttgattaagaaaaaagaaagcatgaataaacaattttagggataaaaagggaaacatcgctaaagatatcccagaaatgtaaaagataataagggaatattatgaaaatattcatgccaatacatttgaaaacttaggtgacatagacaaaaacaaaattgaccaaaattgagcaaaaaagaaacaaaatctgagtagtcctataacttagtaaaaattgagttagaaaagttaaagaagtctttacacaaatcaaacatcagactcagttttctaggagagttttgccaaacattcaagtagcagataattctggtctatttttggccccgaaga

SEQ ID NO: 3880 - DNA, 205 bp, Homo sapien
tgcagggataccacttgtttattcagcacgtgttgactgaatgtgagctgtgtggcaggcccagctgctaatcacgatgatactcgcagcgtcattatgcacttctcagattccgagcagcaacattcattcgtttctaaaaatcttgctgagcgaccatgacataccaggcagtccacagaatgcgaggcacggggtaagagaa

SEQ ID NO: 3881 - DNA, 346 bp, Homo sapien
atgttagataaactttatttaggcatgtgttctagtcctgtgggctcgtgagttcaacggtaacaactcaaccatatatatatatacacatatatatatgaatctttaaacagaaatacacataaaacaagattacatattgatcagctgatgaaaatatcacgaccaaagctcacaggaacgcaaccctgtatttctcctaggagcaacggttcacgtatggtgctaagtcagtgtctcacagtggattttacagatacggcgccactgaagcccttccgcgctcctggggttcaagacgatatctcctggcctcagacctcccgcagttagctggggatttaca

SEQ ID NO: 3882 - DNA, 296 bp, Homo sapien
ctgatttatacggtttacaaatacacgtacaggtaaaaatgacaccatcaagccaggcacagtggtgcacttacagtcccagctacttgggaggctgaagcaggaggatcacttgagcccagagtttgagtccagtctgggcaacacaggaaaaactctgtctcaaaaaaaaaaaaaacttttaaaatgaccatatcatggaaaattctggagagcagttatcttgggacagagatgaggcagttggcggggcggggcgcgggtgggggggaacaggggacaggggtggtcacagg

SEQ ID NO: 3883 - DNA, 137 bp, Homo sapien
taacttagaacaatactaggttcctagaagcatctggactgcaggtcacagtactgaagtgtctcaacacatggccctacgacaggcctacacagctccctccccacctgtgatccagagcacgaaatcggcttgcc

SEQ ID NO: 3884 - DNA, 313 bp, Homo sapien
gttatgcaagtatcccacttcattcaaataaattattctttccttgaagaaaagcatggccattagctctctgaaaaggaaagggtaagtttgggactgaactagtaataacaacaacaaataaaaccttcaaaagttgtggggaaacaaattattttcaaaaacaatttacatagttataccatcctcatatcatctacactgaggtaaacagatagacaagtacaaaatctgaataacatttgctgtatttaaagacaaagatgcccttattggctcttcaaagggcaggtgaggatttacattgatccaa

SEQ ID NO: 3885 - DNA, 391 bp, Homo sapien
atagaatttcattttaataagtatatttaaagtttatcgcttccaaaaaacagcactttaattacattcaagttgtattcattttaaataccaacaaacccatcatttacatatagagctagatattacaaaacagatggaaatttaaacaagttttttttttaagtccttccaaatttagaacattgtgaactattaagtacatgcctaaaaaatgtacacattatcagggaaacacaagttgctctaataggaaaagagccataatacacatacagtggaatataattcaaataggttcaatttacaggtatgtcttaaagtacaagaaaaccccaaagctaataactagaactataggccaaatcatagctgactttctaaactaatg

SEQ ID NO: 3886 - DNA, 457 bp, Homo sapien
cctttttctccagttttggaggagaactggaagggagtaaaaagacctgtccacagcacaaacttccactctggctgtgaaggactagccaattgctaaatgtttcatcacggaggtgctcgatcatattatataaaacactgcaacctccttttcattacatccttcatatattatggatccatcatacattttaaacaaattagatgaaaacagctagaaaaagtaaacagaagtttttgagggacagggccatgagagagcagaaacccagggagcaattttaaattaatttgactaaaataaagagtatagtcttgcaaaatgtgtacggaagggagtgggcacatgggaacagggcagagcaacagcagcactcaggatcctttcatcagaaaggggaggcattcaggaagacttcagttgagaaaaaggtgttcaaaagacattcaatgac

SEQ ID NO: 3887 - DNA, 493 bp, Homo sapien
tttggggataatttattatgcagcaagagataatacacaggacttctcagagcacttaatatgttaatataaatctccaagaaaaaagatatacaatgaaacattcctcttagagtatctggccaaggagactttctttttttgagaatattcttcagaaagctgatctaatgatatggctctggtcctacaattccatgtaacttctaaccttgattttgtctcatgagcaaatcatttatccttccagaacctcaacttttcccttttacaaagtagaaataaaccatctgcctttacataaatcattaatacagccctggatgggcagattctgagctatttttggctggggggtgggaaatagcctgtggaggtcctaaaaagatctacggggctcgagatggttctctgcaaggtagcaggtgggctcaaggcccatttcagtctttgttccccaggccatttccacaaaatggtgagaaatagtgtc

SEQ ID NO: 3888 - DNA, 458 bp, Homo sapien
gatggatctcatatctacacctttccgcacgcctctttctctgagcctctatatcctgttttcagaattttgaccttggagcccactgccctgaccatttgcccaataccaaaagaagtagagagttcccccgatcctgacctagtgcctgatcattccctggagacaccactgaccccgggcttagctaatgaaagtggggagcctcaggctgaagtaacatctctgcttctccctgcccaccctggagctgaggtctccccttctgcaacaaccaatcagaaccataagctacaggcacgcactgaagcactttactgatattcattccattattccatatgacagttgttttgagtttcgtaccaccttattgtccccttatacagataaggaaactggggtgcagaaaggtgaattaactttacaaagtagacatgacaagtgaacagcagagc

SEQ ID NO: 3889 - DNA, 440 bp, Homo sapien
cctcgtgcggaaactcttgaagagccacaatctcaatgtgaattggtacatgtactgccccgagagcgccgtgatcttgctgtctaccacggtcctggagaatgtcctgcagccttttcactttagggctggcactatgtcgaagctgcccaaatttgagattgaattaccagctgcgcctaagtcaactaaacccagcctttccgaaagagacatcgcaatggctaccatatacgggcagctgtatgttctcttcttgaggcatcattctcggacctccaacagcacaggagcggaggtggtcctctatcatctaccacgagaaggtgcctgtaaaaagatgcacatattgaagttaaataggacgggaaagtttgccctgaacgtggtggacaacctggtagtcgtgcatcatcaggatacagagacatcggtaatat

SEQ ID NO: 3890 - DNA, 391 bp, Homo sapien
aattcggaacgaggcgaaacgtggatgtctacacgaaagtctgcaaatatgtggactggatccaggagacgatgaagaacaattagactggacccacccaccacagcccatcaccctccatttccacttggtgtttggttcctgttcactctgttaataagaaaccctaagccaagaccctctacgaacattctttgggcctcctggactacaggagatgctgtcacttaataatcaacctggggttcgaaatcagtgagacctggattcaaattctgccttgaaatattgtgactctgggaatgacaacacctggtttgttctctgttgtatccccagccccaaagacagctcctggccatatatcaaggtttcaataaatatttgctaa

SEQ ID NO: 3891 - DNA, 434 bp, Homo sapien
taagacagaaaaggttggctggatttaaaagcaaaaatgaattcaaattgtgacttttatgaagcaaatcctactttcaactgcacaaatcactcctttgttagattttcagagtagatggtaatgtcactaaaagctgtttacagcccagcaggtgtgttttggtttaaaaggatgtgctttccttttaaactcgagtattcaattaccttcccagccgcagggagaagtgtgagctagggaccaagcgagcttcagaggcagctctgaagatgcaggcaggagggagtggggcagggggagctccacaaggaagagcaacaggggagccaatgccttggactacgcgggatcagtctccttgctctcttcagaactgggaattctcacgacagatgcaccctcgccaatcacgcaggactgaccggggcgtc

SEQ ID NO: 3892 - DNA, 354 bp, Homo sapien
ttttttttttctttttttttgtaaaaaaaaaacacagtggtttattgaatacttacaacgtttacaccttcaatattaattaaattccatttagttttagaggacggaagtgcacaaaacaagtggctgttggaaacatcttcaaagagggaacgaccacagatgaatggatagcactagataccgaccccaacggaaatgttagcggccctgttttctgctttgaaataaaactttataatacccaggaatatttatatccaaaggccaagtattaaagatacacttcacaaacgcactagtgcccactgtctttatctggaaggggttgagtaggttggcggggggcaacgc

SEQ ID NO: 3893 - DNA, 383 bp, Homo sapien
ttctgtctaggccatctagggcttacatgccctctacagtaaactggaacccaaaaccctgcgcgttctctcgaacgcccggccaattaagctctctggccaggacacaaaccccacgcttaaaccggaatcgcacgggaattaaggctcgggtttcgcgtggcctttttgccaagggcacaaggactgggtcctcccagagaaccccgggaattcgggtcacccaacgtttgtctcgcgagaaatcccagagcatttgggccaccagaacattattcgacgactgcagacatctagcaatttactccggataaaatgctgatgatcttccacctgtgtagaaagacgcttatacatgactcctcgcttggtgaagatcatct

SEQ ID NO: 3894 - DNA, 379 bp, Homo sapien
atccactcgctcagtgtctcgatgggcgagccattgacgcaccactcggtcacgccgaactgccgcagtgtgcccgtgcgtggctggccagggccttgcggttttcaaagtaaaggccacacagctcgcagcaggcctcggtggaggagtgggaggtcttctcatgaagggtctttgccttgaagggcagttcagtctggatgtaggtcttggccttgacctctgctgggaggaggcggtcctcctgcaggggccgcttggctgccactgagcccaggtagccagtggctgagggcttggcccacgtgatgggcgtcaggctgagctcacgaggaacctgggccggccctgcacctggtttgcctggccggccagccag

SEQ ID NO: 3895 - DNA, 333 bp, Homo sapien
ttttttttttttttttttttttttggaggtgtccttatgagtatatttatgtgtcacacacacatgtacacactcaatgctggacgggagggaggttgagacggacaggacaggaggaggcacccaggtggcactggcacaggggaggagaggggacacagcgagtgtgtggccccactttggccccccaccgcctcccaacaggaggtggacctggagctggaagaacaggaaatgcttattctcttagaggacagtttcaaagtgcagaaatttctcttataaaaatcctcttccctccacgctctgccccttgctgaagcccagccccct

SEQ ID NO: 3896 - DNA, 421 bp, Homo sapien
tttttttttttttttttttttggttatgaaaacttagggactaaaattaatataaaaattggcataatgttggattgaatctacattttggcagaagttaaacattcccacataatgtcaaaattatacatcatgcagttctgtttttttgtttgttttattttgttttgtttttgagtctggctctgtcacccaggctggagtgcagtggcgtgatctgcaacctctgccccccgggttcaagcgattctcctgcctcagcctcccgagtagctgagattacaggtgcgcgccaccacacttggctaatttttgtattattagtagagacggggtttcagcatgttggctaggccggtctctcctgacctcagggtgatcagcccacctcggcctcacaaagtgctgggattacaggcgt

SEQ ID NO: 3897 - DNA, 417 bp, Homo sapien
ttttttttttttttttttcactcatttagcaaatatttattgaaaccttgatatatggccaggagctgtctttggggctggggatacaacagagaacaaaccaggtgttgtcattcccagagtcacaatatttcaaggcagaatttgaatccaggtctcactgatttcgaaccccaggttgattattaagtgacagcatctcctgtagtccaggaggcccaaagaatgttcgtagagggtcttggcttagggtttcttattaacagagtgaacaggacccaaacaccaagtggaaatggagggtgatgggctgtggtgggtgggtccagtctaattgtccttcatggtctcctggatccagtccacatatttgcagacttccgtgtagacaccaggctttcgggtgatcgcacaggg

SEQ ID NO: 3898 - DNA, 238 bp, Homo sapien
gaagcgcttccagaacgtgttcacagaaagggtccttggatctgttgcctatccagcataggaactgggtagttatgatgccatatttgaaaatgagaaagctaaagttgatgtattaaaagagcatttagtatactaaggactacttgtagaggtagtagcattatagataatcgatgctggggcaggcatgctgaggctcgaggagactatgctacatgtataagctgtaatcagc

SEQ ID NO: 3899 - DNA, 168 bp, Homo sapien
ttcttttttttttttgcacggggagacagaattcgtttattgggatcactgggtggaggtggaggaagaactgagtggctgctgtcctggtctggggatggatcaggcaccaaggttaggggagggagcccatcaccatgttagtaaaataataaaacagtggttgga

SEQ ID NO: 3900 - DNA, 396 bp, Homo sapien
tctgcccttcatagcaaatcacccatttagcagctgaaacagcaccattttattatctcacaggatctgtgagtcaggagccagggtaccacagcctcaagggctctcaggaggttgtaactgagggttgttttttggggtccatcatcttggggtcttcttctgagcccactggttattgacagagctcagtgccttacctttgcagggccagggtccccgttctggccagtgttggctagggacacttgcagttcccagacgctgccagctcgggactctgttccaccgtggtggtctgcccctacagtgctgcaggctgagctgacatttgtccatattcagttattcgggccagtgggagaatcatctttcagaaagggtttggggcccggt

SEQ ID NO: 3901 - DNA, 391 bp, Homo sapien
cacgttttaagaaatttattctgaggcaaatatgagtgaccaatggcctgtaacaccactctcaggaggtcctgagaacatgtgcccgaggtagtagggccacaacttggttttatacattttaggaagacataggcatcaatacatgtaagatatacattggtttggtccagaaaggtgggacaatcggaaggggttgcggtggggaggtggtgctttgaagtcacaggcagattcaaagattttctgattggcaattggttgaaagagttatcaatagaaaggaaagtctgagttacaataaggggttgcagagaccagtgttttgtcatgcagatgaagatgaagcctccaggtagcagacttcagggagaatagatcgtaaatgttt

SEQ ID NO: 3902 - DNA, 187 bp, Homo sapien
cttgctggccatgtgggccatctggccaaccagcctgttgcctgtggcgcacaaatcgttgtcatagcgggaaacctgcccgataaagaggtccatgagtgcaaagtcctgccatcgtcaaaggttgaccgatatgtgaccctgttaaaatttgaggagacctactggtgctcagtgtagccccgga

SEQ ID NO: 3903 - DNA, 491 bp, Homo sapien
gcggccgcactacagccaaacaactcggagcaacaccctgccttcagatgtgggtaggaagtcagtaaccctgagaaaaatgaaacaagaaataaaggagatcatgtctccaactcctgtggagctgcacaaggtgaccttgtacaaggactctgacatggaggactttgggttcagtgtagcagatggcttactggagaaaggagtgtatgtcaaaaatattcgcccagctgggccaggagatcttggtggcttaaagccctatgacaggctcttacaggtgaatcatgtccgaaccagagactttgactgctgccttgttgtgcccctcatagcagaatccgggaataagctggacctggttattagtagaaacccactggcttcacagaagtctatagaccaacagagtctaccaggagattggagtgaacagaacagtgcttttttccagcagcctagccacggtggtaatttggagacacgagaac

SEQ ID NO: 3904 - DNA, 382 bp, Homo sapien
tcacgttttaagaaatttattctgaggcaaatatgagtgaccaatggcctgtaacaccactctcaggaggtcctgagaacatgtgcccgaggtagtagggccacaacttggttttatacattttaggaagacataggcatcaatacatgtaagatatacattggtttggtccagaaaggtgggacaatcggaaggggttgcggtggggaggtggggctttgaagtcacaggcagattcaaagattttctgattggcaattggttgaaagagttatcaatagaaaggaaagtctgagttacaataaggggttgcagagaccagtgttttgtcatgcagatgaagatgaagcctccaggtagcagacttcagggagaatagatc

SEQ ID NO: 3905 - DNA, 310 bp, Homo sapien
attttacatttttattgatgaccacatcatatctgttaacatgtactgcataagcaggttttctttaaaaaaaaatgtatttaacccagcagcaacttaaaaaacaaagtattttaaattaagacattatattcctttttcagagaacatgtagacaaaacaagtctaaagggtgatccaattaaataaatttctgtctctgggggctaggacctctgagttggttctcaaagtctgcatgtttcacattcagtacctaacaagatattcctcactgtaagcttaaagtaagcaatgacatcacaatatg

SEQ ID NO: 3906 - DNA, 362 bp, Homo sapien
ttaaactgtatgttctttattgtcctaaaattgcatagtacttttgattgtgcacgcttttaaatagagagcagagttgcccacttgaaactactctcttgcatgggatatttcaagctgttttactatgggcaaggagcagggaccaaaatgctgccagggcttaaaaagagccgtgatcagattaaacagaagttggagaagtggagggatgtgggccacacacgagaagaaaatgttgaaggaggctgagatttcaactggacttataggaggcataggtggatgcaggaggggctccacggatgtcagagaacaggattcaggagcagcctagagaggaaagaaaaggagaaaggagt

SEQ ID NO: 3907 - DNA, 424 bp, Homo sapien
gttaagttgaagactgaaaatgggaaaatttggaaatgtctttggaacctcaagtacataaaagcctgtaagtgcttcatactcattaacaacataggcatagaaaaaagataatccttattctcaagcatagccttttctaataagttcatgttagatgtcatgaagtttagtgaggagtgaaaatctatgaggaaaaacatgaaccattctactctggcaaaagttcaggacaaacaccataggcctgtataccaaattttaaaccatgttgaataatgtgaaaaaaagcatcacattgcttatgaaaggctttcctgtcgccccttaatacttctgtctcaggctaacatgtttgttaatgagttacagtggtgaagttaaggaaatctgcttcctgtcctagcatgcccattatcccagc

SEQ ID NO: 3908 - DNA, 121 bp, Homo sapien
caggtttcaaatcatgatgttttacgagctgtttgagctgaagttctagctgattgtgaactgaatgcatcaagagttggtcctgtacaagaatctgctggacctagaattcgaaggtgtg

SEQ ID NO: 3909 - DNA, 490 bp, Homo sapien
cagacagaagcactgtttggatggctttggaagccaggaggtgggacctgagggtatggggtctgcaggctgactatgtgttcgttttccaggtgactttgacactgaggctggagctgtgtcctcctcagagcccactgtggccagagatgagccagagagcctagccctggctcagaagtcaccggcccccaaggtcaggaagccaggcaggaagccaccaacccctggcccggagaaagcagaggcagctgctggggaagagtcctgtggtgcctcccctacccctgctaccagtgccagcccacctggccccacactgaaggcccgcttccgcagtctgctggagaccgcctggctcaatggcctggctctgccacctggggccacaagtcctcaagaccagaccagccctcaccctgcccacagctgctggacagccagagccatcacctgtagcactggttgccagtgctgtgtgtatagcagt

SEQ ID NO: 3910 - DNA, 162 bp, Homo sapien
agaccaagatggtaaggaagagtatcaagaaattcatacggaatcagtcagagcgcctatgtcagaattctacgtaactggctgaaacgcagagacaatgacaacatggttcggagaatattcaatggacagatcttgaaacctcaccataagttatcgaag

SEQ ID NO: 3911 - DNA, 202 bp, Homo sapien
atctcttaaggccacaagtttgagaccagcctgggcagatcccacctctacaaaaaaaatccaaaatgagcccagcatggtggcatgtgcctgtagtcctagctactcaggaggctgagacgggaggatccctcctggctgcagtgagctacgatcataccactgcactccagcctgggcaacacagcaagcccctgtctca

SEQ ID NO: 3912 - DNA, 303 bp, Homo sapien
tttttttttaaaaaagcctgaaactttattgtaaaaaaaaaaaaaaaaagaaaatgaaaaacactctaaaaccctgagctggctgggggtgtcgtcagagatcagaaggacagggagaaggctcggtaacccaggttggtgaagacatccacccggcagctgttgcctgcagctgtcaggaccttgcactcaggcgcggcaggctgctggttgaggctgaggctgagcagccctggggaggagccaggcacctgggccttcagctccccgctcagctgccactggttgacgcagcggccctgg

SEQ ID NO: 3913 - DNA, 544 bp, Homo sapien
aacaatgtaaatgatttaatggtcacctgagtggtgtatttgaggagtacaggtttccttgtaggattttttttttaaggcatccattgagaaaaaagaaatgaacactatcagagaagaatcctgatggagatactgttttgggctagaggtattgaagaccccttaagataaaaaatgcatgacttggctcttccctcagagagctcatactaggtgttcaattcacattggtttctgaatggcttgaaaacaatgatatccattctcagagggctgagactggatctagaattggcacttcaatgcttggcagtacttttgatcttctaatatgccctcttgttttccagagcaatattgacaacgataattcattgaaaatttacatcagaccctgtgctaagcctgcattattttactgaattttaaaacaacactaagaggaaagtacctttatgattctattgagagatgacagaagaaactaagtctcagagtgagtcttacccaacttagtaagagctgggattataactggacc

SEQ ID NO: 3914 - DNA, 262 bp, Homo sapien
aaaacaacgccccgtgaccttacctccaggtgccgagcgtggcacagcagggggaggcctaggatatctctacctcggtgtccctgctctcggccgcctttctcacactcgctcctacgcgtggattctggctgcatacttgttccttagccgcctgctcaaatttcccgtttctgctgcgtccttgccacggaccctcgtcatttctgttgccgacgtgtctaggccttccgctgtcatgtcctctctgccgtactgggcc

SEQ ID NO: 3915 - DNA, 246 bp, Homo sapien
accaaattattttactgaactgacaagtgggtttttgatttgtcagttgcttggctgaactgatcaagtcgatagttgcttgacaaactcaccaactttagaatggccaatcgtctaaacaagtgtcagagctgattgaaataaaccaagcattgttgggctgaattatggagagacccgaggagtgactcagcctaaagcgttgacccagttgtgagcagctcacaggccctgcaggaggagcag

SEQ ID NO: 3916 - DNA, 364 bp, Homo sapien
aggctttattgaatttatttgctttgcatatatcttaaatcaaaaaagttaaagaagtagaaaagttgtcagaatatgcctttaggatttaaaaagaacttaatctcttcatttaaaaacagaactttgttgttaactgtggaaaagaaattgttattggagagttctcagagtgagaatagctgaatacaggttcactgtgaaaaaaaggaagggaggtgtaacagctgtgttgttaactgtggaaaagaaattgttattggagagttctcagagtgacaataactgaatacaggttcactgtaaaaaagggaagggaggtgtaacagctaatctaccaggagtacccagataaagggcatct

SEQ ID NO: 3917 - DNA, 348 bp, Homo sapien
tgctttttctatatatttattacaggtacaacagaggtcttcataaatagttgcataaaatgttaaagccacaacattgcacatgatatgaagtaaaaccaaaaaacccccaatgagtgcatttacagtattttcatctgactgtgtactgctccacaatctgattgacggcttggggcaggaacagggggaggggcagtggggcaggacccaacctgatgtcttcatgtgatgggaagaccctcggacccccagaggaagccccaggtggtgggtggggggtgggtaggggaggcaggtgggaaaatgacagaccgaaggcaggaacagtcttatatacaagtaagg

SEQ ID NO: 3918 - DNA, 391 bp, Homo sapien
ggtgtaggaaatgtatatttaatcattctcttgaacgatcagaactctaaaatcagttttctataacaacatgtaatacagtcaccgtggctccaaggtccaggaaggcagtggttaacacatgaagagtgtgggaagggggctggaaacaaagtattcttttccttcaaagcttcattcctcaaggcctcaattcaagcagtcattgtccttgctttcaaaagtctgtgtgtgcttcatggaaggtatatgtttgttgccttaatttgaattgtggccaggaagggtctggagatctaaattcagagtaagaaaacctgagctagaactcaggcatttctcttacagaacttggcttgcagggtagaatgaagggaaagaaacttagaag

SEQ ID NO: 3919 - DNA, 428 bp, Homo sapien
agactgtttccacactgtggaagctttgtactttcactctgctcaataaagcctgcagctttttctcactctcagtccatgtctctttcactcactgtggtcagcttccacaccatttctttggtgtggcttggcaagaacctcaggtgttacatcttggcgagccagacaggagactccagaaaaggtatctagatcatcatgcagatcaaagccatcaagctacaaatgatcttacaaatggaacctcaaatgagctcagctcacggcttctaccgaggacccctggatcaacccgctggtccctcaattaccctagaaaattcccctctggaggacaccaaactgcagggccccttcttcacccctaaccagcaggaagtagccagaacgactgccacacggttcccaacagcagttggggtgtc

SEQ ID NO: 3920 - DNA, 503 bp, Homo sapien
aattcggcactaggtgggagtagtcatgcttgctggtctggctgttccggacaaggtagctacactccttgcagagtcgcagcaggttctcggcgtctcctctgctgatggctccgtgataccatatttgcttctccagggggacggcaggatccaccctttctcctaggatcccgcagaactcagggctcccatgtttgataggcttaaagccccctccaggggcacgaagctggcgccgccggtcccgcgaaggtgagggggatgactgccgcttctcgttgccattaaactgtgctgccagggctgggaattgtgaaccgggttcaattccaaaggctggtccgtattaatcggccgggctgttcgtaatcttggggaagtttgttttcccgcattcgggggttaactgtgctctccgattccgattcaaaattttggccttcaggttcttaaggggtttcatataactggataccttaatgttgggaccggaaactttc

SEQ ID NO: 3921 - DNA, 482 bp, Homo sapien
tttcaatgggaaattattgcaagttcctacatcttgatattgctttcataatttatactaacataaaataatatttttcactgttttgcaatgtctttttaatttctgtattgcagctagaggaagtccaaagaaaacttggatttgctctttctgacatctcggtggttagcaattattcctctgagtgggagctggaccctgtaaaggatgttctaattctttctgctctgagacgaatgctatgggctgcagatgacttcttagaggatttgccttttgagcaaataggtagatggtttggtggtgtggaagcttggaagcggtcaggtagttggctactttctgcttggatctattaaatacctggcagctctctgtctttttgtgggttgttgccctgtgattagttctgctttttaacccactccctggatgcatttttccctccttgcatttccctcttttcctggagttcatac

SEQ ID NO: 3922 - DNA, 457 bp, Homo sapien
  misc_feature (1)...(457): n = A,T,C or G
cagaaatcatattttatacataatttagcattatcatacatcttggctaaataataccatacaatcgtagtggtcagaagagngggggggggggggggggaaggaggggggggggggggggggagggggagggggggggcggggggggggaggggggaggggggggggggaaggcgaggggaaacggtgcacgagtgagaaacagatggtccaggtgcgtacaacctgaagagaaaagaactgggtttaatggtttaagaaaaagcacagctttttcaccttcatcttgtataatttcatagattggctgacttagggtctttcaatagtttgggaattgaaagattcttgttatatatagctagtttgggtttgtttttgttttaactatgttgaaggttaggtgagatgggcaaataggcttaactattttgaaggttggatgaaaagagatggg

SEQ ID NO: 3923 - DNA, 446 bp, Homo sapien
gcaaaatcaaagaagctaaagagaaaaatgaaggcagatatattgcaactttataacatattctattttattgaagactgcaattaatgcagcaagaatgctttctcaagcggtggcctttgtattctcattttaatcaggtgtacattctatggcctctcccccatgctgttagtttctattttaaaagatacaataatatatgtagggaaaggggcctgggctcttcatttaaaggtaagcagtaatattgagtaagtgacataattctttttctctttgttaagtcctatgcctctttttcttaactgtaaaacatagaatatgagcgtttttatcttacaaataggtacctaaggcatgtgattttatttttaaataacaaaaaataacccaagtttcttgcttctccaaagtattcttctcatagcttataaaagaaagtc

SEQ ID NO: 3924 - DNA, 441 bp, Homo sapien
cttgaagttaatcctagtgatgctggaaatagtgaccgagtagtcattcaggagatgttgaaaacagtggcacaatcacaacaacttgaaacaaactctcaaagggattttaaagtggtattattgacagaagttgacaaactcaccaaagatgctcagcatgccttgcgaagaaccatggaaaaatatatgtctacctgcagattgatcttgtgctgcaattctacatctaaagtgatcccacctattcgtagtaggtgcttggcggttcgtgtgcctgctcccagcattgaagatatttgccacgtgttatctactgtgtgtaagaaggaaggtctgaatcttccttcacaactggctcatagacttgcagagaagtcttgtagaaatctcagaaaagccctgcttatgtgtgaagcctgcagagtgcacaataatcct

SEQ ID NO: 3925 - DNA, 271 bp, Homo sapien
aggagctgcttctctcttctcccagttctacctccccagaagccttcctccccaggtggggctgatggagcaagggtccagactaggagccttccaccccagctgtgtctggcgcccctagatctctgcaagggaggtgttacagctggttctgagccgcttgccttgtgatggtaagacaccaacctttacattcttccctgaggttgtggctgacagagcctgcttggccccactgttagtccagcgagctcctatatcaaaatgccgt

SEQ ID NO: 3926 - DNA, 315 bp, Homo sapien
taagtatctgtataaggcagttggaaaacaagttcaagctggacactcttgagtccagtcctcatgttttcagcccactgttgcacccagttcgtgtgggttaggcctgggccatggaatgagtgtatctcccagtaaggaagtctgctatctgacaaaaacagcagaagctgagagctcaagggatacaaaatagattgcagttgagggttaggaaggaggctgcatctgtgtgcctatttcccctggcaagcctctacatcgaagagcagcagagcagccctgtcgtgccattgagctgacagtgccacatat

SEQ ID NO: 3927 - DNA, 294 bp, Homo sapien
tttaaggggctgtaattatatttattagattaacaaggcagatgtgaattttctcttctataatccagtaagtctgtgtattcgttgactcagacagacaagaagccacaaggaaacaaagaagtaatcatttgttgagagacgttattaactatgatcttccctgaagctaccgggatgggaaaggtcagtgtcttcctttgaaccctgagacaattaggggctcttgaggcctgctgtgcccctgctgccaaggcacgctcaagttcaaggagcagctaatcacccactcct

SEQ ID NO: 3928 - DNA, 427 bp, Homo sapien
cacgtggagggcctgaagcggaggagcggcaccgccggtcgggatctggatcctacggcagcggcaggacgacctggacacgctggggctggggctacagggcggcatccccaacggctacctggtcctagacctcagcatgcaaggtgggcggggcggccaggccagggctgggggcagagctgggggcgtggaggtgggcgctctgagtcacccctctctctgtagaggccctctcggggacgccctgcctcctaggacctggacctgttctcaccgtcctggcactgctcctagcctccaccctggcctgagggcccactcccttgctggccccagccctgctgggaatccccgcctggccaggagcaggcacgggtggtccccgttccaccccaagagaactcgcgctcagtaaacgggaaca

SEQ ID NO: 3929 - DNA, 446 bp, Homo sapien
gggagtggggagagaggaaagcagccctcaggccctaccaaccttgactgtcctatccctagaccttatttaaccccaaccagactgtggtaaagatgttccttgtgacctttgacttctcggacatgcctgctgcccacatgaccttcctgcgccatcgcctctttttggtgcctgtgggtgaggagggaaatgctaaccccacccaccgcctcctctgctacttgctgcacctcaggttccggagctcccgctcaggccgcttaagcctgcatggagatatccgcctgcttttttcccgccggagcctggagctggacacagggctcccctacgaactgcaggctgtgaccgaggcccctcataatccacgttattcacctttgccctgattgccagcactctgaacccatgcgggctaatgacctgcccatcctgctccatct

SEQ ID NO: 3930 - DNA, 440 bp, Homo sapien
gggacctggcactccatggccatggcgaccaacaacatctccctcatggcgacactgaaggcccctctgagggtccacatcacctcactgttgccccccccgaggacaacctggagatcgttctgcacagatgggagaacaacagctgtgttgagaagaaggtccttggagagaagactgagaatccaaagaagttcaagatcaactatacggtggcgaacgaggccacgctgctcgatactgactacgacaatttcctgttcctctgcctacaggacaccacaacccccatccagagcatgatgtgccagtacctggccagagtcctgttgaagaacgatgagatcatgcagggattcatcagggctttaaggcccctgcccaggaacctatggtacttgctggacttgaaacagatggaaaagccgtgccgtttttag

SEQ ID NO: 3931 - DNA, 197 bp, Homo sapien
agtaaattgtcatctttacttgcatatgaaccagtaactgtcccagccatgaaggagtggagaagaattagtaggtgttcttgggaccgctggaagtcaggctgaagcctctgagcggcaactctagcagagagaaggccgaggggcaccggtgtcttcagtttccctccttcctcctctctggctacattcgtctc

SEQ ID NO: 3932 - DNA, 552 bp, Homo sapien
ataaagaaaagaggtttaattggctcacggtccagtagatggtacaggaagcacagcagcttttgcttctagggaggcctcaggaaacttacaatcatgttagaaggcgaaggagaagcaggcacatcttatatggccagagcaggagggagacagaggggaggcaccacacactttgaagcaaccagatgtgatgaggactcaatatcaggagaacagcactgagcgggtggtgctaaaccgtttgtgaggactctgccccataatcccatcgcctcccaccagggggcgttacatttcaacatgagactcggtgaggacacagatccaaaccacatcaatagtgctttcatgcttttgattatcttttgtaactatgttattgaactataatttacataccatacaattcaccaacgtaaagtgtgtaattcaatggtcttaagcatattcagagttgtgtgaccatcgctacagtcaattttaggacatttttatcactgcaaaagaaagacctcaatcttcccattcctcccatcccgaagcaaccac

SEQ ID NO: 3933 - DNA, 489 bp, Homo sapien
ggctcagagtcatagccaagcccaagaaccaagctgaggcccagaaggtcacgttcagccaggaccctacgacagtggccctctgcatctccaaagagggccgcccacctgcccggatctcctggctctcatccctggactgggaagccaaagagactcaggtgtcagggaccctggccggaactgtcactgtcaccagccgcttcaccttggtgccctcgggcgagcagatggtgtcacggtcacctgcaaagtggagcatgagagcttcgaggaaccagccctgatacctgtgaccctctctgtacgctaccctcctgaagtgtccatctccggctatgatgacaactggtacctcggccgtactgatgccaccctgagctgtgacgtccgcagcaacccagagcccacggctatgactggagcacgacctcaggcaccttcccgacctccgcagtggcccagggctcccagctggtcatccacgca

SEQ ID NO: 3934 - DNA, 321 bp, Homo sapien
caccttctaccaggacctgattctgtcagctggccagggcgctgcgtcaaccagtggcagctgagcggggagctgaaggcccaggtgcctggctcctccccagggctgctcagcctcagcctcaaccagcagcctgccgcgcctgagtgcaaggtcctgacagctgcaggcaacagctgccgggtggatgtcttcaccaacctgggttaccgagccttctccctgtccttctgatctctgacgacacccccagccagctcagggttttagagtgtttttcattttctttttttttttttttttacaataaagtttcaggct

SEQ ID NO: 3935 - DNA, 208 bp, Homo sapien
cgacatcgagctctttgtgaaggctggcatcgatggagagagcgtcgacaactgtcctttctctcagcgcatcttcatgatcctctggctgaaagtagtcgtgttcagtgtcaccactgtggatctgacaagaaagccagctgacctgcgcaacctagcccccggaacgcatccgccctttctggccttcaactggtacgtgaagaca

SEQ ID NO: 3936 - DNA, 572 bp, Homo sapien
caagttttcttttataagcctttaattcatcctcagtgactctggcaaggctgcttctctatcactggctttgcacagaagtatgctctacttgcgttgctttagggcaggattctattttgagggaaaagacagtatccttattaccttttgtttgtttaatagcacaaatgcttatttgttatccaaaaacaacctccttcttatctgtgataaatctatagaaagaatttagctgcaagtggacaaaggaacaagcccccagaaaagaaagggaagaactgccttcttatactacagaacatgcattagtgtgggctatatagctgtggctcatgctacccaattccagatttctttgtcctctaagagttgattgctgtatattaaaattgaacatcagaggatgggaagagggctctgtaagccagaaccttactaaagtagagggcacaatcagtgtgaataaattcacttcagaatctcaagtcaaggccaggcacggcagctcgcgcctgtaatcccagcactttgggaggccgagacaggcggatcacctgaggtcgggagtt

SEQ ID NO: 3937 - DNA, 573 bp, Homo sapien
ccgtcttggaaagaatgcagcgtttcttctctaccctctatgaaaactgttttcatatcctagggaaggcaggcccttccatgcagcaagacttctatactgtggaggaccttgctacccagcttctcagctcagcctttgtcaacttgaacaatattcctgactaccgactcagacccatgcttcgggtctttgtaaagcctctggtgctcttctgtcccccagagcactatgaagccctggtatcccccatcctcggacctcttttcacctacctccatatgaggctttctcagaaatggcaagttatcaaccaaaggagcctgctgtgtggagaagatgaggctgcagatgaaaacccagagtctcaagagatgctggaggagcaactggtgaggatgttaacccgagaagtcatggacctaatcacggtttgctgtgtttcaaagaagggtgctgaccacagtagtgctcccccagcagatggagacgatgaagaaatgatggccacagaggtcaccccctcagctatggcagagcttacagacctgggcaaatgtctgatgaagcatg

SEQ ID NO: 3938 - DNA, 573 bp, Homo sapien
agaatcttcaaattaggctcagaatccatttgggtcaatgaatttactgttattaagatcttagttgtgttcaaccatgatttgacataccttagagtgagaagatattcttcctggcctcagactagttgaaggtagagagagagacaggcccttgggtgtggggagacctctcctgggataatacacacaaaaaaccaagagctgctcactgtggtgcaggagacagcagggcctgaagccagaggctctgtgtccttgaatacaatgttttactcctctgacccctgttactgtgatttggagaggcagacaatataggatgggctttgcaggcagggaggtccagttataatcccagctcttactaagttgggtaagactcactctgagacttagtttcttctgtcatctctcaatagaatcataaaggtactttcctcttagtgttgttttaaaattcagtaaaataatgcaggcttagcacagggtctgatgtaaattttcaatgaattatcgttgtcaatattgctctggaaaacaagagggcatattagaagatcaaaagtactg

SEQ ID NO: 3939 - DNA, 287 bp, Homo sapien
aacgagggcaggacaatctgcttgtgtctccctcgctggcctgctcctcctgcagggcctgtgagctgctcacaactgggtcaacgctttaggctgagtcactcctcgggtctctccataattcagcccaacaatgcttggtttatttcaatcagctctgacacttgtttagacgattggccattctaaagttggtgagtttgtcaagcaactatcgacttgatcagttcagccaagcaactgacaaatcaaaaacccacttgtcagttcagtaaaataatttggtc

SEQ ID NO: 3940 - DNA, 515 bp, Homo sapien
aatcagcctatcaccccttgaaacatcttccctgtgtccctgggggcccctgatgctttctccttgggtgatagtaacatgcagacacttacacaaagctccctctttggacataccccacgtcgacctgtcacaggcctggctgtagcgagcacctccctatgacgcagaatgcttcttgggaattatcttactcctctggagggttagtccatcaatgttttgcttcttgtcccaatactactgtgaccctctctgatcgcacagaaatcactgcctatcacatatatcctgttaagcactgaagaccctattgaaattagagttctacagatgccaaaagctgtactttccatcaggcagatggcaagcttactgccttgatgcacatctggagccactggagctccttcctctctggttccagcattaaggtggagaactccatgtagcttcttgtcctttcccctcagctgtctttgcttcacaaggttttagcccaaagcaagagtgca

SEQ ID NO: 3941 - DNA, 569 bp, Homo sapien
gttaccaatcttgcaatgggagggatcgactcggccctttaaaaatgagtgatagtacatggctaacgtcagaaattcataaccctctggctgtgggacagtatgtcaacaattgttccaatggtaagaaggcatcatggggctgtgagatgagatatatcaatggctaattctactcctttgtcatatgactgagtgccaagggagttgagtataacatataataagctagtcaagtccttaagcaactctcacttttgggggatgatattagagagaattaggggaaatcttgatatacattatttagaattgtttaatttactatttttcttctgattttgcagtgaatataggcaattgataactcccctttgatcattattattttagcattttaaaaatagaaattattatgtcagtgcttcaatatagccttatagattaatggctagactagtatctgctttctgttgctaagtttgtgagtccctatctatatcttctttaggagttgactttcccataggtaaaagtttgattgtttgaatacatttaacatgggcttt

SEQ ID NO: 3942 - DNA, 434 bp, Homo sapien
gcaaacgggtaatcgccaacccacccaaagctgaagaagagcaaacatgcccagtgccccaggaagaagaggaggaggtgcgggtactgacacttcccctgcaagcccaccacgccatggagaagatggaagagtttgtgtacaaggtctgggagggacgttggagggtcatcccatatgatgtgctccctgactggctaaaggacaacgactatctgctacatggtcatagacctcccatgccctcctttcgggcttgcttcaagagcatcttccgcattcatacagaaactggcaacatctggacccatctgcttggtttcgtgctgtttctctttttgggaatcttgaccatgctcagaccaaatatgtacttcatggcccctctacaggagaaggtggtttttgggatgttccttttgggtgcagtgctc

SEQ ID NO: 3943 - DNA, 507 bp, Homo sapien
agggaagagacctgcctgaacatttgccgcttagactttagcttcccagatgactactttaaaggagtgagccagaaggcaaggagttcgtgtgcttcctcctgcaggagaccccgccaagcgtccctcggctgcgctggccctccaggagcagtggctgcaggcggcaaccgagaagcacgggcgtcctcgacacgtccagactgacttccttcattgagcggcgcaaacaccagaatgatgttcgacctatccgtagcattaaaactttctgcagagcagcttctgcctagagtttgacctatccagaagttctttctcattctctttcacctgccaatcagctgttaatctgaattttcaagagaaaacaagcaaacataactgatcagctgccggtatgttcatcgtgtgaaattgcattccaagtgagctgtgctagcagtgcttggacacagagctgcaactgcgctggggtggaggaccgtcacttacactctgcccaag

SEQ ID NO: 3944 - DNA, 574 bp, Homo sapien
tgagatcatgcagggattcatcagggctttcaggccctgcccaggcacctatggtacttgctggacttgaaacagatggaagagccgtgccgtttctagatggagtctcgctctgtcaccaggctggagtgcagtggcacaatctcagctcactgcaacctcgacctcctgggttcaagcgattctcctgcctcaaccccccgagttgctggaaccacaggcgtgtgccaccatgcccagctaatttttgtatttttaatagaaacggggtttcaccatgttggccacgatggtctcaatctcttgacctcatgatccccccccttcagcctcccaaagtgctgggatttcagtgccacattcttaagggggtgtcctcaagcccaccacatccttccagggctcccccgaaacaccctgctcttcctccctctacttaagtgacctgtaaacccaacagctcacctccgcctccaggaagaccagactcccacccttccacacctccagagcagtgggacttcctcctgccctttcaaagaataaccacagctcagaagacgatgacgtggtc

SEQ ID NO: 3945 - DNA, 572 bp, Homo sapien
atttgcttggagccaaatgcagaactaaataatagagtaaaatcctttgccttgttctaaatcctgagagttcacttgccttaccctaaggcccccgactctgtgcccacccacacccctactccccagtggcagcagtcaggccccagcccccatgctgtctcttttctgtgcctctgtcctggtgccagggctctgagctgctgagagcttcgctttgtgagatcacccccatggcttccttcagcttcaagggtgtgggtggcctctaaatcactctatagtgcgaggagcaataacccagaattcttccttggctgtttgacaaaacttaattccacaactgtttcctcccagaggatgactcttagtgtaagcacatccctctttgagaatctgactgtttctgggaatcaaaaatgtgggtttatatttccgatacttctggagtgccaggttgtttggttttgttttcaacaaaatgtttggccctagaaatgcagcaacttgctctgttgccaggagcttccctgccaagtgtcttgtgcacagccctctcctgggtgagctcc

SEQ ID NO: 3946 - DNA, 323 bp, Homo sapien
  misc_feature (1)...(323): n = A,T,C or G
cgtacctcatcaggcaagacagactgaatgcaggagtgggtgattagctgctccttgaacttgaggctgccttgcaggtgngtgcacagcaggcctcaagagcccctaattgtctcagggttcaaaggaagacactgacctttcccatcccggtagcttcagggaagatcatagttaataacgtctctcaacaaatgattacttctttgtttccttgtggcttcttgtctgtctgagtcaacgaatacacagacttactggattatagaagagaaaattcacatctgccttgttaatctaataaatataattacagcccctta

SEQ ID NO: 3947 - DNA, 551 bp, Homo sapien
caaatacagaaatgacccattccctgcccaccagaaactcagaggtgattggggagactgacacaggaaaatgaacttaatcaagagagactgtgatatgtgctaagaagggtgtgagggagggagagatgaattttccctggagggatcctagaaagcattgtcatattgccatctccattagctcacttttaaacaactagggtgctggaagaacctttgtctgagggtagttcatagctggaaatacttggaatattttccagagtctctaaactctcatcttcccccacagatacacatccaagctcacaaataggagtagcaattctaggtggtagggttgtgtacggaacccctggctgtctgcatatatctcagaattaccccaggaccattgtcccaaagtctagagtctttacaggtaggcaaaatttgttttcaatgcctgtgcctcagctgctgtcacaaatacccatcttaggatcccatcagcttcccatcccccaccagacagccacagtaccctcactttctccctattgttcttt

SEQ ID NO: 3948 - DNA, 563 bp, Homo sapien
ctcaacctcctaccatgtacaggacgtctccccattacaactacccaatccgaagtgtcaactgtgtcaggactaagaaaccctggttttgagtagaaaagggcctggaaagaggggagccaacaaatctgtctgcttcctcacattagtcattggcaaataagcattctgtctctttggctgctgcctcagcacagagagccagaactctatcgggcaccaggataacatctctcagtgaacagagttgacaaggcctatgggaaatgcctgatgggattatcttcagcttgttgagcttctaagtttctttcccttcattctaccctgcaagccaagttctgtaagagaaatgcctgagttctagctcaggttttcttactctgaatttagatctccagacccttcctggccacaattcaaattaaggcaacaaacatataccttccatgaagcacacacagacttttgaaagcaaggacaatgactgcttgaattgaggccttgaggaatgaagctttgaaggaaaagaatactttgtttccagcccccttcccacactc

SEQ ID NO: 3949 - DNA, 293 bp, Homo sapien
ttgctaggcgtttcccatgtgccgtgttgtcctaaacgctcatttttcatttttattttattaaataaattttttttgtagagatgggggtctcactatattgcccatgctggtcaaatgtggcctcctgcaatcctcccacctcggcctcccacagggctgggattatttagttctcccaacaggggaggcaactgaagcacacaggtgaagtaacttgcccagggtcatgcagctactgaggtcacagcctggattcatacacaggtctgactcctgagcacttagccagg

SEQ ID NO: 3950 - DNA, 231 bp, Homo sapien
  misc_feature (1)...(231): n = A,T,C or G
gcaaacgcattcctcctcagctccacccacctggagacgaatgtagccagagaggaggaaggagggatactgaagacaccgtggcccctcggcttctctctgctagagttgccgctcagaggcttcagctngaatctccagcggtccccagaacacctactaattcttctccactccttcatggctgggacagttactggttcatatgcaagtaaagatgacaatttactc

SEQ ID NO: 3951 - DNA, 327 bp, Homo sapien
agggaagctgcggtttttactacctagcccccatcttcactggttattccacttatttaaaatgtccagaataagcaaatctccatatagaggaagtagattagtggttgcttcgggatgggaggaatgggaagattgaggtctttcttttgcagtgataaaaatgtcctaaaattgactgtagcgatggtcacacaactctgaatatgcttaagaccattgaattacacactttacgttggtgaattgtatggtatgtaaattatagttcaataccatagttacaaaggataatcaaaagcatgaaagcactattgatgtggtttg

SEQ ID NO: 3952 - DNA, 582 bp, Homo sapien
aaatctgaacagcccaccttggttacagctagcaaagatggttacttcaaagtatggatattaacagatgactctgacatatacaaaaaagctgttggctggacctgtgactttgttggtagttatcacaagtatcaagcaactaactgttgtttctccgaagatggttctttactagcagttagttttgaggaaatagtcacaatatgggattctgtaacatgggaacttaaatgtacattttgccaacgagctgggaaaataaggcacctttgctttgggagattgacgtgttcaaagtatctacttggtgctactgaaaatggcattctttgctgttggaatctgctgagctgtgcattggagtggaatgcaaaattaaatgttagagttatggaacccgatcctaattcagagaatattgctgcaatctctcagtcttcagtgggttcagacttgtttgtatttaaacctagtgagccaaggccattgtatattcaaaagggtatctccagagagaaagtccagtggggagtgtttgttccacgagatgtccctgaatccttcacctcagaagcttac

SEQ ID NO: 3953 - DNA, 109 bp, Homo sapien
tccagactcttcttttgaatctgtcccacctaagccaaaaccttctcgtgttaaagaaaagttcctggagcaaagcatggacatcgaggatctaaaatattgttcagag

SEQ ID NO: 3954 - DNA, 360 bp, Homo sapien
attcagcaatgataggttaatgccatggcgcagcatcagatcgttagtatatgctatgatttattgtttaccatctaaagctcaagatcatttctttccagtctttgtggatcatgagtggtagttatgtagtcttgaagtgaactgtcttaaatgagaaacgtgttagtcattctgacttataacaggtacaggtgagctctacctatgtgcgttcagtactttgtgcgacaactttcaagtatataagtccattgtggaagtcatagtttatatatctctgatggttgccaataggtgactctcagattaaagctcttctgtcgtatatagatacgtgatacatgcctatgcgacatt

SEQ ID NO: 3955 - DNA, 455 bp, Homo sapien
agtgggtgtatacctggttaacatgggtgttgctgccatcgtgtatttctacattggccgggcagtccagggcttcaccttggatcagcctccaacttcagctttttccggtggatgaggtctctcttgctcccctcctgcaggagcttgcggtcccctcaggagcagatcatcttggcgccgtccctggctaaggttgacatggagatgactcagctcacccaggagaatgcagacttcgccactcgggatcgctaccaccactcctccctcgtgaaccgggagcagctgatgcctcactactagatgcagtgctgggaccttcctcttttggagctgtcccatgtacagtggacccaagctcaggaccttcgtggagctgcttctccaacctgagaaactcaagacccatcctcccgctgtcactttggacaatggaaatctacattttcttt

SEQ ID NO: 3956 - DNA, 493 bp, Homo sapien
tgtaacatttaaatatagggatgtctaatcataaaatttaaaaatatttcataatttcatcatactgaagactcaggaagatctgaaaagaaacagaaagagtaccagacctggaatagaaacctgacttctaaaattggctatatagctagctataggaccttagttgaattgcttcaccattttaggcctgttttctgaactatacaatgagggatttcgactaaatgagggattttgaccaaatgatctctgaggtatcttaaatctctagctttttatgatttcccacccttgccaaggagttgagtaaacattggaggtgatgccaccaaaaaagtgaaagcacaatttttcctttatatgatggagtttgctgtagtgtagttttctctttcagaaatgaacgattatcctgattagattttgtttgcccacatcctgttatatcaagtcatgagtatacccccattgaaactcagagttgatttgg

SEQ ID NO: 3957 - DNA, 495 bp, Homo sapien
tctgggacagtgcccacacccttagtggtggggctggaggctgcgtgtgaggtggcacagcaagagatggagtatgaccacaagcgaatctcaaagttgtcagagcggctgatacagaatataatgaagagccttccagatgtggtgatgaatggggaccctaagcaccattatcccggctgtatcaacctctcctttgcatatgtggaaggggaaagtctgctgatggcactgaaggacgttgccttatcctcagggagtgcctgcacctctgcatccctggagccctcttatgtgcttagagcaattggcactgatgaggatttagcgcactcttctatcaggtttggaattggccgcttcactacagaggaggaagtggactacacagtggagaaatgcattcagcatgtgaagcgtcttcgagaaatgagccctctctgggagatggttcaggatggcattgacctcaagagcatcaagtggacccaacac

SEQ ID NO: 3958 - DNA, 274 bp, Homo sapien
aatgttgcagcgtaatccttcataccacctggttcttgatattctgccgcctgttcaagttcaagaataaaagcgacacaggacccaaatgcagctcccaacccactccccaggctagacatgcttgtgtccacacagcacaccaatgtgatacttccactgaccggctgcagctctgcatgaaggactcggggtctggatgccatggaatcactgtggctcttgttgcagttttgtactctatacttggtttttcaattaagcttaatggctt

SEQ ID NO: 3959 - DNA, 495 bp, Homo sapien
aattcggcacagaggacgggtatcaatttccggagctggtgaagatcatcaacgacaatgccacatactgccgtcttgcccagtttattggaaccgaaggaactgaatgaggacaagctggagaagctggaggagctgacaatggatggggccaaggctaaggctattctggatgcctcacggtcctccatgggtcagtgcagagcctggcaacctgcataaggtatggggctctaaatagctggcctcttgaattcacacttggtttttcctaggcatggacatatctgccattgacttgataaacatcgagagcttctccagtcgtgtggtgtctttatctgaataccgccagagcctacacacttacctgcgctccaagatgagccaagtaacccccagcctgtcagccctaattggggaagcggtgcgtcacaggggactcaaaaatgggagaataaggactgttgccatgtgcacctgcactgctggtat

SEQ ID NO: 3960 - DNA, 232 bp, Homo sapien
cccccaattgagacagcactggccccaacaggcatcactgcgtcatcatcccgagaagtcacactcctagacacatccgtattactcgcatcacgagtatcactcaactgagctcatcatagtctaccagagcacaaccgagaccgagataactcaagcactgcttacttacacactgcactggtgtctctaagtgacacgtcctacaacgcctcagcagtacattcgagtc

SEQ ID NO: 3961 - DNA, 278 bp, Homo sapien
gagaatccagaatagcttatggatgggtcagttctcgtctcaccacactcccaatatccagcttcctggactgttgtgtaaggaagagccacttttttcagttgaagtctgagttcttatgggccatgaccaaggctgctgcttcctcaaaaggcacgaagggggccgcgtgcggtggctcaggcctgtaatcccagcactttgggaggccaaggcgggcggatcacgaggtcaggagtttgagatcagccggcaaacatggcgacaccctgtctcta

SEQ ID NO: 3962 - DNA, 123 bp, Homo sapien
ttaccaatctgtccggaccacgtctttgtccacagtgaactgcacattacgccagaacgctctgtgctcctcgggagtcatggagagccttttctgctggatctcagagtactcctttcgctt

SEQ ID NO: 3963 - DNA, 169 bp, Homo sapien
gctgcagcaacgcgcgtgaccacgcatgctgccacaccacgccggcctcaacccccgcgccttccggatgctgcacgtggaccgccgcaccctccagaatgccgtgcgcaacgtgctggatggggaggtggtcaaccgctacctgtacctgagcaccatggagcgcagc

SEQ ID NO: 3964 - DNA, 437 bp, Homo sapien
tttttttctcaagcaaaaaatgtttttccttgtgttttgtacaaaaagggggtgggaggtagttccgtgtgctggtggtaacggcatccacggggctagaagtgggcggtgacgcggtccgtctccagcaagtcgtccaggattatgtctggtgtggtgccgatcttcttggctagctcgctgcgctccatggtgctcaggtacaggtagcggttgagcagctccccatccagcacgttgctcacggcattctggagggtgcggcggtccacgtgcagcatccggaatgcgcggaggttgaggccggcgtggtgtggcagcatggtggtcagcgcgttctgcagcatcagcagccgccggtaagtcttctcctgcatgggcagcagcagcccgatgccgccgtccagcgtggcaaaccacgtgatgtgcttattctc

SEQ ID NO: 3965 - DNA, 474 bp, Homo sapien
tggctgagccatggaacagaatcctcctcagcaacaaagactagcactccacaatcccctgccaaaagccaagcctggcacacatcttcctcagggaccatcttcaaggacgcacccagaacctctagctggccgacacttcaatctggcccctctaggccgacgaagagttcagtcccaatgggcctccactaggggaggcataaggagcgccccacagtcatgctgtttccctttaggaatctcggctcaccaacccaggtcatatctaagcctgagagcaaggaagaacatgcgatatacacagcagacctagccatgggacaagagcagcctccactgggaagtctaagagtccatgccagaccctggggggaagggctctgaaggagaacccagttgacttgcctgccacagagcaaaaggagtgagtggaacagagttgcttcttactaggagcacattctttgcctg

SEQ ID NO: 3966 - DNA, 232 bp, Homo sapien
ccaggaagtactggcacattcttcaaccctctttagcagaggtgaggggcagtgcatccagagtctggcaccaacggccttgcaagtagctgctgagtgaatgggcacatgacgccaccctcagaaaggaaagcaagatccggcgcaccccctcagggcgagcaaaaccccatgggatccgcagaggaagcaggcctagaatgccccccacccacccccagacaagcctgac

SEQ ID NO: 3967 - DNA, 217 bp, Homo sapien
ccaagttaaagagtgagtcaggcttgtctgggggtgggtggggggcattctaggcctgcttcctctgcggatcccatggggttttgctcgccctgagggggtgcgccggatcttgctttcctttctgagggtggcgtcatgtgcccattcactcagcagctacttggcaaggcacgttggtgccagactctggatgggcactgccctcacctctgct

SEQ ID NO: 3968 - DNA, 410 bp, Homo sapien
tcttactagtgctgatttattacaaaggatattttaaaggacacaaatgatgaagccagttgaagagatacacagggtgaggtttggaagggtccttgtggagttggggtgcaccactctcctggaacatggatgtgttcgccaacctggaagctctccaagtcctgtcttttaaggagttttctggaggctttatcacataggcatgattgagctccagctctactccccacgccagaggatggggaatggggctgacagcacaacgcttccaaccataggtctttttggtgaccagtccccaaataaggagcccaccaagagtcacctcatgagaacaaaggacgcttctatcacccagaaaattccaagggatttaggagctctgtgtcaggaaccaggtttaagga

SEQ ID NO: 3969 - DNA, 465 bp, Homo sapien
agtcacgcaaacacacactaatcctggcagggccccagccctcccctggctgagcagccctgtggctgaaatgactagcagataaacagacccccttctgctccgcttcctcctgcccagccaggcaacaccctcaaccggctccatcacatcctcaggtctcgggaccatggggggctcagaggggagacacacctactgcttcctcagatgggcccctccgcagccccttcccttgctcggggaaagccccaattctgcccacacccatttatttccttccttccttccttcttctgtttccttccttccttcttttttgtttttgccccaattctgcccatacccatttctttctttccttccttccttcttttttgtttttgccccagttctgtccacaccccttccctttcctgtcctgtcctttctttctttcttttttgatagaatcttgctctgtcg

SEQ ID NO: 3970 - DNA, 493 bp, Homo sapien
cctgactttaggtgatcttcccaccatcggccattccaaaggtgcctaggattacagggtgtgagccaccgtgcccagcccaaatatacttattttttaaacattttttatttcttgtcattattttcaaatgtctgttttatttcttaaagcatattaagtatatttattgtatagtttacttctgatatttctagtatctgcaagtctgtgaaagtgtgatgttgttgtctgctgtttcctctggctcttacttggtgtgccttttgcctagtatactttgtctttgtgtgttgggaggggagttcatgttctttagaatgttatctgcaggattttttgagaactggttaaagttggtgtccttcagaaaggattttcttttacttcgattgcctgggaggactaccagttctctctgtgattgttttttttttttttttttcttgtcatgctttccacttccactgcatttctcactggctcaactata

SEQ ID NO: 3971 - DNA, 488 bp, Homo sapien
accgtccttttctcggtgcttgcctgccttctggtgctggcccttgcctgggtctcaacgcacaccgctgagggcgggacccactgccccagccgtcaggaccccaacgccatcccagcccagcgcagcatggcagctaccgacagcatgagaggggaggcccagggcgagagacccccagcctgagacacagaggtcaagctgcacagccagagcccagcacggggttcacagcaacaccgccagccccggactccccgcaggagccccatcgtgctacggctgaaattcctcaatgattcagagcaggtggccagggctggcctcacgacaccattggctccttgaaaaggacccagtttcccggccgggaacagcaggtgcgactcatctaccaagggcagctgctaggcgacgacacccagaccctgggcagccttcacctccctcccaactgcgttctccactgccacgtgtccacgagagtc

SEQ ID NO: 3972 - DNA, 346 bp, Homo sapien
aattcggcacgcaggggaggacgatgagatcatgcagggattcatcagggctttcaggcccctgcccaggcacctatggtacttgctggacttgaaacagatggaagagccgtgccgtttctagtgacctgtaaacccaacagctcacctccgcctccaggaagaccagactcccacccttccacacctccagagcagtgggacttcctcctgccctttcaaagaataaccacagctcagaagaacgaatgacgtggtcatctgtgtcgcaatcccttcctggtggacaccttggcacaagggcaatggggaaggcttgttccctgggggcaagagttctctggca

SEQ ID NO: 3973 - DNA, 424 bp, Homo sapien
gagactgatacatacactcatacatatatgtgttccccttttccctgtaatataaattacaaatctgggctcctttgaagcaacaggttgaaccaacaatgattggttgatagactaaggatatatgcaactcttccagacttttccataaagctctctcggcagtcgctcacactacagtgcacacaaggattgagaagagttaaaggctaaagagaacatcttttctagcttcaacagagaggtttcaccagcacatttaccagaagaatctgggaatggattccactacagtgatattgactgcatctttaagaagtgaccattatactgtgtatatatatataaacacacacacatatatatatatatatagtactctaatactgcaagaaggttttttaaacttcccactttatttttt

SEQ ID NO: 3974 - DNA, 431 bp, Homo sapien
attcggaacgaggtcgagaggagctgacagccttcctgcaccccgaggagtgaggtgggccactgggtgctgccccctgcccaggaccagcccctggtggaagccaaccacctgctgcacgagagcgacacggacaaggacgggcggctgagcaaagcggaaatcctgggtaattggaacatgtttgtgggcagtcaggccaccaactatggtgaggacctgacccggcaccacgatgagctgtgagccccgcgcacctgccacagcctcagaggcccgcacaatgaccggaggaggggccgctgtggtctggcccctccctgtccaggccccgcagaggcagatgcagtcccaggcatcctcctgcccctgggctctcagggaccccctgggtcgggcttctgtccctgtcacacccccaaccccaggga

SEQ ID NO: 3975 - DNA, 437 bp, Homo sapien
gggcttagtgttttaaaacacctctgctttctgatgttgccttaatattctgctattgcagcaattaaaaattgtcttcatgtacatttggaactaacacgtgatgtgatatattcctaaactatgaaacctttttcctagtagtcagctagatcatttgttctgggagtataaagccacccacgtaagttaataagcaaaatcctgactattatgttgttagagaaaaatgctttgctttgtctggaagaaaggagtataatggctatgttatatggtgattcaaaccgggcgtgaatgatcagctctgtaacccagcacactgggaggccgaggcagggggactgcttgagctcaggagttcgagaccagcctgggcaacaaagtgagactccatctctatataaaaacaaaaaccacgaaagcacacacaaaat

SEQ ID NO: 3976 - DNA, 371 bp, Homo sapien
attcggcacgatgcagagcccgggcgcaggcggcggtatggagcggaacggctaggggtcttgagaagcaatggccacagaagcccctgtgaatatagcaccacctgagtgtagcactgttgtcagcacagcagttgacagcctcatttggcagccaaactcactaaatatgcacatgataaggcccaagtccgccaagggacggacaagaccgagtctgcagaaatcccagggcgtggaggtgtgcgctcatcatataccatctccgcctccagccattccctatgagttgccaagcagccaaaaaccaggagcctgtgcacccaaatctccaaaccagggagcttctgatgagatccctgagctgcagc

SEQ ID NO: 3977 - DNA, 161 bp, Homo sapien
ccttatctgcaaaaatggggctaatacccacttcagaaggctgcaattcactcattcattcattcactcaagtactaattcaacaggtatttattgagcgcctactgtgtgccaggcattgttccaggctctggagatttagtagggaactaaacagatct

SEQ ID NO: 3978 - DNA, 454 bp, Homo sapien
cccatccagagcctttgctgctgtgtcactcttctaagcctggttcttgcccagtggaacccaaccatggaaccaaaagaagcatgtgtctggggtcaccggagccgttgttctctacctgcccagtgcgctattcagaagcagaggggctggggcagaaggtctggagggagtgggttatgaagcccctcagtgagccttgggattgtttgagttctcaaagacaagtgctggaacagtgattgtgtcaccccagtgctgctgtggccacagaacatctgtgacacagaaacatcatccagagtgcagcatgaatacagatggcacctctggtggtcaggaccacgtcggtacaattagctgaacctctctttctatgcaggttagaggacggaggctggataactttgtggaaagttcctctgtggaacatttttatcttggccaagttgca

SEQ ID NO: 3979 - DNA, 390 bp, Homo sapien
agcggcgcctgcaccagacctccctgcccttgagcctcctttatggaaggcccttccccaaccctctccccacggcctctagggctctccttctcctgaaaatcatctgccacacgtggaaagttccttgcattttcctaggaaatttccacattcataataacgtagacgatcgggtcccagctaacgagtggggagctgggagtcaaaactggcccctagagcccaaagcccgggcctgtctggagaagatggcacagctcactgggggtctggcgacacttgcggattaggttggggacattgttggggacattgatggactaattaattaccttaactcatggatgttttctgagtactgctgtgaaccagctgagtcccaggaga

SEQ ID NO: 3980 - DNA, 463 bp, Homo sapien
attcggaacgaggctcgggcacccctaaactattctccagtgttgtcaccagaggggtcagccatgtgatggcaagagtcacttcttaagcttttgctatccccagaaacttaaagcaacaccaaccacacccaaaagtcaagtgatatccagacagcaacagtagagcattaactgagtgcagggccgtggtgactcctcgacactccaggctctcctgctggtaacctcccattggcagagcaggcactcagcaaagccctggacagtcagcagcctcctgaacaggctctgctgtccccactcacgacttcagagcagctaggactcctgtgaccacccctgttccctgttcccgcccaccccgccccgccccgccaactgcctcatctctgtcccaagataactgctctccagaattttccatgatatggtcattttaaaagttttttttttttttgag

SEQ ID NO: 3981 - DNA, 425 bp, Homo sapien
gggagaatattattttattatcaaatgtacagtatattgaccttaaaaatacagtaaagcagtcatggaaataacaggtcgtgtattattcatgggcacaaactgactcatggctggggaagaagcagccaccttagaccagatggacaagccagatactgcagagaagtttctgggcttttcggggaagactctagattcaattctgtaaagttatgatgcagttttctccttcctctcctctcacctcctctgagcacagctttcaacaaaaactttgcatacaaggaaatctaatatcgcagccttccccactggagggttcctggagaaggtaatataacagtggtgactgaatttgaaggaggttggagagaaattttttaaaattatatttccatgtctgctgtaatgtatccaagtct

SEQ ID NO: 3982 - DNA, 400 bp, Homo sapien
caggattccagattttattttttagaagattgaaaaaacacacccaggacaacatttctttgatcaataaactttcaggaaatggaggaagctgttttgggacacattcaaagctagttaacttgaacttggaaatagggttttgacaatccaactatgggaaacaaatctctgaacaaattttaaatgaaacctcacccccccaaactgttcaagtggcagacaaaataaattaccataaattatatgccaacacaccttttaaaaaacaacaacagcaacaacaaaaacccaggagtctgaggatttccttagctcctccaggaagtgtgtaacactgcttctggcctgcaggctggggcggatcagggacctgtcacacgtcaggatagttgcagta

SEQ ID NO: 3983 - DNA, 433 bp, Homo sapien
gtttgtcaaataagcaaatgcatttatttgatacacaaattccatgccaccagtcaaactatggtctggctttttttttttaaccaacagtaaagaaaactttttgggtttttttgtttcttttttgagatggagtctcacccttgccacccaggcagtagtagcacgatctcgactcactgcaacctctgcctcctgggttcaggcagttctcctgcttcagcctcccaagtagctgagattacaggcacccaccatcacgcctggctaattttggtatttttagtagagacggggtttcaccatgttggccaggagttcaagaaaagttttttaaaaataataaacctctaaagtgttaccctaactgtaccttacagtgatatatgacttctctagtcactccacattatctaggtgccatcactggata

SEQ ID NO: 3984 - DNA, 425 bp, Homo sapien
  misc_feature (1)...(425): n = A,T,C or G
tccttttaagacagaaaaggttggctggatttaaaagcaaaaatgaattcaaattgtgacttttatgaagcaaatcctactttcaactgcacaaatcactcctttgttagattttcagagtagatggtaatgtcactaaaagctgtttacagcccagcaggtgtgttttggtttaaaaggatgtgctttccttttaaactcgagtattcaattaccttcccagccgcaggaanagtgtgagctagggaccaagcgagcttcagaggcagctctgaagatgcaggcaggagggagtggggcagggggagctccacaaggaagagcaacaggggagccaatgccttggactacgcgggatcagtctccttgctctcttcagaactgggaattctcacgacagatgcaccctcgccaatcacgcagga

SEQ ID NO: 3985 - DNA, 434 bp, Homo sapien
tgctttccttctttctatatctttaccttaaacttagaaaaatcagtgttaataattagatgttgcagatgacagaaagctagattggatcttgggctactggcttaagtgactgggtagataatggtgtcaataaaaagaagaaagaatagtgtttgaggaaaagagacgggcttcagttagggactttttaatgagccatcagtggaaatccaagtatggatgtagttcaggatgctgttgcataggactggcctgcattgtagagaaaagttggagtgggagttgtcataaaaccacaagataggaatgaaaactgaaatggagtgagatctcataaggagactgtgtggaggaagaggagtccacctggaataaaatccaaactcctcacactgacctgcaaaccctacaatagcttgtgtctctcttcc

SEQ ID NO: 3986 - DNA, 395 bp, Homo sapien
gacgcggcagggaccgggcgcccggaggaccaagcgagcgcatcccgcctactcgtgctgggacatcacccagcctggacgccgctcctcgcctttcttccccgcgcatcgccagcgccaaccaaagatccccgccgggaaagcctctctgccaagctggaaagcgctgaaggcggatcgtctctcagacttgggtttgcaggttcacaaggcccgggaggcttacggtgggcgcctgcctaacagagggtccttgcggagaagcgcagaacgacaaatgccagagcgggtgaccgcgtcctctggataccagcgccgcaccgcgcacccgcgccgcctgcggccactgcagtcggctgggccattcggcctttatataccaggcggacccgcgc

SEQ ID NO: 3987 - DNA, 261 bp, Homo sapien
gcgtccgcctgctgcaagcacaggccgtgcaggaagccgccctccacccgcttcagccgcttcacctgcttgcgccgccgcggccggtacttgtagttggggtggtcctgcatgtgctgcacgcgcacgcgctctgcctcctccacgaagggccgcttctccgccagcgtcacgccttccacgacttgcccagcatcttgctcaactcggcgttgtgcaggtctggattctgctgcgccagcgtcttgcgcatcgtcactt

SEQ ID NO: 3988 - DNA, 419 bp, Homo sapien
tgagatggagtctgtgttgctcaggttagagtgcagtggtgcaatcgtggctcactgcagccttggcctcctgggttcaagcgattctcgtgcctcagcctactgattggctgggactacaggcgtgcaccaccacgccatggctaatttttgtatttttagtagaaatggggtttcaccatgttggccaggctggtctcgaactcctgacctcaagtgatctgcccaatttggcctcccaaagtgctgagattacagggatgagccaccgcgcccagcctcaagttctaggataaggtgagaaaagaaaaacattcaaaatacccaatgttttttacatacatgaaattaaaaagcacagcacagaaaacccactacaaagctactgtaatcatacccgttagaatgactattatcaa

SEQ ID NO: 3989 - DNA, 133 bp, Homo sapien
agaaaaaccttgttttattcagcccagacctgggagatctagctctgtggtatggccaaagtataaaaaataaaaaccaacaacaacaaaacaacactgtagagaaaagtgaagtataaaatggggtctggcg

SEQ ID NO: 3990 - DNA, 260 bp, Homo sapien
gactgttgctaagacttttaattgctctggaaggaggcagctggctgagtgccagtgtggggaggtgggtagaactcatcccctccccagcaagaagggagggtctggatggtcccttcagacagcttcatagtaggtgaggtcctgatcaacctcagttttgctgagacttgggctgggtcccaggtggactcggccttgctggaagttgagctcatgccctggctcttgccctgggaccctcagccttgctggacctc

SEQ ID NO: 3991 - DNA, 536 bp, Homo sapien
gttattcctctgtcacttcaaaactccagcttgccaataaggatttagaaccagagtgactgatatatatatatattttaattcagagttacatacatacagctaccattttatatgaaaaaagaaaaacatttcttcctggaactcactttttatataatgttttatatatattttttttcctttcaaatcagacgatgagactagaaggagaaatactttctgtcttattaaaattaataaattattggtctttacaagacttggatacattacagcagacatggaaatataattttaaaaaatttctctccaacctccttcaaattcagtcaccactgttatattaccttctccaggaaccctccagtggggaaggctgcgatattagatttccttgtatgcaaagtttttgttgaaagctgtgctcagaggaggtgagaggagaggaaggagaaaactgcatcataactttacagaattgaatctagagtcttccccgaaaagcccagaaacttctctgcagtatctgggct

SEQ ID NO: 3992 - DNA, 532 bp, Homo sapien
gtgggaggggcgcggttttttttttttttttttgcttcagtacttccgtatttccagtctttcctgcattgcaccaacagatctgtcctcctataaaaccacagcctttatgactcttccctggcaaaggttctacgatggctcccaattcctcattaggttcattctcaatttctcaaaagtagaaattcaagcctctctctaacccagccaaccttagttcccttctccctactccaaactctccattacaggaaggcctgtctggcttcttgttcttcctgacttgcaccattttcatttcaatccctagaccttggctcatattattgcctgtacttggaatgattcaccctccttgcctgccccagtctcaacaactctccattgcccattttgagttcaatttccttagtgaggacttattttctctcttcttcagtgcccccatgctttccacacagtcactgtgaaggattttcctctaaaggtcttcctgtttagagactgattccaaggtccccaaatgtgg

SEQ ID NO: 3993 - DNA, 429 bp, Homo sapien
agtgggagcggccgccagctccgcggtatattactgcaactatcctgacgtgtgacaggtccctgatccgccatagctgcaggcagaagcagtgttacacacttcctggaggagctaaggaaatcctcagactcctgggtttttgttgttgctgttgttgttttttaaaaggtgtgttggcatataatttatggtaatttattttgtctgccacttgaacagtttgggggggtgaggtttcatttaaaatttgttcagagatttgttcccatagttggattgtcaaaaccctatttccaagttcaagttaactagctttgaatgtgtcccaaaacagcttcctccatttcctgaaagtttattgatcaaagaaatgttgtcctgggtgtgttttttcaatcttctaaaaaataaaatctggaatcctga

SEQ ID NO: 3994 - DNA, 430 bp, Homo sapien
ttcggcagcgaggttattatccagtgatggcacctagataatgtggagtgactagagaagtcatatatcactgtaaggtacagttagggtaacactttagaggtttattatttttaaaaaacttttcttgaactcctggccaacatggtgaaacccgtctctactaaaaataccaaaattagccaggcgtgatggtgggtgcctgtaatctcagctacttgggaggctgaagcaggagaactgcctgaacccaggaggcagaggttgcagtgagtcgagatcgtgctactactgcctgggtggcaagggtgagactccatgtcaaaaaagaaacaaaaaaacccaaaagagttttctttacatgttggttaaaaaaaaaaagccagaccatagtttgactggtggcatggaatttgtgtatcaaataaat

SEQ ID NO: 3995 - DNA, 441 bp, Homo sapien
ggcgattccgacgccgtatcagtcctgcgtgattggcgagggtgcatctgtcgtgagaattcccagttctgaagagagcaaggagactgatcccgcgtagtccaaggcattggctcccctgttgctcttccttgtggagctccccctgccccactccctcctgcctgcatcttcagagctgcctctgaagctcgcttggtccctagctcacactttccctgcggctgggaaggtaattgaatactcgagtttaaaaggaaagcacatccttttaaaccaaaacacacctgctgggctgtaaacagcttttagtgacattaccatctactctgaaaatctaacaaaggagtgatttgtgcagttgaaagtaggatttgcttcataaaagtcacaatttgaattcatttttgcttttaaatccagccaaccttttctgtctta

SEQ ID NO: 3996 - DNA, 509 bp, Homo sapien
attcggcacagggggatttaagtgagctctgaatgacaaaaagccaaccaagggaagacaagaaggaagaacattccaggaaaaggcaccagccaagccttagacactaaagaagaaactatgttctatgctcaaaaaagatgaacaagaatcactgtgactaaaaagcaagtggttgaggggaagagagacacaagctattgtaggggtttgcaggtcagtgtgaggagtttggattttattccaggtggactcctcttcctccacacagtctccttatgagatctcactccatttcagttttcattcctatcttgtggttttatgacaactcccactccaacttttctctacaatgcaggccagtcctatgcaacagcatcctgaactacatccatacttggatttccactgatggctcattaaaaagtccctaactgaagcccgtctcttttcctcaaacactattctttcttctttttattgacaccattatctacccagtcact

SEQ ID NO: 3997 - DNA, 493 bp, Homo sapien
attcggaacgaggtgagtgtcataaatccacgtgttcctgttgcaacaaatacccaaaaattgtgtgtgcacttcctaataccagtcttcacccatggaggaacagtgctttttagagatgctttctatttcaatgttggcatactgcctgagggtattgcagttgtgggtgcattccctaatttgtatgatcaagatgaactggcccttttctacttccaagcttttaacagataccaccatatttgacagaatcccagagtgaattgcttgtgttattagtagattcagtgcccccagctgggataggcaagccatgacagcttccctgtttcacctacagaagtcttatctgagggatctattcacagtaagcaccaaggtctccatgtcttgaggtcagtttcattgtcttttgaaaagtgcatgcttcatttgaacaattcattcagcagcagatggactttcagtgatttaaaataaaattttgatc

SEQ ID NO: 3998 - DNA, 251 bp, Homo sapien
cctcgcgaggacagtctctaaggccatgatcgcctactggaccaactttgccaaaacaggggaccccaacatgggcgactcggctgtgccacacactgggaaccctacactacggaaaacagcggctacctggagatcaccaagaagatgggcagcagctccatgaagcggcgctgagaaccaacttcctgcgctactggaccctcacctatctggcgctgccacagtgaccgaccaggaggccacccctg

SEQ ID NO: 3999 - DNA, 481 bp, Homo sapien
gagacagagccactctgttgctcaggctggagtgcagtgacgcaatctcggctcactgcaacctccgcctcccgggtccaagcgattctcatgcctcagcctcctgagtagttgggactacaggcatgcaccaccacgcccacctaattttttttgtattttcagtagagatggggttttgccatgttgccaggctggtctcgaactcctgacctcagtggtgggattacaggcatgagccaccacgcccaacctgatgccttctttttctgaccatttcctctccagcaatcccaccgtggccacaggaaaacctggcccaggagattccaatgttcttggcttcccctcctgtcacagcctcagtgattttgtgatttcatcttgcttctcagggcttgcttttatcaaaagggttggttagtcacaatggctgttaataggtgcaacaaggcatagaagacctgttaggggttgaact

SEQ ID NO: 4000 - DNA, 406 bp, Homo sapien
ggaaaatcatttttcagctcaattacagagctgttgatatcttgaatgtcttttctgtttggcctggctcttaatttgcttttgttttgcccagtatagactcggaagtaacagttatagctagtggtcttgcatgattgcatgagatgtttaatcacaaattaaacttgttctgagtccattcaaatgtgtttttttaaatgtagattgaaatctttgtatttgaagcatacatgttgaaaatacaccttatgagtttttaagtacagggttttatagtgtaatatatacagagtaagtgtttgtttttgttttcaactgaggtcaaaatggattctgaatgattttgcatatgggatgaggaaatgcttggatccttaaggagtttacgaaatctgctgtttta

SEQ ID NO: 4001 - DNA, 417 bp, Homo sapien
  misc_feature (1)...(417): n = A,T,C or G
ttctccctcacttatttttcagctgtactgcttctataaagaaaaatttccccttctactatttggttacctagtgctgcatttatatagaaaaggcgggataaatattcttgctcttatcagttttaatagtaatgtattccaccatctagcaaccttcattgtaaccaattagcttttccccattcttgtttttcgagagtgggcctcattcttttgtccaagctgagtgcaatcatggctcactgcaatctcgacttcctgggctcaagcaattctcctgcctcagcctccaagtagctggganacaggcttgaccaccatgcccggctaatttttgattatttgtaatacaggattcattatgttgcccaggctgttttttagtccattcttttttttttttttttttttttt

SEQ ID NO: 4002 - DNA, 367 bp, Homo sapien
  misc_feature (1)...(367): n = A,T,C or G
acgccagtgacgaccagagccagacccagagcgcgctgccgcggtgatggccgggctgggccctgccgctgggccgagtcgctgagcccatcgggacatgaaggtgaagggcgaggcgcggcgaacagcggacgaccggccggggcgcgggccgagccaagggcgagtcccgtatccggcggccgatgaacgctttcatggtgtgggctaaggacgagcgcaacgcnatggcgcacgagaatccagacctgcacaacgccgagttgagcaagatgctgggcaagtcgtggaaggcgctgacgctggcggagaagcggcccttcgtggaggaggcagacgggctcgcgtgcacgacatgcaggaccac

SEQ ID NO: 4003 - DNA, 507 bp, Homo sapien
attcggcactgagggggagctaagatcagggattcttaaccttggctgcacaccagaatcacctggcaaattaaaaatacgtggacctgccaccagagcttgtgatttaatcagagtcggcatcagagttttcaattttttatttatttattattattattattattattattattattgagacaagatcttgctctgtcgcccagactggagtgcagtggtgtgatcacggcttgctgcagcctcgacctccctggttcaggccatcctgccacctcagcctcctgagtagtagggactacaggtaggcaccaccacacccagctaatacttttaatttttttttgtagagatagggtctcattatgttgcctggggtagtctcgaactcctaggctcaagcgatcctcctgcctcggcctcccaaagtgttgagattataggcgtgcgaccagtgcccagattcacagaagtttcatacacctttcacccaggttcccctaatgt

SEQ ID NO: 4004 - DNA, 338 bp, Homo sapien
gtggacaggcagtgtttgatgagccagcgaactcaacgcccacagccccaggagtggtgagggacgtgggttccagtgtgtgggcagctggcacctcagctccagaggagaaaggctgggcaagttcactgacttcaacctttctgctgctccgagtcagggcccaggtgcagctctccggtggacacagaatgcagccatgctgagggcagccggagccaaggccgtgagaaagccttcagcccggcttctccatgtgcctggaacgtgtgtgtcacaggaaggccccctgctggctctgacagtagctctctgggggctccacagcgaggatggcg

SEQ ID NO: 4005 - DNA, 465 bp, Homo sapien
ctaaaagcacagcacagaaaaccctctccaacacttcccttttgtcttcttgataatagtcattctaacgggtatgattacagtagctttgtagtgggttttctgtgctgtgctttttaatttcatgtatgtaaaaaacattgggtattttgaatgtttttcttttctcaccttatcctagaacttgaggctgggcgcggtggctcatccctgtaatctcagcactttgggaggccaaattgggcagatcacttgaggtcaggagttcgagaccagcctggccaacatggtgaaacccatttctactaaaaatacaaaaattagccaggcgtggtggtgcacgcatgtagtcccagccaatcagtaggctgaggcacgagaatcgcttgaacccaggaggccaaggctgcagtgagccacgattgcaccactgcactctaacctgagcaacacagactccatctc

SEQ ID NO: 4006 - DNA, 140 bp, Homo sapien
gttaccaatctgaagtgggggcggccggggttttttttttttttttttgtttggaaaaatgaaaacaaaacaaaacccaaaatccttgagctctaccctcgtggaccccgtccctgcccacccttcccacaaaaaaaacc

SEQ ID NO: 4007 - DNA, 208 bp, Homo sapien
cggcaacgaggggcagaggccaggaaaggtcaaggctgctcgtggccggagctggagacccagcaagggttgatgccacccagggccgaagcaggggactgctccgaagttccaccaagactgaggctttgtatgactcaaactggagcctcagcaagactgagtatgcccaaggccagggctagaggtccagcaaggctgagggtgc

SEQ ID NO: 4008 - DNA, 426 bp, Homo sapien
tctcattaaaataggaacaaaatttgctatcctttagattaggagctgaagattcatttccctgggaatgtttccatttagcttcaagtttcagctcaaacatcaccttctttctgactcctttcattcattcctccaggtagtaaggggctaccatagtactttgtttatgcctatattatatgacatcactgtagttgcttgactgtttctcctactgttctgtaaacttattaatgggtgagaatctaattttactcatcttgatggcttcatgatccagcacagtgcctcacacaaagaactattgggtgggtggatggatggatggaggaatggagacagttggcttaaccagatcctatatacagattattactggctccaaaggatgagcagataagaccataagaattggatcaatgt

SEQ ID NO: 4009 - DNA, 419 bp, Homo sapien
agactgtttcacactgtggaagctttgtactttcactctgctcaatagagcctgcagctttttctcactctcagtccatgtctctttcactcactgtggtcagcttccccaccatttctttggtgtggcttggcaagaacctcaggtgttacatcttggcgagccagacaggagactccagaaaaggtatctagatcatcatgcagatcaaagccatcaagctacggatgatcttacaaatggaacctcaaatgagctcagctcacggcttctaccgaggacccctggatcaactcgctggtccctcaattaccctagaaaattcccctctggaggacaccaaactgcagggccccttcttcacccctaaccagcaggaagtagccagaacgactgccacacggttcccaacagcagtt

SEQ ID NO: 4010 - DNA, 207 bp, Homo sapien
ggttgctgctaaaaccttgcctttttataaggactacttcaatgttccttatcctctacctaaaattgatctcattgctattgcagactttgcagctggtaaagtaaatttcattttattgctgaattgtaataactttttaaaattttgtgacttttgatgcaagagtatatatatatatatatatatatatatatatatatatat

SEQ ID NO: 4011 - DNA, 469 bp, Homo sapien
gacaaccaaatatacattgctggtcacccagcttcttgtcaactactctaccagccagaagatctcccgccctggggactcggatgactcccggagcgtgaacagtgtgcttctctttaccatcctgaaccccatttattcgatcaccacggatgttctttacactatctgtaatccttgtggccctgtccagagaattgtcattttcaggaagaatggagttcaggcgatggtggaatttgactcagttcaaagtgcccagcggcagaggcctctctcaatggggctgatatctattctggctgttgcactctgaagatcgaatacgcaaagcctacacgcttgaatgtgttcaagaatgatcaggatacttgggactacacaaaccccaatctcagtggacaaggtaatcttgacgaccactttgttctaaacatacccgccttgctttcactcgactagtgcactt

SEQ ID NO: 4012 - DNA, 496 bp, Homo sapien
aacacctatgaaaagaagcggggaaaacaacaacaaggacaacaacaaaaaaccagtgaaattctacaagtgtcccttttaaaaatagtatgtgctaactaagggctattcattctgccatttttaacttgagacacatttaagaataaagttggatgttctttttctgtgattatgaaatgcaataaaatctgaataaagggcaaagtttcttcctgatcagattagattaagtgcttagttttattcctaattctgccccttttaacctgatgtgtaccttactctttcctccctctcttcctcccttcctcctctccccactcctttcctgcatttctccctccctccttccctcgtcacatctcttatatgagcacagtaattatgacctttttgttttggctacaacttgattgaaacaagttcaaaatttaaacaagttcatacaagttttaaaaattctcaactggtagcttgcttgctgtgcgtcttc

SEQ ID NO: 4013 - DNA, 446 bp, Homo sapien
acacgactactctttaatggtaaaaaaattttttttaagtcatcaaaaaatggaaagaagttataaaagaaaaacttccagaataatggctattagtcaaagtctcacaaaatattaatgttctgccttatgtgtgcatgtttatatgtggagggctaatatatgaaagtagggttaacagataaacattaaatcctataaaatgatacaaaacaaaaatatttgcatggttagattgacccacagatgcgataaggaaaatacgtgactaggcaactcagcctaggtgaaaatgaaaaaagttattaatatcaaaacagaaattccattttgaagatactattaggttaaattacttaaataatgttccagttgtcacactgcaatgacacagtgacatgacgccactacctacttcctcttccttaaatcacttcctcaactgt

SEQ ID NO: 4014 - DNA, 464 bp, Homo sapien
gacggctgctgcgccgcgctccccagtgccccgagtgccccgcgcgcccgcgaggcggagtgggacccagccctaggcagaacccaggcgccgccccgggacgcccgcggagagagccactcccgcccacgtcccatttcgcccctcgcgtccggagtccccgtggccaggtgtgtgtctggggaagagacttacagaagtggagttgctgagtcaaagatctagccatgagctaccctggctatcccccgcccccaggtggctacccaccagctgcaccaggtggtggtccctggggaggtgctgcctaccctcctccgcccagcatgccccccatcggggctggataacgtggccacctatgcggggcagttcaaccaggactatctctcgggaatggcggccaacatgtctgggacatttggaggagccaacatgcccaacctgtaccctggggcccctgg

SEQ ID NO: 4015 - DNA, 443 bp, Homo sapien
ttcggccaagggggatttaagtgagctctgaatgacaaaaagccaaccaagggaagacaagaaggaagaacattccaggaaaaggcaccagccaagccttagacactaaagaagaaactatgttctatgctcaaaaaagatgaacaagaatcactgtgactaaaaagcaagtggttgaggggaagagagacacaagctattgtaggggtttgcaggtcagtgtgaggagtttggattttattccaggtggactcctcttcctccacacagtctccttatgagatctcactccatttcagttttcattcctatcttgtggttttatgacaactcccactccaacttttctctacaatgcaggccagtcctatgcaacagcatcctgaactacatccatacttggatttccactgatggctcattaaaaagtccctaactgaagc

SEQ ID NO: 4016 - DNA, 430 bp, Homo sapien
tgctttccttctttctatatctttaccttaaacttagaaaaatcagtgttaataattagatgttgcagatgacagaaagctagattggatcttgggctactggcttaagtgactgggtagataatggtgtcaataaaaagaagaaagaatagtgtttgaggaaaagagacgggcttcagttagggactttttaatgagccatcagtggaaatccaagtatggatgtagttcaggatgctgttgcataggactggcctgcattgtagagaaaagttggagtgggagttgtcataaaaccacaagataggaatgaaaactgaaatggagtgagatctcataaggagactgtgtggaggaagaggagtccacctggaataaaatccaaactcctcacactgacctgcaacccctacaatagcttgtgtctctc

SEQ ID NO: 4017 - DNA, 395 bp, Homo sapien
  misc_feature (1)...(395): n = A,T,C or G
tacagaatattttatttcagctggtctttgtaatttgaagagaatataggagaaacaaaatagtcagatctaccatagatgggacatttcaatacaccaaaatggcttattcaactcttgcagatggaaagttccatggacctttacacaaggagtttttctttggcctgaacctgtctttcctcatggtcacttataaattaaatatgaatacaaatataataggacttcgcttcattttgaagtgtcttgaagctaattatgattttatattttagaatcattgggtatctaccccatgcaggcttagttgaagtgatagccttttggcttttctgtgtatgatttgtttttatgtaaattatgtagactagatanatgtttatttattttta

SEQ ID NO: 4018 - DNA, 405 bp, Homo sapien
ttgtttaatccagtcatttattcacttcactcttctaacaaatctgtattaaacgctgcacatgccagcattgcactaggtactggaaacacaagataagctcactaagtagacaactgggagagaggcagtttaaagagaaaagaatctaaacacagactgatgcaattaaagaagacaagtagaaaactgcagcaaaacagaacaacagaacacagtggattgggggatgcaggtaagatgggagaagaggacagggaggaggtgggggtgggggaaggagtctaaagggtgctgggggacacacagacaagactgcaggaaggaaagagagcaaagaggttgctgaaatgacccacaaaaggtgaaggccagaacaaagaaaatttaagatttgagaaaagg

SEQ ID NO: 4019 - DNA, 92 bp, Homo sapien
tggacacactgttcctgctggccgggccagacacaggtgctcacgcctgacttcctgaaccgctgccgcatgcatgccatctccggctggca

SEQ ID NO: 4020 - DNA, 231 bp, Homo sapien
aaactgtccgctcttcacttgaaatcatgtccctatttctaccccggccagaacatggacagaggccagaagccttccggacaggcgctgctgccccgagtggcaggccagctcacactctgctgcacaacagctcggccgcccctccacttgtggaagctgtggtgggcagagcccaaaacaagcagccttccaactagagactcgggggtgtctgaagggggccccttt

SEQ ID NO: 4021 - DNA, 466 bp, Homo sapien
cctcaactaaactctttatttttggtttggtttttaagtaggccatggttgctttgaggccactgtatggtggcaaactatagatgaaagagcttttattaaaaaaggcactgatgggagacactggctgcccccgaacctttgccctccctaagagcagcctctcagttcccttttgaggagccccctcacctccaccagatatgggaagacaaatggggtccctgtttctggattcccagcatggtcgggggaagatctgtgacctgggcttggcacgggggctctcagaaggcaaggcctggttggagggtgttggtgggggcagaaagctgagcagattctgggagcagcccaccccatatcctagtaactcccttttgctcttccagacttattatgcggcttggaccattgatgcctgtgctcccaggagatacagcatcaaatggcgtggagaaaggac

SEQ ID NO: 4022 - DNA, 208 bp, Homo sapien
ctcagctggagcaattggggggcagcccgcagagccaatccccggacggcagggttgggtgagcagctctctgaccctgaaagtgaccagcgccctgagccgcgatggcatctcctgtgaagcctccaacccccacgggaacaagcgccatgtcttccacttcggcaccgtgagcccccagacctcccaggctggagtggccgtcatg

SEQ ID NO: 4023 - DNA, 545 bp, Homo sapien
cccacgcccctcagatgagtctcacgccaatggaggaacagatccgagctattagaagtctcgggaacctccagagatgacagaaggtggcagatttggtccaagccctcaccccactcgtcaggagggcgtcggggaaagctgtggctgcctgcagagggagcccctgatcccacacttccttggagcctgagtgtgagaggaagctaatgtcagccgggctagacaccgtttaaagtctaatccatgaaaccctaagccgcaaatgacacttggggctttgcagacacccgcagactcagcagatactcctgcggtaacacactgtgctggaaaacgcctggagccatgacacattatgtatttttattattatttatggtaggaagaggagatgagggaaaatcgggctgaatctaagcagcctgacaattcagctagttaatatttagccagttaagaaaggtggttgtaatccctgcaagcagtgagctctcctttgatttctctaatagcttaaaaaataatttcttacaagacaatta

SEQ ID NO: 4024 - DNA, 490 bp, Homo sapien
ggtgaagggcatgtcacatggccagaagaacaaacaagagggaggtgccattcactttcgtgcgtgcgtgtgcgtgatggagtctcactctgtcacccaggctagagtgcagtggcgcgatctcggctcactgcaacctccgcctccagggttcaagcaattctcctgactcagcctctcgagtagctggtactaccagtacccgccacgaagcccagctaatttttgtatttttggcagaaacagggtttcaccatgttggccaggctgctcttgaactcctgacctcaagtgatccgcccacctcagcctcccaaagtgcagatatgctttacaaatgaaatgagggtggcagaagcttcaccagagttcagtcactacttgagagtttatattggaaagaaatcgtataaatgtatgtgctagaggcttccccgaggtgtctgaactcactagacctcagaatatacatctttgacaaatgtaaaaa

SEQ ID NO: 4025 - DNA, 530 bp, Homo sapien
  misc_feature (1)...(530): n = A,T,C or G
nangcccctgaccgcgtccatgctggctgcgggcccctgcatgagcaaaagcagatgattggcacctgttatcttgtcttaaaacgctggtcagactggatggtcctgagctttcttccactgctgctgtcctgtgactttgaggggagcgtctctacccccttatccatgatgtccacacccagctggctggcaagatcacgggcatgctgctggagattgacaactcagagctgttgctcatgctggagtctccagaatccctccatgccaagatagacgaggcagtggcgtgctgcaggcaaccaggctatggagcagccgacgtancatgcactgaaaccagaaaaggaaatcctcgcttccatggctgccaaaaggacagtgtttctggctctcagcgctaaggccctgcaaactctaacttatttcccaattagtctgtatctatacttgggctctgtatgtgaatgaaggttggtcacccatccagcctattaccttttgctttgtgtattaaaagtgctgca

SEQ ID NO: 4026 - DNA, 533 bp, Homo sapien
ggatcagtggacgggcctctacctcatcctcgatggtcagctgaggcatctgggaaaccctctccttctgatccaggatctggtacagctaccatgatgaacagcagctcaagaggctcttcccctaccagggtactcgatgaaggcaaggttaatatggctccaaaagggccccctcctttcccaggagtccctctcatgagcacccccatggaggccctgtaccaccacccattcgatatggaccaccacctcagctctgcggaccttttgggcctcggcatcttcctccaccctttggccctggtatgcgtccaccactaggcttaagagaatttgctccaggcgttccaccaggaagacgggacctgcctctccaccctcggggatttttacctggacacgcaccatttagacctttaggttcacttggcccaagagagtactttattcctggtacccgattaccacccccaacccatggtccccaggaatacccaccaccacctgctgtaagagacttactgccgtca

SEQ ID NO: 4027 - DNA, 441 bp, Homo sapien
  misc_feature (1)...(441): n = A,T,C or G
gccttaattttggggaagataaaaaatgttgattgcatcctccttgcaaggcatggaaggcagcacaccatcatgccttcaaaggtcaactaccaggcgaacatctgggctttgaaggaagagggctgtacacatgtcatagtgaccacagcttgtggctccttgagggaggagattcagcccggcgagtattgtcattattgatcagttcattgacaggaccactatgagacctcagtccttctatgatggaagtcattcttgtgccagaggagtgtgccatattccaatggctgagcgnttttgccccaaaacgagagaggttcttatagagactgctaagaagctaggactccggtgccactcaaaggggacaatggtcacaatcgagggacctcgttttagctcccgggcagaaagcttcatgttccgcacctgggg

SEQ ID NO: 4028 - DNA, 532 bp, Homo sapien
tactcccctagtcctggccagaaggatgatctcgcttttcctctacaggcctataagaagcaggtacttcagttctaaattctgacttgtgttcttttcgtcttcataaattctaactaaggccactgtgccactgtgcacccttgagtaccattgatccaaagctttcccacagacctccctggcccacctagaggctttcttggtcagtgcctgtcaagtccagtcctgctgagccaaaggtttgtcattcctttctcttcctgtacatctgagcagacccactccagctttctggtgtcacaggcgggaatgttagttagtaggtagacttagatcccatttctgtcctgctcccaggaagattcttaggtcctcttcaatccagcagcccctcccagaggtgtgatcagcaggatgctgaggaaccatgttgcctttcctgtcaatcacagccaccttcctgttatctcctaaatggatctggcttttcctggaggctgccatggttggaagatgttatcagagggcc

SEQ ID NO: 4029 - DNA, 500 bp, Homo sapien
  misc_feature (1)...(500): n = A,T,C or G
ngtaagcagctcgccagccagcagcccgccagccgccgggaggttcgatacaagaggctgttttcctagcgtggcttgctgcctttggtaagaacatgtcgtccatcttgccattcacgccgccagttgtgaagagactgctgggatggaagaagtcagctggtgggtctggaggagcaggcggaggagagcagaatgggcaggaagaaaagtggtgtgagaaagcagtgaaaagtctggtgaagaagctaaagaaaacaggacgattagatgagcttgagaaagccatcaccactcaaaactgtaatactaaatgtgttaccataccaagcacttgctctgaaatttggggactgagtacaccaaatacgatagatcagtgggatacaacaggcctttacagcttctctgaacaaaccaggtctcttgatggtcgtctccaggtatcccatcgaaaaggattgccacatgttatatattgccgattatggcgctggccg

SEQ ID NO: 4030 - DNA, 252 bp, Homo sapien
ggttgctttgaacttcatttgagaattacaggagtcatatgcatacgacagagcacacaggtagcgacggaggcacaactagtgtgacacaggatgtgggcatcctggctaaggctttacatcgtggtagtctcatcggcatttgcacctactggggacccaacctaggctccagactccttggtgccagggatggctgtctcccgggacttcatgtctagcttggtcataggggcctccatggtcattgtg

SEQ ID NO: 4031 - DNA, 533 bp, Homo sapien
  misc_feature (1)...(533): n = A,T,C or G
ngagggtctgcaagtggggtcccagtgtagcaccaatgagagtgagaagcctagcattttggttgaaaaatgcatctcacccccagaaggtgatcctgagtctgctgtgactgagcttcaatgcatttggcacaacctgagctacatgaagtgttcttggctccctggaaggaataccagtcccgacactaactatactctctactattggcacagaagcctggaaaaaattcatcaatgtgaaaacatctttagagaaggccaatactttggttgttcctttgatctgaccaaagtgaaggattccagttttgaacaacacagtgtccaaataatggtcaaggataatgcaggaaaaattaaaccatccttcaatatagtgcctttaacttcccgtgtgaaacctgatcctccacatattaaaaacctctccttccacaatgatgacctatatgtgcaatgggagaatccacagaattttattagcagatgcctattttatgaagtagaagtcaataacagccaaactgaga

SEQ ID NO: 4032 - DNA, 496 bp, Homo sapien
cggcacgagggggagcggaggtggcggcggcggcgtttacggtggccttggttgtcttccagtcacctcggctcgccctttagccggcaccgctccccttccctcccccttcctctcttccttccttccctccccttccctttttcccttccccgtcggtgagcggcgggggtggctccagcaacggctggcccaagctgtgtagaggccttaaccaacgataacggcggcgacggcgaaacctcggagctcgcagggctgggcaaggcgggccttggagatggagaattctcagttgtgtaagctgttcatcggcggcctcaatgtgcagacgagtgagtcgggcctgcgcggcacttttgaggcttttgggactctgacggacttgctggtggtggtgaatccccagaccaagcgctcccgttgctttggcttcgtgacctactccaatgtggaggaggcggaccccagtggccgcctcgccccatgccgtgga

SEQ ID NO: 4033 - DNA, 554 bp, Homo sapien
ggtgagtgcacctccttgcccagtgcttccctaactcagcctgcactttatgtaactttcacctggaatactgcaaaggaatgggtaattgacatgcccttgacactggtgaggatttgttgcctcaaatcaacctttagtagtgctggaccacgggcaactcaaggttgaattccctgacaaaattctcgagctttctacatggagtgaagtcgaatcagctggcatttggttgggataatcccagtgagggagggtgaccagactgtggttgcaggtcttgcctgtcacctctgactgccctcctttgggtgaacaatagtctgcaatttcccctaagccaggccttgggatttggacttttgagggacctgggtagtagttagttgacatgctatttatcttttccttcttttagtttacaacccccaaacctttctggtgcttctgagtgctgggcctgcctcagagcggggagaaggtggaggcaggtgctctgggtgacacccggttctggtgcctcaggttgcacagtgggtctgtggggtgggtga

SEQ ID NO: 4034 - DNA, 504 bp, Homo sapien
cgtcttgcggtaggaaaggggcagggttcgatacctctggggtgtggcgtgttctctcttgcccacctccccaagctcctttaaccaggagcttccctcccagagtgagctacgtcttgggaggattgaagcagggaggtggcagtggctagagttgctcagatcggctcagatgaaggcccaggggtcaaagcatttgctcaccacaactgagtctggaaggcactgtgcagccaaaccctcttgtccaatcacatgcaggccccaggcctctcagaaacgccctggtggagggaggagcccaacagatagggtcagggagtcagtggggaaagcagaggggagagcttagagtgaaacttgaaactgctatggacatggaggtcagatgggaacttggaactgggcatgaatcctgaatggtggggaaacttgaagccatcacagccaagaggtggggttccatgacctgccctgaggtcagcagctcccagactcctttgc

SEQ ID NO: 4035 - DNA, 202 bp, Homo sapien
tgcagggatacccacttgtttattcagcacgtgttgactgaatgtgagctgtgtggcaggcccagctctaatcacgatgatactcgcagcgtcattatgcacttctcagattccgagcagcaacattcattcgtttctaaaaatcttgctgagcgaccatgacataccaggcagtccacagaatgcgaggcaggggtaagag

SEQ ID NO: 4036 - DNA, 141 bp, Homo sapien
ttttttttttttttttttttttttttttttttttttttttttttcccaatacttattttttattactgtacaaaaagcacactctccctctttttgtctctcccaccaacggcacccccccacccccaacccaagaggact

SEQ ID NO: 4037 - DNA, 165 bp, Homo sapien
gcgccgcagggcagcacatggcggtgttgcagtggagcgtgctgggccgcgagctgcagctgcacgaacatcatgtggtcgcccacacgcaaggccagtgtcagtggcgaacggcccgacaggaagtcactgacctgcgtctccgtgagactctcgagagcttgc

SEQ ID NO: 4038 - DNA, 480 bp, Homo sapien
tttaaaaaaaaaacatgaagggagacatgactttattagaaaaataaaaaacaactgaggtgatgggttggtcttcagcggatgccttggtggatgaggctgcttttggctgcactggccttctcccgctcccgccgccgcgcagggtccaactcaaaacagcgccatagcctcagggtctcatctgctgctgcggatgccactgtggccccatctgggctcatggtcagactcaggacccgggatgtgtgacctttgagttcagccaccttggccatggttgggtacttccaaataactagctggttctgtgcaaagccatggcctgagatgagctccttgtaatggggagacagaagattgagcacacctgggaatggggcatcacggaatcagacaagccccagagcacaaattccagatgcgaatgtgtcgattcactggtgccccactgtttgccagaaattggacctgccagga

SEQ ID NO: 4039 - DNA, 196 bp, Homo sapien
gcagtgaccgtgctcctactcagctctgctacacagcgctcaccagtactccgcacttcggcccctcgcctggctttgctaatacgtcacgatgatgagctcgggcttcaacgcataccacgatgccgtcatccacccgcatgcagcaaggcgtccccgtgcacgggatcatgcactctctgtactaccaactcac

SEQ ID NO: 4040 - DNA, 490 bp, Homo sapien
atttaatcatatatttttacttgtatctaagccaggtcctttggcaatgaggaggtgtgcagggatccaggtgaggaagtgcaggactggatggacatttaaggtagggcagctttgggggatgccacttccaaatgcaatggggaccatcactgtgtattccccatagttgtgtggtgagcagctctggataccctgaccacaaagctttggggacaatttgttcaccagaggatgtgaggaggacggaatactcaaaggcactcagggatggtggagctttggagctgaggcgggcaaggcctctcagatggtcacgctgttctctaccatgctgggtcaaaggtactcacagggcaggtccaggactgcattccggacctcaatctccttgtccatggaagccagttcctcctggaattgtctcagcacagcttggggctcaggaccagagaaatatttctcctcatgcatgacaggctggcgtctg

SEQ ID NO: 4041 - DNA, 497 bp, Homo sapien
gagacagtctcactctgtcccctaggctggagtgcagtggcatgatctcggctcagtgcaacctctgcctcccgggttcaagcgattcgcctgtctcagcctcctgagtagctgggattacagacacgtgccaccacacctgactaatttttgtatttttagtagagacagggtttcattgtgttggttaggcttgtctcgaactcctgacctcgtgatccgcccacctcggcctcccgaagtgccgggattacagacttgagccaccgcgcctgtcctgtcctgtgttcttaggctggatgttttccatctttgtctccacaatatttgtattccacagattccctgaatcttaggagtcttctcagtcaagactgggaagaagtgggaaacaagtggaaagactgcagtactcagtttacttgcacacttgaacaaagggatttaaatatatactctgtttcagacgaaagttctaggtgcgtagggttagtagg

SEQ ID NO: 4042 - DNA, 490 bp, Homo sapien
  misc_feature (1)...(490): n = A,T,C or G
atttaatcatatatttttacttgtatctaagccaggtcctttggcaatggggaggtgtgcagggatcgtggtgaggaagtgcaggactggatggacatttaaggtagggcagctttgggggatgccacttccaaatgcaatggggaccatcactgtgtattccccatagttgtgtggtgagcagctctggataccctgaccacaaagctttggggacaatttgttcaccagaggatgtgaggaggacggaatactcaaaggcactcagggatggtggagctttggagctgaggcgggcaaggcatctcagatggtcacgctgttctctaccatgctgggtcaaaggtactcacaggngcaggtcaggactgcattccggacctcaatctccttgtccatggaagccagttcctcctggaattgtctcagcacagcttggggctcaggaccagagaaatatttctcctcatgcatgacaggctggcgtctg

SEQ ID NO: 4043 - DNA, 521 bp, Homo sapien
aatccatggtccacctgggttttaattattagatcttggtcgcccaaacagaaatttatatatatatatataaatttgaccccaaggaagaacaagtcaaaacaaaatgccacgctctgtttgctctagaaaaagaaccatcaagtccacagagtgcaggtatgacttactctccagagtcagtcattaatgtctgtcacctagccacgtataatcatctttgaaaaaggactatattctatcttgggacaataattatggctgttttaatagttcaagagcataatatagcattgatttaccaaaattttgggcctttaacagccagtctatgaaaaccatttagagccccattcctgtctgtagcctaggaaatggaaccatctttaattctttcccacagggaagaatgctgcacctatcacactatgtggtcagggtcactgattgataataaataaataaataatagagcgctcaggggaaacaacactcaccagaccacaacacacagtagaagc

SEQ ID NO: 4044 - DNA, 455 bp, Homo sapien
ttttttttttttttttgttttacctttatacaatttattgggtttaatattcataacaataactttttctactgaaatagcagtttgtgtttacctgtcgaaccccaatatgagaaatgtgtacaaaagcaacagactgtgatagaaaaaggtatgtgaaaaaattagcaaaccaaagcatgataaatggatgaagcactataaaattactttgctgtttacgtaactgtatctttaatctgtactgtgctaaacagcctatagccaagttttaaagagttacaggaacaactgctacacattcaaagaacaggcattcactgcagcctcctgatttgacctgatgggagggacaggagaatgagtcactctgccaccacttttcctgccttggatttgtagaggatttgttttgctctaatttgtttttcctatatctgccctactaaggtacc

SEQ ID NO: 4045 - DNA, 484 bp, Homo sapien
cagggaaggggggggggcttaattcccaagcggggtcccgggaaaaaatttaaacggggaacgtgcaaagaatcctcgtggaaccgcaaaaccccggccaaacgcgggtttggcggccgtcgaactaatttacccgggaaaagggaaaggcccttccgcgtgaaagggttttcaaaacccccatgcatcacggagcatgaaaaaactttcccctggggcaaactgcttttgtcaaggggaaccttgcaaaaaaggaaaaaggacccttcggattccaccacgggaagcgtgggccctgaaaattttcccccgggtgccaattgctccccaaatcaagggggatttccctggaaaaaaagcctttaaccaggaaggtaaggctaacctggtttttggaaaaccccccccggaatgggggaagggtttaaaccaggggttctcggggctgccctttggctttgaaaaaggtttccccaaagggggc

SEQ ID NO: 4046 - DNA, 325 bp, Homo sapien
  misc_feature (1)...(325): n = A,T,C or G
ccctcgtagttgacgcaaccgcgcatacgggttccgagaagtcccagatcatggcccagggcatgcggggcaggtcgcacaggtagcaagattgtctccgggacgaggacacctgcgccgccgacatgatgcctgccctgaggaaggtaggcccccgcccgggctngtctccgcggcgccttctcctccgggaggactggccggcaggggagggagtccgactgcacggacgggacgagggggggcgagaaagttctgccccagggcctggagggaacgcgagtctccaccgccggcgcaggcctcgccgtgggggctccaccgc

SEQ ID NO: 4047 - DNA, 556 bp, Homo sapien
  misc_feature (1)...(556): n = A,T,C or G
gagcagacaaatctttattcctgaggctaaaatatgcaccagttccctccctgtaccgcgccactgccagcctgactgcatgcaggccctgtcccagacctggagcgctgaacttggagtcccaggacctccttccctgagttgtgtgtgtgtacatggaggggactcctgggtagcacctggaggcggcctaggggtgaggggcttctcaagggtgccctgcactnnccagaggtgcagtcttgggcaggatgtagcatgttcagagtctggtgaccgaaacagggctgtcggggacaggcctcgggtgttggagggcaaaggtgacagcatcatggacagaggcaaagagatgcttcttggtgatggatgcatcgaagaagtgcccagcctcaagctggctgaccacagggctgtggcaggccgccatgtacacctccacctcaatctcccggaagtcatggaaaatattcttcaggctcttgaggcacacagtgtccacaaaggagagggcacccaggtccaggatgaggctgtggaagtctggctgaggcag

SEQ ID NO: 4048 - DNA, 507 bp, Homo sapien
ggatttcctttctttattgaggggataccgggaagaagtactttaaaagttaaagatggagataaaattaccccccatagatttgctagtacaatggatagagtctttatcccaaacaaaaattataacaacacatagaaaaaatttttaataggaaatattcagagattccagctgtggtatggttagcccttttctgtatggaagaaagggtgttgatctggatggcttatggacagctatttaaataacctctccaggggagagtaaaccctgttggtgatgacagctcccactatgcgggaggaaagcacagtgaatgtgtgaagatgaagatggtatgtggagacacaaatatttatagttttgtaaactctaaagaggaaaaagaacaccctttattacaattggggttaaaaacaaaaagcccctgtctaaaagagaagactcccatctgctgtagacagaggaaataaacatattgacaggagttcaatagaaattact

SEQ ID NO: 4049 - DNA, 484 bp, Homo sapien
ggaagaaactgctcaacaagtgcgccgcctcagccgcggaggagagcggggccggcaagaaggacaaggtgaccatagccgatgactactcagatccctttgatgccaagaatgatctcaagagcaaagcaggaaacggggagagtgctggctacatggagccctatgaggcacagaggatcatgacagaatttcagaggcaggaaagtgtccggtcccagcataaaggtatccagttatatgacaccccttacgaacctgaaggccaaagtgttgactcggactcggagagcacagtcagcccccgactgcgggagagcaagctgccccaggatgacgacaggcccgccgatgagtacgaccagccttgggagtggaaccgggtcaccatcccagccctggcagcacagtttaatggcaacgagaagcggcagtcatccccctcaccttcgcgggaccggcggcgcagcttcgtgcccctgga

SEQ ID NO: 4050 - DNA, 253 bp, Homo sapien
agccgccctccacccgcttcagccgcttcacctgcttgcgccgccgcggccggtacttgtagttggggtggtcctgcatgtgctgcaccgcgcgctctgcctcctccacgaagggccgcttctccgccagcgtcaggcgcattccacgacttgcccagcatcttgctcaactcggcgttgtgcaggtctggattctgctgcgccagcgcttgcgctcgtccttagcccacaccatgaaagcgttcatcggccg

SEQ ID NO: 4051 - DNA, 159 bp, Homo sapien
tcaggtctttataagtaacaactcattatacgtaatcattacattaggtaaattctgcagtgtatctaaggtcaccgtgaccacaggagtacagattaaaagggaaaagccctgagcgcgagaaagatacatcccatcctcaaaataaattaagtgaac

SEQ ID NO: 4052 - DNA, 439 bp, Homo sapien
caagagacagggtcttgctttgttgcccaggctggagtgcagtggtgcaatcatagctctctgtagcctcaaactcatggccttaagtgatcttccttccccagcctcctgagtagctgggactacaggcatgtgtcaccacattttgtagagatggagtctcgctaagttgcccacgctggtctccaattcctgggctcaagtgatcctttcacctcggcctcccaaagtgctgggattacaggcgtgcctggccacagatgagaggatctctgcagcagatagtacttgtgggtgcgagacctgtccagggcttgatttgaggagaggagcctgaggcccctgcctgctccctggtgctcaggggctgttcttgggcccctgttgtttcctccgctgccggcccagctggcggaagtgcagccgtttggggttgagg

SEQ ID NO: 4053 - DNA, 386 bp, Homo sapien
tcgtggcgctgtggcggaatgtggcgggagtcgtgttaacagcaacacggaagtgtgtgcttgcatcagcgccaggacgtgacacctttctcctcctatattgcttctgtcctgggtaactccaggcaaaacagatttgtatgtgagctgtgaccaggtaggaaggccggcctcgggggtcggaacccaccatggttgctggtgtccacgttgcccattgctcgcacactcctcgtgctgtgttgtcatgcagatgccaccttcggaggtgccctccgctgtgtgagccacacgccggctgcctctcagccaccgtgtgtctgtggtgtgtgatcccgggtgtctgtccctcggtctcgtacatccatgtctctcgtgaagcccgt

SEQ ID NO: 4054 - DNA, 285 bp, Homo sapien
ggcctgccaggattttaaaacccccctttgcgccccccacagggggactggccccaaacccggcttggccacccccaccccaaaaaaggggccccccattcccggtgacccttccgggggaccgtcagtgggtttttcccccaaggaggccccgcccatttaaaacgggggccaatggggcccccagcctcaaaagacctcccattcatgggcccccaggggttcctaaagggtccccggttcccccggagacccccctaaagggggggaaacccctcgggggtc

SEQ ID NO: 4055 - DNA, 475 bp, Homo sapien
tgtggttgatcctttattagacccattttacagattaggaaactgagatgagcagaggtgaagtcagccctgacaggtcacaggagcagcaggtggcagaccagagttgggctcaagctagtgccaaatgtgccccattggccactgaccctaaagatgtgtgacccagagggtcctgaggagccacgttaacccatggccggtgtcatcctcttccggtttaggactagtggattttgggcactggagccacctctttggcaaacagcttgagggagaaatcaagggctggggccgcctgggtcagcatccccatggagatgacgtctatgtgcggcccgcagaactgggggaggttgtccagggtgatgcccccactggcttccacagccacactcgggaactgggccttcagcacggtggccgttgggtgcagctcctctggcttgaagttggtcagcaggaaaaggtcggc

SEQ ID NO: 4056 - DNA, 422 bp, Homo sapien
tacaaagctttctgtaaatattttattttccatattttagagtcagaaagaagcgcttggtaataaaaataatagagaattattttcttcgagcccgctctgcgctgcgccggcctccccgcgcccgggcccacggctgagtgcgcggcgtcagaggccccaagtccatctcactatttacagatatgttacaggccgggatggtcacagaggaaagcccagctctcagcatggccccacgtggtgaggagcccccaggctcatcccggctgtctcggacagagactgagaagcctgccgcgtcccgtgggggcctaggctgcggcgggctccacgggggggcaggagtgggccgtgatgtcgctgtgcttgtacgccgcctcgtccaggtccagcagcctccggttgacctccagtgtcat

SEQ ID NO: 4057 - DNA, 160 bp, Homo sapien
gctcgtcctatgctggcatgtggaacgacctggcagactgagtgacacgttgcccaaggtaggctcagacctgacttcttgccgagtccgcaagcaggccggaattgaaatcctggagcttggcaatcatgctcttgacctttaaagcgatgtagagccc

SEQ ID NO: 4058 - DNA, 130 bp, Homo sapien
ctctcagcagctagccaggctggcctgcgcctgacggcccgggaatagcagcttcttgtgacttcccacagcaggcacattgcgtcgtctctcaaagtccctcctctggagcgcctcctctgcccgtggg

SEQ ID NO: 4059 - DNA, 437 bp, Homo sapien
gagacacctgaggccccagagcttgaggcaaagccaggccgtccaaatcctgtgtgccgtggacgagtggccactttactactcctaaggctaagatgttgagagctcagaccactgctcagagcagtaatccctgctcagaatgctcccagttccctcgtccctgcccaggtctcttgtctcttgggaaggaactgataggtcgggccattgttgggccatcactgagcgctcagtatctcaagagactctgttcattctgctcgtatcccaaggcctggttggtcaaactctgggcaaagggttttcaggatgaggaggtcaagacaggatgtccagagctaccgagttcatctgtgggtgttgggggcaagtgggggctgaagtcctgtgcaggctgcgctggccccacctgccttgtgccctggagtggggtt

SEQ ID NO: 4060 - DNA, 146 bp, Homo sapien
catttgatgctactgccagttttattattgttattatgctcattaatattaatactcagccactgtacctatttaagattgaagaggagaaaggcaaggttttgctgaaatcatgatagcagtgacaatgggtttggggcaggtgg

SEQ ID NO: 4061 - DNA, 109 bp, Homo sapien
gtatcacgagtactccatggagctactcaataattctccagcaattgcagatagactggtacagctacggtactcactggtataaagtggtgctgacaaaacacttgtt

SEQ ID NO: 4062 - DNA, 557 bp, Homo sapien
gtttttttttttttttttttatttgcaaaaggaaaagtaattctttattacatgaacagacactgtacaaatgagcttgttacacaatacagctgcatctccttgctccaaagaaggtggtgagaggcagagggggaatagagcgcatgaaagcccttccctgatgccaatgccagccatcttggcatcctggccctcgagcaggctgcggtaagtagcgatctcctgctccagccgtgtctttatgtcaagcagcatcttgtactcctggttctgagcctccatctcgcatcggagctcactcagctgggcctccaggcagccaattgagcccctggatctgctgcagctgcgtggcatagcggcactctgtctcggccagtgagttctccagcccagctttcatgctgagctgggactgcagctcgatctccagctcctgcatcgtgcgtctcaggtctgtgatctccgtcttgctggtttggatcatttctgtgttggaggcagctatttgttcagctcctcagtcttgctgaagaaccgggctcgaatcccgg

SEQ ID NO: 4063 - DNA, 577 bp, Homo sapien
gaagccacgtggacattcttcagagagccatggcttgtttgacctatcattccctatgtcctcctgatgacctggctgaccgtgggctcctggatgtgaaatcttctttttatggctaagatgccatcaggtgtggggaatcatcagccgggaataggtacgtggaggggatggttgggcttttctacaatagtgaccaagccatgaaggatgatctagagctgcaggcctggtgcagagagatgactgagactggactgcagagggcccaagaccaggggttcctcatctccttagagtcccgggctcagctctgccactttgtcaccatgtgcatcttcacatgcacaggtcagcatgcttctaaccacctgggccagctggactggtactcctggatccctaatggcccatgcaccatgcagaagcccccgcccatctctaaggatgtgacagagaaggatatagtggacttactgcccaatctccaccaggcacgtatgcaaaagaccttcacaaagttccttggcagacgcagcctgtcatgcatgaggagaaatatttctctggtcctgag

SEQ ID NO: 4064 - DNA, 555 bp, Homo sapien
gagctgcaggcctggtgcagagagatgactgagactggactgcagagggcccaagaccaggggttcctcatctccttagagtcccgggctcagctctgccactttgtcaccatgtgcatcttcacatgcacaggtcagcatgcttctaaccacctgggccagctggactggtactcctggatccctaatggcccatgcaccatgcagaagcccccgcccatctctaaggatgtgacagagaaggatatagtggacttactgcccaatctccaccaggcacgtatgcaaaagaccttcacaaagttccttggcagacgcagcctgtcatgcatgaggagaaatatttctctggtcctgaaccccaagctgtgctgagacaattccaggaggaactggcttccatggacaaggagattgaggtccggaatgcagtcctggacctgccctgtgagtacctttgacccagcatggtagagaacagcgtgaccatctgagaggccttgccgcctcagctccaaagctccaccatccctgagtgcctttgagtattccgtc

SEQ ID NO: 4065 - DNA, 573 bp, Homo sapien
aagctagctgttaccagtccaggtaagggtaccgtagcttgggctacgcagccatgtgctattttgggggtcggaatcagacacacctgcattaaattcccagctctaagctaataaactcaggcaattttctgaggggagttaagaatatatgttgacaagtaacacaatgaaatgtaagccctgcagagcatctcgctgccttgcctactaaccctacgcacctagaactttcgtctgaaacagagtatatatttaaatccctttgttcaagtgtgcaagtaaactgagtactgcagtctttccacttgtttcccacttcttcccagtcttgactgagaagactcctaagatttcagggaatctgtggaatacaaatattgtggagacaaagatggaaaacatccagcctaagaacacaggacaggacaggcgcggtggctcaagtctgtaatcccggcacttcgggaggccgaggtgggcggatcacgaggtcaggagttcgagacaagcctaaccaacacaatgaaaccctgtctctactaaaaatacaaaaattagtcaggtgtggtg

SEQ ID NO: 4066 - DNA, 458 bp, Homo sapien
gtgaatgtgccattttctttccttttgtagagaaaatcccctttactttttggaacagtaatggcagcttctagtacagccattacagtttcatatgagaaaaattaagaataactataaaattgttaaaatatccaataatggataatgatggccagaagatttaacatacaaagtaattctcaatgtaaagctattcagctcttccaggttgaatgccctgtaacccaccctgaccttccacatcatcttcaaaaagcagtttctctgttccccatgattctcctataaggtaactctttagtcctccatttagcacattttaaatcctccaaagaataagtatcatgtggattattttaggctttacaaaaaaaaagttgaatggcgttttattttcatggcctataagcaggtaccttagtagggcagatataggaaaaacaaattagagcaaa

SEQ ID NO: 4067 - DNA, 471 bp, Homo sapien
gcgaagagagggctgaacccgtccgctgcccgggcggtggagcccacggcgaggcgctgccggcggtggagactcgcgttccctccatcccctgggcgagaactttctcgtccccagctgctcgctcccccgcagtcggactccctccccagccggccagtcctcccggagagaaggcgccgcggagacagcccgggcggggcctaccttccccagggcaggcatcatgtcggcggcgaggtgtcctcgtcccggagacaatcttgctacctgtgcgacctgccccgcatgccctgggccatgatctgggacttctcggaacccgtatgccgcggttgcgtcaactacgagggcgctgatcgcatcgaattcgtgatcgagacagcgcgccactgaaagcgggcagctggcctgcttccaggacggccgctcccccgggccgccgccgcccgtcggggttcaagacagtgg

SEQ ID NO: 4068 - DNA, 585 bp, Homo sapien
gctcggggctgcagtgcgctctaatggtgcctgtgaataaccactgcattcagcctgggcaatgaagcgagaccccgtctctaaaaaaaaaattgaggggtcaaagaggatgccaaacttaattagagactgagacagggcagggtgccgaggtgtctgcatgcgtttcatgtggatgcccgtgtctattctggcctgctcctgggccccctccccactcagccctggctgatgagaatgggacagggactcccttctcgtgtccctgtgcagcgtcggcccaggaggtagcagagcagtatatgcacatctgggtgtgccctcctgcatgtccccacacatctgtcattcctgtctttggacacctatgtgactcccgcatgtttgtgtccttatgtgtcccatgcatgctccccatctgaccttgcgtgttctcgcgtgtctgtgtgcggccagtcctgccttcactctctcatgggtggccctggcagcatgtctggctccccagcaggtgagctcaggagataagatggaagatgcaacagccaatggtcaagaagactccaaggccccagatgggtccac

SEQ ID NO: 4069 - DNA, 485 bp, Homo sapien
ctgttgcccaggctgaagcgcagtgatgcaatctcagctcactgcaacctatgcctctcaggttcaagcaattctcctgcctcagcctctcgagtggctgggattataggcgtgcacaaccacgcccagctaattatttttagtagagatggggtttcaccatgttggccaggctggtctcagactcctgacctcaagtgatccacccacctcggcctcccaaagtgctgggattacaggcgtgacgactgcgcccggccgacacccaactttcagagcatctttggttcctggggtgagagaagccagaccccagcaccagtcctatcccacagggagcctcggtgctgcaacctctgcagctgcaaaaccccggcaggcttctggagagctgctccccgggtgggaggtagcagaatggagccagcgcacccctttcccgatgtctcgaggcccttctgctcaaaattcttttgtaggcaccg

SEQ ID NO: 4070 - DNA, 357 bp, Homo sapien
attcggcactaggtgggagtagtcatgcttgctggtctggctgttccggacaaggtagctacactccttgcagagtcgcagcaggttctcggcgtctcctctgctgatggctccgtgataccatatttgcttctccagggggacggcaggatccaccctttctcctaggatcccgcagaactcagggctcccatgtttgataggcttaaagccccctccagggatccgaagctggcgccgccggtcccgcgaaggtgagggggatgactgccgcttctcgttgccattaaactgtgctgccagggctgggatggtgacccggttccactcccaaggctggtcgtactcatcggcggg

SEQ ID NO: 4071 - DNA, 487 bp, Homo sapien
attcggaacgaggaaatatgcttatatgagtggctgagaggactactaactagtagacagagttttaacatcatatttggtgaatgtccatattgtagtaagccaattaccttaaaaatgtctggaaggaaacactgaaataagaatacaacatttcggtgaagagctggaaacttaaaaaattatcaaaaggaattttggtatcatcttcagagaaaaaataaagcaagaaatactaacatcaaaaggacaggtatgatgatgcgataataataaacatctgcgtttgtctcttcactaagagtaaactgggaaattgtaggccaaagtccagttgaactttctaagtctgtgatccccgtgctgactgtggaagtgtatttataccaagatggagatcttgacttcttgaatatatctggactggtaaaatcttgatgaggctcataaaatgagtttgggaattgtgtatagctgattttttgtg

SEQ ID NO: 4072 - DNA, 370 bp, Homo sapien
attcggcacgatgaaggaggtatacacatattgatgttgttttgaatatctatggtattgaatcttttaaaatctggtcacaaattttgatgctgagggggattattcaagggactaggatgaactaaataagaactcagttgttctttgtcatactactattcctttcgtctcccagaatcctcagggcactgagggtaggtctgacaaataaggcctgctgtgcgaatatagcctttctgaaatgtaccaggatggtttctgcttagagacacttaggtccagcctgttcacactgcacctcaggtatcaattcatctattcaacagatatttattgtgttattactatgagtcaggctctgtttatt

SEQ ID NO: 4073 - DNA, 341 bp, Homo sapien
agcaggccaagtactatgagctggcccgcaagtagaggcagctgcacatgcagtattacccaggctggtcagcgcgggacaactacgggaagaagaagaggcggtcgagggaaaagcaccaagaatccaccacaggaggaaaaagaaatgcattcggtacttacccggagaaggccgctgccccagcccacgttccttccgatgacagtgctctaggctgccccgggtccccagctccccaggactcaccctcataccatctgctgccccgcttccccacagaactgcttactagccctgcggaccggcacctacatccccaggtctctccactgctctca

SEQ ID NO: 4074 - DNA, 362 bp, Homo sapien
acctggttacgctggtgctttcgcttggtttagacaaccaagacacttgagaattatgctgtcctcagaatgtctgatgaaaagaacagattcatttttttgacacaatgcccattagccatctttggcagtgtttctgatcaaaggttccccatgcctgctctaggaaagtaaacttttttcagaataaatcctcagatggattactgagtagtctttgcaccattcccatcagcctaatcagactgaatggtcacgctcagtgcaaaaagctgttttgctgttaggatgtgtcagtgtttcttggctttcctggaacagttcaggtgtttaaatttagtaattcaatcctgaccagtgta

SEQ ID NO: 4075 - DNA, 328 bp, Homo sapien
cctttatccaacaggcttcacatgctaagacttttctaaagtcaaacctgtaaaagcatatctgatatggaatatttaatattctgccccctcttagggctcaaccaatcagcaagggtaccatatccattttaactcagcaaagtacaggaatcctgaaaacattcagttattctacaaatatgtatcgagaacttcctttaagggcctggggagaggggacaaggaactgggcagatacttggagtaggtattttatagtttaacacatgctgaagtatcagatttcccttaaagcctggtagaggtaattaagtaaaaagctttg

SEQ ID NO: 4076 - DNA, 128 bp, Homo sapien
gggaatctttgctcagtgggcgacactcagcccgagcccaaaggaaaaaaaaagcaaaagcaccggaagaaaagtagcccacccgggtgtcctagtcactcccttcggagctccgactaagcccgatc

SEQ ID NO: 4077 - DNA, 410 bp, Homo sapien
  misc_feature (1)...(410): n = A,T,C or G
ccagaccccaaactcagctggagccaattgggaggcagcccgcagagccaatccccggacggcagggttgggtgagcagctctctgaccctgaaagtgaccagcgccctgagccgcgatggcatctcctgtgaagcctccaacccccacgggaacaagcgccatgtcttccacttcggcaccgtgagcccccagacctcccaggctggagtggccgtcatggcgttggcgttcagcgtgggcctcctgctcctcgtcgttgctgtcttctactgcgtgagacgcaaagggggcccctgctgccgccagcgggantgtaagggggctccgctccaggggatgcacggtntgatgcacgtcggggtcggagcaaccagagcagaccggccttctcatgggaggtgcctccgg

SEQ ID NO: 4078 - DNA, 379 bp, Homo sapien
acagcccgccgcgaacggctctggcccacggcacatcaatgactcaccctttggactctgcctggctctgctgagccccgctcactgcagtgcggcccgaggcgtccgagccaccagggttccccacctcgggccctcgccggacgcaggtctgttcacgcaagaaccgcacccgcagccactgccgtctgggccaggcaggcagcgggggtggcgggactggtgactcagaaggctcaggtgccctacccagcctcacctgcagcctcacccccctggcctggcgctggtctgtggacagtgcttgggcctgctgacccacggacacaaacgtctcacagcaggtgtgtgtacatacggggtctctctcacgcgccaa

SEQ ID NO: 4079 - DNA, 330 bp, Homo sapien
gttgtcacaatttactgtattttttactttttctgttacagttttgctaatttatcagaaggtccaaaagtctgacataactatttcattttgcattatttatttatgatgcttttttcattgtcttttatacatttgggattataaattatgtaaatgttaaaatgagcatctcaaagaagtctgttaaatcatgactgaaaaaaatcaatcagatgtatcttcaaaaagtggagtcccagttttatgaatcagagatataaaccagaaattctataactgatcatagaagaagaatccagtaattgaacaaatcctatttaatgacat

SEQ ID NO: 4080 - DNA, 120 bp, Homo sapien
attgacgggagggtcgctctgggttttacgagggaatctttgctcagtgggcgacactcagcccgagcccaaaggaaaaaaaaagcaaaagcaccggaagaaaagtagcccacccgggtg

SEQ ID NO: 4081 - DNA, 121 bp, Homo sapien
gcggccgcgatcgggcttagtcggagctccgaagggagtgactaggacacccgggtgggctacttttcttccggtgcttttgctttttttttcctttgggctcgggctgagtgtcgcccac

SEQ ID NO: 4082 - DNA, 350 bp, Homo sapien
  misc_feature (1)...(350): n = A,T,C or G
ccagaccccaaactcagctggagccaattggggggcagccccgcagagccaatccccggacggcagggttgggtgagcagctctctgaccctgaaagtgaccagcgccctgagccgcgatggcatctcctgtgaagcctccaacccccacgggaacaagcgccatgtcttccacttcggcaccgtgagcccccagacctcccaggctggagtggccgtcatggccgtggccgtcagcgtgggcctcctgctcctcgtcgttgctgtcttctactgcgtgagacgcaaangggggcccctgctgccgccagcgcgggatgagagggggctccgccgccaaaggggagccaa

SEQ ID NO: 4083 - DNA, 398 bp, Homo sapien
acagcccgccgcaacggtctggccacggacatcaatgactcaccctttgggactctgcctggctctgctgagccccgctcactgcagtgcggcccgagggtccgagccaccagggttccccacctcgggccctcgccggacgcaggctgttcacgcaagaaccgcacccgcagccactgccgtctgggccaggcaggcagcgggggtggcgggactggtgactcagaaggctcaggtgccctacccagcctcacctgcagcctcacccccctgggcctggcgctggtgctgtggacagtgcttgggccctgctgacccccagcggacacaagagcgtgctcagcagccaggtgtgtgtacatacggggtctctctccacgccgccaagccagccgggc

SEQ ID NO: 4084 - DNA, 285 bp, Homo sapien
tttttttaagaaaagagctctttattccacgtcgtccgatatttttacacaagtaaaataaaatgcatatctctatataccgcgatctgggtgggaggcggcgttctggaacaaacgctgccgccgaaccctgtaaacatgatggggtggagatgggggtggcgggcggcaggcgtccatcagggaggacctggcctggcctgccccacgggtcggccgcccggctggcttggcggcgtggagagagaccccgtatgtacacacacctggctgctgagcacgctc

SEQ ID NO: 4085 - DNA, 328 bp, Homo sapien
cctagctgggggaggggaggaagtatgcacttaggagtcagttgtctgatgaagagacatgcatagatctgggccctctgggtggggctgggcttcaagggcaggtggaaggcagcctccaggtgcctgagggagacccctgcaggcagacgcaggactcaggactgggctttcagccccactcttcactccattgcaagctaggcagaatacggcctcgatgggcaggaggaatgcctaggctggcagtgccacaggagtttggcggaccagagccatctgtccatgtgtccatggactcaccctgcttcctccatctgccagcatg

SEQ ID NO: 4086 - DNA, 366 bp, Homo sapien
  misc_feature (1)...(366): n = A,T,C or G
gccagggacaaggggatttattgagaaaggaacaaggccagggagaggttacacgaggggtcgagctgggggtgtgcggaagatggaggcatgctggcagatggaggaagcagggtgagtccatggacacatggacagatggctctggtccgccaaactcctgtgggcactgccagcctaggcattcctcctgcccatcgaggccgtattctgcctagcttgcaatggagtgaagagtggggctggaaagcccagtccntgagtcctgcgtctgcctgcaggggatctccctgcaggcaccgtggtaggggcttgcctttccaccttgccctttgaaagcccaggacccgcacccaagagtttggc

SEQ ID NO: 4087 - DNA, 238 bp, Homo sapien
ggatccccgacaaggccacggacatctgcatgcgctgcacgcagacgcgcttctctgccctcacgaggcgccaccactgccgcaagtgccgtgtcgtggtctgcgctgagtgctcgcgccacgcttcctgctcccgcgcctgtcccccaagcccgtgcgcgtctgcagcctctgctaccgcgaactggccgcccagcagcggcaggaggaggcggaggagcagggcgcggggtcccca

SEQ ID NO: 4088 - DNA, 375 bp, Homo sapien
cactggggaaccacatatttatttagatgaatccaaaccagacatggtgccgaagctccttgaggacacagtctcaccactggcgggcttcctggaggcactttgtcggagtaccatgccttcttaggtgtcctcaattaggaactttcacatccacccgacagtccacagatgcctcccctagggggttcaccgccttgcaggtatagatgcctccatcaaagggacccggcttgcggatctctagggagcagattcccaggtgagtcagggctctgtacttagggttgccttggatatccatcttgttcttcagccagaatgatctttgggccggggagaggcgcggacacagcagaagagctgggtattata

SEQ ID NO: 4089 - DNA, 175 bp, Homo sapien
aatagttattatttattaaaattacacaatattccagttacactttcaaagactttacatgtaccaaacatttaatttccatgatagcagtctcaggtagatgtgattatccttatgtacaaataatgcacatagtgtctgtgtgctggacaacgcacaggggtagtgagccttt

SEQ ID NO: 4090 - DNA, 180 bp, Homo sapien
gagatggaaaataggatttatggggggaaccgtacaagcagaggagaagcaggggtgcccaggctgtcacagccttgcagtgcatggtgggttccgtggccaacttgccaggggacaggcctgttgctggcactccccccacaattacagggtgggagtgaaggacctcgcggctgcgga

SEQ ID NO: 4091 - DNA, 340 bp, Homo sapien
cgatttgcactatatttagttgaagcctgttcactgtttaaaaccggagtatcttcaaaggcatggagacctggttccagtaaatgtcccaccagtggggtatagaaagcatgctcatgaccctgccgtgtcgtctgaggtacccgttcttatcctagtggttcaggaagagaaaacgcagtttgcactttcaagacagcttctctaaggctggcatgttatctccttgctttgctttttgccgttttaaaatgtgtaattgttccagcattccaatggtcttgtgcatagcaggggactgtaaccataaataaacatgtatttgtgtaattggtttgaa

SEQ ID NO: 4092 - DNA, 440 bp, Homo sapien
gtgggggaaaagattcaaactcagataggtgggtcaaagatgatagtgtctggaatgaaagctgaaccgcaaaactggttaacttcgatagaggacaacaacagagtggcagttagcccaaaagacattccccagctgtgagtccatcccataacacggactcttgaccacgacagtctcacacactctgacccacctcatttgtttcaatgcaggtaatggaagaaaattaattcagttcaaaataatccaaatgataatctggggcattagttagaattcaaaaaagttctagaatttcttctggtataagagctgtaagagttctagttgaatttctagtcctcagttgtttctagttttcaatcttttctaatttcactttgaggctgtgtacactggagcccaccaactaccaacagtgacttaaggcaggagtg

SEQ ID NO: 4093 - DNA, 325 bp, Homo sapien
tgtgggagcacaggaaaaggacaagggtgtctgtcagggatggcactgtgttaaaaagtgggcgtgcaagggccgcattcccgggcagccgctgcaacctcagcccctgggccgttacctccgcagcctctcccagcatccagctacccagactccaaggccccaggcgagacgagctctcggtacctggagctccacaggtcccagaatcggggtggatcagagttcaaattctggttctgctactgtctaattgcgtgctgcagggactcaatctcttcatctgggaaatgggagtaataacccttggcaggaatgttgcgat

SEQ ID NO: 4094 - DNA, 289 bp, Homo sapien
gggcatgagctcaacttccagcaaggccgagtccacctggggacccagcccaagtctcagcaaaactgaggttgatcaggacctcacctactatgaagctgtctgaagggaccatccagaccctcccttcttgctggggaggggatgagttctacccacctccccacactggcactcagccagctgcctccttccagagcaattaaaagtcttagcaacagtcctctggtcccacagctgagtttattatacttgttttcttttacaaaattaaaaacatctaaaacca

SEQ ID NO: 4095 - DNA, 369 bp, Homo sapien
cctgagtcaccctcctcttcccctaacagggcatcgtgaagcgggatgagctggtgttccggatggtccgtggccgccgggtgcccatccttatggtgacctcaggcgggtaccagaagcgcacacccgcatcattgctgactccatacttaatctgtttggcctggggtcattgggcctgagtcacccagcgtctccgcacagaactcagacacaccgctgcttccccctgcagtgccctgacccttgctgccctgcctgtcacgtggccctgcctatccgccccttagtgctttttgttttctaacctcatggggtggtggaggcagcttcagtgagcatggaggggcagggcatccctggctgggg

SEQ ID NO: 4096 - DNA, 254 bp, Homo sapien
ccgttgtgccagctgttggggctgaccggctgtagggaccaccagccgctgctactgtgggccgccccgggcagggtgggcagggcttttgtgggttatgaggacacagaagtccctgaggcccccagacctggctcagcaacctccttcctccccgggttgcccccactctaaagcctcctccctcccagcgtccactggctccaggctcctcacaacagcagctcatagacacgggggcgtcttccaggtgg

SEQ ID NO: 4097 - DNA, 429 bp, Homo sapien
ttcggaacgagggcaaaatcaccttgcctcctaatagaatgtcaaaaggataaacattaattggggaaaaaaaaaagttttcaccccaaagcctttcaaaaacagactcaaagagaaggaagttggtccctagccactgtgttcagcacagacccacgctgggcttagtattagcaaaaccggccaccaaaatcttcagtctgtggttccctgcacctgcagctctgagccctctgcctgtcctcccctcatactcccacccaccttagccaaattctcaggttcctggggggtggggaggaggtgggtattgactccaaatcctactggggagaatatcctaatttaaagcatctctttttccctttttaattttatttttctttttctgtcttcaaccttaacacatgaatgatcttaaagttttga

SEQ ID NO: 4098 - DNA, 472 bp, Homo sapien
acacttccggaacgaggcatttcaggcagcttcataggcatagacctccctccttccctcctaccccctcccccctctcccaactaatgccagaccggccactactttttaactgttttacatatttaaccttcaagaaagatttcctttgatccaagtgtattgcagcccacaaaaaagcttggaaacccagctagatggtctgtttttctagttcctacattggatttaagtcctacccatcgagactactgtcttcagagggcatcttcatgtgtgggcaccagggctgcggctggaaccacagtggacaccccacgctccaaggacaatcctctgcagaaaccagcagctggaaacaattcttaatgctgcaggaagtagttaggagaaaacgactgtgtaagtcagagctaaaactggagttcaaaaaccacagaaaatatttcaaggctgtctgtgaagtggggat

SEQ ID NO: 4099 - DNA, 440 bp, Homo sapien
aagtaatacttgtatatacctaaaagcctaaaagaagcttaaagtaactccacactctggtgtgtttccttctggtctgtttttgcctctgatagtattaataggattatataatgtatcctttcaaaaatatatagttttattttgttttcctcccaattaacattgtatcatgctttctcatatcatatgcttctttgaaacatgaacttagagtggcaaggtgttctctgagatggacattctgctgttttctctttacagtttcagaagaggagccccgccgaggcatgagggccgtgctccccccagaggaagggatggttttcctggtcctgaagactttggtccagaggagaattttgatgcttctgaggaagcggcccgaggacgagatctcagaggtcgaggtcggggtacccacgaggaggaaggagggt

SEQ ID NO: 4100 - DNA, 452 bp, Homo sapien
gctgtagatatcagcccagtggaaagcacaggtgtctcccactttgcaacctatgtggcagccatgagggccatcaacatcgcagatgagctgccccgctcccgtgcccgaaaactggcggatgaacagctcagttctgtcatccaggacatggccgtcggacactgctcactaacctggtagaggtagacgggcgcttcgtgtggagggtgaacttggatgccctgacccagcacctagacaagatcttggctttcccacagaggcaggagtcctacctcgggccaacactctttctccttggtggaaactcccagttcgtgcatcccagccaccaccctgagattatgcggctcttccctcgggcccagatgcagacggtgccgaacgctggccactggatccacgctgaccgctcacaggacttcatagctgccatccgaggcttcctg

SEQ ID NO: 4101 - DNA, 388 bp, Homo sapien
  misc_feature (1)...(388): n = A,T,C or G
cctgggcagcntccttcgaagtgtggccctcgtttggagtcaaccctccttcccgaccccctccccctagcccagccccagtcactgtcagggtcgggccagcccctgcactgcctcgcagagtggcctgggctaggtcactccacctctctgtgcctcagtttcccccccttgagtcccctagggcctggaagggtgggaggtatgtctagggggcagtgtctcttccagggggaattctcagctcttgggaacccccttgctcccaggggaggggaaacctttttcattcaacattgtagggggcaagctttggtgcgccccctgctgaggagcaccccaggagggaccagaggggatgctgtgtcgctgcctgggatcttggggt

SEQ ID NO: 4102 - DNA, 455 bp, Homo sapien
tttccctgatgactaatgatattgagcaccttctcatgtgcttattagccatttacttatttttgtgaattttatgttcaagtcttttgtccattctttaataatttttaatatttcatgatgaaaattccaaatatgcacaaccgaagagagtacgacagagccttacgtgactcttaccttgactctgtactgtagtttttcatcattccttcgtcacttgcaaattcaagtatttttcccagccattaattgagtttttgaagatgaggaattttttattttggtgaagtccagcttatgaactttttctcttacatgtagcactttctctgtccagaccgatgttatatcctgagaacctcttcacctaggaaacctaccacatatcagactcagcgtgtccataacttatcttacctcaaatccattcttcttccagtaatattacataa

SEQ ID NO: 4103 - DNA, 479 bp, Homo sapien
ggaattggggcccggcattccctcctcgtcccgggctggcccttgcccccaccctgcaactcctggttgagatgggctcaccaagagcgtcccagtcacaccagcgcggcctccgcgacaacaagcatctggctcgagtggcggacccccgttcacctagtgctggcatcctgcgcactcccatccaggtggagagctctccacagccaggcctaccagcaggggagcaactggagggtcttaaacatgcccaggactcagatccccgctctcctactcttggtattgcacggacacctatgaagaccagcagtggagaccccccaagcccactggtgaaacagctgagtgaagtatttgaaactgaagactctaaatcaaatcttcccccagagcctgttctgcccccagaggcacctttatcttctgaattggacttgcctctgggtacccagttatctgttgaggaacagatgcca

SEQ ID NO: 4104 - DNA, 353 bp, Homo sapien
gtggagatctggtttccggaagacggaatggggagaagggcaggttccccgaggcgcccagacacccaatcctcccggtgacatttacagcctggcctttggggtcgggtcaacgctaggctggcaggggaagggcggggcgtggagtgagccggcgctgcaggaaggggccaccaccagaggggccattttgcggtggaaatgtccttttccaactacccatgactcagcttctcccggcttggcaccatgccacagccaccacacctctgcggggaggggacacaagaggacctccataaacccacttctttgatttaccagagaataatctaggaaaagcatcacccgga

SEQ ID NO: 4105 - DNA, 430 bp, Homo sapien
ctgacataccacgtaccccggtgctgggctgctgcatcagcgagccctggagccctcgctgtccaggaagagtttatgaccagccgtgtgaattgggtggtacagagctctgctgttgactacttacacctcatgcttgtggccatgaagtggctgtttgaagagtttgccatagatgggcgcttctgcatcagcatccatgacgaggttcgctacctggtgcgggaggaggaccgctaccgcgctgccctggccttgcagatcaccaacctcttgaccagtaagattcctagttcatatggatgaattaaatattaccgttccatgttgatctgccactcagaaccagtttgggaaccatgatctatcctgattattgggtgcatgtttgcctacaaactgggtctgaatgacttgccccagtcagtcg

SEQ ID NO: 4106 - DNA, 452 bp, Homo sapien
tttcggcacgatgagagacagggtttcaccgtgttggctgggctggtctcgaactcctgaccgaagcgatgatccagccgcctcagcctcccaaagtgctgggattacaggtgtgagccctgcgcccggcggaagagtcttcatgttgttttgcggcaccctgcagatctgcccctcccctccgtccctcccccgtcccgtgacctctgatgtgcgcttgtctgctgactctggggctgggggctgtgttcttccctaggactgcgggctgcagctgagcggggaggagggacgccgttgctatcccctggcgggccacctactgtgtcgtcgttgccacctgcggcgcctccaacctgggcctcttccctcacccactgtgcacgtcactgagctctgagcaggggaaaacccgtccctgggccggggtgggtgtgggtgtggagggaggg

SEQ ID NO: 4107 - DNA, 464 bp, Homo sapien
attcggaacgaggagagagactcatatattatgtaaataatggaacaaacaaacagattttttaaaaatcataattaagatgttgaaatgtagaaaagatgaacaaagtgtaagaaaaaatagtacccacagaaatatctatataaaaaattaaatggacatcttatacctaaagaatacagtattgggaataactcattgcatgggtttgagggcagacaagagccaacagaaaggagtaataaacttgatgaaaaaatggaaaatatccagaataaagtacagtgagaaaatacaaaaaaaatttagagcattagagataagagatagagcctgtaatccaggctgaagtgcagtggtgtgatatagctcactgcaacctcgacctgggctcaagcgatcctcttgagtagctagggctacaggcacacaccatgctcaactaatttgtttttgtagagatg

SEQ ID NO: 4108 - DNA, 434 bp, Homo sapien
tgaagtgggagcggcgtggtggctcaagcaatccacccacctcagcctcccagagtgctgggactacaggcatgaccaccacgcccagcccaattctaggagttttgacaaatgcatgtagttgtcatacatatcacctcaggcaagatatagaatattcccatcccccttgtgctatctgtagtcagtctactcctcccactgccaaccctggcaattctaccatccctggagttttgccttttccacaatgtcatataagtggaatcatctgtatgtagaattttgtatctttttctttcatgttacacggtggtcttgagattcagccatgctgttgttgtgtgtatcacagtttgttccttttcaatgctgagttggattgcgttgtatggttgtgacacagtttgtttatccattcctaagttgaggga

SEQ ID NO: 4109 - DNA, 437 bp, Homo sapien
aggagctgcttctctcttctcccagttctacctccccagaagccttcctccccaggtggggctgatggagcaagggtccagactaggagccttccaccccagctgtgtctggcgcccctagatctctgcaagggaggtgttacagctggttctgagccgcttgccttgtgatggtaagacaccaacctttacattcttccctgaggttgtggctgacagagcctgcttggccccacgtgttagtccagcgagctcctatatcaaaatgccgtacgcgggtggcttacaaacaacagaaacgtattgctcacagtcctggggggctgggacgtccaagatcaagaggccagcagattcggactccgctgagggctgtttcccgatccatagatggtgccttctcgctgtatcctcaatggtagaagcacaaacaagca

SEQ ID NO: 4110 - DNA, 455 bp, Homo sapien
tgttccaacctggggaggcctggaaagagctgcaggtgaaagctcctggagctgcatagaatattgactccctcctgcggggccgccagtccgccgtttccacgtccagctcagcaaccctaagtttggggcccacctggcgagccccactaaaacacctaaaatcatcagggacccagatgaactggaccggagcttcacgagtcagatgttgtcatcacagccaccccctcacggcgacctgggcgcccgcagaaccccaatgctaaggccgctgggtccaggaagatccatttcaactggctgcccccttctggcaagccaatggggtacagggtaaagtactggattcagggtgactccgaatccgaagcccacctgctcgacagcaaggtgccctcagtggagctcaccaacctgtacccgtattgcgactatgagatgaaggtgtgcgc

SEQ ID NO: 4111 - DNA, 454 bp, Homo sapien
tttggggataatttattatgcagcaagagataatacacaggacttctcagagcacttaatatgttaatataaatctccaagaaaaaagatatacaatgaaacattcctcttagttatctggccaaggagactttctttttttgagaatattcttcagaaagctgatctaatgatatggctctggtcctacaattccatgtaacttctaaccttgattttgtctcatgagcaaatcatttatccttccagaacctcaacttttcccttttacaaagtagaaataaaccatctgcctttacataaatcattaatacagccctggatgggcagattctgagctatttttggctggggggtgggaaatagcctgtggaggtcctaaaaagatctacggggctcgagatggttctctgcaaggtagcaggtgggctcaaggccaatttcagtctttgtt

SEQ ID NO: 4112 - DNA, 146 bp, Homo sapien
tggcttaccagtccaaggctgctggaacaagtgatgcctctacaccttggattggcctgtgtgtgtgtttgtacatagaatatctatttttatacagttttcactttttgaaaatgccagaagtatgatgcatcttacagattatt

SEQ ID NO: 4113 - DNA, 439 bp, Homo sapien
tcggtgaggaaaagtgtccttgcaacaacaaatgcatgctgaaaaaataatgaatgcattgcagcacattgttagcagtcgttattatgaagaaaatggtttgcctctgtctttcgcgaatagaacgtacaacacgctctggcccagccacactcagtatcatcccatagcggaaaagaaggtgaaaaattctgaaaaaatatttgagtgaggaatgcaaactttacagagggtcttttggttggacgtcagtggcacatccacatgcaacacagggaagttggatgtgtacccagacatgagaaatacaaggaaacaatgccacaggggactcctcagtttggtgaggtggggcaagaattcccctgctcctaacggcgcaaaccctatattaaaagtagacaagccaagtgaaccttttcactcaaatccgatctga

SEQ ID NO: 4114 - DNA, 436 bp, Homo sapien
gaaactgtccgctcttcacttgaaatcatgtccctatttctaccccggccagaacatggacagaggccagaagccttccggacaggcgctgctgcccgcgagtggcaggccagctcacactctgctgcacaacagctcggccgcccctccacttgtgaagctgtggtgggcagagccagaaacaagcagccttccaactagagactcgggggtgtctgaagggggccccctttccctgcccgctggggagcgcgtctcagtgaaatcggctttctcctcagactctgtccctggtaaggagtgacaaggaagctcacagctgggcgagtgcattttgaatagttttttgtaagtagtgcttttcctccttcctgacaaatcgagcgctttggcctcttctgtgcagcatccacccctgcggatccctctggggagg

SEQ ID NO: 4115 - DNA, 416 bp, Homo sapien
ggtggcaccaagggttacagatctttttgtcagccagcaacttacacgatgtgtccgttttgttattcactcatgaaatacaatttaaaatatttaaaatattttgtattccaaaaatataatacaaagaagtacctctgagaacattgaaaaaaatgtataatttgaaaaatgtaacttataagggcagctgtcttcctgcaagagttctgttgccaaggaatttcttaatgtcgctcattctgtccagggggtttggggcgattgggctttgaaaaaatattcttaaaagtttgtttagcagaaaataatcacttttacattttgtgcaaaacattttacattttcagataatttaaatgagcactacatactgtcagtgtgaatgtagggccttgaaagcattttgctttttt

SEQ ID NO: 4116 - DNA, 279 bp, Homo sapien
agtgggagctgcgggatgatatacgagaccaggtttgggtgggctggcgaagggtggcactgattctggggtagggtggcagatgtcaagtgctgactcctccccatccttctccaggtgaaggaaatgtccctgatccgaaacaccattatggagtgtcaggtgtgcggtgagtgggagagcaggggaggctccacatgaccgtgccacgttccccacccaatggctttggctttcccttctggtggcttaaatagtgaccaccgggtagctctgact

SEQ ID NO: 4117 - DNA, 436 bp, Homo sapien
gtgatgcagaccataccctttgtgctctcagccagccttcatgggggcgacctggtggtgtcctaccccttcgacttctccaagcacccccaggaggagaagatgttttctcccacgcccgacgagaagatgttcaagctgctgtccagagcctacgctgacgtccaccccatgatgatggacaggtcggagaataggtgtggaggcaatttcctgaagagggggagcatcatcaacggggcggactggtacagcttcacgggaggcatgtccgacttcaactacctgcacaccaactgctttgagatcacggtagagctgggctgtgtgaagttccccccgaggaggccctgtacacactctggcagcacaacaaggagtcactcctgaatttcgtggagacggtgcaccggggcatcaaggtgtggtgacagat

SEQ ID NO: 4118 - DNA, 483 bp, Homo sapien
aattcttccattagaaatttgtagtgttgtgtggccagcacagtatttttcagatttgaatttcagtacctctgtgtagcctcagtactctcaacaccagtcactctttattgtcttaaaatattccatactttttgttgacccaaaattgttgaaaatattttgctcagttttcacaatgaactaattgaaaagtgtagttactgtgttgtaaacatttgtgtagttctgttaatacactgatttgaattttatttatctcaacttcctttagcgtctgcctccaaattttgtctttgctgtatacccactgagatcaattccctagacccctctggctcttagtgtactataatttgggctttataaaatatattgtcttaatttaaatagaatgtgagccctctttttttttttttaagccaaataactacacaaagtaaattataaaagatttagatagtttgtctacagtgactagac

SEQ ID NO: 4119 - DNA, 438 bp, Homo sapien
  misc_feature (1)...(438): n = A,T,C or G
aaaaattaaatttttattttgagatcactgtttgtgttcagttgtaagaaacaagagagattctgtgtaccctttacccattcctccatgttgcaaaactagcacaatatcaccgccacggtagacgcagtgaggccataagacatttccgtcagcaaaagggtcacttcttgtgcccctttagaaccacacccacccctgccttccaactattaatgctggcaggacttagccagaccgcaaggcgcctactccgaacaaggaagagggtcaggcgctgggagggcgactgcaagcggacaggcagcacctgcgaccacggtacttggggacaccacaaaagtccgcagagcaggcaccgcggcacttccgcgagcgccgcagcctggccccntttcgccgtcgccgaccaattgccgcccgaagaccgagccgctt

SEQ ID NO: 4120 - DNA, 479 bp, Homo sapien
gaccaccaggagaagtgcctgtcccagctctacgaccacatgccagaggggctgacacccttggccacactgaagaatgatcagcagcgccgacagctggggaagtccacttgcgcagaccatggtcatcacgaggagtcggtgcgggaggccagcctctgcaagaagctgcggacgattgaggtgctacagaaggtgctgtgtgccgcacaggaacgctcccggctcacgtacgcccagcaccaggaggaggatgacctgctgaacctgatcgacgcccccagtgttgttgctaaaactgagcaagaggttgacattatattgccccagttctccaagctgacagtcacggacttcttccagaagctgggcccttatctgtgttttcggctaacaagcggtggacgcctcctcgaagcatccgcttcactgcagaagaaggggacttggggttcccttgagagggaacgccccgttca

SEQ ID NO: 4121 - DNA, 461 bp, Homo sapien
cttttgaaggcaacagtgcatcccgacagcagcaacctgatccccaagctttttcgacctgcagcgttcctgcctttcatggcgcccacggtatttttgtcaatgacgccactgaaagggatcaagtccgtgattttacctcaggttttcctctgtgcctacatggcagcgttcaacagcatcaatggaaacagaagttacacttgtaagccactagaaagatcattactaatggcgggacggttgcttcttcaactttcttaggagtaatcctcagtttgtccagatgaagtatggcctgactggccttggattaaaagactcttacctgtgatcttcctcgtgcaagccagtggaatgaatgtctacatgtcccgaagtcttgaatccattaaggggattgcggtcatggacaaggaaggcaatgtcctgggtcattccagaattgctgggacaaaggc

SEQ ID NO: 4122 - DNA, 461 bp, Homo sapien
attcggaacgagggggtggtcggtagccttgcgcccgcaggagagatatggcctgaagcctgctgcacgtgcgtgcacacgcgtgtggggccacctctgcacatcctgaggtgaccgttttgggggggtcgtgatggtcagtgcacgtgtgcggcaggctggtcagggtcatcgcctgccaggagcctgacctgagcagggaggtctggtgacgttcccccaaggtggctcaccacagcaccgggaatggaccaggtcgtccctgcccctcagtaagcctggggactggcagaccgtctcttttctggggacacgtatccagccacacatgggctgaccccctcccagtctctgcacccgacacagtttgatcccttctcaggccaatcctgaggctcagggctggcacactgtctctatcccaaggcaagcacaggtgggcacactgccttgtccttggt

SEQ ID NO: 4123 - DNA, 265 bp, Homo sapien
tgatgctcacaccaagcctcgccctgcactagctgccgccacaactattatcacctgccctccgtcagcatcagcttccaccctggaccagtccaaggaccctgggcctccccggccacacaggcctgaagctacccccagcatggcctctctgggcccagaggaggaagagctggcgagagtggcagagggcaccagcttcccgcctcaggagccacggcacagtccgcaggtgaagatggcccccacaagttccccggcagag

SEQ ID NO: 4124 - DNA, 393 bp, Homo sapien
gtgtaggacagagacctggcatgtgctttgatcgttaatgaggtggtcacatgagaagtgatacctgttactactgtattgtttttagagtcctgaagtctggaggctagacttcctgaaagcaagtcaagaatatagagcaccttgcaggagttcaagatggcctttggaaccaattatgtatttgtttcctcctacagtggagcagcattcaaatcaaatatttacatattgcttatcactttttctccattttaataatggaatgaactaaaataaacaagaacaagagaatagtataattatatcagtaacaagaagactcaaaaaagaaacaggagtacctatccctatctgaattttcaagttccccattggatgaccagactggca

SEQ ID NO: 4125 - DNA, 443 bp, Homo sapien
gcaaacctcaaaaaaacaaaaaaaaacaaaaaaaagagtaaaccaatttggttactcattttaccaatttggttttgattttgcaagtggttacaactcatgagaggattcttatttctgatcaatatattgtgtttttggaaaggacttctgggaaataattatgatgaagccctcgagcaattgcaacaaaaccaaaaattgaaaagtgggacctaataatacttttttaaaatttattttttagagacaggatctcactctgttacccaggctggagtgcagtggcctgatcatagctcactgcagcctcaatctcccaggctcaagagattcttctacctcagcctcctgaatagctgggactacaggtgcatgcccccatgcccagctaatttttgtattttttgtagagaccaggttttgtcatgttgcccaagctg

SEQ ID NO: 4126 - DNA, 445 bp, Homo sapien
atggctcactgcagcctccacacctcctgggctcaagcaatcctcccacctcagcctcctgcatagctgggactacaagtgaatttcctaatattccgggagtcaaaaccaaggctcactgttttcacaatacacacagttctatgtttataaataacaggtttcaaaagaaactcaggacagtatttaaaacaagttcttaaactattaattgaacaatggcatttttaaatatgtaaacacagcggaattcgtgtatacactaacagaagctttaacaaaacatgtagcgtggtgggacactctgccacagcttatgctgattggtatcaagccttgtctttggtttctgaggcctcctgagcccttctgtactgggagaccgcactccagagtctgcagaggagaccacccctgggaaacaaacacagctgtcttcagagtc

SEQ ID NO: 4127 - DNA, 443 bp, Homo sapien
cagctctatggctatcggagggcagctggaggggtccccagcatgggcagagaaataaggtctgaagagccagaggagtcagtacctttcagctgtgactggcggaaggtggccggcgccatctcacccatcaaggaccagaaaaactgcaactgctgctgggccatggcagcggcaggcaacatagagaccctgtggcgcatcagtttctgggattttgtggacgtctccgtgcaggaactgctggactgtggccgctgtggggatggctgccacggtggcttcgtctgggacgcgttcataactgtcctcaacaacagcggcctggccagtgaaaaggactacccgttccagggcaaagtcagagcccacaggtgccaccccaagaagtaccagaaggtggcctggatccaggacttcatcatgctgcagaacaacgagca

SEQ ID NO: 4128 - DNA, 440 bp, Homo sapien
ctttgtatagcagaggatctcatttgactttgttttgatgagggtgatgccctctcttatgtggtacaataccattaaccaaaggtaggtgtccatgcagattttattggcagctgttttattgccattcaactagggaaatgaagaaatcacgcagccttttggttaaatggcagtcaaaattttcctcagtgtatttagtgtgttcagtgatgatatcactggttcccaactagatgcttgttggccacgggaagggaaatgacttgttctaattctaggttcacagaggtatgagaagcctgaactgaagaccattttcaagagggacggtatttatgaatcagggttaggctccatatttaaagatagagccagttttttttttaaatagaacccaaattgtgtaaaaatgttaattgggtttttaaacattgttt

SEQ ID NO: 4129 - DNA, 410 bp, Homo sapien
gtcctgggcacccctgcaggtgggagtggtccttgtcctcctggtatccagcagacacccccctctccccaccagccccattctcaggtcctttcctctttgttaccaacaccaagaatctgtccatggttcttggcttatcttttatctcttttcactcctagagaggaattgcaattgactcagaatgacacattttggcaccacgtgtgtagaaagcccccactgttagatgatagcctcgtgaaattcatgtttctgtattctcctatttcttttcaaaaactaattttttttttagtgtaataaatcctaagagggaactgatttaagaaacaaggccgccaaacaaaggcagcagttccgactccagcagctgggaaaggaaggaaagtgaccccactttcact

SEQ ID NO: 4130 - DNA, 406 bp, Homo sapien
tttccctgatgactaatgatattgagcaccttctcatgtgcttattagccatttacttatttttgtgaattttatgttcaagtcttttgtccattctttaataatttttaatatttcatgatgaaaattccaaatatgcacaaccgaagagagtacgacagagccttacgtgactcttaccttgactctgtactgtagtttttcatcattccttcgtcacttgcaaattcaagtatttttcccagccattaattgagtttttgaagatgaggaattttttattttggtgaagtccagcttatgaactttttctcttacatgtagcactttctctgtccagaccgatgttatatcctgagaacctcttcacctaggaaacctaccacatatcagactcagcgtgtcc

SEQ ID NO: 4131 - DNA, 446 bp, Homo sapien
caggaggaataccacaagcaaaggcagatgaggtggcaaagtccacatccaaccccagaaagtcttcttccccacccatgtctgcatggggccccaggaggctgtccccttcactggcccacccagaacccccatccaggaggaagatttctggagcacaccttttagccatgcccacccgcttccgggcagttctttttcagcaaacccctgcggatcctcaacatcctcctgctgctggagggcgctgtcattgtctatcagctgtactccctaatgtcctctgaaaagtggcaccagaccatctcgctggccctcatcctcttcagcaactactatgccttcttcaagctgctccgggaccgcttggtattgggcaaggctactcatactctgctagcccccagagagacctggaccaccgtttctcctgagccctggggtca

SEQ ID NO: 4132 - DNA, 499 bp, Homo sapien
attcggcacaggtaagaccaattaagacattaccaaagtatttgtgtatttcctgaaaacaaggatatattctatgtcacagccacagtacaacccagcaaaatcaagaaattaataaatacaataataccatgtaacttacaatctcattcagctttcatcaaccattccagttgggtggaggctgatcatctctctgccattttcataagttatgtcatagattttcacatctgtcacatcattcatttctccaaagagccttagttccttttagtaaggaatggtatttagaagccaagtttggatgctaggtgtgtttattgctactgagatgtcattatttccagtctatttcagtgactagacctagcaaataaatgaatattgatatacacacccattcatctatatttctatgaaatatatttaaatatgtgtgcatatagatgtgtatatgtatatatagatctatgtatatgtgagcatatatatgtgc

SEQ ID NO: 4133 - DNA, 452 bp, Homo sapien
actcccgatattcccaggccctcatggcccagtctacgagggctaccggccacactttaagctgcactcagatgatgtggcagggatccaggctctctatggcaagaagagtccagtgataagggatgaggaagaagaagagacagagctgcccactgtgcccccagtgcccacagaacccagtcccatgccagacccttgcagtagtgaactggatgccatgatgctggggcccgtggaagacctatgctttcaagggggactatgtgtggactgtatcagattcaggaccgggccccttgttccgagtgtctgccctttgggaggggctcccggaaacctggatgctgctgtctactcgcctcgaacacaatggattcacttctttaagggagacaaggtgtggcgctacattaatttcaagatgtctcctggcttccccaagaagctga

SEQ ID NO: 4134 - DNA, 486 bp, Homo sapien
ggtaatatttccccagaggtagattttagtgggacgagggtggtgggatgatgtcatatcatacatgggattgcatcagaagggttctgtaaagcctgaactcccttttaaaagtgcctagtgatagaggcgttgtttgtcatctattataattggaatgtcattgtagttcagtgaattttgatgtaaataaaatatcttttaaaaatgttaaagtaccaggataaacaaacaataagaaacaaccgttaagatgacagattttcctcaacatgcaggtttccttcttatatacctcaagtatccaacatctagccatgcaaattgattacctgaagcatagtactggaaagtagaatagcatgaaaaacttaattttgtggacattacctttttttgtaatcagctactgtatgttttattttagatcttttgttttgggtgggttttctgctctggaggtatatgcactaacaaaacattttc

SEQ ID NO: 4135 - DNA, 478 bp, Homo sapien
catggtgacttggcaccccgtgcatcaccaggcatctttgccgaggcctgcaacaacgccacctatgtggaggtctggaacgatttcatgaaccgctccggggaggactaggagcgtgttcttcgctacctggaggatgagggcaggagcaaggcgaggaggaggggccctggctgtggggaggaccggagagtagaggaccccgcctatacaccccgcgagtgcttccagcgcatcagccggcgtctgcgagccgtcctcaagcgcagcgcatccccatggaaacgctggagacctgggaggagcggctgcttcggttcttctccgtgtccccccaggccgtgtacacagcaatattagacaacagcttcgagaggcttctgctgcacgctgtctgccagtacatggacctcatctcggccagtgctgacctggaggggaagcggcagatgaaggtcagtaatcggcacctggattt

SEQ ID NO: 4136 - DNA, 436 bp, Homo sapien
gagataaggtctcactctgtcatccaggcttcagtgcggcagtgtgatcatagttctgtaacttaaactcctggcctcaagcaatcctcctgcctcagcctcccaaagcgctggtattacagatgtgagccaccaagcccagcctaaacagcatttctctattaaaccttttcagaagactgcatgattagccaaaagtgacttttttttttttttgagatggagtctccctctgttgcccaggctggagtgtagtggcgtgatttcggctcactgcaatctcagcctcttaggttcaagcaattctcctgcctcagcctcccgagtagctgggactacaggtgcccaccaccacacccggctaatttttgtatttttagtagagacagggtttcaccatattggccaggctagtctcaaactcctgacattgtga

SEQ ID NO: 4137 - DNA, 509 bp, Homo sapien
tcggcacagggagatttggaaggcacccacctccagactgcttcccgtccaagttaccaggacagctcaaaaacatgctgacagaaaactcccatggctctaggaagaagtgacactaagccaacacctttctttatgtgggagcagaatcagctgatgaaggggtgggcagcagtgtggggcaggcaccccactggctgcagctagcccaccataggcacagcacatcccaccactctccttccagtcctgaccaggccccagccggcaacttctaccgagagccatggtcaacaccaaactggacagtagacatcatgatccctccagttagctctaattacagaccccaccagtacagcttgacagctcccggcaccatcccttccttcatctgacttattgaacttttacaaactaacagtcaccagcaccaaagaattaagtcaactaacctgccttgaattttagaccagcaatccatatggctttatctggtataaatcttc

SEQ ID NO: 4138 - DNA, 406 bp, Homo sapien
attgatggcaatgagcagctctcagtggtccggtacagcccagatgggttgtacctggccattggttcccatgacaacgtgatctacatctatagtgtttccagtgatggtgccaaatccagccgctttggccgctgtatgggtcactccagcttcatcactcatcttgactggtccaaggatgggaatttcatcatgtccaattctggggactatgagattctttactgggacgtggctggaggctgcaagcagctgaagaatcgctatgagagccgagaccgggaatgggctacctacacctgtgtgctgggctttcacgtctacggcgtctggccggacgcgtccgatgggaccgacatcaactccctgtgccgctcccacaacgagcgcgtggtggcggtgg

SEQ ID NO: 4139 - DNA, 456 bp, Homo sapien
attcggcacaggaaagagggggaaaagattcaaactcagataggtgggtcaaagatgattccatctggaatgaaagctgaaccgcaaaactggttaacttcgatagaggacaacaacagagtggcagttagcccaaaagacattccccagctgtgagtccatcccataacacggactcttgaccacgacagtctcacacactctgacccacctcatttgtttcaatgcaggtaatggaagaaaattaattcagttcaaaataatccaaatgataatctggggcattagttagaattcaaaaaagttctagaatttcttctggtataagagctgtaagagttctagttgaatttctagtcctcagttgtttctagttttcaatcttttctaatttcactttgaggctgtgtacaccggagcccaccaactaccaacagtgacttaaggcaggagtgc

SEQ ID NO: 4140 - DNA, 472 bp, Homo sapien
cttttttcttaacctacaataggcttaaattctcacattgtcagatgagtcttaacactttagtatttgctaaatttagcatattaaaaatttttaaaaggagtataagggccctaaattggaaaaaaaaactctactacgatcataactgtgggatttcatttccagttcattctgtcagaatcaatctaaagtccatgtaatgtaaacagttcgaaaaaagtcttaaaaatgaattgttgactttaaacacacaatcttcggagccgctcacaacgtccgtagaagcagactcctccccgctcctggggaaaaccctgcctaatatttataacgttatgacatactgtaatactcacaaggtggttgtagaagtataaacacgactggagttatctgattggctgctggtgatgtaacaccatgtcaatacttcccagtgaacgcacgtgttcgaccttttatttaaatt

SEQ ID NO: 4141 - DNA, 260 bp, Homo sapien
tgaaaggcagaggggctccaggtcctgtttccagctcccctcactgcacatggtgaagctcgctccctccctccctccgttcccgcttttcccagagctaatacacaggtgctattattcagaaaaaaactggtcagctctagccaacagtgaggtttcttttcttctgccgtaactattgtgtagcctcttatgctgaaatcggcttctgctggcttctccggctttcagagccctgaaacaaagagaaacaggatctg

SEQ ID NO: 4142 - DNA, 124 bp, Homo sapien
tcctccacccctcacatacatacataatttcttggcctagccaaacaagtccaggccactgaatggcaccagaggggtctgtggtcagccaccccaccttgagggcagcacaggcaccacgggg

SEQ ID NO: 4143 - DNA, 445 bp, Homo sapien
  misc_feature (1)...(445): n = A,T,C or G
ttttagcacttggtcagatcttttctatcactttgcaaaggcgccaagacctgcactcaggcctggtatagagtgtctctacaggcgttcattttaagttctgtggcgaaattctataaaaataggcaatacttgtgtttttatatccggaagttgaaacaaagagcagcgttctttttgtggtacaaaaacaacaaaaaatgagcggatgcagtctgcaggtcctgtccctgtccttaccggggaactggagctaggatttaggggcctctcgggagtctagagcgtgaccgcgggcccgtgctcctccacgccgcctgcgagcgccacggtgtgacgggggtcggcccgcagantgctgagcagccgctggaggcgccgtccaggccaggtccgctgcagccgctgcgccaggcccgcgccattgacccgggagaggctgcct

SEQ ID NO: 4144 - DNA, 508 bp, Homo sapien
gattcggacaccaagcatttttttttttttttttcaatagcttgacaaatccctttatcgtgaggagaaatgatctgagctcatccatccagtgggggtagcagcagaaggtttgcccgacttgctgcaaccacatttatcagtcaggggattcctgtgtacctcttttctgatataacgccaaccccctttgtgcccttcacagtatcacatttgaaactttgtgctggaatcatgataactgcatctcacaatccaaagcaggataatggttataaggtctattgggataatggagctcagatcatttctcctcacgataaagggatttctcaagctattgaagaaaatctagaaccgtggcctcaagcttgggacgattctttaattgatagcagtccacttctccacaatccgagtgcttccatcaataatgactactttgaagaccttaaaaagtactgtttccacaggagcgtgaacagggagacaaaggtgaagtttgtgc

SEQ ID NO: 4145 - DNA, 504 bp, Homo sapien
ctgtctttcacaagcgccttttatatcctgtcaatcatctgtgtcgggctgctctatacatattacaccaaaccagatggctgcacagaaaacaagttcttcatcagtattaacctgatcctttgcgttgtggcttctattatatcgatccacccaaaaattcaggaacaccagcctcgctccggcctcttgcagtcctccctcatcaccctctacactatgtacctcacctggtcagccatgtccaatgaacctgatcgttcctgcaatcccaacctgatgagctttattacacgcataactgcaccaaccctggctcctggaaattcaactgctgtggtccctacccctactccaccatcaaagagtgggtctttactggattcagataattttattggactgtttgtctttgttctctgcctcttgtattctagcatccgcacttccactaatagccaagtagacaagctgaccctgtcaaggagtgacagcgtcatcgtc

SEQ ID NO: 4146 - DNA, 338 bp, Homo sapien
ccggagagtaggactggccgattgttgtggatccaggaggagaagcgcaggagccggcggtacgcgtggttggggtcggtctgcgcggctgaggcgagagcgagttctcctccatggcacactgcagcaggaacatgggccggtcctccaggtaggtggtctgctgcaccatctccgcattgaggaccaggtcaggggcggtttctgagcaggcaactccggccccgtactgcactccgccctggggcaggccacgtcctccccgtcgtggcggcagtgcgccagggacagctccgttcccgagcacttcactccactcatgaccactttgttgctgt

SEQ ID NO: 4147 - DNA, 340 bp, Homo sapien
gttgaggggacaagaagaaggcagaatgtccagatggaggataagaccaaagagccagcacctacaggacttgggctgcttcaggctgaacgctgggagaccacttcctgtgctgacacacagagctcccatctccatgaagaccgcacagcgcgtgtaagccagcccagctgacctaaagcgacatgagactactagaaagaaacgacacccttccccaagcccccacagctactccaacccaaacaacaaccaagccagtttaatggtaggaatttgtattttttgcctttgttcagaatacatgacattggtaaatatgccacatgcctttggtgga

SEQ ID NO: 4148 - DNA, 399 bp, Homo sapien
atcagaattataaaacaaaaatcaagcatgttgtgaagttgaaagatgaaaatagccaactcaaatcggaagtatcaaaactccgctgtcagcttgctaaaaaaaaagcaaagtgagacaaaacttcaagaggaattgaataaagttctaggtatcaaacactttgatccttcaaaggcttttcatcatgaaagtaaagaaaattttgccctgaagaccccattaaaagaaggcaatacaaactgttaccgagctcctatggagtgtcaagaatcatggaagtaaacatctgagaaacctgttgaagattatttcattcgtcttgttgttattgatgttgctgttattatatttgacatgggtattttataatgttgtatttaattttaactgccaatc

SEQ ID NO: 4149 - DNA, 533 bp, Homo sapien
acctctttgcatgatctgtcaaagtgagatatttttacctgcctaaaatatgatgtttaaaagcatactctatgtgatttatttatttctacctttctgagtctcttggactaagaagatgttttgaaatgtaccatcaaatgttaacagagtttgatatgggctttctctttggtttctcatcacatttgtaaatgtcttttcaaaaggatttagtttttgtaaaaagcttcattctcactctgctttgcatcccccaaacttcttgttcaaaacgaggggagtttaggagactttaatcccggtttcagaagctgcagctggtctgtttccaggtcagaaaccattgttcagaagacctccctgtgagagagttgctcctcagggtccctcaggcccaaagaacactcgaaaagagcacttcacacagacaagtggctaagtgtccattatttaccttgaacaatcaaggcaactagtggagagaactgattgtgagctctgctctgggtcagagagacctggatttgagt

SEQ ID NO: 4150 - DNA, 208 bp, Homo sapien
tacgacttcaaggctgacatctggtccctggggatcacagccatcgagctggccaagggggagcctccaaactctgacctccaccccatgcgcgtcctgttcctgattcccaagaacagcccacccacactggagggccagcacagcaagcccttcaaggagttcgtggaggcctgcctcaacaaagacccccgattccggcccacgg

SEQ ID NO: 4151 - DNA, 234 bp, Homo sapien
gtgtgcggccaccagcagaggggtgactcaacgcttggaccttcctgaccttcccctctcagatattctaaagggaaggactgagaccctgaagccagacccccacctccgcaagagtccctcactagagtcactgagcagacccccatctctgggctttggggacacaagactgctgagtgcttccacccgggcatggaaaccacaaagcaaactcagtgtggaaagaaaaga

SEQ ID NO: 4152 - DNA, 187 bp, Homo sapien
actgagtttgctttgtggtttccatgcccgggtggaagcactcagcagtcttgtgtccccaaagcccagagatgggggtctgctcagtgactctagtgagggactcttgcggaggtgggggtctggcttcagggtctcagtccttccctttagaatatctgagaggggaaggtcaggaaggtccaag

SEQ ID NO: 4153 - DNA, 273 bp, Homo sapien
  misc_feature (1)...(273): n = A,T,C or G
accgaggacccgccccaagcagaccgcccctgggtccgtctgcgccggacgtgcggcggcgggacancggaccagaccagccacatccaggggtcctcatttctccggctctggctcttgtttggggttctctcaccctctttctctttccttccctcccccattctccagatctccctctgtctccttttctctgtctttcttggcccctgtctctctccatgttgggggtcctaactcccccaccccatatctacgtgtcctccgggcatt

SEQ ID NO: 4154 - DNA, 424 bp, Homo sapien
cctcccaggcctcaagggcagtgtcttggagtgggaggatggccagcagacaagccaccagcttgtcagcatgggaagggcaagggggaaatgggttggcctacctcatttgactccagccaatggagacaattcctgacccctgctttgatggtgttgaccccacaggaatcaaggatcttgatgccaagtgtggcatctctacctgaagagctgcttctgttagacccaggggccccggcgtcgtgttttaagggggcagggcgtctgcaacacggagtggcacacggtgaagtgctggcatggctctacctcccaacccctcccaaccccatcccaaagcctacagtcctctgctccttctacctccactgtatcctgcatcccagaccctacagattgtgtgattgcttcatctgtatca

SEQ ID NO: 4155 - DNA, 403 bp, Homo sapien
ggcttgtaccagttggtgagcgtcatcatgacgtgcagtgaggccagcaccaggcagacgcccccgggccacctccctgtaggtgacgccgtcctgctcgttgtcaaaggcccggccctcacaggctgccacctgctgctgctgctgtgtggcgtctagcataggtgggcactcctcggtctgcatcaggctgttcacctgccggtggtctgaggagcgcagactgatgaagagggtgcacaggaggaagatgatgaggcccacaatgctcggggcatccaccactgggtctcatagccctcggggcgtgcctacaactgtctcgttgcccagctgggtagggctgctcctctacctgtggaccctggtagccccactcctcctgcagcaacgcgacttcagc

SEQ ID NO: 4156 - DNA, 241 bp, Homo sapien
  misc_feature (1)...(241): n = A,T,C or G
ggtggggngagttggtggtttattggggggggtggtggggggtcggtggggacgaatccagggggcggggagggtgggctgggggcgtgagcgggggcacgagggcttgagtggcggatgcccactgtggtggagtgcgccagtctgtcgacaggccggctcgcggtgaccgtgaggagagaggagcgcctttgatgggagagtctgagtatnggcgacgggggagagggggaaggggagg

SEQ ID NO: 4157 - DNA, 462 bp, Homo sapien
tcaattaactgtgttgccatgagtcgcaagcacagagagcagcagcaggtggaccccgcccgcaccaggccctgttcctggtcttcagtgctcactgcttcattgagggaggatgcacagaaaaggtcaccactgtgactgctggtttgcatataaggacactgaggcttgagggggggactgtggggacccaggcctcctccctcaaagcccacagctccttcctgaaacacacctgggttccagtcccagctctgcctctcagggaagtcacatgtcccctcagtgcctcagtttcccctctgcttcagggaggctcagtgaagggtgaggaggacccacctaggccagcagagcccagcccaggagcttcaaacaggggttgctacaaggggtgaacaggggaccagggggtgggacaaattctgcaaagggctaggaatgtgcagggtggggatggga

SEQ ID NO: 4158 - DNA, 159 bp, Homo sapien
aggaggaagtagcgtggccgccagtcttgatgtactcccctcgtttgtgcagccaaccctccttcacaatagccacgtcgctcatggtgcccgaggctcccgcgacgctcacgcgctcctctcaggctggcgctccccgagcccagctggcctggccac

SEQ ID NO: 4159 - DNA, 160 bp, Homo sapien
gcttcccaatacttattttttattactgtacaaaaagcacactctccctctttttgtctctcccaccaacggcacccccccacccccaacccaagaggactatacatggagtgcagggacagagtgaccaggaggcctttgtccggcaccctgcccacag

SEQ ID NO: 4160 - DNA, 379 bp, Homo sapien
gatcagagaaatgttaatacatatgaagccttaaaacagcaacatggcggggaaggagagggaggcgggaacctaatgcatttgaattaaaggaaacaggcaatatttggtcgatgtaaacaatgctatttaacgagtgctttatctactttactgaaatacggaaatacttatgtacacgatttaaatgtgcacaagacttgggcttttttcttctagactatgtacatcattcagcacacaattcaaaaagttctggtgtattcaacacactcccagtaagattatgttacactgaaacatataatattaaactttcaagagactgcttttgatgctaaggagtaatctatttttacaagaatgctcaatggtggtg

SEQ ID NO: 4161 - DNA, 426 bp, Homo sapien
tttttaggaaatgtatatttaatcattctcttgaacgatcagaactctaaaatcagttttctataacaacatgtaatacagtcaccgtggctccaaggtccaggaaggcagtggttaacacatgaagagtgtgtgaagggggctggaaacaaagtattcttttccttcaaagcttcattcctcaaggcctcaattcaagcagtcattgtccttgctttcaaaagtctgtgtgtgcttcatggaaggtatatgtttgttgccttaatttgaattgtggccaggaagggtctggagatctaaattcagagtaagaaaacctgagctagaactcaggcatttctcttacagaacttggcttgcagggtagaatgaagggaaagaaacttagaagctcaacaagctgaagataatcccatcaggcatttc

SEQ ID NO: 4162 - DNA, 423 bp, Homo sapien
caacatacaaaaattttaattatttttgcaaaaagaaagccaactattcgccttggaaataataatgaagtacaaatagctctgactctgcatttggacaaggatgaaccatgatagatatttagaaagggttttaaatcatgtgtatgttggctacagagtaaaaggaacagagaagactcaagctattgtcaggtgtgtatgtgtcatcagcacacactgggggaggagagtcctcactaagtgccacaacccctgatagctgtcagtctctcatgaagcaccatgatctggcatggactcccaaatgccacttgagagaaggtcttcacagcagactgtgcatctgtgtcacaaaacacggctgcaatgaacaacagtgttcattttttgcccttccaaatgtattcttgtgtatgatcg

SEQ ID NO: 4163 - DNA, 417 bp, Homo sapien
ctggggacgtagtttcccaggtagttgagctgcagcttagtgggaccgtttccatggaccacaatggggagcgtgtcgtaggccacgttccggatacgcacacggttccgatcaaactttaaaaccacttcatctaaagccccgttgaggttctgaaagatccgagacttatgatccagattaaggctgagtttctccctcagtcctgggtccaggtagagccgtgtgtagaacagctggtcgtcgtcatcatccttgtacttccactggcgcacgatttggtggatggtgctggcaaaaccgatgaatccaccagaattgaggaagcgcttccccgtgcccacctcagggtactgctccgccagcccccactcgggccagcagaagctctctgcagagaagagcaggcggctgcac

SEQ ID NO: 4164 - DNA, 462 bp, Homo sapien
atagtgctgtggggagcacagtattacccagtggtagggcttctgtcttccctgggagcagggatggtatcttagtcaatttttttcccttgagatgaggtctgtgcctgatgtacaacggatactccataaatgtttgacaaaccaacgaagaatgaaaaaaagcctagtcagactcccatccaaagtaggaactatctctttaacattcttgactcactatcactttacctcaaattgaacagattccatgacggaacttcattcttcacaaactagccagtgacatgtgggacagctctggccagggctctgggactgcagtgtacttgcgctctgcacggtccaggagctgtgatgtggctgtggtctaggggaatcctgcctgccccatggagttgcgccgacaaccctggctccaattgccagaaggctctttttaatgctgaaccaaaatgtgcc

SEQ ID NO: 4165 - DNA, 497 bp, Homo sapien
cgctgcttcaattgatattaaaaataacctcaataataatgtaaaggttcctttctcttgtgtcagttatattcttagggatagcctagaaggaatatatggttagaactaagtgtgactaatcatctgagccttgaagagaaacttcagtgcctctaaacagatcatctacaaaacaacaggtaaacatttatgccagttaagtgggtcatgtttttgtttcttgggtttttcctaaatttaagtgaggttgggcttaccttgtagataaaattatgttttctttttggtaaatacttgaatgtggataacgtcaaatcagaatattttgtgaggaggtgatgatttgaaattaagctagatttctagggaggtgttggttccaatgaaggatgggaagaaattaaaatagtcttcaaacttcttccttattatatttggttgctttggaaaagattggtcctatcctcaatctaatttattcactattaatatta

SEQ ID NO: 4166 - DNA, 497 bp, Homo sapien
gtcaactaaaaaagagagattcccagcaacctacacaaccatttctataggctctcagctgatgcttagtgtttggacaactcacacatgcagattgacagatgaccaacttataaaagagatttttaataattcttaatgatttcacagggtgttgtcaatggaaatatggattcttctacagcaaacatgtacatctatatcatgtggaacaaggatagtgggaaaacctctgattgtgaggacgtagaactgagaagagcatatgaaatgtcataagaaaaacacttctggagcatgtcgtcttcaagaaaatggtgcccagacagtcaggattgtgttacattttaataggaatggggatatttgtgatatactgacaaaccaagacaggtgactataaaactgcaatgtaaagtgtcagcttctcctcacacctttatagtagacatctgagaacctcactcctgtcagcatattcttggggttgatctcaa

SEQ ID NO: 4167 - DNA, 493 bp, Homo sapien
gttgagatctaaaaaatcgttgtaaaagttgccttgttcttttttttgaccaagtttcgctcttgttgcccaggctgcagtgcaatggcgtgatctcagctcactgcaacctccatctcccaggttcaagcgattcttctgtctcagcctccctagcagctgggattataggcatgcaccaccacgcctagctaattttgtatttttagtatatacagggtttcactatgttggccaggctggtcttgaactcctaacctcaagtgatccatctgcctcagcttcccaaagtgctgggattacaggtgtgagccactgcatccagccatagctgcctttttgtatcatacttgtaataggattccatctactcctaagactttttttttttttgagatggagtctcctctgttgtcaggctatagtgtaatggtgtgatcctggctcactgcaacctctgctccctggttcagacgattctcctgcttaagcc

SEQ ID NO: 4168 - DNA, 133 bp, Homo sapien
acactccgatggtactagcatgcatcaatacatgtatcattaactgcatgtgagacgacttacatacagatctgcttgctcggctctgcactctcgtcttcttactgtggtgactcaagatcagggtgatggt

SEQ ID NO: 4169 - DNA, 441 bp, Homo sapien
tagaaaacaatgcttttggacttacattgccacggcagtttacacagttttattcccaaaaattgtagttttgtgactaggtgataaaaatgatctcctatatgtgccaaacttggtattctagacactcatacttaggatgtaaattgactgtagtccaataatttaatatgttgtgtttaattcttgtaatattttactcacaaattgaacttttccttaccaatttaatgtttgtaggcttaatttggcatctttgtcaggattattagacttctctgcattcttctgacttctccctaaactaatgtttagaactgaattgggtccagcaatttaagtggaaaatcagtatgactagagacttctagaaacttctggtgtcactgagatggtgaatttgatgattctgaccctacttgctcatctgtaaaagctatt

SEQ ID NO: 4170 - DNA, 294 bp, Homo sapien
gttaaagaattctggtgcccctctttaagtcttcaggaagtgtttagaggcttattcacattagttaaaacaggccccccccaccttccccaaggcaacagaaaacataaccattagctctcttcctgttttccttcctcatttcatgcttgcttcggctgctaaactgaatttttgttacttagaatattataaagtgtggatgctttctataatgctattggtctaagtgtgattaaatttcattaaggtgtataagcctctaattattacataactggcacgtctgacttt

SEQ ID NO: 4171 - DNA, 418 bp, Homo sapien
ttaaaaaaattttgaataactatcttttgataacacattcggcggttacgatgttggaatttagcagaactatcaaatccaaaattattttcaaatcaagatgtttaaattataagtttttttgttttgttttccagtaagtataaatgaaaatattcatatgtaaaatatgttttgcttaatgtggacaatttacacacccaacacatactgtttccaaaattatttctatatgacacaaagtatgatacctttaaaaaggtgagcttatatattgtttattaacctggaaatagacaatttggctctcataccataagcatttaaaaacatatgaaatattttgatttctttatatggtggtgtgtttttatttctgaattttccatgtgctttaatatttgttaagaatattttt

SEQ ID NO: 4172 - DNA, 230 bp, Homo sapien
gcctccgccaccctccgcgtacgcgtgcccaccacacacagccagcatcacctgctctgcgacatacaccggccgatacacacgcctggtggtatcagcagaagccacgccagtccccgtgctggtcatctatccacatcgcacgcggccctcacccactcccgagcgactctctggctccacactccgggcacacacagtcagctctcgaccactcacgcgcgcaccca

SEQ ID NO: 4173 - DNA, 365 bp, Homo sapien
cgacgagagcctcgatcttctacaagaagtgggagctggaaccatgcgtaggatgcggccctgctggccaccctagatggaccgcgtgaacgccatccccttcacctacgagcagctggacgtcctaaagcataaactggatgagctctacccacaaggttaccccgagtctgtgatccagcacctgggctacctcttcctcaagatgagccctgaggacattcgcaagtggaatgtgacgtccctggagaccctgaaggctttgcttgaagtcaacaaagggcacgaaatgagtcctcaggtggccagcctgatcgaccgctttgtgaagggaaggggccagctagacaaagacaccctagaca

SEQ ID NO: 4174 - DNA, 267 bp, Homo sapien
agcagacctcccattttccagcccctggcgcattagaccacgtgctggaactagcattgtaaaattcccatcccagttccactcccctgaagtgaaacctttttttttttgtgacagtaaatcttaaaaatcattgtctctttatgaacatttcctcagtttcttctctgctgaaaatgtaagccatgctactttttaatgtattttgaattttgtgctcattggaaattgatatgctaatgcctcccccaccccccgccagacttt

SEQ ID NO: 4175 - DNA, 259 bp, Homo sapien
cagtgtgcgtggagccagggaccgggagtggcgtgcatctcatgtggccctgggacggacccgatgcgagatgtgtgtcggctcggtggggctagagctcgctactgcttcgtgatataaacgagaagagcaagtccaagcgtgatttgcaggctctccacgacgggtgcagtagacatgaccagtttatcggcagtcaacgacttttattcccacatcgtactcgcagctggccggaacaggaccgtggaagtgtttg

SEQ ID NO: 4176 - DNA, 154 bp, Homo sapien
ccaggtctctgctggcagaggtcggtagtaaagtccctgtaccccgtctcccagggcacaagctccctagcctctttggatccattctccctgagctcccagagcgtctcctccactccgcagccagtgaagtgtgttgtgcctgctgaagtga

SEQ ID NO: 4177 - DNA, 510 bp, Homo sapien
  misc_feature (1)...(510): n = A,T,C or G
gtgacctgagtaaatttgacctccctgaggaaccatctgcagaggacagtatcaacaacagcctagtgcagctgcaacgtcacatcagcagcaagtcctgccaccccgccagccttccgccctggtgcccagtgtgaccgagtaccgcctggatggccacaccatctcagacctgagccggagcagccggggcgatgctgatccccatctcccccagcactgaagtcgggggctctggcattggcacaccgccctctgtgctcaagcggcagaggaagaggcgtgtggctctgtcccctgtcactgagaatagcaccagtctgtccttcctggattcctgtaacagcctcacgcccaagagcacacctgttaangacctgcgcttctcggccctcccagtttctgaacttctggaancaacaggacacattggagctggagagccctcgctgacacccacccagtgtgcagcagaggtggtggtcacacacactgcacgggacagaaccc

SEQ ID NO: 4178 - DNA, 442 bp, Homo sapien
aaaatatagtttggggactaaggaacatagaattttattagcatatgtgattttacccttatctttgtttctaatttaaagaaacaatttcagaaagtgttagaagaattctatgtttaataatgaatattgttgagttcaaaatattctcatatacccagatttacagagatgacacagtattgaaatggcaggtgggctctgtaagttattttggattaatgacattcagggtctttgcagtggggacttcatgttgcctctcactcattcctcatatgtcagagtcttctgtctatatgcacatgctcaaagtccatactcagtaggggaaatctagccggatggttctccaattgttcctcggctggattttcatcatcagatatttcaactcatctcatcagtttcttgtaagaaaaaacattttcactttgtagca

SEQ ID NO: 4179 - DNA, 536 bp, Homo sapien
gaacaggacgggatctgaactatacacccaggcggccagctcctgcatcctgtggtttatactaccgctatcattctcctcttatgtctcttagccgtcattgtcagttacatataccatcacagtttgattagaatcagcctcaagaactggcacatgcttgtgaacttgtgctttcatattttcctaacctgtgtggtctttgtgggaggaataacccagactaggaatgccagcatctgccaagcagttgggataattcttcactattccacccttgccacagtactatgggtaggagtgacagctcgaaatatctacaaacaagtcactaaaaaagctaaaagatgccaggatcctgatgaaccaccacctccaccaagaccaatgctcagattttacctgattggtggtggtatcccatcattgtttgcggcataactgcagcagcgaacattaagaattcggcagtcggccaaacgcaccctattgctggatggcatgggaacctccttggaggcttctatgggccagcc

SEQ ID NO: 4180 - DNA, 410 bp, Homo sapien
tgagttcactcctgctatagtaaggaggccacgatgtccctaaggaaagctttgtcctgagctcttcattcattggctaacccctagctcccttttcttctgccctttcacaccaggagaaataattttccattttgttcctattgctttggccttttgtattattctacccccttagtccctttgcagatccccactcctgctcagcaggctcttacctctgacccccagctttcattgtggctgttagaacatcctggggtttaaactccacccacgcccgatctggctgtctagagggattctacgcctgcgtgctgccgcctccccaagaggcattcaggttattggagaactaatctcatctcaaggggccagacaccaagtcccaaagcctacagacctctttc

SEQ ID NO: 4181 - DNA, 410 bp, Homo sapien
cctcgctggcagaagagatagaatcagggctgcccccacagagtgtacccaaggggctaattggaggcacgaggggacccctccccagggccttttcctcctctgcgtcttccatctactgaaatgggagagggggtggggagcttctgttctggtgaagggacccgggcaggcccccagcaccccatgctgacttggagaaccccagatctctggggcccagccaggctagggtgtgggggcagctgtgccaatctacctcacaggcccaccccctgccgggcatgccgtgggatcatgggcagggaaggctctgggggtcggagacaccgctgcttagcacccccagccagaacaccctgagggtctcggggctctggagagagtggggcgggaggaagaattggcac

SEQ ID NO: 4182 - DNA, 436 bp, Homo sapien
  misc_feature (1)...(436): n = A,T,C or G
catgaatttgcctgtatactctcgttctgcgacttataaaggaccagacaaatcaaattagtggttttggtttccgccagctgtggatgcctttgacattatgaccgcagaggattccaccgcagccatgagcagtgactcggccgccgggtcctccgccaaggtgcccgaggcagtggcgggcgcgccaactgaggcagcactgctggcgctgatggagccacgggctacagcatggtgcaagagaacgggcagccaagtacggcggcccaccgcacggctgggagggcccgcacccgcagcgtggctganggtcattcgtgggcaagatcccgcgcgacgtgtacgaggacgagctggtgcccgtgttcgaggccgtggcgcgattctacgagctgcgcctcatgatggactttgacggcaagaaccgcggcta

SEQ ID NO: 4183 - DNA, 406 bp, Homo sapien
gacatcttcacctttgaccgtacagaagccgaggacgtgcttggggagctagagtatgacaaggtgccatactcctccctgcggccaccctggaccagcgccgggccctggtcatgcagctctttcaggaccatggcttcttcccgtcagcccaggccacagccgccttccaggcccgctatgcagacatctttccctccaaggtttgtctgcagttgaagattcgtgaggtgcgccagaagatcatgcaggctgccactcccacggagcagccccctggagctgaggctcctctccctgtaccgtcccccactggcaccgctgctgcccctgccgccactcccagccccgcaggccacgtgaccccacctcacccagctcggactctggcacggccaggctgccc

SEQ ID NO: 4184 - DNA, 411 bp, Homo sapien
atgcaaataaaatatttaatttgctctccactcctgcctctgtccccttaccgctaccaccctaagagattatcattgttaacatttgaggacatggtgttttgtaacctgttgtttttttttaatatgacaatggcccatattttagcagtaaacaaaaagatacagaagatgaaagcttagccaaacactgtaaatagaaatgggaagctttttcatatcggggaacggtggcttaattgattcttggggaatgggggatcaactaaccataaacaatttcatttaggatttttgcatcatgagggtatttggagagaaatatatcatcctataatgtgcacagtaagtttttcctaatttgttgctttgaggaaagacacaaagcaaactaaacagcctttcatagat

SEQ ID NO: 4185 - DNA, 365 bp, Homo sapien
taacttaagatctggtcaatgctcacaattagtatttgctttaatgattcaagcaattttgagcaaactgatactctaagcagccagaccaggacaattgataattactagaatataaaaattaaaaatatccatgtcatgatttaaatgatcaaaagaacatgaagtctgcatttaacaattttaaacattggggtatgactaaaaaaagctggcttttatgcctgatacaacacgtggtatactaaattaaggaaatgctaatcctatctgcgtacgagcatgttaatcgataaactttctcattccagagtatgctcaagtagtaggtatctcaacaagacagggggagtaaaaagactcaa

SEQ ID NO: 4186 - DNA, 310 bp, Homo sapien
aaagatcatttataatactgttttaaaatgtgaggcaataagaattactttgtgttggatctgaggaggctttggtaaaacagtttcatctaaatgaaagtggtaatcctcttctaaaatagcaataactgaaaatgaaagtgttaattttaccttgtttgagttatcagggaacttagtaagtaatatcaaagcattttataaatgatatcaaagaagagtcaacattgatccagtcattttattttgtaatattgagggataattggttattaacctgaatagttcaggagactttacaaacctttgt

SEQ ID NO: 4187 - DNA, 188 bp, Homo sapien
ttaaaatcacaaataatttatactaccgttagagttgatacagttttaaatagcaacaaagtacaacagtggtggaaaattggcacagaacctacaagcatttcaatcacaataaggctgtccatgatttatctgttcaaacattgatgtccattttcatactgatcaagttgaaagaaaaaaccata

SEQ ID NO: 4188 - DNA, 361 bp, Homo sapien
ttctcagttcttttaatgatggtgtttacttgagactaagaattgcttaaaataaaactgtcctgaagaacacctatcatccgacggagggggaaaacgaggctagattatatttggaacagctgtgattttaaaatacacaaacgcttgtattacggagttagcatacagagaggaatttctcataaccccttccagcaaatgtttccggagtataatgctccttccgctctagagacccatagaacaggcatcaagggttaaggggacgaaaagttagttacactaagaccgctaaagcctccaatttatatgtgtaaatctttcgtctaaacacccatgatttatcatacattaaact

SEQ ID NO: 4189 - DNA, 508 bp, Homo sapien
  misc_feature (1)...(508): n = A,T,C or G
ttttaaaaatcataataccaacccttaagttcctagttcacagttattcccacaaaagaaaaagccaacaatagtgtaccatttttctatttattttattgctgtctaatcaataaagaatgcagagctgtcaaaaaatgtgtcttacattagctgtcccaacaggattgtcttccctcccagctctgttttaattggcttttagacccactatctgtcagatccttgccatctgtcagtgtctgcctgcgccacctccgtgcttgcttaacatcctgttgcatgtctagcgtgattgagctagatttttcaggcatgtctttagattcccttgttcttgtcaaagccttgttttgttttacatttgtagtgcaaatcactttgtcanacatctccagcactaatgtntcaatcttagtatttgtgcaactgctatacttcacactgcaaaagaaaaaagtgaagaaagggaaggaaagaaaaaaaaaaacggggcggacttttcctt

SEQ ID NO: 4190 - DNA, 443 bp, Homo sapien
ttttttttttttgagatggagtttcactctttttgcccaggctggagtgcagtggtgcgatctcggctcactgcaacctctgcctcccgggttcaagtgattctcctgcctcagcctcctgagtagctgggattacaggtgcgtgccaccacgctggctaattttgtatttttagtagagacagggtttcatcatgttggccaggcttgaactcctgatcttgagtgatcctagtgccttggcctcccaaagtgctgggattacaggcgtgacgaccaatgcccggcctagaaagggaattcttaactgaggtctacagatgggcttcaggggttcaggaaacctctgaaaacttttatccaaggtttcaaatgtgtgttgttttagaaaaaggatccaaactttatttatttatttgtttatttgtttgtttatgagacgga

SEQ ID NO: 4191 - DNA, 307 bp, Homo sapien
tttttttttttttttttttttttacatttgtcaaagatgtatattctgaggtctagtgagttcagacacctcggggaagcctctagcacatacatttatacgatttctttccaatataaactctcaagtagtgactgaactctggtgaagcttctgccaccctcatttcatttgtaaagcatatctgcactttgggaggctgaggtgggcggatcacttgaggtcaggagttcaagagcagcctggccaacatggtgaaaccctgtttctgccaaaaatacaaaaattagctgggcttcgtggcggg

SEQ ID NO: 4192 - DNA, 532 bp, Homo sapien
gcagcacttttaatacacaaagcaaaaggtaataggctggatgggtgaccaaccttcattcacatacagagcccaagtatagatacagactaattgggaaataagttagagtttgcagggccttagggctgagagccagaaacactgtccttttggcagccatggaagcgaggatttccttttctggtttcagtgcatgtacgccttcggctgctccatagcctggtgtgcctgcagcacggccactgcctcgtctatcttggcatggagggattctggagactccagcatgagcaacagctctgagttgtcaatctccagcagcatgcccgtgatcttgccagccagctgggtgtggacatcatggataagggggtagagacgctcccctcaaagtcacaggacagcagcagtggaagaaagctcaggaccatccagtctgaccagcgttttaagacaagataacaggtgccaatcatctgcttttgctcatgcaggggcgccgagccagcatggacgcggtcaggggctc

SEQ ID NO: 4193 - DNA, 484 bp, Homo sapien
gactagcatagacaagcttaacattgtagatgtttctcttcaaaaatcatcttaaacatttgcatttggaattgtgttaaatagaatgtgtgaacactgtattagtaaacttcatcacctttctacttccttatagtttgaacttttcagtttttgtagttcccaaacagttgctcaatttagagcaaattaatttaacacctgccaaaaaaaggctgctgttggcttatcagttgtctttaaattcaaatgctcatgtgacttttatcacatcaaaaaatatttcattaatgattcacctttagctctgaaaattaccgcgtttagtaattatagtgggcttataaaaacatgcaactctttttgatagttatttgagaattttggtgaaaaatatttagctgagggcagtatagaacttataaaccaatatattgatatttttaaaacatttttacatataagtaaactgccatctttgagc

SEQ ID NO: 4194 - DNA, 358 bp, Homo sapien
cttataacctaagttgaacgtaaaacaaaaaccagaaaaaagcataacttcctacaaatgtaatctataaattgcagtgtttgttaatacaaaaaaggtaccaaggacgtaaggataagcatctaagtccaagtcacttgagtgtatttcatcaaaggttatgctaaaaactgtcacccataaaagtgcaaaataaaagattaatgcatgtcaaaaatagagttcttgcaacattgtccaaaagcagcaaacatagttgaacaaggctgtgcatgcactgtcactagctataaagtaatgcttatgacagattttgagtaaatgacatatacttgagatcagttatttgcaaaaattt

SEQ ID NO: 4195 - DNA, 254 bp, Homo sapien
acggctgctaaaaaaaagttaaaatacactgaaagctgttaaaaaattattcattacctacggagccataaagatttgaatgtacccatgcacttttcatcacaatccttggaagaatttagtggaatggtgcctttaacgcattggaagaaaagacctgtcaactcagaattttatatccagtgaaaatattcttcatgggtgaaggtgaaataaagacattttcagataaaataattcatgagcaatgggat

SEQ ID NO: 4196 - DNA, 311 bp, Homo sapien
tacactccacagtcccggtcccgccatgtcccagaaacaagaagaagagaacctgcggaggagaccggcgaggagaagcaggacacgcaggagaaagaaggtattctgcctgagagagctgaagaggcaaagctaaaggccaaatacccaagcctaggacaaaagcctggaggtccgacttcctcatgaagagactccagaaagggcaaaagtactttgactcaggagactacaacatggccaaagccaagatgaagaataagcagctgccaagtgcaggaccagacaagaacctggtgactggtgatcac

SEQ ID NO: 4197 - DNA, 436 bp, Homo sapien
gcctggggacaaggatagcagtcaggggggccagggaagatccggggacgcaccagaactcctggactgaggagggaccctctggcttttatcacctcactggaatgtgagcggcagggaactgggggctttgttcactatgcattcccagcacttaaaacagtgcctgggcaggagcaggccccagtaaagatctgctgaatgaatgaatgactacttcttctccccactgcctgagaatgaataaatgaagaaagagccggggtctccccaaatcagagaatgaagattcacactgtcggaaaaggcaagaatgggaagatatcactgcacacctcacccatttctccaaccgttcaacccagcccctcccaggactacctgtctctggatcataatagcctccatcattgagcaggactctgtcgaaggggac

SEQ ID NO: 4198 - DNA, 272 bp, Homo sapien
tgcagtggtttcttttcgtgtaattttttatctccatatttcttatatgctaaaggtattccatatttagcggcaggctttgtaattttctgagcaggcataacagaaatcgagttttgtcctgaagctggtcttttagctggtataggctgtgatccaaacttcgaaaatgtttttagacaaaattcttctgcaataagctgaggagagagaaacttttcaatgcgtttggctataaaacctttctccaatatggagttgactgatggtct

SEQ ID NO: 4199 - DNA, 408 bp, Homo sapien
agctttgtcctgagctcttcattcattggctaacccctagctccctattcttctgccctttcacaccaggagaaataatttaccattatgttcctattgctttggccttttgtattattctacccccttagtccctttgcagatccccactcctgcatcagcagactcttacctctgacccccagctttcattgtggctgttagaacatcctggggtttaaactccacccacgcccgatctggctgtctagagggattctacgcctgcgtgctgccgcctccccaagagcattcaggttattggagaactaatctcatctcaaggggacagacaccaagtcccaaagcctacagacctctttccgccaggccctgaaacctggccccgtgcagcaggatgacaagccc

SEQ ID NO: 4200 - DNA, 476 bp, Homo sapien
ctgcttacagaatatcagaagtcattctagaggcaaatttgaagagtggaaaaatcactttttctgaatgatcttgtttttggtgtagatgtttttattgtgtgggttagtttaatgaatacataaagactaccagtaccattctgtctttactccgtggcatctgtggaataaccctgctaatgtaacacgtgagaaagcctttggtcatgctacccactctaccagttgttccgacatcccccgccctcctccctgtgagacactgggccaaaggtcactacccctgtgcgttgtccagcacacagacactatgtgcattatttgtacataaggataatcacatctacctgagactgctatcatggaaattaaatgtttggtacatgtaaagtctttgaaagtgtaactggaatattgtgtaattttaataaataataactattgttgtttttatgatcattactaccatttgt

SEQ ID NO: 4201 - DNA, 454 bp, Homo sapien
actctgtcacccagtctggagggcagtggcgcaatctcagcctaggcaacgaatgagaccccgtctcaagcaaaaaaagagtcagttgcttcacctccccaatattcaacatcctcagtgtcatctcaacacctgcgatgtcacctgcaaatcaccacgtccgaacgaccaccgaacacgtggctcctccgtgccggtgtggggaaaaggcaggacgcgggcagataacaccttcgcatgctgcgcgggacgaccagagggaggggcactgcggaggcggcgctggccaggtggatgcccacacggtgaggagagcatggcgtgaacgtggagtgctggcagctgcctcgtgctcacaaggtcctgatgctttccaaggcacctgtcctcatcacaccactccacagctgttttccagaggacgcaggccgaggtcacacaaggtccgtggtgt

SEQ ID NO: 4202 - DNA, 366 bp, Homo sapien
ttagaatgtgcagtaaacttttttctcatttttttttctttttagcaaacgttgttattttaggtccaattattgagttgacagtctactgtgagaatgagatgacatatctactgtgagaataccataaatgatgaatagtttatttgagaacttttatactcagtggtgttttatatattaagataaaaatatgtacacacatgcatgtcacatctctctactgtggagttaatgtgaattttcacaaaatggaattgcaaccacaatcatatctaagagaacattcactcctagtgagggtttacaaaagctactaagagaataaggtagatgataatgcaaagggtcatgatttggggttat

SEQ ID NO: 4203 - DNA, 249 bp, Homo sapien
tgttaccaatctgaagtgggagcgtgggtcaccctaggctgtttttactgccatggacttggtggaggaatggctcccagcttcagcagctgggagaactcgatttccctgagcgtaccttggtgaggagtgggttaggacatctcccccctccggcagatccctgccccctcacccggtaggagtcctcatagtggcggcagtgctctgcgaagggcgtgttctcgccctccgccagcagcaccttgg

SEQ ID NO: 4204 - DNA, 391 bp, Homo sapien
ctaaggcaccgagcgcccagtaggaaaccaaatggacaaccccctgcccttgtggattgtatatttttgcttcaatggtcttgtctctactcagctaaaatggactttgtaccccgctatttatgtcctccctcatgcaaaggggttcaaataaagcaattgggaaaaaaaggtgggagggatgaggggacgggaagaagcttggtgtagcaggaagacctggaaagacctcaaccttggggctggactccaatcatagcaatttaccagctgtgtggccctgggcaaagccattgacgtctctgaacttcagttctctcatctgtaaaatggaactaataccagcatcctgaagaggatccctgagattacatacatcactttgggccca

SEQ ID NO: 4205 - DNA, 161 bp, Homo sapien
acttttaaatggacatggttttatttttaatgtttttaatctttaaagttttgtatattgacagtcctttaaaaaaagtacacgatcatactgtacatgggatctttacatacttttagcatgagcggtaatcttttaaggttctcttaactctaggaatt

SEQ ID NO: 4206 - DNA, 286 bp, Homo sapien
caccactaaaaaaggcttttattacaaaatgaattctaataaaaccaggcctggtcttcaacccctcccgctgggtagaggccctagggtgggctagggtaggggagatgggggtggggggccctgaaagaacagagcaggctgccctcctctcatcagtctcagctgctgccctccttttataaagggctagaagagctcttccaaagccccttgagagagtccccatccttccaaccaggatccttccaaccactgctgtcacaggaccttagcaatgccgcat

SEQ ID NO: 4207 - DNA, 436 bp, Homo sapien
ttttttttgagtgtaaagaaaggtttactccttgtatcatcccctccccgtggactgcttcaattctattggggacaggccagtccctggaggctgcaaggagccacaaacctttcccagctcacactctgcacccctcagtctctgctgctaaagaatcagactcaggtagatggggtgtccacagtctgtcctcattacccagtcataccgggtagcatggcccgagagagcccttatctctccccaccttaaaaccctcagcatcacacagcaggaaccagtccacagggcttaccaaggatacgcagtgaaaacagaataatgtctgttacaaaccccctaaacctgagatggctgaagagcagattcctgcaccccatctgactcccccaggcagtgggagatgacccaaagcccccattccctgggcaga

SEQ ID NO: 4208 - DNA, 272 bp, Homo sapien
caaagttaactacatttattgagctgttatatttcaaacactgtgctaaatgctttatatgcacaaaaattgtttacatttagatatatgctatcattaacaatgttctttttaataatataatttaatgatttttaaataaatttacaaacgcatgcaactatcacccaatccagttttggaacatttccatcacctcaataaaatctaccacctcaaaaagattacccgtgcccagttataatcagtctccattcccacccccagcccca

SEQ ID NO: 4209 - DNA, 401 bp, Homo sapien
gagacagggtctcactgtgttgcccaggctggagtgcagtggcaatctcagctcactgcaacctccacctcccgggttcaagaaattctcatgcctcagcctcccaaggcgctggaactacaggcatgtgccaccatgtccgggtaatttttgtattttttggtagagacggggtttcactgtgttgatcaggctggtttcgaactcctgacctcaagtgatccgcccacctcggcctcccaaagtgctaagattacaggcgtgacggactgcacccagccctggggccctgttcttatcctcagcccacttggttttcccatccctagggagctagtttcagttctctatacttcttagccacaggctgggctcctgctaaacagcaggtcacccggaaa

SEQ ID NO: 4210 - DNA, 171 bp, Homo sapien
tggctgggaacgttgcttcatttccttttctagcaggatgcatgattgggcaagaacttgcttaaaacacaaccagctaaacagctaaacagggcctgggagggaggccccagccccaggctcctggctctgaggttaattaacttctggccgaaagcccagagccggagt

SEQ ID NO: 4211 - DNA, 426 bp, Homo sapien
gtagagatggggtttcaccatgttagccaggatgatctcaatctcctgaactcgtggtccgcctgcctcggcctcccaaagtgctgggattacaggagtgaaacatcacgcctggcttctctccctttttaaataggaatgtctataactgttattctatgcctgtttcaccagtgaatttagggagcagataacttgtttcttaattttcacaggttcatagagagcaatgtattccagggtggattaaacatggagcctcctttttacctaatttgaatgggttagtttagatgatgagatttggggtgtttaagttgttaagatttaggattttgacttgatactgccatatcctaggtctttaggggatgtggggatagggtgatctgttttgcatttgggatggatgtgaatcttttgagg

SEQ ID NO: 4212 - DNA, 266 bp, Homo sapien
atcttatgcaaaagggacacaggggttcagacatagacatatctcctctcccgcggcagacctgtggcccagcgccccgacgacaaggcccttcctcccccagggagaccacgaaggagcaggtgtcacatcctgagctagcacgagcagtgccggggacgtgccgagcccagctgtggtctcgttcccaataagagtacgtgtgtcagaagtgggtcatcctccagtcgccatcacacaagcacacgccgttacctgacggtgtt

SEQ ID NO: 4213 - DNA, 429 bp, Homo sapien
ttagtggtataaagatataattattaaagggaaaaatgagcaaaatgtctgatgcaacaactaaatttaacagataaatgatatttaaaaatctcctaaggtaataaacctctaacacatgttttttaaatacaatgcttagatatttttgttccttgattgagttctaggccttcttcaatgtcccagaagactaactgcaattgagaaagttcaaaaaaatgttcagaatggggacaatttggttttttgagaacaattaagtactttaacacttggataaacacttttttgtggagactgttaattttccttagttttgcaaaactattcaattcaccagattggtattgggtttctcaatatgcttaacactgggccacgtttgggccttagattgccccgtctcagtcttctccatcacaaccc

SEQ ID NO: 4214 - DNA, 115 bp, Homo sapien
ggccgcggcggcgcttgatgccgcacaatacggatgccgcaacagtcgatggcatcagccatgattctccgaagagcatcagcagccagcgcactagacccaaccgtgtgtagtg

SEQ ID NO: 4215 - DNA, 416 bp, Homo sapien
gccaggcggaaatatttatttgaaaaattgaaaacacagatgcaatgtattatacaaagaaaggtcttaataccataataaaagtattgttggagggaaacagaagccagtggccacctgccctgggaaggtaggcactcagtgaaaaatgaaattcatttcaaggaactaccctaatggaaacccaggggaaaggttaaaaacagaagaaaaacaaacccaaccctatccctgcaaactgaaatgtgaaagagtctgttataagtttgagacaactgcattatcaccaagatgtaaccgaaccccctcggtttgtccctatgagtggtaatcagtttcatttagggccttcaaacctgaggtagttgagggtcactgaaagacatgtctggaaaaatctactctcagaatcgaac

SEQ ID NO: 4216 - DNA, 346 bp, Homo sapien
gagacagggtctcactgtgttgcccaggctggagtgcagtggcaatctcagctcactgcaacctccacctcccgggttcaagaaattctcatgcctcagcctcccaaggcgctggaactacaggcatgtgccaccatgtccgggtaatttttgtattttttggtagagacggggtttcactgtgttgatcaggctggtttcgaactcctgacctcaagtgatccgcccacctcggcctcccaaagtgctaagattacaggcgtgacggactgcacccagccctggggcccgtgttcttatcctcagcccacttggttttcccatccctagggagctagtttcagtt

SEQ ID NO: 4217 - DNA, 369 bp, Homo sapien
tacatctcttactgggagtagttcgaatctatcaaagtcatgaaattcttcaggtaaagtaatggcattataagctgcttcccgattttcctcaggcaggtcaaccacacctggccgaaaagccatctttatcttaatgaatgcttcattacagtctgcaagaaggtatttggctttcctgtgatagattcgaactactcccagtaagagatgtcctgatgtccgtaatgccattttcacctttggtgagatgatactctccacgctgctctctaaattacactcgaacacatgggcttgggttagcttcttatcccaatgggccgctagcaaattttggccagagcgctcttttaccaaaaacatcac

SEQ ID NO: 4218 - DNA, 388 bp, Homo sapien
attcggcaccaggaggcagtgcgcctgtggggcccgggccggtaaactcatcctggccagctttgcgtctggcttgctgtcctcattctgggtcccctgctgctgtggttgctctcctacgccatcgctcaggctgagtgaccctggatggcctctgctgagagccagccgagacctcctggatcctgcaatgcggcattgctaaggtcctgtgacagcagtggttggaaggatcctggttggaaggatggggactctctcaaggggctttggaagagctcttctagccctttataaaaggagggcagcagctgagactgatgagaggagggcagcctgctctgttctttcagggccccccacccccatctcccctaccctagcccac

SEQ ID NO: 4219 - DNA, 375 bp, Homo sapien
gggccatggctcgagccgccccgaccccccgcgagcccgccttgtctgcggcgtgactggaggcccagatggtcatcatgggccagtgctactacaacgagaccatcggcttcttctataacaacagtggcaaagagctcagctcccactggcggcccaaggatgtggtcgtggtggcactggggctgaccgtcagcgtgctggtgctgctgaccaatctgctggtcatagcagccatcgcctccaaccgccgcttccaccagcccatctactacctgctcggcaatctggccgcggctgacctcttcgcgggcgtggctacctcttcctcatgttccacactggtccccgcacagcccgactttcacttgaggg

SEQ ID NO: 4220 - DNA, 436 bp, Homo sapien
caacccaattaatacattgacaaaaggttagaatagacatttcaccaaagaggatatatgaatggttaataagcacataaaaagatgcccaacatcattagtcattagggaaatgctaattaaaaccacagtgaaatactacttggcacccactagaatggttataatcagaaagatagacagtaccaaatgctggcaagaatatggagaaatgggactcctcatgtattgttgatgggaatgtaaaatggtacagctactttagaaaatagtttggcagtttcttaaaaagataaacacaaatttactatacaacctagcaattattccactccttgttatctacccaagagaaatgtaaacagacatttacacaaaggctagcatgtaaatgttcatagcagcactattcctaatagcccaaaagtggaagcaa

SEQ ID NO: 4221 - DNA, 413 bp, Homo sapien
gggcagtgctgtggtgcacaagtagtgatgttatgtttccgggtgacctgctgtttagcaggagcccagcctgtggtaaagaagtatagagaactgaaactagctccctagggatgggaaaaccaagtgggctgaggataagaacagggccccagggctgggtgcagtcgctcacgcctgtaatcttagcacttcgggaggccgaggtgggcggatcacttgaggtcaggagttcgaaaccagcctgatcaacacagtgaaaccccgtctctaccaaaaaatacaaaaattacccggacatggtggcacatgcctgtagttccagcgccttgggaggctgaggcatgagaatttcttgaacccgggaagtggaggttgcagtgagctgagattgccactgcactccagcctgg

SEQ ID NO: 4222 - DNA, 175 bp, Homo sapien
cgtgacgacagtggttatctccaagctcagggcaatcccttccgtcctgtcaactgctccccgactcctgcatggctcattccttcacaatgtcgccgtggctgccaggttcctcaggcagccccggtgggaggctgcggaccatggggactcagctctgcatggcaggcagagg

SEQ ID NO: 4223 - DNA, 393 bp, Homo sapien
ctcatctcagcgcaccaactcctgatttttttcagtgggaaatgtggtggtcatagggtagataccgatgtctgccctgctctttcatctctgaaagcctgtttgcagaatgaggccctggctctaccctcatctcaggctcttctaaagagcttttgtattctaaagaggatttttccatcagagaggtaggagctgtaggaaccccgagggcagataagcagccctcactctagataaggtatgctgggggagcttactgagggaatcctgtacacagcccacatcaaaggaaggctgagaatggcctgtggtcctgcttcccttccttgtgtttctccaacctggaagaaaaggggaagctagaaattcacatttattgagcacctgtgt

SEQ ID NO: 4224 - DNA, 358 bp, Homo sapien
cagttgaattaactcttcatttgtcctcctgtcctgttatacaatagaagctccaagtcttattcacaactttgagtctagtgtgtggctgtatagaacagagattaagagcatgggttcaagggtacgatggacctggatttgaattcaaccgagcaactttttgtgtgacttagaggtagtcacaccacattactcagttttctcatctgtaaattgataatagttcttacctcatagaactattgtgaaaattaaattcactcacatatgtaaagcatttagcttgccccggcagtaaatattcactactattattgcattaagtgctaaaagagtatttcaagtagaattttta

SEQ ID NO: 4225 - DNA, 463 bp, Homo sapien
atagaaaaccaccaccacggacctgccaacatcgccacaaaccagccagctgtttgctgccaaattccttcctctcccaggtccagaccaaatacaagatcagcaccacaccgtggtgttgtcaggagccaaagcaacaggaaacaattcaatgctgttgggttcgattctgagagtagatttttccagacatgtctttcaggtgaccctcaactacctcaggtttgaaggccctaaatgaaactgattaccactcatagggacaaaccgagggggttcggttacatcttggtgataatgcagttgtctcaaacttataacagactctttcacatttcagtttgcagggatagggttgggtttgtttttcttctgtttttaacctttcccctgggtttccattagggtagttcttgaaatgaatttcatttttcactgagtgcctaccttcccagggcaggtg

SEQ ID NO: 4226 - DNA, 433 bp, Homo sapien
tgctgtggtgcacaagtagtgatgttatgtttccgggtgacctgcgtgtttagcaggagcccagcctgtggtagagaagtatagagaactgaaactagctccctagggatgggaaaaccaagtgggctgaggataagaacagggccccagggcatgggtgcagtcgctcacgcctgtaatcttagcacttcgggaggccgaggtgggcggatcacttgaggtcaggagttcgaaaccagcctgatcaacacagtgaaaccccgtctctaccaaaaaatacaaaaattacccggacatggtggcacatgcctgtagttccagcgccttgggaggctgaggcatgagaatttcttgaacccgggaggtggaggttgcagtgagctgagattgccactgcactccagcctgggcaacacagtgagaccctgtctca

SEQ ID NO: 4227 - DNA, 170 bp, Homo sapien
aaaccatgtgcttcatgaaacctacagttgacaatgagaatgtacagctaagagaaaagcttaagaggccacactattcgcggaatggctttagaggcagatgaggtggtctttgaccacagttgattgaaccagagcacttattgcttaaagaataacagagttctaga

SEQ ID NO: 4228 - DNA, 412 bp, Homo sapien
tactaatcccattccagggcaagcccaaacctcacgccatctggacacatgatggctgtgcttggacaccaggcgtgtgagtgtgcggaacggggagcaagactccatcctcttcatccgagaagcccaacgtgctgactcaggtcgctaccaactccgcgtgcagctgggtgggctggaggcaccgccaccattgacatcctggtgattgagaggccaggcctcctcagagtattaagctggtggacgtttggggcttcacgctacactggaatggacaccgccccaagatacggggaatacagcacttctgggatacacggtgcagaaggctgacacaaaatccgggctgtggttcacggtgctggagcatatcaccgcaccagctgcatcgtctctgacctcatcatcg

SEQ ID NO: 4229 - DNA, 478 bp, Homo sapien
cagctttcctttagctcttcttctaatatggcttctgccacaaaagcctgctctgtcaggatctcatggttctccacttgccagaaccttcttcagcctcagttcctcggcctcaacttgtacgtttaacccattgaccaccaccccccaaattcaccttcatttctttgaccctgctcctcactccttttctgttgaggaatctgttgactaactccaggctcactcaggctcaccgtcctgctctctgcaccagcctttccagagcgtgccagttctcatggcttcatctgttaactgttgatcacttcagtcctgatttttagacctaaatggtttccttaacgccattctaactgcctgtgactcattttcacttacagtgtttattgtaacgcataccaacaaatcacaggtgcttgcttctctccataaatctcccagtctaacttttggtcattcaacatgactcgtttat

SEQ ID NO: 4230 - DNA, 257 bp, Homo sapien
gacccacagaaaagaaaaccagacatcaaaaaagcaaagctgattgctgtgggtgggagcccgtggtcccgctggaggaaggtttaaacaaagcaattcactacttccgtaaagaactcgagtaccaggcaaataatcagtacatccccaaaccaaagcctgccagaataaagaaaggacggactcgccacagctgaactcctcacttttaggacacaagactaccattgtacacttgatgggatgtatttttggct

SEQ ID NO: 4231 - DNA, 462 bp, Homo sapien
ggattgtttggccatttcatttatcttatcattaattcacaagatagttagaaattctgcctcaagcaaagtaccacattttgaatgttttcttagattttgattgcaagtagatatcagcattttttaaatgaaaagctatattatcttctcccttcaaggcagcctaaggatgttctttcccagaatcactccaacccttcttgccagaattcataaaagtacaaaattggagaatagatgatatcttagaaataagctttttttttttttttttttttttttgagacggagtttcactcttgtcacccaggctggagtgcaatggcgcaattagggttcactgcaacctctgcctcccgggttcaagcagttctcctgcctcagcctcctgagtagctgggattacaggcatccaccaccgtgcccagctaatttttgtatttttagtagagacggggt

SEQ ID NO: 4232 - DNA, 301 bp, Homo sapien
ttttttttttttccatacggaaatttgtttattgttcataaatatcataatgttcatttcaaaaattgtcatcatcttaatggctatcttacacttttttcttttggagggttgtcaggcatccatccattttcctttttaagaagaacgttatgtgtattaggctactaaacccaatttttacattatttttagtgatcaaaggtttcttatacaagtgactcacagtactgaattatgtcaatctctcatttgaggaaggaaatgcagttcaagttagcattgaaattgcttggctgta

SEQ ID NO: 4233 - DNA, 148 bp, Homo sapien
cagcttgctgctgttcggttatcacctagtctcaagcacagaagcagagaatactgtcgtagtgctctagctccatgcttaccagaattgcacttaagagtgtgtctcgaacagcgaatctactgacaacctcaagtaatgcatcgcg

SEQ ID NO: 4234 - DNA, 127 bp, Homo sapien
ggcattcttgggtgaagttccggtgagccttgaactcgggggaataagcattccttctctgctccggtgcctgagactaaggtgagcccaacagcagcaggcttatgcagagggctcccgcaatggg

SEQ ID NO: 4235 - DNA, 441 bp, Homo sapien
cgccattgttcctgcatggctaagtcccgggttcgtcctaattgagctgaacactagtcactgggtgccacagttctcttccatgacccacggcttctaatagagctacaacactcactgtatggcccaagtccttggaatctgtgaggccaaggaccccaggtcagagaacaaaaggcttgctgccatcttgggagcagccccaccccatcttgggagctctaagaacaaagacccgcccataacagagtgaagtggtgtgatcacagctcactgcagcctcaatctcctgggctcgagcaccctcccacctcagcctcctgagtagctgggatcacaggtgcacgccaccatgcctggataatgttttaaaataaagcataaggaggctgtcagtatgtttgccaggctggtctcaaactcctggctcaagcaatcctc

SEQ ID NO: 4236 - DNA, 526 bp, Homo sapien
gctcggggctgcagtgcgctctaatggtgcctgtgaataaccactgcattcagcctgggcaatgaagcgagaccccgtctctaaaaaaaaaattgaggggtcaaagaggatgccaaacttaattagagactgagacagggcagggtgccgaggtgtctgcatgcgtttcatgtggatgcccgtgtctattctggcctgctcctgggccccctccccactcagccctggctgatgagaatgggacagggactcccttctcgtgtccctgtgcagcgtcggcccaggaggtagcagagcagtatatgcacatctgggtgtgccctcctgcatgtccccacacatctgtcattcctgtctttgcacacctatgtgactcccgcatgtttgtgtccttatgtgtcccatgcatgctccccatctgaccttgcgtgttctcgcgtgtctgtgtgcggccagtcctgccttcactctctcatgggtggccctgcagcatgtctggctcccagcaggtgagctcaggagataa

SEQ ID NO: 4237 - DNA, 274 bp, Homo sapien
gagcagacaaatctttattcctgaggctaaaatatgcaccagttccctccctgtaccgcgccactgccagcctgactgcatgcaggccctgtcccagacctggagcgctgaacttggagtcccaggacctccttccctgagttgtgtgtgtgtacatggaggggactcctgggtagcacctggaggcggcctaggggtgaggggcttctcaagggtgccctgcactccagaggtgcagtcttgggcaggatgtagcatgttcagagtctggtga

SEQ ID NO: 4238 - DNA, 338 bp, Homo sapien
tcaatttattgctagaattttatttggttgttagaaaatctgtaagggtgtatatatattaaaaaaaggtgtggggtgagagtggatggaaggcagtcagaagggtgagagttattttcaagttacctaaagtgccaggctaatttgttttaacctttccaagaaagtgaaactgagcataagctataatgagataaggggacacattcatgggaaaagacttcatcttgctttaactaaattttaatacttctggaaaaaaaatttaagtttggttaataccaagctgaacatcatgtaaagaaaaaaaaaaacagcccttaaatgtttaagggtac

SEQ ID NO: 4239 - DNA, 425 bp, Homo sapien
atagaaaaattgtttctatttattaaatatattttgaccattacatagatactttgcacattaaatatatacatggaaaagaaataaggtaaagatagatcaaatctgtgtattcacaaggctaaaaattttttaaatttagtattacacaaaatgtttaatagcttaaaatttgttcttatttcctgccttctaccactagtccaagttaacagcatgtacactgacatctttttacacttcacatatacagatgcatccagtcacataacagtgtaaggcactaaacctttttccatttatctgtacaattccacgtggggagcaacaaaagatccacaggtagtatataatgataataactgtacttattgagtgcttgctatgagtaagtactataccagcatgattgcaggtattatcat

SEQ ID NO: 4240 - DNA, 409 bp, Homo sapien
acactgtctaaagcatttaatggtctttctttaacacagccaactcccccgggtttgaaacagtgttaaattctctcttgcttgtggcaaaagaagctgtcaagtccaacactgaaaaattggtaccatttcctggccagtaagcacagaacagaggggctaaatattttatggttttatttatttactgtgttctcatgctgtgtttttcttttctctgtctctccctcctgctcgtgtctgcccagggctgattgttgtgacattggccgtatgctggatgcccaaccagattcggaggatcatggctgcggcaaacccaagcacgactggacgaggtcctacttccgggcgtacatgatcctcctccccttctcggagacgtttttctacctcagctcggtcatca

SEQ ID NO: 4241 - DNA, 501 bp, Homo sapien
tcatttttttaaaatgatatcttacctgaaactacaaacgacaaaagagaattagaaatgtttgaattaaagtgaagaagggttgggggagatgggcctgaacccacttcctgtctcaatccatgctaccccaaacactccagggaacctctgaggttttattgggtgcactttgaaaatttctcttctatagtgtgtttgtttgattttaaatcacagagaaaactgggttttactcttagagaaacattttcatccagttttttagtttgcttcatttgacttcctaaatcatttttgagttcacaaggatttggtacttttctgtttagctttctctctctaagctttatctaccttaaaaacaaagtcctttttttaatggccagtccaaccaattgatttctcaaactgaagtgcccaggtgtggactcatcaatttccgttagaatagggacatcctacttaagagttggtgcagctccaaggagctgacttgtc

SEQ ID NO: 4242 - DNA, 112 bp, Homo sapien
tgggagcagaggtgcctggtgcaagagctggtgcctggggagagaggtgctgggggatggggtgtgtggcgcaaggagtctgtgctgggcaagttgggggacgcctgtggtg

SEQ ID NO: 4243 - DNA, 438 bp, Homo sapien
ttttttttttagtcaaagaatatgtttaataaaaaataattaaacttccatttgctctatagaacatcatagaaagtaatttaataaattacaaatgactttttaagacgtttgctcaactacagaaagcaaattcagactacacaaaacacaactggtaaatattgcaaatgtccaaaagaaagattggactaagacttgaatcataaaacctgaaacaagggctataaatacaaggcaataacagctataattcttttagtaactaccaacacatacttggatattctttcaactgcaactttagtattatgtaattctactgatttttttttccttataacccttaactttacacaaccatatttgcatgtgttttcttagctgatagctggacaacttttccccaatgaatattaaatagaagtgtcttgaaac

SEQ ID NO: 4244 - DNA, 474 bp, Homo sapien
ttttttacactccctcagacgctttattgtttacaaaacagatggatcccatagggaaggaacacaatcattatgctgacagcagcgaacagagaggggaagaaaaaaaggtgagctttaaagtaatcgcaaatcactgcctatgcgaagaggctgcttccgggcacctgggctgtgactcaggtgctgacatgaatacatcagcaaggtctcaattcagccacagtcccaagtcccccaaccttcctgattgcatctctattttaaatgacccagcctggacatcaaggacaatgatctaggaggcgggtcaaggagacagccaggcaaagtcagaacagacttggggcttccaggctatgccaggtgacagctgagctcttcagaaatgcgtcacatttagcgttcacttccttcgcttcctccactacctatgacatagcgggggaaagagacaaccatgagagaggggtc

SEQ ID NO: 4245 - DNA, 101 bp, Homo sapien
gttatttaatcatatatttttacttgtatctaagccaggtcctttggcaatgaggaggtgtgcagggatcggggtgaggaagtgcaggactggatggacat

SEQ ID NO: 4246 - DNA, 103 bp, Homo sapien
taaggtgccttgcgggcttgccaatcgaggaacttctcttcgaactgttagtgtccaatgcactggcaatcgcagccttccagctctcgaaatcggtgacgtt

SEQ ID NO: 4247 - DNA, 160 bp, Homo sapien
ggggcccccccccagggggcctgtgcggggccccaaacccggcaaaaagaccgtccgcggtccgcagaggcgccaccgtggcccaccaggggggggggccgcccccgggcccggggggaaggccgatgccagaggagagggcgcccccccgggttccccg

SEQ ID NO: 4248 - DNA, 428 bp, Homo sapien
gcgccgccatgttgcaaccgggaaggaaatgaatgggcagccgttagaaagcctgccggtgactaaccctgcgctcctgcctcgatgggtggagtcgcgtgtggcggggaagtcaggtggagcgaggctagctggcccgatttctcctccgggtgatgcttttcctagattattctctggtaaatcaaagaagtgggtttatggaggtcctcttgtgtcccctccccgcagaggtgtggtggctgtggcatggtgccaagccgggagaagctgagtcatgggtagttggaaaaggacatttccaccgcaaaatggcccctctggtggtggccccttcctgcagcgccggctcacctcacggccccgccttcccctgccagcctagcgttgacccgaccccaaaggccaggctgtaaatgtcaccggga

SEQ ID NO: 4249 - DNA, 363 bp, Homo sapien
tggcccagagcgctcgggctgtcggtctagcaggggggactccctgagggaccgctgcgggtcgccgtcttcggaggcaccggcgagggcagagcaacagcctcttcacggtctgtaaggtcattgtttgccagtcgtgggcagcgcggcaaacctgctgggaaaaggttttctggttggaataggatgagtaccgcaccagctttgccttccagctgagatgtaaatttcaggcctccatcctgtggaacgtgggaaaactatcttgagtgttggcatgttctaagtatgacataatagtttaatgtatgataaatcatgggtgtttagacgaaagatttacacatataaattggaggcttt

SEQ ID NO: 4250 - DNA, 299 bp, Homo sapien
cagagtacactgaggtcataatctcgaccaaaaaaaaaaaggaattgacttgattagtagctggatgcatgtgcacaggatgtcccaggtattaaactccccaggatggccaagtcctagggctaagcgcacggtgggactcactgtgtcccagtgctacccagcatagcggactatttcccaggcactgtggtacgccacagaggggtaggcaggcaccggctgccgcagtttttcactatgtgacaagacataagacgactcagacagcagcttgccatcacggtgactagatcttc

SEQ ID NO: 4251 - DNA, 430 bp, Homo sapien
tccccagggaaactgaactcagtttgcatcagctgctgcaacacccctctttgtacgggccaaggcaagaaaaggggaagttctgcctcggccctcaggcagggctccgcaccaccatcctgttcctcaaattagccctcttctcggcacactgctgaagctgaaggagatggctccccgtctgcattgttcttccagccctcgcccccaaccccccacctccctgagtgagtttcttctgggtgtccttttattctgggtagggagcgggagtccgtgttctcttttgttcctgtgcaaagcatgaaagagctcggtaaagcattctgaataaattcagcttgactgaattttcagtatgtacttgaaggaaggaggtggagtgaaagttcacccccatgtctgtgtaaccggagtcaaggccaggctg

SEQ ID NO: 4252 - DNA, 305 bp, Homo sapien
  misc_feature (1)...(305): n = A,T,C or G
ctgacaacttctcggctcaggtgcaggtgctttgcaagatatcaccttgtcacagcagaccccctccacttggaaggacacgcagctcctgacggctattcccacgtctccagaacccaccggcctggaggctacagctgcctccacctccaccctgccggctggagaggggccaaggagggagaggctgtagtcctgccagaagtggagcctggcctcaccgcccgngagcaggaggcaccctccgacccagggagacacacagctcgcgacactcatatgcctcacgacacagccacacggcc

SEQ ID NO: 4253 - DNA, 471 bp, Homo sapien
gccgacttggcccttccttggcgagcgcgtgtctggccgcccagctgcccgcatgtgcgccttttccttaggtggggcacgagcgtaaggtccagctggtcaccgacaggatcacttcatccgaaccctcagcctcaagccgctgctcttcgaaatccccggcttcctgactgatgaagagtgtcggctcatcatccatctggcgcagatgaaggggttacagcgcaccagatcctgcctactgaagagtatgaagaggcaatgagcactatgcaggtcagccagctggacctcttccggctgctggaccagaaccgtgatgggcaccttcagctccgtgaggttctggcccagactcgcctgggaaatggatggtggatgactccagagagcattcaggagatgtacgccgcgataaggctgacctgatggtgacggatgctgagtctgcaggagttctcaacatggact

SEQ ID NO: 4254 - DNA, 501 bp, Homo sapien
tcaagatgataaacttcaaagtgtattttttaaaatgcaagttgcctgtatgaaataaattaaaaatttatatgtaatttcagtgtaaaacaccaaaaccgaacattaaaactgttcacagaaaatagaaaaaaaaaacaaaaaaacaaatcacaattataaaagcacagagatatcagttataagaaccaagtaaataaactaatttctattaatattttcatttactttataaaactttgttgattaaattgggggagtctctgacaatctaaagggtaacaaaataacaaatatacatcatttctttataagtcataccacacaaaccaagttaagttttttctatctgattacagagtcaataaatattgcatctgtatttagagcagcaacataaaactttattagaaagaaatactatatctggaccaaaaaactgcaacatggtttggaaatctaatgactaagaaggtaaaactgggcactatgtgcaactac

SEQ ID NO: 4255 - DNA, 249 bp, Homo sapien
cagctgcatagcgtgactatgaagtgttgcatgggcatgtgtgataatcctgcgtttcccctgtgaaagctgactcctgccatattgcagaaggctctgaagtcctcgttcgttgtggccaaggacctttaaccctgaaacttggatcaacaactgatatcatcattgggggaaaggcttggaccgaccaggcttccaagaattgcaagttgactcatgaagtaattaaccgagaccaattcccctttg

SEQ ID NO: 4256 - DNA, 380 bp, Homo sapien
attgtttgtttgctttctttgtgtagatttctatttgtgttttatgtcatggaaatattccagaattaacagataatagtggtaaagtaatattcagatagtctaattcattttgagtttgtaggtgtaagcagactaaatgttgcccagaatcagtgttgggttatcagtttatattaaatatactgagttgcccgttttgaaaatgcactttgaataatctcaaaaagatgtacaagttatacctgtaaaccacaaaagtgaagcctgagcgttctgttcaatttcatagactcctttaccatgtaaaatttgtctgatatttgatttgtgatacaatttctcctgctaaagctgctattattctgacaaggtagagg

SEQ ID NO: 4257 - DNA, 492 bp, Homo sapien
tcggaaccgggccggctctggctgtccctgtgccggtccctcacaaacctctccccctttgaaactcaagcacagctgcgaggagggcacgaggagggaccctctctcatggttgtctctttcccccgctatgtcataggtagtggaggaagcgaaggaagtgaacgctaaatgtgacgcatttctgaagagctcagctgtcaccgggcatagctggaagccccaagtctgttctgactttgcctggctgtctccttgacccgcctcctagatcattgtccttgatgtccaggctgggtcatttaaaatagagatgcaatcaggaaggttgggggacttgggactgtggctgaattgagaccttgctgatgtattcatgtcagcacctgagtcacagcccaggtgcccggaagcagcctcttcgcataggcagtgatttgcgattactttaaagctcacctttttttcttccctctctgttcgctgctgtca

SEQ ID NO: 4258 - DNA, 437 bp, Homo sapien
gagtaagtgcatgtgtgtggggagaagggatgggagagagccccagcccaggcccccagctacagaaaggtcagcagctatatttaacctcagaccagggtgcggtgggagatctggtttccggaagacggaatggggagaagggcaggttccccgaggcgcccagacacccaatcctcccggtgacatttacagcctggcctttggggtcgggtcaacgctaggctggcaggggaagggcggggccgtgacgtgagccggcgctgcaggaaggggccaccaccagaggggccattttgcggtggaaatgtccttttccaactacccatgactcagcttctcccggcttggcaccatgccacagccaccacacctctgcggggaggggacacaagaggacctccataaacccacttctttgatttaccagagaataa

SEQ ID NO: 4259 - DNA, 244 bp, Homo sapien
ataacaatatggcagtgaacacctttgatgtatgtttggcacttattattagagatggagtccgcctgtcgcagctggagtgcagtgggaacttggccatgtaactcactctgggtcaagcgattccttcctcagcctctgagtagctgggattacaagtgtgcgctaccacaccagctaatttttatttttttttgagacggattctcgctttgtcaccaggctggagtgcagtggcttgatg

SEQ ID NO: 4260 - DNA, 354 bp, Homo sapien
taaaaaaggttttcccttctcctttccattgaagatggactccaaaggaagaattgataatagttctcagttcttttaatgatggtgtttacttgagactaagaattgcttaaaataaaactgtcctgaagaacacctatcatccgacggagggggaaaacgaggctagattatatttggaacagctgtgattttaaaatacacaaacgcttgtattacggagttagcatacagagaggaatttctcataaccccttccagcaaatgtttccggagtataatgctccttccgctctagagacccatagaacaggcatcaagggttaaggggacgaaaagttagttacactaaga

SEQ ID NO: 4261 - DNA, 455 bp, Homo sapien
cactaggtcagtgcatctgcttaatctgtggagaccgccagaccgttgaggaaccgacaaaagtagataagctacaagaaccattgctggaacactaaaaatttatatcagaaaaagacgacccagcaagcctcacatgtttccaaagatcttaatgaaaatcacagatctccgtagcatcagtgctaaaggtgcagagcgtgtaattaccttgaaaatggaaattcctggatcaatgccacctctcattcaagaaatgctggagaattctgaaggacatgaacccttgaccccaagttcaagtgggaacacagcagacacagtcctagcatctcacccagctcagtggaaaacagtggggtcagtcagtcaccactcgtgcaataagacattttctagctacttcaaacattccccagtaccttcagttccaggatttaaaatgcaagaaaaaa

SEQ ID NO: 4262 - DNA, 100 bp, Homo sapien
ttattgtaatgcctctgcatttattctgttgcctcactgtacttgaagatgcgtaatatatatttatctgtggtatcagtgataaaatgatacctttctg

SEQ ID NO: 4263 - DNA, 166 bp, Homo sapien
ttcggcacgatgagagacagggttcaccgtgttggctgggctggtctcgaactcctgaccgaagcgatgatccagccgcctcagcctcccaaagtgctgggattacaggtgtgagccctgcgcccggcggaagagtcttcatgttgttttgcggcaccctgcagat

SEQ ID NO: 4264 - DNA, 332 bp, Homo sapien
ccaggactgccggccctgcagctgccttctgccccaggtttttggctactgatgttacaaacaataaaatattggagcatagagttgaagaacagactcaaaccaggtttttatttaattagttaaaaatatggatcctgagacaaggggacaagagaatatcaaagtgacacctcttcaacaatatcttgctcatgtactggagctatactgacatcagtaatagtgacaccctggatgttgttaaaattagactccaaacccaaaacaacccactccccaaaggaaaatgttttgtatatagtaatggactcatggatcatctatgtgtc

SEQ ID NO: 4265 - DNA, 115 bp, Homo sapien
gcaagcactgcactcccaccaccgcctgactcacctgactgccacccgggactctatggccacactctcaactaagctgagtgccgtgagcttgcgcggaactggcactccagca

SEQ ID NO: 4266 - DNA, 208 bp, Homo sapien
gcaacgaggcatggatgctgctttccacccataagctaactgaatcctcccctcaacctcaagaggcgagttcttggacacgagccttgcagttttaacaattgcagccttaccatgtgtcctagtgccttatagagaaggcctctcctttccaggagcgtctctatttatagaacacctgctctgggcaaggcacaggtgttttggc

SEQ ID NO: 4267 - DNA, 570 bp, Homo sapien
cccggcccatcccacagtggtggactaaggacggaagtgggacccgtccagggccatttctcgagggagcacatcatcgctctaagacttctcccaggacccagagcagtacgtgtgcggctgaatggagtgatagtgaaactcactctgtcaaaaagcaccttttgttcgaactcctggaggacgagcgtcggatgagcggcgtcccaccccacagcttctcggtaagtcgtggctcgacgtctgatcgtactcgctgactggagttaactgcggcgaaagacctggacagcaattgaccaggagattcggtgctgaggactcaggacagctggacaagcaagagcacgggagaaggagtgcacagtggtcgtgagaagacgtttcgctgctgtgaggtcttgaaacggatgacctacgacaaagggtgctcttaaagaaattttggggattccagattcaaggtccggcaacttaggccccaaattagtttagaagctatgagatctctctaaagtattagatattagtgtggattgtgaacacacttcgagaggactctcactgtgt

SEQ ID NO: 4268 - DNA, 226 bp, Homo sapien
cttcggcacaggaggagcagctgcagctggtgacagaggctgtggcaggccagctgggtcggggacgccacgctgagaggagcgcgtgacgagcgggacctcgggaccatgagcgacgtggctattgtgaaggagggttggctgcacaaacgaggggagtacatcaagacctggcggccaccgtacttcctcctcaagaatgatggcaccttcattggctacaagg

SEQ ID NO: 4269 - DNA, 258 bp, Homo sapien
cgtaagaacaagagttattcccagaacctgtgtcttttggccaagtgtttccttgaccataagacactgtactatgacacagaccctttcctcttctacgtcatgacagagtatgactgtaagggcttccacatcgtgggctacttctccaaggagaaagaatcaacggaagactacaatgtggcctgcatcctaaccctgcctccctaccagcgacggggctacggcaagctgctgatcgagttcagctatgaactc

SEQ ID NO: 4270 - DNA, 140 bp, Homo sapien
attgcgttggaaaagaactagctccacatgtcaagaagcatggaagcaaacttgttccagaatctcttaaaaaagacaaagatgggaaatctcctctggatggtgctatggttgtagcagcaagtagtgttcaaggattt

SEQ ID NO: 4271 - DNA, 157 bp, Homo sapien
ggctccgacctgggcgtgcggggagccgctgggacgggtagtgggggaggggagcctggttgagagtggggtggtggggtggggggcgtgggctcggcgggcccgggctagcggggggctgtggggcggggcgctgcccgcgcgcggggcgggctgg

SEQ ID NO: 4272 - DNA, 253 bp, Homo sapien
ttccttttttttttttttgggtttgatgattttatttctcccttcccataaccagtaaaaaaaaaaaaaaaaattacaatcaggcctggtggtggctcacgcctgtgatctcagcactttgggaggctgaggtgggcggattgcttgatctcaggagtttgagaccagcctgagcaacacagcgagacctggtctcaaaattattatacaatcaatgcaagtacaaagattcaatttttaaaaatcaccagag

SEQ ID NO: 4273 - DNA, 145 bp, Homo sapien
  misc_feature (1)...(145): n = A,T,C or G
ggccctctgaccctgttttccacgaggcgagtacgcctgagtgcnggtctccancgtcatgtttcagctcgaccccccgtgctgcatgctgtgctttaatgatgctaatgttggaggagaatggatggataaacgtgatgtttgc

SEQ ID NO: 4274 - DNA, 220 bp, Homo sapien
tatcaatagataaacccttatttattataaggaattggcttacacaataatggaggccgagaagcgccaagtctgctgtccgaagtctgagaaccaggagcactgatggtgtcagtcccagttcaagggcaggagaagatgggtgtcccagcgccacagtcaggcagaaaattcaagcttcctccacctattttatttgggtccttagaagactggatca

SEQ ID NO: 4275 - DNA, 492 bp, Homo sapien
  misc_feature (1)...(492): n = A,T,C or G
ggccagctgntcagcctggtagagacagcacctgaagacagctcaccccgtggacactggcaagcagtggagatggatttgaagaaggtctgactgtggccacagtagtggagtcagccctttgtgctctgagaaattgtatagccttcatgcccccagcggaacagaacccggcccccctggcccagccagagcctctggtgtgggtcagcaagtgggttgactactccaataagttcggctttgggtatcaactgtccagccgccgtgtggtgtgctcttcaacgatggcacacatatggccctgtcggcaacagaaagactgtgcactacaatcccaccagcacaaagcacttctccttctccgtgggtgctgtgccccgggccctgcagcctcagctgggtatcctgcggtacttcgcctcctacatggagcagcacctcatgaagggtggagatctgcccagtgtggaagaggtagaggtacctgct

SEQ ID NO: 4276 - DNA, 593 bp, Homo sapien
  misc_feature (1)...(593): n = A,T,C or G
caagtcagacttcctccccaagactcacctacatggagatgagttcctacctgtgttggccagacgtccaagcgggaaacagccttcagccgagggaatgaaaggattctgaaccccagagtgccccctccctgcccagaacccagcagcgtgagtcaccagcagtttcagccacttcatcggatgcaacagacaaacgttgccctgcttggccgggagactgtggggaaaaaggagcccacagggttcagccttaacaaccccatgtatgtccggagcccctgtgatcctgacagggatcagcgatacctgaccacctacaaccaagggtactttgagaacatccccaagggtctagaccaggaaggctggactcgaggtggcatccagccccagatgccaggaggctacgcctcagccagccggtcagctgcatggaggccacccccaaccccatggagagcctgcgcancctgcatccccacgtgggaagaaccctgacctcagctgaccccttctaccagaacacacctcacagcagccgctgcgtggcacaaagctgagccctgagcccttggtttgtcaatctaggg

SEQ ID NO: 4277 - DNA, 352 bp, Homo sapien
ctgcttcaatgctctttatttcattaggaaagtagctgggcaggggtgttcccctgggggatggagtgggggtacagacagtagcctggctcctgtcccctaggattgacaaaccaagggctcagggctcagctgtgtgccacgcagcggcatgctgtgaggtgtgttctggtagaaggggtcagctgaggtcagggttcttcccacgtggggatgcaggtgccgcagtctccatggggttgggggtggcctccatgcagctgaccggctggctgagggcgtacgtcctggcatctggggctggatgccacctcgagtccagccttcctggtctagacccttggggatgttc

SEQ ID NO: 4278 - DNA, 493 bp, Homo sapien
caatggctagagggctctgctccaagtcattgcttactacacccacaaacattcttcgttctttaaggcctaacttaaagcccagatcctacaggaaaccttgattagacccctctctttattaagcttcctaagatcaaaccctgcttttgtgtaaatgctgacctccttgcctacattttaaaaacctagagctgggcatgatggccccagcctgtaatcccagtgattcaggagactgaggtgggaggattgctagaagccaggagttcgagaccagcctgggtaacatagctagaccacatctcttaaaataaaatagttaatttagccaggcatgatgatatatgcctgtagtcccaactacttggaaggctgaggtgtgaggatctttgagcccgggaggtcgaggctacagtaagctatgatctcaccactgtactccagcctgggtgacagagcgagacccagactcaaaaaataaaaataaaaa

SEQ ID NO: 4279 - DNA, 472 bp, Homo sapien
agaaggaagatattcagggtttttatttttattttttgagtctgggtctcgctctgtcacccaggctggagtacagtggtgagatcatagcttactgtagcctcgacctcccgggctcaaagatcctcacacctcagccttccaagtagttgggactacaggcatatatcatcatgcctggctaaattaactattttattttaagagatgtggtctagctatgttacccaggctggtctcgaactcctggcttctagcaatcctcccacctcagtctcctgaatcactgggattacaggctggggcatcatgcccagctctaggtttttaaaatgtaggcaaggaggtcagcatttacacaaaagcagggtttgatcttaggaagcttaataaagagaggggtctaatcaaggtttcgcgtaggatctgggctttaagttaggcgctaaagaacgaagaatgtttgtgggtg

SEQ ID NO: 4280 - DNA, 571 bp, Homo sapien
  misc_feature (1)...(571): n = A,T,C or G
ggtggcagaaggttgggccccgtaggctgctgcggcaccataggagccagtggcgcagcacganctgagccccataggagcctgaaacgccattgatgcttgggccccgtaactattcagctgggtctgcacaaccggctgggccccataggagccagccattggggtagtggcttgtgcggcgtaggtgctggctggctggcataggcagcagctgtggctggctgtgcacantaggcagcaggttgggaagagtaggaagcagcctgctgtgcagcatatggggcagactgggcattgtaagaggccgaggctgggcattatatgaagctgcctgggctccataagctagtgaggaggctgcagactgggccccataggaggctgcctgagccccgtaggagcctaaggaggaagctgctccctgggtgttgtaggaagaagcagctgcacgaaccccataggaagaggcagcctgggcgccgtaagaggatggctggttaccataggaggcaagggaggaaccctgagccccataggagttcgagcaagaagctgcagctgcctgacc

SEQ ID NO: 4281 - DNA, 378 bp, Homo sapien
gggtggggagaggcgggtaccgtcatagggcggcggggtgctgttggcgttggcaacggccccctgggacatggtcaggcagctgcagcttcttcgctcaactcctatggggctcagggttcctcccttgcctcctatggtaaccagccatcctcttacggcgcccaggctgcctcttcctatggggttcgtgcagctgcttcttcctacaacacccagggagcagcttcctccttaggctcctacggggctcaggcagcctcctatggggcccagtctgcagcctcctcactagcttatggagcccaggcagcttcatataatgcccagccctcggcctcttacaatgcccagtctgccccatatgctgcacagagg

SEQ ID NO: 4282 - DNA, 461 bp, Homo sapien
ttcaattagtttaatttcatctctaggcaagttctgtttccaaacattagtattagttggtgatatttccccttcatagggaaggtaaaaaaggtttgtagaggtggcaaacaatatttggtttaaactagcaggagacaaaggaattccaagaaaggcaaaaatcctttcagtagttttctgaggaaaatgcacaatatcttcaaacttgaccagctggtagctagtaggcagcaaatctgtatttattctcaaggctgctgctgtatttgctagccacaagtgagacaagagggacactgcatttgatttggattttgataattctttcctcaatggttcatactcgaaagcataacccgaatttaagttacatttgcctttacctccctctattttaaacaattttgctaaatgctctggtacattcttcaagaataaagacttggtttactattgta

SEQ ID NO: 4283 - DNA, 430 bp, Homo sapien
aaactaatgcgatggatattaatacttgttattgccttgtggtttattgagcttttggatgtgtggagcacttgtagtcagcccatttgtgcaaaatggacaaggacagaggctgagggaagcaagaagtctttgtcttctgaagggcaccacatggatcttcctgatgttgtcattacctcacttcctggttcaggagctgaaattctcaaacaactttttttcaacagtagtgattttctctacatcagggttcctacagcctacattgatattcctgaaactgagttggaaatcgactcatttgtagatgcttgtgaatggaaggtgtcagatatccgcagtgggcattttcgtttactccgaggctggttgcagtctttagtccaggacacaaattacatttgcaaaacatccatctgcatgaacc

SEQ ID NO: 4284 - DNA, 123 bp, Homo sapien
tgctccaacggcttattaataacctactgccagagactctgcccccagggagcagcctccccatggccgtggtgcaggtgtgcagcaggaaggggatggcgacacagatgaccacgtcatcgt

SEQ ID NO: 4285 - DNA, 125 bp, Homo sapien
tcatgctccaagggtttattaataacctctgccagagactctgcccccagggagcagcctccccatggccgtggtgcaggtgtgcagcaggaaggggatggcgacacagatgaccacgtcatcgt

SEQ ID NO: 4286 - DNA, 494 bp, Homo sapien
ttttttttttttaggtaaagaaaggcaggtttattagataaagtatgaaaatacattgcaagggtgcaacaggcaggtcagcaagagagaagctgactgctaggaaacaaaggcttgctggggattttgtagaatggtgcttatgttgtgggtggaagagggctttgtgcagtactaataatgccagggttgcagtgaactaacttccatttttctatcagctgagggtctggtgatggctgggcacaggcagattgtgagttatttgcacagcagggctatgtgtcctggaccacgaagaaaggcagacttatggcttgtctgctttctccttttgcttcccttcgtccagccagcctgactccttttccctaattaggactccacacgcaagggtttgttctgttccagaatagagacaggtcgatgtatctatctttataccagtactatagctgctacttcttgaccaattacagctttagtatctctct

SEQ ID NO: 4287 - DNA, 487 bp, Homo sapien
ttttttttttttttttgaacactgccacctgcccagccagatcctggcctcactgtggccaaccccagagaagggccttcagcccaagcccagctgggagatgccaaagagacctggggagagggactggggcttagggtgggacagactctatttcctcctcctttagggtggggcgggggaaatcctgaaaaaaagtgaagtgcagagttcagatcacccccaggtcccatgggttgaggcctctgtaccctcccctgcccaggctcagggcctcccccactgcagatagctttggagacagcataacccagctggcagcagcggacctcagacacatccaacgaaacacagactcagacaccatttaccactgctgcccagagaatctggtttccccacaaagggtgaggccaggcactcccaaccaagcctgttccgcacagctgggtaagcaaggccacccccagggaggtccccaacagct

SEQ ID NO: 4288 - DNA, 265 bp, Homo sapien
aacttacatttttaataatattatttttaaaaaaacttggagctgggataagtggcagcagggaggaggggcccagagctttacccctctattaccagctgcctaggggaaggagcattcaacgaagccccgtaactttaagtccctaagggctgtgggtatagacaaccccaggcttgaaaggggtaaagtcagggggatgggaaacccacaatctggggtgaagatggaggcaaatgccctggggggtggtcaggacatgtct

SEQ ID NO: 4289 - DNA, 330 bp, Homo sapien
ggtgcgtgtagaaatgtatctggaatgtttactaaattaagtggctatctttagtaggatttaaagtgttgattttttggtttctgtattggcattttctatgatgattatgtattatatttacaaacagaaaacttacttttagaaatgctatttggaaacggataatggtgatattcaagtcagaggataggggtatcatacacttgatattttacctccacattataacaataaagagcaaaatggtgattaaagattcagctgattagtggctgcaggcaaattcccagtaaccgcacaaaacacaaacatttttggtatcagcta

SEQ ID NO: 4290 - DNA, 396 bp, Homo sapien
gggccgtggttggtgggggggcaggaagctgctggtggagctgcagcatccttcagtctcaggcccctgggagggggaggggaaagaaccagggctgagctgtggagtgaaggggagccatttctctccaccgactgcaacctccgtgctcacagctcacggttcaccagaatccaggggcttggtcggcctaggaatccacaatgctggatattttcatcctgatgttctttgccatcataggcctggtcattctgtcctacattatctatctgctctagtggcctggagctgcggccggagcctgctggagaacagctcagaaggaaggatggagctgaatggccgagtgccctgcttgctgacgcaccggtggatttttgcttctgctgttat

SEQ ID NO: 4291 - DNA, 313 bp, Homo sapien
gagttggcaatttgaatcaacccatagaagtgacagcgctgtattcatttgaaggacagcagcctggggatttgaattttcaagctggagacagaatcacagttatatcaaaaacagattcacattttgattggtgggaaggaaaacttcgaggtcaaactggcatttttccagccaactacgtaaccatgaattaaagcgtatactattttcttctttgagaattacaaaaaaattatttctacactgacaggatttactagttaagcaatgtttaatataaattttaaaaaacttctgttctacaaaattt

SEQ ID NO: 4292 - DNA, 166 bp, Homo sapien
tgagctgattcagccatcctcagtgccacgagtccgcagtagaccacctcagcatcacatgctctggagataaattgggggatacatatgcatgcaggaatcagcatcgccaaggtcagtcccctatgatggtcatctactcaagatagccaagacagccctcagg

SEQ ID NO: 4293 - DNA, 130 bp, Homo sapien
  misc_feature (1)...(130): n = A,T,C or G
tcaaagaataaccacagctcagaagacgatgacgtggtcatgntgatcgccatccccttcctgctgcacacctgaccacggccatggggaggctgctcctggggcaagntctctggcagaggttattaat

SEQ ID NO: 4294 - DNA, 238 bp, Homo sapien
  misc_feature (1)...(238): n = A,T,C or G
gaccagagcggctgtantcggtgcgggaaagaggggcactggtccaaagagtgtccgatagatcgttcaggccgcgtgcagacttgaccgagcaatataatgagcaatacggagcagtgtnancgccttacaccatgagctatggggattcattgtattacaacaacgcgtacggagngctnncgatgcctactacaagncgctgccgtgcatgcccggtcctatgaggcaggttgca

SEQ ID NO: 4295 - DNA, 116 bp, Homo sapien
agcgttgagacaccctcaaggccagtgctcccgtgcatccaggccttacctgtgctctgagctggcctggctggcaaggggtggaaacagctgtgcccaccagctcccaggagagc

SEQ ID NO: 4296 - DNA, 345 bp, Homo sapien
  misc_feature (1)...(345): n = A,T,C or G
cctagctgctgctcacgtgtgccataagaaggtgatgaaggagcgctacgtggaggtggtcccctgttccacagaggagatgagccgagtgctgatggggggcacttggcgcanggtggcactgtcccctccaccctgcaagctgccctgcctctcaccacctacctacaccaccttccaagccaccccaacgctcattcccacggagacggcagctctatacccctcttcagcactgctcccagctgccagggtgcctgctgcccccacccctgttgcctactatccagggccagccactcaactctacctgaactacacagcctactacccaagccccccagt

SEQ ID NO: 4297 - DNA, 345 bp, Homo sapien
ttttctgcccaatttcattattggggtgtgaatccttgttgatgtttactgtctatttattttgaagatactaatcctatatttttgtaagtcaatgtcctccggccaggactacaagaaaccaactttaattaagcaagttggttttattactcagtcatgattactggagaatttcagggcatctcagcacgaggatgttaggaagatcctatacagattttgggcttttatttggggattttggaaagggttgaaggaagcaggctttgctccagactgaatgctgcaggaagatactcagtacagtgagtatattttatatatcttttgtatagggaggac

SEQ ID NO: 4298 - DNA, 361 bp, Homo sapien
  misc_feature (1)...(361): n = A,T,C or G
ggcaagnggaaaaccgnctgtggagaaggaaatagggcccggcgctgagtgagctcggttgcgtgtcctttgcagacactttctggggcgaggtgacatggcgagagtcttggatcggtggacgtagacggtagacagttcgcgtgctttccttcgcctacttggcctacatgccttctgcccgtgaagcgatgtttcccctcgaaaggccgtagtacgccgtcagaactgcggtttttcangtgagttttgacccctccgacgctccgtctctgnnacagaactcgcggcgttcttcgtacccgcccatgcctccgcggacgccgtgnnccatgggannctctgcctgcgccctgtcctc

SEQ ID NO: 4299 - DNA, 351 bp, Homo sapien
  misc_feature (1)...(351): n = A,T,C or G
gctccatcagcagctgtgggcgagtagcgttgtaccggcagagtgggttgagatcgtgtctgcgcccacagtgccaccagctccggcctctggggaggtggtcgtgcatagggagggagagtggctcctgtttggctcctggagacagacagctgggtgtcccacttncagcagtccccagccccctctcccctctgctaactctgccggtggagctcacgccgcagctcatgccaaccctgcccttctgttttgcctctcatgactctccccaaattctgccccaggcccccagccagcgcttcttgccactttcctgccctttactcttgccccttctacctcttgcca

SEQ ID NO: 4300 - DNA, 327 bp, Homo sapien
  misc_feature (1)...(327): n = A,T,C or G
tcggcacaggcatgtggatcanacttggaacctgggcctctgagacatgtcctgaccaccccccaggcactttgcctccatcttcaccccagattgtgggtttccatccccctgactttacccctttcaagcctggggttgtctatacccacagcccttaggacttaaagttacggggcttcgttgaatgctccttcccctaggcagctggtaatagaggggtaaagctctgggcccctcctccctgctgccacttatcccagctccaagtttttttaaaaataatattattaaaaatgtaagttaaaaaaaaaaaaaaaaaaaaaa

SEQ ID NO: 4301 - DNA, 354 bp, Homo sapien
gctgagcagtacatcgacaccgagaagaagaagcgtgagaaagcttaccaagcccgctcccaaaagacttcaggcattgggcgccgatggtgatgtcattgaagctacagaattaaaagcctgcaaaccaaatggaaagagcaacccatactgtgaaatcagcatgggctcccagacgtacaccaccaggaccatccaggacacactcaatcccaagtggaattttaactgccagttctttattaaggatctctaccaagacgtgctgtgtctcaccctgtttgacagagaccagttttcaccagatgatttcctgggtcgtactgaaattccagtggcaaaaattcgaacaga

SEQ ID NO: 4302 - DNA, 313 bp, Homo sapien
  misc_feature (1)...(313): n = A,T,C or G
tagcaaaactgggttccattcccctttacttaaaaaatacataaaaatatacgttgggtttcaaaaataagaaaaagcatctccagacaaaaaagacgatcttcatttttaaaacccatgacgcactctcgggaaggtgttcctgtgctctgggcctggggacgctggtgccaccaannttccaggatggccaggtggacccggggcagatgctcccagccattccttctgtgctgttctgtgggcccccagctagccctgcccacagagcacggcaagcaggtggaccccagacccgtgacagagagccacc

SEQ ID NO: 4303 - DNA, 325 bp, Homo sapien
  misc_feature (1)...(325): n = A,T,C or G
gancccccttctggatggcacctgaggtcatcaagcagtcggcctagattcaaggctgacatctggtccctggtcacagccatcgagctgccaagggggagcctccaaactctgacctccaccccatgcgcgtcctgttcctgattcccaagaacagcccacccacactggagccacacagcaagccttcaaggagttcgtggaggcctgctacaaagacccccgattccggcccagcaggangctcctgaagcacaagttcatcacacgctacaccaagaagacctccttcctcacggagctcatcgaccgctataagccctgg

SEQ ID NO: 4304 - DNA, 332 bp, Homo sapien
atttgaaagtatcattaatgaaattggtataaagaataacatctccaatttttttgcgaaaattccctttgaagaagctaatggcagacttgttgctggtacaagaacctatgaagagagcatcaaaggaagttgtgggcaaaaggaaaacaaaattaaaactgtatcatttgaatctaaaatacaacttagaagcaaacaagaatttcagttttttgatgaagaagaagaaactggagaaaaccacaccatcttcattggcccagtagaaaagttgatagtatatccaccacctccagctaagggatgcatctctgttaccaatgaggacc

SEQ ID NO: 4305 - DNA, 185 bp, Homo sapien
  misc_feature (1)...(185): n = A,T,C or G
cctgtcggcgtgtttctcccagcctccgccatgccgtggcttgtnatatgcacaggcagccaantacagatgtggcnnngcgctggatgcgggataggcaaggtgcactggcgaacccgcggcgganctctacgtcacgctnncctggancagagtntncgcttccagngtgnnatacagccnna

SEQ ID NO: 4306 - DNA, 127 bp, Homo sapien
  misc_feature (1)...(127): n = A,T,C or G
ntnanagccggggnatngctnnggtggttacgcgcatacgctancatgctngccagctnangncgccgctnncactttgcgctnnttcttccacttccgtttctcggccacgtttcgccgggctttt

SEQ ID NO: 4307 - DNA, 320 bp, Homo sapien
ttgaaaaagcattcttcagtttagctgataccaaaaatgtttgtgttttgtgcggttactgggaatttgcctgcagccactaatcagctgaatctttaatcaccattttgctctttattgttataatgtggaggtaaaatatcaagtgtatgatacccctatcctctgacttgaatatcaccattatccgtttccaaatagcatttctaaaagtaagttttctgtttgtaaatataatacataatcatcatagaaaatgccaatacagaaaccaaaaaatcaacactttaaatcctactaaagatagccacttaatttag

SEQ ID NO: 4308 - DNA, 319 bp, Homo sapien
  misc_feature (1)...(319): n = A,T,C or G
taacagcagaagcaaaaatccaccggtgcgtcagcagggcactcggncattcagctccatccttccttctgagctgttctccagcaggctccggcganngctccaggccactagagcagatagataatgtaggacagaatgaccaggcctatgatggcaaagaacatcaggatgaaaatatccagcattgtggattcctaggccgaccaagcccctggattctggtgaaccgtgagctgtgagcacgnnggttgcangtcggtggagagaaatggctccccttcactccacagctcagccctggttctttcccctcccc

SEQ ID NO: 4309 - DNA, 171 bp, Homo sapien
ctgccattagtatttattctttgaagatactttggagattcattttcttgagtggcactgccatgctcattcagtgaaaacttgtggggtatagaaatggaatggagagtttcaaacagctttgctgaaactgtactttggactccagacttcactgtccttaggcattga

SEQ ID NO: 4310 - DNA, 438 bp, Homo sapien
cacatagaaagtcttagtttattttggtagacttgctttttataggcattggtttaaagtgattcttttcagagacatcctttgagaagttaaaattgcagaggcttacgctttcttttatttcaaatatgcatagtgattaaccaggaataaggattctcccatgttctgcctgttaagagcaaacagatctggagaacggaagcccaccctgcctcccttttccatctgaagcagtgcggggaggctggctcctctctttgttcccagactccagggcaaggggcgaccatgctgtatatgctgtgccttgggggaccccagaggctgcgctctgtggcctgtgctcccccgacctgtgcacccgcaccccagtcggccacttgctctcacatcaggcaacgtcagcctgctgcagtgaaactcaaccacgatttt

SEQ ID NO: 4311 - DNA, 499 bp, Homo sapien
ctgccattagtatttattctttgaagatactttggagattcattttcttgagtggcactgccatgctcattcagtgaaaacttgtggggtatagaaatggaatggagagtttcaaacagctttgctgaaactgtactttggactccagacttcactgtccttaggcattgaaaccatcacctggtttgcattcttcatgactgaggttaacttaaaacaaaaatggtaggaaagctttcctatgcttcgggtaagagacaaatttgcttttgtagaattggtggctgagaaaggcagacagggcctgattaaagaagacatttgtcaccactagccaccaagttaagttgtggaacccaaaggtgacggccatggaaacgtagatcatcagctctgctaagtagttaggggaagaaacatattcaaaccagtctccaaatgggatcctgtggttacagtgaatgaacactccctgcttatttttcctgagattgccgag

SEQ ID NO: 4312 - DNA, 429 bp, Homo sapien
cacatagaaagtcttagtttattttggtagacttgctttttataggcattggtttaaagtgattcttttcagagacatcctttgagaagttaaaattgcagaggcttacgctttcttttatttcaaatatgcatagtgattaaccaggaataaggattctcccatgttctgcctgttaagagcaaacagatctggagaacggaagcccaccctgcctcccttttccatctgaagcagtgcggggaggctggctcctctctttgttcccagactccagggcaaggggcgaccatgctgtatatgctgtgccttgggggaccccagaggctgcgctctgtggcctgtgctcccccgacctgtgcacccgcaccccagtcggccacttgctctcacatcaggcaacgtcagcctgctgcagtgaaactcaac

SEQ ID NO: 4313 - DNA, 511 bp, Homo sapien
  misc_feature (1)...(511): n = A,T,C or G
gggccgagctgtccgacgtgtcactgcagggacccgcccggggtgggtctcgggctctcgctaccggagagggaggagaagggggaggttaaaggggaaggaccccggaagtgccccctcctcagtgcgggagagggagacgccgggggcangtccatgcctcccgcggcgtggttggtgcgtcccaggtgacgtcagaagcagcccgcccctgcctggatggtgcgccctgagtgacgtcaggagcagaggccggagctgtccatcagcaccaaaggccgcgggcgggctcagggcatggggccgcggttctggggcggccgagccccggctcctgcgccttccccttcctcaggcccagcccgagttcccggacgccgcgggactggagtgccagccggtgttggacgtggagcggcgccgccaccgcgccgacaccattctctccggcccagcagcccccttcctcgcacgacggactttccctggaccccagtcagttggagcctct

SEQ ID NO: 4314 - DNA, 510 bp, Homo sapien
attattctgtgcagtcgtggccctgggaaggggaaataagaaggccctgttgacgggctgtcttggctctggaattcatgcatcctggccttgcaaggttctggcagggctgctggtgtgttggagcctgcagggcagtcaggctggttcagaggcccatgctgaggggtgggtgctctgaagtggagtgaagcctcaagcccatgaatgccaccccagtcatctctggtgtcagctgctgctgtggccccagcaggttctcaaagctcccaagtcctccctacgacacagcccaaatgtgtaaatggcactgttgccctgacagtgcatggaaaggacgttggcatccaattggcactccttctcccttattcaatattaggtttgatttgcccttcgccattgtttccaaagatcaaggaatgtcaataacattttaaaggaccaataaacagcctcctataaagtaaacctcttcccgtggaagcacactctactactaaagggaag

SEQ ID NO: 4315 - DNA, 506 bp, Homo sapien
ctgaagtggtcacataggctgactttttgtggaggaaaaaagcaaaataataaaaataaggcctacctttctctatgtctgaaacgtgaattgagtaccttctaagtaaagggaaaaatatcagatccatggcctcaaagcacaatccctgttctcatggagttcaattaattgggaagacaagttgaaaatcttagagcagtggtctttaaatatcagtatatattggaataatctgaggaaacatgttagaaatgcaaattccttgatcctgaaaccagagattctgatgtagtagatttgggatggagtctgagtttttagcaagctctgccgccaacccctagtaattctgatacagttgatccatggtcatagtgcgaggaatcctgccatagaataggtacaagagtggcagctgtagccattataggtggacaccatgtgcacacatctgccagatgcctcattcacttgggttattccctttagtttgcaaggaatgc

SEQ ID NO: 4316 - DNA, 130 bp, Homo sapien
ctgtcaacgaaaattattgcagcccacagtagtcgcttttgaatcgggttctaaaggagacggcggagagcttcatccagttagcgtgagcgttggagatagaggtcttctcccagagtatcgtggcagc

SEQ ID NO: 4317 - DNA, 196 bp, Homo sapien
aggtgccgcacagaacggtcccgtactccggaaggcgagtcaggctgagcagtcgcccgaagccatgcgcgaaatgggacctttcgccgtacatgtaagtgccactctcctcgaagggctcgcacagatgggttttgcagcgcgttgagttgatctgggaacggacgaagcccttccgctgccgctgaaggtgaac

SEQ ID NO: 4318 - DNA, 514 bp, Homo sapien
caatatggaaatttcagaaggacagaggtgaggagggaggaagaagaaagtatactcctccagaatttcagtgatctgttgtggcagtccagtggaaggaaggtcttttgaggtcacttagaagcatctttttgggacatccttttgggatcttttgtaggctaggcatctcatatcttgagactcacccccagcctccaagcctctctccatttctctaacctatgcattttagagcgagaggaccgcctcactagtgtcaccatcctgccttttctaaaacatgcaggctcacacattctactcctgcttaatgtctgtgttaaacgttttctaaccatttttgttttatttttctgaaaaagttaacccctcccaactcctcacacattggctcttcctcttgagccacaaagttttgattcttgcgatgtatgtgccttattttatgttaatcttgtcaatgagagggaccagttggtgttgcccaatcagcactccaaggctgtgtgtg

SEQ ID NO: 4319 - DNA, 494 bp, Homo sapien
gaaataaagattttattacttacaggtcctgggggcacaccgcacacccaaaggtgacctccccacccgtcccaagcacacacacagacacacacacacacacacacgcacactggtcagggagctcgtggctgtgaggggccaatgggcggtatccaaacattttgaggagattttaactggtaggttcaaagcaagcaggctcgacttcaggaggtcatgctgtgcctgagagggggtcactgtggcatccgcacagttcagtggaatgtgggggccagcggggcgctcaagtaggctgtctgtggctgactcaaagggagggaggtggtcccccggaggcggctgcataacggagatatctgggtcaaccacacggaggaactgggaggaggtggaaaactgcaaactgctgacggtgaccgagccttgtttctggcatgacaaagtccagcttacattaaaatgaatcccaaggcaacttctgtttttgc

SEQ ID NO: 4320 - DNA, 491 bp, Homo sapien
  misc_feature (1)...(491): n = A,T,C or G
agcaacgcctctaagacgcactgcaccatgtgtagtggccatcagagaggggatgtgagtgggaggaaaggggtctgtaaagcgggagaacaaggctagcctccccctaacaatcctagactgagacgcagtcaggcgcacgccgcaagaggcggcgaggtgacaagtttggagtgcgcccccttcagtactgcgcgttctaagacttttggcggagactttcttggcaaaacccattccccaaagctacgcttcccctgctgagatagcccctacccccacctccacaggctgggacagcccgtccccaccatcctcctcccaagccaattaaatgatcacagcacgcgtgacagttaccggctggagagcganggatgggaccgggagcaggggaccgtagaaccgggccgcgctcctcccctcctagagttcgtggaggcgccgagagggccgtccctcttccggatgtcggactaagcgaacagcgc

SEQ ID NO: 4321 - DNA, 492 bp, Homo sapien
gtgaaaaccaggggagacctgggggacatcacaagcttggttcctaccaggtttatggagccgtacatctttgggagccgcctggaccacgacatcatcgacctggaacagacagccacgcacctccagctggccttgaacttcaccgcccacatggcctaccgcaaggcatcatcttgtttataagccgcaaccggagttctcgtacctgattgagaacatggcccgtgactgtggcgagtacgccacactcgctacttcaggggcggcatgctgaccaacgcgcgcctcctctttggccccacggtccgcctgccggactctatcatcttcctgcacacgctcaacaacatctttgagccacacgtggccgtgagagacgcagccaagatgaacatccccacagtgggcatcgtggacaccaactgcaacccctgcctcatcacctaccctgtacccggcaatgacgactctccgctggctgttgacctc

SEQ ID NO: 4322 - DNA, 412 bp, Homo sapien
actgaaggagaaaggctttaataatattaaaaataggcaaggtaatgcttttcatagtatagtaagatttgcctaataccatcttatttctttgattaaaagttacttagcttcagcatgcgtgtacattcaaaatacaaaattaaagcatgagttgtcattaatttgcagaattctatgattgaagcctctaaatgaattgtgcaggagagggagtttgtaaacaactgactacagacattcacattgggtcatctttaaaaagctggactctgcttttggatgcttctcggaggcgagttggattttggactgaagtactgtcgttccattcctttttttgaggtgttatgagtggggctataacatcgccatcctgcggcttggtgaaatttctgtctgcacaccactg

SEQ ID NO: 4323 - DNA, 202 bp, Homo sapien
aacagagaaggaaataacaaccattttattaataaagagccttagacctgaatgtaatgggaaatagaggcaaacagttgagaggttgaaaacagagagagaaacttcactgttctatacaacccattaagtacatgttttcttttgtcttttttctttcttttttttggagacaagagtctcactttgttgcccaggctag

SEQ ID NO: 4324 - DNA, 370 bp, Homo sapien
ggatgcttcggtggatgacgctgcttttggctgcacgggacaaaaaaccgtcccgccgccgcgcagggtccaacccaaaacagcgccaaaacctcagggtctcatctgcagaagcggagggcactgtggccccatcagggctcatggtcagactcaggaggcgggaagagagagctttgagttcagccaccctggccaagaaagggcacttccagagaactagccgggtcagtgcaaagccttggccccagaggggctccttgtaatggggagaccagaggatggagcacacctggggatgggcatccacgggaggcagacagggcgcagggcccccattccaaaagggaatgtggggaacactgggacc

SEQ ID NO: 4325 - DNA, 457 bp, Homo sapien
taagggagacatgactttattagaaaaataaaaaacaactgaggtgatgggttggtcttcagcggatgccttggtggatgaggctgcttttggctgcactggccttctcccgctcccgccgccgcgcagggtccaactcaaaacagcgccatagcctcagggtctcatctgctgctgcggatgccactgtggccccatctgggctcatggtcagactcaggacccgggatgtgtgacctttgagttcagccaccttggccatggttgggtacttccaaataactagctggttctgtgcaaagccatggcctgagatgagctccttgtaatggggagaccagaggatggagcacacctgggaatgggcatccacggcactcagacaggccccagagcacacattccagatgcgaatgtgtcgatcactggggccccctcctgttgccaagacatttgg

SEQ ID NO: 4326 - DNA, 372 bp, Homo sapien
  misc_feature (1)...(372): n = A,T,C or G
gcggccgccgctgcccactcgcccactggcgtgggtagaagagaggagcggcggnncagcgcgaaggggcgcgctccgtggccgccgagccgcacttgtccaacgtggaaaacccaaataccagtttcaaacacttgggaaacattcagccccgctgcgcacgcgatgcgccccggccccctcccccggcaacggccccgccccccgccgcattcacgcccctcaccgtcccaggccctgggggctgcgggctcgaggccggccctcgcgggggcgtggccttgcctgtcactttttccagaggcgagggtcgcggaggggacagcgtcagggccgctggggtgtggacggcgggcgaggcgcaaactttac

SEQ ID NO: 4327 - DNA, 416 bp, Homo sapien
tcaaagaaattttaaaaactagttttattaatattacttgaaagagaagacagaattacactttgcgaagaggccatgaaaatagccactttttatggaagagttcagagtgcctcagaattggaatgctttcagttcatggaggggggtggatatgccacagaggagggagacacagacactgtactcacatcgttagtttggagaagcaacatatgagactgtgagcaatcagtgcaaggcagcaaaaaattgattacatgatgccatgtggaatccaagagaaaaggaacacagatgaaacaaaacaataaaaatgctcctttttctttcccaactattgtaaaactgaagaacatattttgttttcccctcaaagcaccaaacactgaaaaataaggagtgttgagagtgaa

SEQ ID NO: 4328 - DNA, 393 bp, Homo sapien
tactcagtgcctctcaagcattctattttattttaagcattctattttaaattaataaaagttattaatattaattttaaaaaacctattgtgtatgattcattaatggttgtatcagatcatgtaaaacgtttccagtttaacaaatctttacaaagtgcctctcaagcgttctattttaaattaataaaagtaattactaaaagttattaatttttaaaaacctattgtgtatgatccattaatgattgtatcaaataccctatgcaactaaaaataacacctatgatcacatttaaatcaagagctatgtatagtctaaggattttttaacatatctttgaaaatatgcaaaatggaaaagaaatctatgattgccttgatgacatttac

SEQ ID NO: 4329 - DNA, 202 bp, Homo sapien
tcatcagccgcgtcaggcccctccgggaccccagtacctcccaggataccggtcagagatggaatcccatcacgcctaggggcgaatcccccagagacctagatcacatcacttgccgggaatctcggcacaaatcgcatcggtctacgaaaacgagaacagcacgctgggtaacgcctctgctaaagtcgctagctccagg

SEQ ID NO: 4330 - DNA, 388 bp, Homo sapien
ttttatttttgtataatggtttatttaatacagtatacattatctttcatatactttgttacaatgttaaaaaaacttcatttttcataatataggaaataaagttggaaacaactctggtgggaatacttcagatagagcaagaaagcattcacagcaaggcctataatcagtaagatgtgtgaaaagttgggtagccacaggaggtgttcattaaggatatgattccatttatatagctatttctattgcataaccaggacagttttattgttttgaggtcaatgttcttttaaaatttgattttctgtaagaagaggctttttggcccagaaagccttacttattttacatcttccagtttgtccatcccatgagttagagttcg

SEQ ID NO: 4331 - DNA, 396 bp, Homo sapien
aaaatcaactatcattttaattacaatcttaaacacttttgtttaagggaatccaattttcctcttccaagggtcttccaaacatggaatatgtaggttttcatcataatctcaatgttgtttatccaaatgtatcacgttatataaatatgtagaggtttccagatgtcaagggcagggtattaggttcaagtgtggctggctctaacctctccactgaactcctagagtgagatttaagttttatttaatctaactttactaattcaacttagtcgtgtaagaaggatatgaagaatatgaattattgtacttcacactgctactttcatgtacagtatagtagaataatactgacaactatagacaagaagttaaaatttgtctcaggaaaat

SEQ ID NO: 4332 - DNA, 119 bp, Homo sapien
cgcagaacagtgcagctgccccgcgagccgacggaggagcagggcctgaccaacgagtacggcaactcacccctgcaccgctctcaaagaagcccgggctctcaaggaatcttccgaga

SEQ ID NO: 4333 - DNA, 124 bp, Homo sapien
gactgaggagatcctcgctgctgacgataagacgctgaaccggtggtgctccctaaagaagacctgcatgtacaggtcagagcaggaggagctgcgggacaagcgggcgtacagcagaaggccc

SEQ ID NO: 4334 - DNA, 319 bp, Homo sapien
ctgcacaccactcctaaggccgtagagaaggagctgaacgccctctacgatgtgtttctggaggtctcccagcactggcagacaaggacgtgatcctgcttggggacttcaatgctgactgcgcttcactgaccaaaaagcgcctggacaagctggagctgcggactgagccaggcttccactgggtgattgccgatggggaggacaccacagtgcgggccagcacccactgcacctatgaccgcgtcgtgctgcacggggagcgctgccggagtctgctgcacactgcggctgcctttgacttccccacgagcttcca

SEQ ID NO: 4335 - DNA, 98 bp, Homo sapien
gcaggcgttctctctctaaggaggatgtgctgcagctcgtgggggatgtttcttcctgggtgtggctgggctgctctcacatacagaggccgaggggc

SEQ ID NO: 4336 - DNA, 241 bp, Homo sapien
gaaggcggtgcgggcggccagacagtcggctgacttcgctctgaaggttgaagtggaatgcagcagcctgcaggaggccgtgcaggcagctgaggctggtgccgaccttgtcctgctggacaacttcaagccagaggagctgcaccccacggccagcgtgctgaaggcccagttcccgagtgtggctgtggaagccagtgggggcatcaccctggacaacctcccccagttctgcgggccg

SEQ ID NO: 4337 - DNA, 235 bp, Homo sapien
ggcaccatcttctctttctcttctgcatccagtgtcacggtgactcagagctacctccttgtcagggggccctgggccttgcagcttcggagacagtctggtcaaccgctcttaactcttgggcaactccagcccccggagacagagccctcagtgctggaggatcatttgatcttggagcctggcaggcaggggtgagggttggaggttgctacgtcgtcttaagctcaatgcc

SEQ ID NO: 4338 - DNA, 194 bp, Homo sapien
ggtgtctatgaattagaagatgagttttaggattctcttacccctgcctcgcattctgtggactgcctggtatgtcatggtcgctcagcaagatttttagaaacgaatgaatgttgctgctcggaatctgagaagtgcataatgacgctgcgagtatcatcgtgattagagctgggcctgccacacagctcaca

SEQ ID NO: 4339 - DNA, 124 bp, Homo sapien
ggaagaatctgactctgagaaaacgacggagaaagaaaatctggggccgagaatggatccaccactaggggaaccgtaaggatcgcttgggtgggtgctaccaaatacagccatgaagaaaaag

SEQ ID NO: 4340 - DNA, 219 bp, Homo sapien
ttccagcctatggagagcctggaaagagctgcaggtgaatctcctgtagctgcatgaagttgactcactcctgcggggccgccaggtccgccgtttccacgtcctagtcagcaagactgtatttgtggcccacacttggcgagcccagtctctatcagcagtcatcataagggaaccgatatgaactggaccggagcttcaacgagtcggatgttgtca

SEQ ID NO: 4341 - DNA, 194 bp, Homo sapien
cctcgtcggtgcctcaaggcggatacagtccgtgatgcaagctctcgagagtctcacggagacgcaggtcagtgacttcctgtcgggccgttcgccactgacactggccttgcgtgtgggcgaccacatgatgttcgtgcagctgcagctcgcggcccagcacgctccactgcaacaccgccatgtgctggccg

SEQ ID NO: 4342 - DNA, 355 bp, Homo sapien
gtcatctcttactgggagtagttcgaatctatcaaagtcatgaaattcttcaggtaatgtaatggcattataagctgcttcccgattttcctcaggcaggtcaaccacacctggccgaaaagccatctgtatcttaatgaatgccttcattacagtctgcaagaaggtatttggctttcctgtgatagattcgaactactcccagtaagagatgtcctgatgtccgtaatgccattttcacctttggtgagatgatactctccacgctgctctctaaattacactcgaacacatgggctttggttagcttcttatcccaatgggccgctagccaaattttggccagagcgctctt

SEQ ID NO: 4343 - DNA, 440 bp, Homo sapien
gggagcggcctgtaatttatcttgtaactccttattgtgtaaggtaagggaagcaacttttgcttgcaatagagagagaagatcttgttggtcagcttcagaacttatatccaataagctatcagcacctgtagtactgtcacttagtctgtctttgttttctcgtatagaactgatctcagccttgaagggtggttcagcaaaaaataccgattcctttcccgatagtggagtcgaagttattgatcttggggaagagacatcactcaactgggtaggactgataggaggtggtggagctttgcgtgtttttggagttccacttctttctgagcttattttagagacttggtcatgctgctttggttttgttggggtctttaaatcagcatcctgagagatttttgataatagaaggctttgaattcctgcattttctg

SEQ ID NO: 4344 - DNA, 480 bp, Homo sapien
cctggagagggtggctgggttcctctgcagacattcacccagcatcaaggggctgtcaaggccgtagcatggtgtccctggcagtccaatgtcctggcaacaggagggggcaccagtgatcgacacattcgcatctggaatgtgtgctctggggcctgtctgagtgccgtggatgcccattcccaggtgtgctccatcctctggtctccccattacaaggagctcatctcaggccatggctttgcacagaaccagctagttatttggaagtacccaaccatggccaaggtggctgaactcaaaggtcacacatcccgggtcctgagtctgaccatgagcccagatggggccacagtggcatccgcagcagcagatgagaccctgaggctatggcgctgttttgagttggaccctgcgcggcggcgcgagcgggagaaggccagtgcagccaaaagcagcctcatccaccaaggcatccgc

SEQ ID NO: 4345 - DNA, 423 bp, Homo sapien
aaaataacattcttgggttgagggaaggaatgccatacactactgtctcttcagatctgaaatactccagtttagagccaggaaatttcacaggtcacaccgatttttagcattaaaaactaaggaatatacttagcacttacttaatcttttcagttttccagtttacgtctcaggaatgaagtgtagtctatggttgacaatggagttttgtgatcctgcttattgtaactgacaactgttttcaactccaagagctaaactattggcagttcatgttaagttagagtgagggtgtaggtagtgtcagtgagtggctcttgtgcctgctgtagacattaggcctgcactagggccatgtgctgtcaagattcaggaacatggctttaacaagcagatcttgtatcaaggcagaggtgatgc

SEQ ID NO: 4346 - DNA, 413 bp, Homo sapien
tgaggtctctttttactagatcatggctgttcttcccacctcatccctctgaaaataaaaatgtattgccctccccaccatccatcatagccaggccactaacttgacttggtgcaagagattcttgctgcgaactttgtagagccagtgtgcagatagaatttggctttgagggttcctgatggctttttagtctttaactgtgtgtgtaccagtctcacatttggcccaaacctcaggattctccctctgcctgtcttacttcatggtactagaagaccttcctcgccactctctccacatgagagagtcagctgccctttctcctgtgcctctgcaggaagaactctcttgcatggcacatctcagctcctcattgagggatagttttctttgataagaaacctggagtc

SEQ ID NO: 4347 - DNA, 410 bp, Homo sapien
aagaaacagaaaaaggacactcagcttgtgagcctgagaacctggaatttagttccttcatgttctggagaaaccctttgcccaacatcgatcatgaactgcaggagctgctgattgacagaggtgaggacgttccaagtgaggtggaggaggaggaagaaaacgggtttgaagacagaaaagatgacagcgatgacgacgggggtggctggataacccccagtaacatcaagcagatccagcaggagctggagcagtgtgacgtccccgaggacgtgcgggttggctgcctgaccacagacttcgccatgcagaatgttctgctgcagatggggctgcacgtgctggcggtgaacggcatgctgattcgtgaggcccggagctacatcttgcgctgccatggctgtttc

SEQ ID NO: 4348 - DNA, 111 bp, Homo sapien
aattgggaccatctaccaatttctacaatatctgaccaaaaacagttcacacagttcccacctgacccccttgtcaaaaaggatttatttagtagggaattttccagggct

SEQ ID NO: 4349 - DNA, 505 bp, Homo sapien
cctatagtagccttggtgaagacttcctcaactcctgccacaaggtgatggagttcaagtctctgctgctgtctctgtgcttgttccatgggaacgccctggagcgccgtaagtttgggcccctgggtgtcaacatcccctatgagttcacggatggagatctgcgcatctgcatcagccagctcaagatgttcctggacgaatatgatgacatcccctacaaggtcctcaagtacacggcaggggagatcaattacgggggccgtgtcactgatgactgggaccggcgctgcatcatgaacatcttggaggacttctacaaccctgacgtgctctcccctgagcacagctacagcgcctcgggcatctaccaccagatcccgcctacctacgacctccacggctacctctcctacatcaagagcctcccactcaatgatatgcctgagatcttttggcctgcatgacaatgccaacatcacctttgcccagaacgagacgttcg

SEQ ID NO: 4350 - DNA, 485 bp, Homo sapien
gcttagaaaattcagctttaatggtccagccttctgtctgagtctagtagtccagggcacagatgagggccacaccacgctttatccagtgtcgctggggctgatgggtggggatctccacagcaatgacatagtttgtagagtgtcctgtggttgatagtgttccagcacgagtcagtgtcttgtagatggggcacaggtaaaagtcctggtcctgggccttgcggttgggtgttggcaagagccagataacggccatctctgtgtacagctccttgggctgagactcagccagctggaaggcctctggatcccagcgggcaccttccaggaataatccatggatatagcaccctacttggggtctttgtgttaactctgatggtgcctcaaaacatcacctgtgggtagacacagacacaccccacacacataacaatacccagaatctgggttaggaggcacaaaactcccttctgagagag

SEQ ID NO: 4351 - DNA, 449 bp, Homo sapien
ggattaggctccctggggccccctgctgctgtgcccacctgcccacccaggtccccacctcctgcagcccagagggagctctgcatgtgggacactccctgctggcacagcacaccagatggacatgttggatgggctgtgctgtccccccaactgtggcccccacaaggaggtccccaagatctccaccccagtcatgctgatggggccttcagcaccagctctgtcctgggtcgatggaggaaagcccagccccatggccttgcccttcctggggcatcccacatcgtgccgccgacactgtgtgcccctgggggagtgaaggggccaggggctttgacccccagcttaggcggctatgcctgagcctgccaacccagtttcagacactcatccttcatccttcctgctgccgccctgggttcctctataaacctcgctgctcagct

SEQ ID NO: 4352 - DNA, 522 bp, Homo sapien
  misc_feature (1)...(522): n = A,T,C or G
tttggagagtgctcaatggacgtagttattattatcatcatcagcacagtgcggggcacatggtgggcattcagggatgatggcccttgtgtcacagccgacactcttgaccagtgagtcctctctcctccctttgttgactcctgaccgtccacaaatgaggttcagaatcctccatccagcatcttccctggtcacatggtcccaaccttttgctccacccccttctctgttccccccgcagtccatgctccagccatcctgactctgtccctggatttctggcttactgacacctgagcctgtgcacaggccctcccttctgtatagagcacgcttcccatcttgtggacttgcttcccatcttgtggactcggagggttccgagcagccgttgaggtgagnctcctatgacacctcctccgtgaagcctccctcacttttccattaccagtgaggcctgccacagcctgatttgtactctgatcctggcacgcatgaagccgtgttgccatttgttaa

SEQ ID NO: 4353 - DNA, 263 bp, Homo sapien
aatttttaaaagttgtcataatgcaaattttattttgattagtttttgtgactcctttatcttaaacccagcgatgcttgccacttcccaaggtgtaaaaatgtgaagattaaggtaaactgaatgtcgaggagtgtaaagagatggcaaaacacagataaaaacatccaaaaagcctcttggggcaggtcaagcttatgattcaacagttagaaaaccaaaattacttggacatccccttctacttaaagtgatatactgga

SEQ ID NO: 4354 - DNA, 184 bp, Homo sapien
caccgagcttagctatgctggctaggactcatccagaatctagcagtggtattacaggatcatctcccatagagaggattatgatgcgtctacggtgacgtacgtactttgagtctcgcacggcattgagttctcacggaagaagcccatggctagttactccaataactgcgccggtcaagct

SEQ ID NO: 4355 - DNA, 290 bp, Homo sapien
ttttttttatgtaaaaggtatttattttattgataattatgctctattagaaatccctggggtcagaaggtatccgggaaaagacagaatggaaaagaatgaagatgtggcagagggatgcaggatgcttggcggggagtcgggctgggggtgatggctaggggacattgtgctgaagcattggcctcttcggattgaacaccaaagagaatattatgtcatctgctacctcactctaaatctgatctggagagacaggccagaccacagagctcgaaggcattggatgt

SEQ ID NO: 4356 - DNA, 111 bp, Homo sapien
tatcaggggccaaattaaaaggggaactagtcagatgacaaaactcacgttaagataggaaatctatgaagaagaaattacaaatgctgaatatgacgaaacgatgtagat

SEQ ID NO: 4357 - DNA, 136 bp, Homo sapien
tatatttttttttgaattatttaatttgatccatttatttaattaaaaaaaaaaggaaggggaaagagatcatggccaaaaaaatagtagttaacccccaccccacccccaaagctctagccagtcatgtgagcat

SEQ ID NO: 4358 - DNA, 273 bp, Homo sapien
ttgtttttttttttttttgaagaaaaaaatttttattctaagaaatacatattcgttatagaaaatttggaaaatacagagaatagagaaaatgtgaatttcccagaatccaacaacacacagataaccttacagttttactatttcctatatacatgtgtatttttaaacaatttgctcttttcttcttccccaccctacctcccaaaaaagtggggaaggcagctcctggtgggccacacctgagcctgcctctccaccattccatcctca

SEQ ID NO: 4359 - DNA, 142 bp, Homo sapien
ggcagacattgaccaccaagaacagtcttgaccttatcaagatttggatgatgttgaagaagtataaccagagggaaccggtgaaggaaccaaactccaagcacgtcaggttaatggtcagaagaagccaaaactccccata

SEQ ID NO: 4360 - DNA, 469 bp, Homo sapien
  misc_feature (1)...(469): n = A,T,C or G
gagttaagggtcttgcgaggtcattctggacttggggtgggccttaaattcaatgaccagggttcttataaagagagcggccacaggaagacggaggagagactggaagatgcagccgcagcaagggacacggtggccaccagcatgggaagaggctgggagctgccccagagcccctggaaggactgtagccccgctgaccccgattccagatctctggcctccactgagagccagcctgtcgggggcagccctgggaagctagtgtggcagggagggcccagccggctcggngnntgccggngnctttagcagagggccagcgcggtctcggggtcccccacgatgtccctgtgcaccagcttaaaggtgtcaatgaacagctccatccagtcctgccgctctaccccggtggcgaacttggcccgctcggcgtgtagaccagcacggccaccagctgggagtaggc

SEQ ID NO: 4361 - DNA, 525 bp, Homo sapien
ttcgagaccgcaccattgcactccagcctgggcaacaagagcaaaactccatctcgaaaaaatacaaaaataaaaaaataaagagaccagaatagaagagagcccaggactgagtcctgaggaaacagcacagagatcagagagaggagaagactctgaaatagggaaactggaagaaatggccagagagaggagaaaaccaagagggtcaatgtcactgtggctgagagagaatatttccagaggatgaatttgctcagccagccaagtgcttctcacagggtcgctccatacagaggccattgatttcatgggcacatggagctgattcaagaacgagtgagaggaagtgacagcgtgtgcaagaagacagcttgtagagggtggctagcttctcctcactttgtagccacatctgctatgaacttatcccatctcttcttccagatttccatgaaagtatttttctcactctccaacagggtactgtacttgatagagttcatggccagctgtttgagggtc

SEQ ID NO: 4362 - DNA, 476 bp, Homo sapien
cctctttaataggtttattcagaaaacatgtccactgcaatttgggaggtaggagtttggagacagaccagaacacttctactgaagaattacttaattaaatgcagaaccaaaaagagtagtgttcaggaaattctttttccactatttttattattttggttaatattaattagcatgatgcatccaaataagaaatatgaagaagtgcctaatatagaactcaatcctatggacaagtttactctttctaatctaattcttggatatactccagtgactaatattacaagcagcatcatgaagaaagtgtctactgatcatctacctgatgtcataattactgaagaatatacaaatgaaaaagaaatgttaacatccagtctctctaagccgagcaactttgtaggtgtggttttcaaagactccatgtcctatgaacttcgtttttttcctgatatgattccagtatcttc

SEQ ID NO: 4363 - DNA, 478 bp, Homo sapien
atgtaatgaagaaaataaatctgtatcattttatttaacattcattctttaagttacagttaacacaatctgcttctaatccaagaaatcctagtataatctgaaatacatgcatatacatttagtaagacctacatttctaaataaattacatgcatgatatacaataaagaatactaatatgagaattcaggacatttatttttctgcatggaaatttaactactgtataacacacgcacatacaaaacaaacccacaaagcaacagtgtgtaataggtagtgagagacacacaaaataagcatatttaaaacgcctacaaacagccttttttttttaggcaacaaaatacgtccagtccttgacatcttctcatactcacctagcaccacagatgcaaggacctaacagtaaacatgtacaatctcatgcttaacacctaaagcatgcactgaattgaatttgtatgttgtgatc

SEQ ID NO: 4364 - DNA, 361 bp, Homo sapien
ttttttacactccctcagacgctttattgtttacaaaacagatggatcccatagggaaggaacacaatcattatgctgacagcagcgaacagagacgggaagaaaaaaaggtgagctttaaagtaatcgcaaatcactgcctatgcgaagaggctgcttccgggcacctgggctgtgactcaggtgctgacatgaatacatcagcaaggtctcaattcagccacagtcccaagtcccccaaccttcctgattgcatctctattttaaatgacccagcctggacatcaaggacaatgatctaggaggcgggtcaaggagacagccaggcaaagtcagaacagacttggggcttccaggctat

SEQ ID NO: 4365 - DNA, 348 bp, Homo sapien
cacctgccagagctgatcctccctaggccctgcctaaccttgagttggcccccaatccctctggctgcagaagtccccttacccccaatgagaggaggggcaggaccagatcttttgagagctgagggttgagggcattgagccaacacacagatttgtcgcctctgtccccgaagacacctgcaccctccatgcggacgcaagatggggaatggaactgaggaagattataactttgtcttcaaggtggtgctgatcggcgaatcaggtgtggggaagaccaatctactctcccgattcacgcgcaatgagttccaccaggacagcccgaccaccatcggggttgaa

SEQ ID NO: 4366 - DNA, 357 bp, Homo sapien
gaatgagaactcagcgccccgggactgtgggaggaacccgggctggtggagggctctggtgtctggccgccatttatccttcctctcctgccccaggtcatggaagacgcccacttggatgccatcctcatcctgggggaggccttcgcctcgagtgagccttttgattttggcactcagagcaccaccgagaagatccacaacctgattcccgtcatgctgaggcaccgtctcgtccccccacccgaggaaacctactccctgcacaggaagatggggggctccttcctcatctgctccaagctgaaggcccgcttcccctgcaaggccatgttcgaggaaggctacagcaactac

SEQ ID NO: 4367 - DNA, 495 bp, Homo sapien
gctaaacgccacggagctcacgcaggacccggccgcctactcccagctggtggccgtgctggtctacaccgccgagcggccaagttcgccaccggggtagagcggcaggactggatggagctgttcattgacacctttaagctggtgcacagggacatcgtgggggaccccgagaccgcgctggccctctgctaaagcccgggcacccgcccagccgggtgcgcctccctgccacactagcttcccagggctgcccccgacagctggctctcagtggaggccagagatctggaatcggggtcagcggggctacagtccttccaggggctctggggcagctcccagcctcttcccatgctggtggccaccgtgtcccttgctgcggctgcatcttccagtctctcctccgtcttcctgtggccgctctctttataagaaccctggtcattgaatttaaggcccaccccaagtccagaatgacctcgcaagaccctt

SEQ ID NO: 4368 - DNA, 287 bp, Homo sapien
tttatgaagagctcgactctgactccgaggacctagttcccaatcctgaagatctggacccggtttctgaagacccagagcctgatcctgaagacctcaacactgtcccggaagacgtggaccccagctatgaagatctggagcccgtctcggaggatctggaccccgacgccgaagctccgggctcggaaccccaagatcccgacccaatctcttcgagtttcgacctcgatccagatgtgatttgccccgtacccctgattctcgatcctaacagcgacaccctc

SEQ ID NO: 4369 - DNA, 519 bp, Homo sapien
atggtgatcagctctgatgaaccagctatgtttgatgccaaagcttgtcctatgatttctatgaggtcttcatgggcattggggggatgaaggctgacctgaggaccctcaaacagctggccatgaactctatcaagtacagtaccctgttggagagtgagaaaaatactttcatggaaatctggaagaagagatgggataagttcatagcagatgtggctacaaagtgaggagaagctagccaccctctacaagctgtcttcttgcacacgctgtcacttcctctcactcgttcttgaatcagctccatgtgcccatgaaatcaatggcctctgtatggagcgaccctgtgagaagcacttggctggctgagcaaattcatcctctggaaatattctctctcagccacagtgacattgaccctcttggttttctcctctctctggccatttcttccagtttccctatttcagagtcttctcctctctctgatctctgtgctgtttcctcaggactcag

SEQ ID NO: 4370 - DNA, 573 bp, Homo sapien
gattactgtacttggaagtatgttgtgtgtcccaaatgtgaacgaagtattgttagaatttattagatcagcttctttggagatcaaagattggaaatcctagtcatagatattcactggactggctttggactgaaatgctcctttgtaattcttttcctattgtcttttccttctagtgtcccaaaatattttctttaaggtcagcacagtactgtatatgaatctttaatgtggtatcatatatgtctacttttgtctgattcatcgatgtattatatctttataattgaatattttagctccgggtcctgttgccccttcaagcagtacatgccaaattataaataggtgctactggccttgagcatatcactgtgggacagttccccaattgtcaagtgtttagatatgtagactattgccatttgtttttttgttttggttttgctttgtgtctgaagctgaattgatttcttttttttgaatgtgaaagttgaatttcaaacgtagtcatttcttacagatggccaagacagaaaattgtggctaggttgactgagaactgttgtc

SEQ ID NO: 4371 - DNA, 412 bp, Homo sapien
gctcctttccaaaagagaaacattggtcttcaactgtataatggcagcatctatggatgcttgtaaaactgtgaaacctgaggaccagtactgagcagcctcacatgattttgaacagccagctcttgaatccatataaatagaagatactggaatcatatcaggaaaaaaacgaagttcataggacatggagtctttgaaaaccacacctacaaagttgctccgcttagagagactggatgttaacatttctttttcatttgtatattcttcagtaattatgacatcaggtagatgatcagtagacactttcttcatgatgctgcttgtaatattagtcactggagtatatccaagaattagattagaaagagtaaacttgtccataggattgagttctatattaggcact

SEQ ID NO: 4372 - DNA, 182 bp, Homo sapien
ggggttcttcctgcggggcagaagggcagattgttaaaggggctgcggctagaccaccctggtccctcctccggcagtgactcagacccacactgtgccgtgcagctgtgtgccctgcaacccgcttgacggcgcactgctcacttctggggggccctttcagaggcacttttaaagcaaat

SEQ ID NO: 4373 - DNA, 516 bp, Homo sapien
actgactcacagtacacttcggcagtgacagagaatatcaaggccttgttccccacggagatccattctgggctcctggaggtcatctcaccctccccccacttctaccctgacttctcccgcctccgagagtcctttggggaccccaaggagagagtcaggtggaggaccaaacagaacctcgattactgcttcctcatgatgtacgcgcagtccaaaggcatctactacgtgcagctggaggatgacatcgtggccaagcccaactacctgagcaccatgaagaactttgcactgcagcagccttcagaggactggatgatcctggagttctcccagctgggcttcattggtaagatgttcaagtcgctggacctgagcctgattgtagagttcattctcatgttctaccgggacaagcccatcgactggctcctggaccatattctgtgggtgaaagtctgcaaccccgagaaggatgcgacagctgtgaccggcagaaagcaacctgcggat

SEQ ID NO: 4374 - DNA, 516 bp, Homo sapien
gctgcttacagaatatcagaagtcattctagaggcatatttgaagagtggaaaaatcactttttctgaatgatcttgtttttggtgtagatgtttttattgtgtgggttagtttaatgaatacataaagactaccagtaccattctgtctttactccgtggcatctgtggaataaccctgctaatgtaacacgtgagaaagcctttggtcatgccacccactctaccagttgtccccaccatcccccgccctcctccctgtgagacactgggccaaaggtcactacccctgtgcgttgtccagcacacagacactatgtgcattatttgtacataaggataatcacatctacctgagactgctatcatggaaattaaatgtttggtacatgtaaagtctttgaaagtgtaactggaatattgtgtaattttaataaataataactattgttgtttttatgatcattactaccatttgtgttgccattagtgaatttttacaagaaaactccctgtg

SEQ ID NO: 4375 - DNA, 568 bp, Homo sapien
tggggggaccagtcctgctgaagacagatgtgccattgagctcagcagaagaggcagagtgcactggcagacacagagctgaaccgtcgccgccggcgttctgcagcaaagttgagggctatggaagtgtatgcagctgcaaggaccccacacccatcgagttcagccctgacccactcccagacaacaaggtcctcaatgtgcctgtggtgatcattgcagggaaccgacccaattacctgtacaggatgctgcgctctctgctttcagcccagggagtgtctcctcagatgataacagttttcattgacggctactatgaggaacccatggatgtggtggcactgtttggtctgaggggcatccagcatactcccatcagcatcaagaatgcccgcgtgtctcagcactacaaggccagcctcactgccactttcaacctgtttccggagccaagtttgctgtggttctcgaagaggacctggacattgctgtggattttttcagtttcctgagccaatccatccacctactggaggaggatgacagcctgtactgcatctctagc

SEQ ID NO: 4376 - DNA, 383 bp, Homo sapien
ttccagtatgccaactttggtttaatgcacaactttgaaaataactcattaaaacacacatcaagatgctactaacaaattcattaatatccaagattcattactgtatgtcaaaggtcatccaggattaacattttcattacaatgaactgtgaaattccaatgaaaaatgtttgcctgaattaaattatttaatctctcaaattggaagtctagcactcttgaaaatcaaattcacacacacacagacacacacacacacacttacaaactgcacattaggacatgagggcaatttaatggaaaaagaaaatagaaactgaaagggcatttgtaaaatgtaggatatcatttggacaactggatagagtaggcagaaaatc

SEQ ID NO: 4377 - DNA, 332 bp, Homo sapien
cctcataagggaataacttgcgccgggtttttttttatataattgtgaccaatacatttgtattttgtgatgaatctacatttgtttgtattcatgttcatgtgattaactcttagaagtgttgtaaaagatgcagagtaagtattatgccccagttcagaaatttggcattgatcttaaactggaacatgcttttactttattgccctaacaattttttattaaatttatttgaaaatgcatcacatgatgaaaaattatagtagcttataagagggcatatacagtgaagagtaagttttccctcctactctcgatcttccagaagctgt

SEQ ID NO: 4378 - DNA, 332 bp, Homo sapien
cagtttaggaggcaaaaaagtaatcttttctaataaccagctatttaccatttattttgcatttattttattcctgaagatgcaggtttctctttggtatcatttttcttcagtttaaataacttccttcagcatatctcatagagcaatcccattgctcatgaattattttatctgaaaatgtctttatttcaccttcacccatgaagaatattttcactggatataaaattctgagttgacaggtcttttcttccaatgcgttaaaggcaccattccactaaattcttccaaggattgtgatgaaaagtgcatgggtacattcaaatctt

SEQ ID NO: 4379 - DNA, 397 bp, Homo sapien
ttttttcaatcttacatacatttaactctattttacagatgaggaaatagaaatccagagaggctaaatgacttaatcaaggttatacaacagctctgctgggactgagtagagtgagaacccagatatcttgactcctaaaccagtgctcgtcccactatcccatgatactttcaaaagcaacatgctggaagagagagagaaggtgcccattttctgtgaataatgttcatcaatctttatattatttgagagccagagcaaactgtaagagatactaagtaatggaggctaagggggcactgtagttttaggcaagcaagtcaatttttctttttaaggattctctaaacctgccataatggaaacatgaagcaatagcagcctaagggacaga

SEQ ID NO: 4380 - DNA, 484 bp, Homo sapien
gcggagaagtgactaggggttggaggatagaggtcctcgggcagccctgggtggggatccacaggggaagggggctggcactctgccctgagcatcccctttaacatccacccttcccactcaggagtggagggggcacagcagcccctgtgccccaagtggcattttcagctgctctgagtttgccccggtctgaaccaggcacggtccccttcgacagagtcctgctcaatgatggaggctattatgatccagagacaggtagtcctgggaggggctgggttgaacggttggagaaatgggtgaggtgtgcagtgatatcttcccattcttgccttttccgacagtgtgaatcttcattctctgatttggggagaccccggctctttcttcatttattcattctcaggcagtggggagaagaagtagtcattcattcattcagcagatctttactgggggctggctctgcccaggcactgtt

SEQ ID NO: 4381 - DNA, 393 bp, Homo sapien
aaagaaatcatagggatagaccatcagtcaactccatattggagaaaggttttatagccaaacgcattgaaaagtttctctctcctcagcttattgcagaagaattttgtctaaaaacattttcgaagtttggatcacagcctataccagctaaaagaccagcttcaggacaaaactcgatttctgttatgcctgctcagaaaattacaaagcctgccgctaaatatggaatacctttagcatataagaaatatggagataaaaaattacacgaaaagaaaccactgcaaaaacataaacaggcccatcaaactccagagaagagagtgaatactggagaagaaaggaggaaaatatctgaggaagcagcaagaaagagaaggctggaattta

SEQ ID NO: 4382 - DNA, 298 bp, Homo sapien
agtttaaaaacaacaagcatcctttattctccttccagtctcagtgtccagaggctacggttaacaggttttcaaagtgcaaatcatttcattcctcaaaagccagaggggaataaaaactgtacatcatctccaatccatattcatcaggagcgccctggggcttgtcatcctgctggcacggggccaggtttcagggcctggcggaaagaggtctgtaggctttgggacttggtgtctggccccttgagatgagattagttctccaataacctgaatgcctcttggggaggcggca

SEQ ID NO: 4383 - DNA, 304 bp, Homo sapien
ataaagaatatgcaatccatttgggatttattgcatttaaagaaaacagattaaaacaggtatgataaatacagtaagataataactttaaatttcaaacaaaacagtgaatcagggacagaattcagtcaaaaagaataagcagtgtaaaggcaataaagtaataaaatcagttagtgcttaattagatatggcaggggaaaaggggtgggagggggagactgagtctatctcataattgtttcccagctatatttgaggactgaagttactttagcaagtatgttttgtaacaagtagaaat

SEQ ID NO: 4384 - DNA, 319 bp, Homo sapien
tatatatatatatatttatgtatttataacatagaaaattggatagaaattattccaggcatatgggatgtggttcccctgggcatgcacacttggagggcaggggctttcaggagtcacaccagatcacgcttgggacctttttagagcctggctgagccacctttccagagttccagtgagcagggggcccctcagtgcatcttccccacctcccctgcttccagggacgctgggctgcagacttcgcagctgctgccacatggggttggagcctccaacagcatcatccctgagtagacctggtccactgagcccc

SEQ ID NO: 4385 - DNA, 414 bp, Homo sapien
tttttttttttttctatgaaacatttatttcctttgaaacctccagaaacatgccagaaaatctcaagacagggatggggaaaaaaaaaagacaataaagaataataaaaaaaaaatccaaatgaaacaaatcaacatatgaaaaaaaaaacctgctgctatcttcggccattggatagaacatcaacctcaaattaaatagatctgtttttgcagaaatccttaaaaaataacagaaaacaaaaccaaaaatcataatttacacttgtccatgtacatgattaagtccccaaaatgattcgaatgatctgaagatgggaggagacaactgaaaaaaaaaaaaaaaaagggacccgatgagggtctaaggggtgggggtgggggacgggtgggcccccagagaaggggatgggg

SEQ ID NO: 4386 - DNA, 346 bp, Homo sapien
taggaaagcagatatttatttggagcagcatgctcagcttggcatgttttctttcttccttatttatatactgtgtcattcccaagaaggatttaaagtgacttcaatcaatacacaatatatatgaaaatataaattagatatacaggtaaaaaaagagcaagaggaaaacaaggcacaggaataaggctggtgcaaaactgcttctctgtgattttctacacttacaataaatagtccatttatgggctggcaggataaactcctaacaagaaaggaccctcaagacatgccatggaggaagatacattcccatgggaatgtccctataatactccatagattt

SEQ ID NO: 4387 - DNA, 268 bp, Homo sapien
ataaaacacagtatttattgatttcaaggaaactgtcttgaggatgttctatcagcgcatccacccaagtccctgggagcagggtctgaaaggctggcaccagcctgagcacagttgtggggaggaagatgggagcaccactgcctgaggctgagggagtaggatttggggaaagagggcttccactgagccaagtgatgacctgggggacctctgggtatctccagaagctctagtcaggttcattctcagccctccagacctgctg

SEQ ID NO: 4388 - DNA, 373 bp, Homo sapien
tttgtttttttttttttttggagaacacacaccaagttttattgggagaagggagtatttacaggagcaggtaaaagagagggaagtcacacagggtggagagggggcggggagactgtgggtacaaggcagacagggaacacggtgacccctgcacccaccccaaccccaggaagggcaggggagcagcgagggcccaggaagaccggggccggggaaggacagcaacagggtctgagtccctgggcaggggggctcaggggcttgtaaacattgaccactctcagaaggggatgggggtgggaaagggctccccctatacttcctcacagggttaaggcctctccaggctcatgggccccctaagtccaaa

SEQ ID NO: 4389 - DNA, 291 bp, Homo sapien
taagtcataaaactctagattttaatctcagacattttctttttggaaacaattaaagtctctttgtgctgcatcagaattcacaaaaaagctatccagtgtccatttacattaattatactggtgattgactatggctatgcagagaatgtattccaggctcaagttctactttttgatgactgttctcaggatcatcagacacctgtccgatgtagcagctggaatatttaagcatcacagtgcttttaaaatagcagacaattgctggggcttatctcactaaatgca

SEQ ID NO: 4390 - DNA, 360 bp, Homo sapien
gcttccacagaggagtgagaatatagagtgattaactttctgttcctggtttatttcacataacataatgtccttcagttccatccatattgctgtgaataacaggatttcattctttgttgtggctgaataatattccatagtacactataccacattttctgtcgttgaacacctaggttgattccatatatttgctattatgaacaatgctgcaataaacatgggggtgcagatgtctctccaatgtaataatttcctttcctttggataaatatccagtagtggaattgccgaatcatatggtagttctattttagttttttgagggacctctatactgttctccacagtggttgc

SEQ ID NO: 4391 - DNA, 362 bp, Homo sapien
agacggagtccatactctggcccaggctggaatgcagtggagcgatctcggctcactgcaagctccgcctctcgggttcacgccattcacctgcctcagtttcccgagtagctgaggtgggagtgttacctaggcctgggaggtcaaggctgcagtgagccgagactgctctactgcactccagcctgggtgacagagtgagaccctatctaaaaaaaaaaatgttgttcccaagtggcagcaaaagtttgaggtctcatttcttcctctgtagtttgagttatctggcttttctacttttatctgaagcatttgttcctgagcaataatgatgtgatgtgaatttgttttgaagttggtga

SEQ ID NO: 4392 - DNA, 310 bp, Homo sapien
tgcagagtggattgttcacataatatgtttctaattttccatgcttgatttttgcctgtatgtttgtactctgacatgtttgtactcatccacccgtcaattcatttgttcatccattccacaagtattcacaaagcccctggtcctgtgtgtgttccctgctggtgaggtctcagcgacaggtagtgggcacccttcccaatgcttacggttggtagaacacggggcaattgcatgaaaacactgcacttttataatgtattttttaaaagagcccacatagaccagttttcctaattgtctctggaaa

SEQ ID NO: 4393 - DNA, 415 bp, Homo sapien
tgtgacggagtctcactctcttgtccacgccggagtgcagtgacgcaatcttggctcaccgcaacctctgcctgccaggttcaagcgattctcctgcctcagcctcgcgagtagctgggattacaggcccacaccaccacatccagctaatttttgtatttttagtaagagaggggttttcgccatgttggccaggctggtctcaaactcctgacctcaagtgatctgtgtgccttggcctcccaaagtgctgggattacagatgtgagcacctggcctctgcttttgtacttcataagcacttcaaattctcacatacaatgtgtctccctcaaactttgttatgaggtcagcacattacccatctcacatgaaaataaataataaaaatactccaatctccaactaagtttat

SEQ ID NO: 4394 - DNA, 121 bp, Homo sapien
ccacacctgaggatttgttcaggtaaaagggtcgaataacctttcggaaccttttaaagtgccctgccggaaggggtaagagggaggtcctctctgagctgttgggtgtccaggcactggg

SEQ ID NO: 4395 - DNA, 464 bp, Homo sapien
ttctggtggagccggtggatacactctcagttagaggctcttctgttatattaaactgttcagcatattctgagccttctccaaaaattgaatggaaaaaagatggaacttttttaaacttagtatcagatgatcgacgccagcttctcccggatggatctttatttatcagcaatgtggtgcattccaaacacaataaacctgatgaaggttattatcagtgtgtggccactgttgagagtcttggaactattatcagtagaacagcgaacgtcatagtagcaggtcttccaagatttaccagccaaccagaaccttcctcagtttatgctgggaacaatgcaattctgaattgtgaagttaatgcagatttgggtccatttgtgaggtgtgaacagaacagacaactccttcttctggatgatagagttatccaacttccaagtggaatgctggttatcagc

SEQ ID NO: 4396 - DNA, 532 bp, Homo sapien
accttccaaagtttaatcaatcaactccttagaagtgaaatctaacaatcacttcaaatactctaaaattcgacagagtaaaatctcaaattactttctcatcttcctaattcttattgaaaaggagtccctccatgaagtgtgtgcactttcacgaggatgccagggaggactcactgattttcacactggataacgttgaaccgctccagtttcagaaactcatcaaaaagaggatttactacgttaaaacgttcatgtcccaagttaaaaatggatactgaatacaacagcatccatatttctggagaaaaatcagtacacatgtcacttctgttatagaaatccatttacagtgtgtcccgctccatggaagccctggtctcaggcacctccagctttaccgtctccctgcacacaccgggagcctggtaggcttcgagcagaagccgaggtcccatcaagggtccagactttccgtgcctcctttgttttcatcgagtctggggcgctttagctctgggggatgccc

SEQ ID NO: 4397 - DNA, 464 bp, Homo sapien
agttacaggggattttattaattataaaatgcaatcaatttaaattacgtaggtttaagactagtcccttggataagccccaagcgaatttgtcttcagattattaaaattagtgctgtaaatcagggtgggcaattcacagcctttctgaactgactgaactagagcttgcagtgaagtgttctgctgagactgagcaccttacagatatttttctccagaagatggtgctgggtaataaaatcatcacaattagggaatggttagtggtctctactgtggcaaatgccaactgttggaattcactttattgtagaaaaacccaaactgagactcttaagttttgtttagcaatgtgtttctggtatgaaacaaactactgtgtcactgtccaggtaggaaacaattctttcaactgggttttcagcataaatgggaactgatgtagaaggcaggatttagcc

SEQ ID NO: 4398 - DNA, 445 bp, Homo sapien
gagagggagtttcgctcttgttgcccatgctggagtgcaatggccgatcttggcccactgcaacctccatctcctgggttcaagcgatcttcccgcctcagccttccaagtagctgggattacagacgtgtgccatcaggcctggctaattttgtatttttagtagagacagggtttcgccatgttggtcaggatggtctcgaactcctgacctcaactgatccacccgcctcagcctcccaaagtgctaggattacaggtgtgagccactgcacccggccctgcccccagtcttgaccattctactaattttaaagaacatcttggaattttacactcttggaatcatagtcgtagaatcctttttttgagacagagtctcactctgtcgcccaggctggagtgcagtggccagatctcagctcactgaaacctcagcctccca

SEQ ID NO: 4399 - DNA, 498 bp, Homo sapien
catatgaaattctaataaatccattttatttgtggcaccacaatattatcattaagctctctttttacacagtctgcaatttgtatcagctgccccagtgtgactctgcccttattttaggaacaaccttttgctgggtggcgtcctagaaggtctgggcctgggcagcagccactgggaagcccacctgtgctttcccccatctgggtggggcggcacgagagaccctgagaatcagcggttatgggagctgtgtgttagctgtgtgttattggctttggcttcagcatgtcctgcctaggagtctccagcagctgtggtttccttggactggaggctttttctcctgatgacaatcgtgacaggtccatcaggcagtgccttgatgatgttccaggcttcaaaccgtgtgaggccctgcatggcagtgccacccagctgcaagatttcatctccaggctggactgtctcactttgttctgaggctgctccttgaaa

SEQ ID NO: 4400 - DNA, 268 bp, Homo sapien
  misc_feature (1)...(268): n = A,T,C or G
cagagcttttctttgtttttattttaaaggaaaaaaacaaaaaagaacaaaaaaacaaaccaaaaaaaaacagtgcaaaaacccattttccagtgtcagcctcgtcgctcgggtggcncaggcgaaaccagctgtgagcgtgactgttcataccagttagcaggagctgtggcatgatggatctactaggggatggaggctccaattaagtggagggggagattccaggaggaactgtggggtggaaaaaagggaggggggggaacag

SEQ ID NO: 4401 - DNA, 354 bp, Homo sapien
gcgaccgccaactggacggcgggcttcggcgcgggcacacgccgcccggcgttgtgggcatccggcccgcgcggcgcggcgcgcgccgctcctcgtgctggaagaattcaagacggagaagaagctgtgcaagatgttctacgccgtcacgctgctcttcctgctcctctgggggccctacgtcgtggccagctacctgcaggtcctggtgcggcccggcgccgtcccccaggcctacctgacggcatccgtgtggctgaccttcgcgcaggccggcatcaaccccgtcgtgtgcttcctcttcaacagggagctgagggactgcttcagggcccagttcccctgctcccagag

SEQ ID NO: 4402 - DNA, 522 bp, Homo sapien
acggtgagcacgccaggcattttaatccgcattctcatctcagcctcacgactgccccgtcacatagataacagtattcctgcccaccctgctccccgcatctccctactccaccccacatgcgtgtgacagatgaggggactgaggtggaacaagtttcagcaggaaggcagatccagggctagagttcgagtctcccatctcctcaattaagactctcgtttccaggcctcttcagcccacccagcttctgctcctgtggccctgtgccaacggggcaggatttgggagctaggccctcagctcagtgggtgtatctggctgccggcaggggtgagacacctggaaggcctccaagaccagcagcctcttgttgatggagctgatggtagggtagggggtgagatccaccttgaatctttcagcatttgccacctgaggcaccaagcacagatcagccatggtcacctcggtctctaaacagtatatgcccgctgtgctctgtaggatctgctccagggg

SEQ ID NO: 4403 - DNA, 424 bp, Homo sapien
  misc_feature (1)...(424): n = A,T,C or G
tgcggccgtgctgcaggagctcgccacgcacctgcacccggcgggcgngnnagggcgacacgaacgtggcgcggactacgccgcctcccgggcgcccccctgcgccagctccgaggaggaggacggagaggcagtggcacactgatgggcgagctgagcgcagagctgcgaagaggaactgtttgcagtagcagccgctgctccatttctccctctcttcctccctcttttgccactgtctgggccccatctgggattcctgggccctttggaaaagagttggtgtaatgcgcaccggctgtggacgggggaggaggaaggggacagagggagcaggtaggaaacacttgtagttgggggtggggggcgtctccctctggccccctgtctgtcttcctctccgcggtggagcaaactgtggact

SEQ ID NO: 4404 - DNA, 462 bp, Homo sapien
aaaaattctccttttattctctagttataaacatgtactcactttcaaataaaattctatattagaaggaaaggtctctttgtaaggcatagtattgactttttcttatgagaaaacaggaaatatcattagtgcttttaaaaaactgaaagcgtgagagaaaaatcagggctctatctagagaagtctaattgtttctctacaaaaaccaactggaatacaggatagctctgtcctatagcaacctaaaccagcacctcccttgatgtgcatatagaaaatctatgtcttgtggccgggcatggtagctcatgcctgtaatcgcagtaccttgggaggccaaggtgggcggatcacaaggtcaggagatcaagaccatcctagctaacacagtgaaaccccgtctctactaaagatacaaaaattagccgggcatggtggcgggtgctatagtcccagcta

SEQ ID NO: 4405 - DNA, 384 bp, Homo sapien
gtaggcggaaaccaaaaatgctgaacatcctacaatgcaggagatggtacacacaaaatgctaatagcaatgacctcaagaatggaggaaaggacaattcatctcttgtcagttttacctgcaccaggcagtgtaggacagagattcacaaatgaaacaggacattcatatcaaggtgacagagatattcagggagagatttttaagtcacaaggtgcctcttgcagcctcccttaacaaacttaactgccaaaagtgaccagaccagccgctgcacatccactgggcacagcacgtgctttttggggccaatgcttcaaaataaacccaagcattagctagaggggggcacttaccaatccgcccgatcttcatacccgagcg

SEQ ID NO: 4406 - DNA, 374 bp, Homo sapien
cacaaagccaagatttattttttgaacaccgagtacaattgacaaatctctaacaagtttgattaagaaaaaagaaagcatgaataaacaattttagggataaaaagggaaacatcgctaaagatatcccagaaatgtaaaagataataagggaatattatgaaaatattcatgccaatacatttgaaaacttaggtgacatagacaaaaacaaaattgaccaaaattgagcaaaaaagaaacaaaatctgagtagtcctataacttagtaaaaattgagttagaaaagttaaagaagtctttacacaaatcaaacatcagactcagttttctaggagagttttgccaaacattcaagtagcagataattctgg

SEQ ID NO: 4407 - DNA, 462 bp, Homo sapien
acacttaagtctgtgcattttattacatgtaagtaacacctcaatctgaaaagtatcagggcaacaccacacactgcagaggggcagggctcctccggcagttactcacttcccttgaaacagaagctcaaacatggagtagtcttctgtgactaaacttgttttccgccctcccaacttccaggaagaaccttcttctgaataggatttgaggtaacttaggaaactgctctcaatacggaattttaaagttggtgaggaagtcgacagaaggggaagtcacagtaggaaaatcaaggtactatcaggatgaagtcagcacgcagagcaaggccagcgaggcccaggcgccaggccttggtccctgcccacctcacccaggccagccagacagcacggactgccctacaaggtcacctcagagagatgggggtgttctctcactgctggcttttgatgagc

SEQ ID NO: 4408 - DNA, 497 bp, Homo sapien
cttcctctgggtgcctgctgaacaactgagctcatgtcatgggcatgtggtggtttctctgttgcctgaaagagccattaaagtcagtcgtgcgtgaacatctctcttctaaaggatgtgtatttccataaatgctttctgaggatccggtacaaaatgatttcccaaagttctgaagtgccttgagaacatgtgggtccgagtgttataacagactcctcccccgggtcaccttttgcctggtcatcctgttagagtacatctttggaaatccagggtaatattctctttcagagatgctcattgtgtaactctgtgtagggagatagtcactttaaacagctcaaagtagctagctaaaggagtagccttaaatacctaaaagatgacagaagcatagcccttaacaaatcttcagcttgtctctcagtatttcccaatcatgaaaatcccttgctatgtctttcctactagaaatgttctagaatcgctggacg

SEQ ID NO: 4409 - DNA, 432 bp, Homo sapien
ggattttttaactatattgaaaaactgaagtatgaacaccacctgaaagaatcattgaagcaaatgaatgttggtgaagatttagaaaatgaagattttgacagtcgtagatacaaatttttggatgatgatggatccatttctcctattgaggagtcaacagcagaggatgaggatgcaacacatcttgaagataacgaatgtgatatcaaattggcaggggatagtttcatagtaagttctgaattccctgtaagactgagtgtatacttagaagaagaggatattactgaagaagctgctttgtctaaaaagagagctacaaaagccaaaaatactggacagagaggcctgaaaatgtgacaggatcatgaatgtcaaaggcttttatctttagaacatggtgtctggagttaaaggtattggcatact

SEQ ID NO: 4410 - DNA, 447 bp, Homo sapien
cactttgggaggctaagaatcacttgagactaggagttcaagatcagcctgggaaacatagtgagaccccgtctctacaaaaaatataaaaattagttaggtgtggtggcatgcacttgtagtcccagctactcaagaggctgaggcagaaggatcccttgagcccaggagtgcaaggctgcaatgagccaggatcccatgatcacacatctgtattccagcctgggcaatagagcaagtccccattactaatgaacccaaaaggccaaatgactggaaagttagagttcgaggaattaccaactgtagttttagccttggttcatgctctcttgcatatttatataatctctgacttgtaatggaccctgactggaatgtgatccctcaggaacttagtagcctgagtctttcagtagactacactgcccagaaccctggccattc

SEQ ID NO: 4411 - DNA, 184 bp, Homo sapien
agaagctctgccctcagtgcaacacgatcacagcgcccggagacctgcggaggatctacttgtgagctatctgccccaggcaggcctcgcctccagcagccccacctgcccccagcctctgtgacagtgaccgtctccctttgtacatacttgcacacaggttccccatgtacatacatgcaca

SEQ ID NO: 4412 - DNA, 283 bp, Homo sapien
agatcctgcagtggagaggaggtcttccagcagcagcaggtctggagggctgagaatgaacctgactagagcttctggagatacccagaggtcccccaggtcatcacttggctcagtggaagccctctttccccaaatcctactccctcagcctcagcagtggtgctcccatcttcctccccacaactgtgctcaggctggtgccagcctttcagaccctgctcccagggacttgggtggatgcgctgatagaacatcctcaagacagtttccttgaaatcaa

SEQ ID NO: 4413 - DNA, 124 bp, Homo sapien
attcttccaaacttaggataaatgctaaaaacattaaccatacaagcaaagattaaattagcctatattaatcataataactgtttatcgcacatgtaccccttaacctaaaagatgaagaaga

SEQ ID NO: 4414 - DNA, 410 bp, Homo sapien
ttatctttgccagcctcaaaaataaggtcaagaagaaacagtctctcggtttacagttggacagttgtagcctcaagaacaaatgaggtattaatattagctaggaatctctgacaaggaccagaacttgcatcctcagatatcttcagtgttgtgggtcttcagcacagccttgaagataattcctaaaaaggctcagtccacaaaaatatcaccaacttcaaaacaaattcacatcacatcattattgctcaggaacaaatgcttcagataaaagtagaaaagccagataactcaaactacagaggaagaaatgagacctcaaacttttgctgccacttgggaacaacatttttttttttagatagggtctcactctgtcacccaggctggagtgcagtagagcagtc

SEQ ID NO: 4415 - DNA, 382 bp, Homo sapien
tttaaccagaaagatttcgatcaaaggaggggctgccatgacagacagcctcccttggcttgctggctcaggccttggagttccaggagcctggcagatccctataggtaaagcctgaagaggtcagattagcaaaagaagtctatttaagcatccttttcaatgcaccttttattgactacctactttgatctgaccccaatgggcccattttctcctccccctttgaaaccccaagtgcttctccctatcaaccctgctgcaggaggctcctctaacatagccatttcctaaggagaaatctgtgaacgtccccaagcccttcctgcatgcagcccttcaacacatgcaaaagcagcttcggtaagtcagtccctgtatc

SEQ ID NO: 4416 - DNA, 458 bp, Homo sapien
accactttaatctgtccttgggcttcagacttaaatattctcttaaacagcaaaaatactaactaagttaaatttaaaagcaaggagaagcatcattgtaatacgacatccatgtgtattcaaactagaattttctgatggtcttcgtaagataaaggagataattgtcatttctatgacacagcttttataatttgaataaacttagttggagattggagtatttttattatttattttcatgtgagatgggtaatgtgctgacctcataacaaagtttgagggagacacattgtatgtgagaatttgaagtgcttatgaagtacaaaagcagaggccaggtgctcacatctgtaatcccagcactttgggaggccaaggcacacagatcacttgaggtcaggagtttgagaccagcctggccaacatggcgaaaacccctctcttactaaaaatac

SEQ ID NO: 4417 - DNA, 535 bp, Homo sapien
acctgtacttcagtcacttcacattcaaatacaatatccatagattcgtgagcatatatattagtaggctgcttcaggaattcaggttgagcttgcactgtaagctctgcttgagcttcaattgtctcatttccattatcagctatacaaaaataagtcccagcatcatcctcagtaacatcactgatctccaggctaccacctgccagcaataccaatctttcagagctttctgtgtcaagtgcctcctcatttttcatccatttaatggttggagtaggaagtcctgaagcaacacatggcaacactacatcctgaccaatgactctgactaagggagaaggctgtttcaaaaataccaagtctgatatcacctcaggatctggaagaaccttcaattcaacttcatcactatactttggtggcccccactttccactacgcagcgataaagcccgccatctccttcagttgcattgctgataaccagcattccacttggaagtttgataactctatcatccagaagaagggg

SEQ ID NO: 4418 - DNA, 532 bp, Homo sapien
cactcccgacggatctttgcttctcacgccagctggatgtgtggaatctggtgaaaatgtaatgaataccacttatgttttctccaggaagaatcttaaaaggcccatcgctcatcttccatgtcctggaaaagccactcttgctgttcgctgctgtccggtctactttgaactgaggccaatggtggaaacaggtgtggagctgatgagtctgccctaccgcctggtgtttgctgtggcctcggaggattccgtgcttctgtatgacacccagcagtccttcccttttggttacgtgtctaatatacattaccaaaccctcagtgaaatttcatggtccagcgatggtgccttcctggccatttcttccacggacggttactgcccatttgtgacatttgggaaaaatgaacttggaattcctttgaaaaagaagccacttttgaaaatgggaactcctgttaaagcaaggaaaaccacgggtctgagacatcggggtgtttttccaggaccccaaccgctaaaggggacc

SEQ ID NO: 4419 - DNA, 112 bp, Homo sapien
ctggactcctgggaatctggattaagaaagttgggatgaaagaggaggactgctcaggccagttgtgagccagggagaatgttccagtctggttttggtctggtggctccta

SEQ ID NO: 4420 - DNA, 543 bp, Homo sapien
ctgacaacttctccggctcaggtgcaggtgctttgcaagatatcaccttgtcacagcagaccccctccacttggaaggacacgcagctcctgacggctattcccacgtctccagaacccaccggcctggaggctacagctgcctccacctccaccctgccggctggagaggggcccaaggagggagaggctgtagtcctgccagaagtggagcctggcctcaccgcccgggagcaggaggccaccccccgtcccagggagaccacacagctcccgaccactcatcaggcctcaacgaccacagccaccacggcccaggagcccgcaaccttccaagcccaaagggacatgcagcctggccacaatgagacctcaacccttgaaggacccagccaagctgaccttcacactccccacacagaggatggaggtccttctgccaacgagaaggctgctgaggatggagctccagtcagctcccagcagcagagggctctggggagcaggacttcacctttgaagcctcgggggagaataaggctgt

SEQ ID NO: 4421 - DNA, 346 bp, Homo sapien
attcattgtcagcaacctcaacccagagagagtcgactccaaagcatccttatcgcttttaggggtctacggtcacgtgcagcgcgctgaagatcctatgcaataggagtgataacgctcctatttcacatcgcgggcgggaactaggcgcagctggccatgtagtacttcagcgtgcacaagcggcacgcggagcccatccgcatcacgctctcaaagatcagaggcgtcagctggcctgcgaggcaatggacgcccatggccgtgacgagggcctggggcaacgtgcccctgcaccggttcaagaagccgggctctaacagcttccaggagatatgcccgccct

SEQ ID NO: 4422 - DNA, 445 bp, Homo sapien
tgctgtttcattgctgacagtgttcaacaatatgccccatctttatatatcctaagaaacactaatcctaggttattgctagccaaaatatttttgtcctgagtagtgtcactgggccaaaagatagatcaggacgacagcctttagttttcctgaaatcaccaggtcaggcacaaggagaaaaggttcctggatactgactaacttgggtgggtctagccaggagaaagacagtaacatgtgttctgtactttctgggaagatccctgaagccatcacagaggctccccaacttctgagtcgcccatctgttgctgtgggagtgtgaacggatcgctgaaggagagggagctttgctctctctaggtgggcaagtttcctgggctctctgtgttgcctccctctggcttcttcctcccgtgccctctccccgtgtgccccaggg

SEQ ID NO: 4423 - DNA, 417 bp, Homo sapien
ctgaatataagcacaggaacactcgtgaaacccaactgagcttttcttttgcctagaagggctaaatcctgccttctacatcagttcccatttatgctgaaaacccagttgaaagaattgtttcctacctggacagtgacacagtagtttgtttcataccagaaacacattgctaaacaaaacttaagagtctcagtttgggtttttctacaataaagtgaattccaacagttggcatttgcacagtagagaccactaaccattccctaattgtgatgattttattacccagcaccatcttctggagaaaaatatctgtaaggtgctcagtctcagcagaacacttcactgcaagctctagttcagtcagttcagaaaggctgtgaattgcccaccctgatttacagcactaatttt

SEQ ID NO: 4424 - DNA, 408 bp, Homo sapien
agcttaccctcttctccacctgctccccggctgcccgcaccttccgggcctccgcggcgaatttctttttccccttggtccttctcctgggtctggccatctccagcgttcccctgctttacagcatcttcctgatcccgccttctaagctgtgtggtccattccgggggcagtcgtccatctgggcccagatccctgagtctatttccagcctccctgagaccacccagaatttcctcttcttcctggggacccaggcttttgctgtgccccttctgctgatctccagcatcctgatggcgtacactgtggctctggctaactcctacggacgcctcatctctgagctcaaacgtcagagagagacggaggcgcagaataaagtcttcctggcacggcgcgctgtgg

SEQ ID NO: 4425 - DNA, 454 bp, Homo sapien
  misc_feature (1)...(454): n = A,T,C or G
agtgttgatcagtttactagtatttttccaaacctgaagaatggtgaaagtttgtggtacagtgtggggaaaacagtaagtgtgggccccggggncggccggcgagcccccccgggcttgccggccccccgcaccaagagggggttggagtgtgtggtctctaaggcactgaatttcagtctgttctccatccatcagtggatatgtgagatgcaatgcaggggtgctggcctgtccctggtaatgagcgaggatatgagcaaagcagtgagtacagcctggaattccagctactcaggaggctgaggtacgagaatcacttgaacttgggaggctgaggtttcagtgagctgagatctggccactgcactccagcctgggcgacagagtgagactctgtctcaaaaaaaggattctacgactatgattccaagagtgtaaaattccaagatgt

SEQ ID NO: 4426 - DNA, 524 bp, Homo sapien
  misc_feature (1)...(524): n = A,T,C or G
gctggcctctgtgccacgagctccaatctaggacacaattatctttaatctttgttggcctaaaaatcctctagcattgactaaccggttcaatcctcctccagcaagtatgtggacctggacagngnggaanttcgggcctgacttcctttggtttgctcaggttcacagagtgtttccaaatgggctggcctcccaggaagggactattcagaagggcaatgaggttctttccatcaacggcaagtctctcaaggggaccacgcaccatgatgccttggcatcctccgccaagctcgagagcccaggcaagctgtgattgtcacaaggaagctgactccagaggccatgccgacctcaactcctccactgactctgcagcctcagcctctgcagccagtgatgtttctgtagaatctacagaggccacagtctgcacggtgacactggagaagatgtcggcagggctgggcttcagctcggatagagggaagggctccctacacggagacaagcctctcacc

SEQ ID NO: 4427 - DNA, 482 bp, Homo sapien
cgtacatttcctgacatcaagatgttgaatgtaatctggtctgagctgggcctgtgggaggggccgcctgaggctgtgcgctgttgtcctcgcagatgtacttatttttgttcatgatacgggcgttccgttccttaaagatgtatatattttcttactgtacataaagatgttccttaagtcgtacagaaggtggcgcggcaaagggcctcgtgcagtgtgttcagattgcccctggggatcttctgtgtcttcagcgcccagccctgcgtgttcctggtgaagcagtttcacatcagtctctccagatagcactacgatgtattccgcttctgaacaggatcccatgccagtgtggaacaccttcccaatcttagttcagaagtggcttgtatgacctgttcaggggtcacatgaggtctcgccagtttcctgggtcctcttcagaggccagaaagttctaagttctgagtcccggccag

SEQ ID NO: 4428 - DNA, 423 bp, Homo sapien
cacccccactcccacggacactaaaacgctaataatttattagatctaaagccccttcctccccagcccctgctttcattaaggtatttaaacttgggggtttcactgctctgcccccacggaggagggagggagccccccaacctcagtgaggagagccccgagccggccccggggaaagaggggtgcagagggagttccccagatcagtacccccaacccctccccagctagtagcatgaccaggagagggttaatgagagccaagaggagtacctggtgcacctggtgacggtggctggagacctgggggacacgtggatctggggctgttccaccccctccgttttttccaccccacagttcctcctgggatctggccctccagggaagtggagcctccagcccctaggggatgcatga

SEQ ID NO: 4429 - DNA, 502 bp, Homo sapien
aacgccatcacttgtggctttaacgccctggagcagatcctacagagcacagcgggcatatactgtgtaggagacgaggtgaccatggctgatctgtgcttggtgcctcaggtggcaaatgctgaaagattcaaggtggatctcaccccctaccctaccatcagctccatcaacaagaggctgctggtcttggaggccttccaggtgtctcacccctgccggcagccagatacacccactgagctgagggcctagctcccaaatcctgccccgttggcacagggccacaggagcagaagctgggtgggctgaagaggcctggaaacgagagtcttaattgaggagatgggagactcgaactctagccctggatctgccttcctgctgaaacttgttccacctcagtcccctcatctgtcacacgcatgtggggtggagtagggagatgcggggagcagggtgggcaggaatactgttatctatgtgacggggcagtcgtgag

SEQ ID NO: 4430 - DNA, 489 bp, Homo sapien
aattcggaacgaggttttagctgttcttaggtagctcaggctgaagcgcagtggctgtgagctcggcttactgcaagctccacctcccgggttcacgccattctcctacctcagcctcccgagtagctgggactataggcacccgccaccatgcccggctaatttttgtatctttagtagagacggggtttcactgtgttagctaggatggtcttgatctcctgaccttgtgatccgcccaccttggcctcccaaggtactgcgattacaggcatgagctaccatgcccggccacaagacatagattttctatatgcacatcaagggaggtgctggtttaggttgctataggacagagctatcctgtattccagttggtttttgtagagaaacaattagacttctctagatagagccctgatttttctctcacgctttcagttttttaaaagcactaatgatatttcctgttttctcataagaaaaagt

SEQ ID NO: 4431 - DNA, 385 bp, Homo sapien
  misc_feature (1)...(385): n = A,T,C or G
gacgntcggccctcagagcccttgcccgctcgggtatgaagatcgggcggattggtaagtgcccccctctagctaatgcttgggtttattttgaagcattggccccaaaaagcacgtgctgtgccagtggatgtgcagcggctggtctggtcacttttggcagttaagtttgttaagggaggctgcaagaggcaccttgtgacttaaaaatctctccctgaatatctctgtcaccttgatatgaatgtcctgtttcatttgtgaatctctgtcctacactgcctggtgcaggtaaaactgacaagagatgaattgtcctttcctccattcttgaggtcattgctattagcattttgtgtgtaccatctcctgcattgtaggatgt

SEQ ID NO: 4432 - DNA, 521 bp, Homo sapien
cggcactaggattttaatctttacaacaaacccttaaagaaggcaaggcatatgaaattacccttgtattcagtaaactgttgaggtcaaggtgtttattaagacccatgccttctggatagactaacagggatcaaaacaaaaactgactcttagtcaataagtcaaacacttttgattcctattacaagtaaccatttttatattaatatatacttattggccacccttccttcttttgtgaaatgcctattcatttattttgcccattcaaaatttggaaagctcattatgttggtactgttttgtaagggctctctataaaatatattttatttcttttacttttttaataatttgaactttgactttgttttattaatttattaacaaattttaattcaaaataagtgaatattaattccatatctggcaacaggtggactagatgtctggcgaataacacctaatataaaacacctgtcacggtgattgaaaaaaatcaacagctatctcattaa

SEQ ID NO: 4433 - DNA, 117 bp, Homo sapien
taagaccatttcatcacatactttattggacatctcctgtggctggtcactgggatagagtaaccaggaaatgcagtcggccctcatgaatgaacaaaacttacaaccccaggaggg

SEQ ID NO: 4434 - DNA, 389 bp, Homo sapien
caatctttagatgcatttatttggagagaaacttgcaatgggatagtttccaactttcaacatccgagtaacggtctcatattctgggactctgctgccacccaatggctacaggcagtattgctgcttgttgtgtacacgctgatggcggctgaggctcgagtggcaccgaaaggctttctggcaacgttgacactgataaagtgtctcctgggtgtgaactctcaggtgctggttgagatgggcactgaggacaaaagctttgccacacacattacaggagtaaggcttctcccctgtgtgaattctctggtgctgtgttagatttgctttctgggcaaaaggttttcccacattccacacatctgtaagggcttctccccagtgtg

SEQ ID NO: 4435 - DNA, 274 bp, Homo sapien
aaaaggtttagtgaaatgtttattttaaagtttgattacatcagctataggagtaaagtgctaacttacaaagcttacagtttgtgacaccagtgataatgcatgcatactgctattttcaccaccaactggtgaaacaatgaaaagacagtttacttttactgagataccgaaatgagtcaaagactatattagccaatataattcctttgtttttagtgtgaaatactatggtagggcctaattaaaaataaaaacaatatggagaacagta

SEQ ID NO: 4436 - DNA, 121 bp, Homo sapien
tcctgataaatctatagtggtagtatgaggctgatctgtgtgcaagggaggggtgctagaggactgcttcacattgatgggaatcattatggagatcagccactacaactttgggttcatt

SEQ ID NO: 4437 - DNA, 423 bp, Homo sapien
gcggccgcagccccgcgtgcgtttccagcgcgccccccggcatccgcggcggctcctcccggcggaaggccgacaggaagtggcggtccgggtcgaggaaggaggggaagcccaggccctcttcccggggtggcgggaacaggaggtgcgctcgtttagggaaggagaagggggttggcgccccgaccccagggacgcccacgagaggcccggccccggcatacggagccagggcataggcgtccatgcgggccagggcgcggccgagggcacaagcggctcggactgcgcgaagaggatgcggaactcctcgtcgaagctggagaccagctctccttggaacacgtgcgccaggctgcggtggatcttctcaaaggaccacatgaagctgtagctcccactcatcaccacggcacagtccac

SEQ ID NO: 4438 - DNA, 465 bp, Homo sapien
tcattactcatatcttgtattttatttcttatgaaaatggctacccaaagaagtcattgtagcaggctactattttaaggcagcaactgtataacttaaatgctaagactcactccataagacagaaaacccttccccagggctgtaatgggcatttaagtttcccaaacccagggacaactaatttttattacctattgaatagaaacaactggattttaatagttcccctcccctatagctgaaaaactccacaaacaataattgactctatctacatgatctgttgactcacgccagaaatagttactaaaacacttagaattgtgatgttcaaactggcctctggctacttctaggggggttatttggtgttacgcaatgacatattgccagcgacatggtgaatatactgtctttatagtcagcaatgtttagttgaggctaatcacgtatttatttttt

SEQ ID NO: 4439 - DNA, 540 bp, Homo sapien
  misc_feature (1)...(540): n = A,T,C or G
gcgtccgcgaccctccagccgctgcagcgcggacggcggcatctcgtcgtataggcggtaggacaggttccgcagacgcacaccgcgttctccacgctcttgtcctcgcatttgcccgcgtccagggcgtggttgatagaggtgaccagggcgtccaccagcccgtggcactcccgcatcttctggcgagtggcctgagaggctgagctgaggttcctgaggaagccggtgcgtatgtagaagatctctgcctccgaggcgttctgctggatgagggggggaccccagcccccgacacgtcanacgaccacggtcctgtgagctgctccagcgtgtctctggccaggcggtccttcaggtggtcgctggatgaaaggttccacaggatccctgtgacatttttgcgaactcatcatcctgctcccgcagtgtccgcagcagctcgaagatcacgttctcctccaccagggccagcttgttgtcagcgttgtcgtagatgaggttgcgcatggcacctgtggcatggcgctgcactttctg

SEQ ID NO: 4440 - DNA, 311 bp, Homo sapien
aaaatgaaactgcatgagaggcttgggacccagcctgcatgggtttcctcggcaaggacaaggcccgtctagcacctgggcccatcacaggaatggtgggggttagggcagggctgaggaaaatgcccggcctcacagagtggggaaaagaggctctctgctcccggctcactctgcagaaggtgccatgagcccagggctccgtgggcagtgcatccctcctgtgtcctgcctgcttgtggcagggacacggccaagcagggctgctgctgggcacgcagggtacatcctccctagaaggccacccgggg

SEQ ID NO: 4441 - DNA, 505 bp, Homo sapien
agatgtataaagaagccaagtttattacaaccgaagccacaaaacatggagaagacttagtgtggagaaagtaaacagtcaaatgtcctttgaccacttacagaatgcatttctctactccatttcatcaaagtgtcaacattctgactcttagtccttgtccccatctttgccttcagagagagtataaggaatccgaagtgtgccctgcacacggctcagggtcgggctgcactggcagtctgtggtggacagacgtggtcttcctgtgtctgctgaggtgagacttgaggctgaagccccgcccacacgtcttgcacacatatggcttctcccccgtatgtgtcatttgatgtaaggtgaggtgtgacttttggagaaagccttggccacactctctggacacacaaggcttctcttccgagtgagcccgcttgtgtgtaattagagctgacttattgccaaaagccagtccacactgcctgcacatgtagggcgtctcccc

SEQ ID NO: 4442 - DNA, 471 bp, Homo sapien
ccaccaatatttattgtgaatttattggatagtgtattttccatatatttatgtgtcatgacctacatttaactccaaaggaaatatgcaatctatataaatccatttttctgccttctagaagcttagtctacggaggaaacatatgaacgcagaccattaaaatacaatgtgatgaagattttaacaattacaatgcactgaagttttggactgagggctgtgggagcaataatacagtgcttcgaacttaagtaaaatgaaacaagaacagttttactaacatgctgagaacatgaaagttcagagtttggcatgcaaatgctgagggctgaggagtaatcatgaggcagaggagctaggaagcatatacaaccctcccaagattttcattgacagtaaggagtaagctaaggtgtaaactgagcaggagacagtatcaagaaaatgatttaaattatgtctctgagg

SEQ ID NO: 4443 - DNA, 434 bp, Homo sapien
ttgccagggcggaccgtctttattcctctcctgcctcagaggtcaggaaggaggtctggcaggacctgcagtgggccctagtcatctgtggcagcgaaggtgaagggactcagcttgtagcccgtgcctgagtagaacttgttctggaattccacccagtgcagccgcagggcgtgcaggaaggctgagagtccctccatcaccagcaggatagccacggtcatcacggcaaaggcggcaaagatggggaccagcaccacagccgccacgcccacctcccggcccaggcccaggcctatgcgatcaaccatggcccaaggacctcggacaactgggcctggggcaagcttaagggcccaaggcggcagttaagaagccgtttttgaaaaccaagccaaggaggaactgaattgtttgattggctgttgaatgag

SEQ ID NO: 4444 - DNA, 98 bp, Homo sapien
gctcttgcggtaggagctccagacactgccgctggtctgccctttgacctcagtcaggtcgcctacactgactgtctcgaagatccctgtgttgaggt

SEQ ID NO: 4445 - DNA, 242 bp, Homo sapien
tagcttccacagaggagtgagaatatagagtgattaactttctgttcctggtttatttcacataacataatgtccttcagttccatccatattgctgtgaataacaggatttcattctttgttgtggctgaataatattccatagtacactataccacattttctgtcgttgaacacctaggttgattccatatatttgctattatgaacaatgctgcaataaacatgggggtgcagatgtc

SEQ ID NO: 4446 - DNA, 103 bp, Homo sapien
tccgaccaatatggtttatttctcccccagccaagcttctttggaccctggctgggggaaaggcaccccaggcaccggcaagttccagtcattgcagatcctc

SEQ ID NO: 4447 - DNA, 440 bp, Homo sapien
gaatggttaaaaattcatttttaatagtattgctttaacatagacatgctaattttctcagacaatttagaacagaattgggacagtagtagcttcccttcttctccttactctcctagcctctctctttgaaagacctaagagccttgttcttcatagcaggtgctgatgcccaaagggcgattataagaatcctatagcctccccccctccccgccacacacatgagataataaagtaaatacagagaaaatggatggaagggagggaaagcactcccagcctttgattcttggtagttatgttcaagtggggcacttctctttgaaaagtgaaaatgtttctcacggtacagaatttatgggcagacaaggagcagacttaactgatcccagcaaacagttccttccttttcctaatccctggctgcttattttagc

SEQ ID NO: 4448 - DNA, 421 bp, Homo sapien
ttcctagcatccagtatctataattcattgtttacatatttgtcatttgtaataactgaactcttgtagagaagcagcagatattattcacatgtgaatttctatcaccctgagtaacacagaatacttgaatgagacatttttatttagagaatgggagttttaatagaaaagacaatagagcttaagactccctgggagagcaggccagacatggagagatactggtctatttcttttactggtaggttaatcttaggcaggttatttaatcttgtttaatcttttatattacaataattttaattatataaaatgtgagagtgtgtgtatacatacatatatgtgcatacattttattaaaacagtacatgttcatcgggttttcgtttttgttttttgttttattttgagacagagt

SEQ ID NO: 4449 - DNA, 435 bp, Homo sapien
ttttaaaaagttttattgagatataattcatataccatacgatttacccatttaaaatatacaatccaataattttaagtggattcacagagttgtacaactatcagcacacaatcaattttagaacatcacccttaaaagaaactcacactcattagcagaaattctctattttcccccaaccccttaaccctagcaaactactaatctactgtttctatagatttgcctattctggacatttcatataaatggagtcacacaatgtgtggtctttaaagctgacttctttcccttatcatatgttttcaagattcatccaagtcatagcatgaatcattatttcattgtatagatatgccacatttaatttttatccagtcatcagttgagcatttgggttgttcccagtttttggtttttataaataatgtt

SEQ ID NO: 4450 - DNA, 413 bp, Homo sapien
taagcttttttttccaagttcattcattcactagtagtttattgagcatctactatttgcagtatagctaacaaagccaaaatttggtgggatacgaataaaagatggtaagtacaatgaggaaaatgaagtggggatgaggttggagactcgcatgaggactgaccttggaggaagtgtaggattctggagatgaattggaatgcaaggcatactgagatctgccctaaagatgccaagccaggctgggcgcgtggctcacgcctgtcatcccagcactttgggaggctgaggcgggcagatcacaaggtcaggagattgagaccatcctggctaacacagtgaaaccccgtctctactaaaaatacaaaaaattagctgggcgtggtggcgggcgctgtagtcccagttac

SEQ ID NO: 4451 - DNA, 438 bp, Homo sapien
tttttttttttttttttttaacacatattctgtattttatttgtatcatatatttttatgataaagtaagacagagaaaacaagatgtactttaaaaaatcattaggaagaggccaggcaaggtggctcatgcctgtaatcccagcactttgggaggccaagtcaggcagatcacctgaggtcaggagtttgagaccagcctggccaacatagtgaaaccccatctctactaaaaatacaaaaattagccgggcatggtggtgggcgcctgtaatcccagctactcgggagactgaggcaggagaatcacttgaacctaggaggcagaggttgcagtgagccaagatcataccactgtactccagcctgggggatgcagcgagactctgtttttcttcttagcctgttcaccacttgacatggaaatcacttggtttc

SEQ ID NO: 4452 - DNA, 414 bp, Homo sapien
aaagagcttctaacagcttctgtccatttattggttggatgacaaatgaaaaagtttctttggccttgacaatctccatcaaagaaaccaaataagcatgttaaggaaacatacagtatatgaacagttaattcttgtattgcttggacatcaataaatctaataaaaacgaccaagaatagtcactcagttttacaatatagaaggcagagaaaactctgacactccaagttgtgaagacaatgaaacattccagtactccattagaggactttttgtatctacagctgcctgtgctttgaaggtaaaaacccagaatttaaattcaaacatattcagttaatgcacttatgcattttacaaatttttgttctggtatagcatatgaaagggagctatatctgcccccatttc

SEQ ID NO: 4453 - DNA, 136 bp, Homo sapien
tttttttttttttttttttttttttcctttttccccttctttattaataaattttatttttagcacaatcatttacccaaaaagagagtttgagaatgttcgagaatctctaccactcggtaaccatgctggctgt

SEQ ID NO: 4454 - DNA, 500 bp, Homo sapien
gcggccgcacctggagcccgacggcctgcggaggcaagaaactgctcaacaagtgcgccgcctcagccgcggaggagagcggggccggcaagaaggacaaggtgaccatagccgatgactactcagatccctttgatgccaagaatgatctcaagagcaaagcaggaaagggggagagtgctggctacatggagccctatgaggcacagaggatcatgacagaatttcagaggcaggaaagtgtccggtcccagcataaaggtatccagttatatgacaccccttacgaacctgaaggccaaagtgttgactcggactcggagagcacagtcagcccccgactgcgggagagcaagctgccccaggatgacgacaggcccgccgatgagtacgaccagccttgggagtggaaccgggtcaccatcccagccctggcagcacagtttaatggcaacgagaagcggcagtcatccccctcaccttcgcgggaccggcggcgc

SEQ ID NO: 4455 - DNA, 472 bp, Homo sapien
tattgagcaaaatttatttttatatgtacatacaagagacatattctttgacatataaaaaatacagaaatatttacatgtatacaaaaatattaaaacagatttcagaaataaggaaaacaagcaagtttttacaaaggatactttcttgggaaatacacacaatgaaaaaaagctttagaaaggtgacaacacatttaatagactccagaagttgatatttctgttggtatcaattgagtaagaggaacataaaatgtctgaaatgctaacagatggaaaaccagacatatttaagactgtctaggtaaaattgcatgggtttcctttaccataaaattgaatcaatttttttttaccctcagtatcactatctacttttcctttttgcttaaaatatttaaattgtttgatttgtattgagaattttaaactttttctcattaaattgtaaaaatattttaagaggttg

SEQ ID NO: 4456 - DNA, 156 bp, Homo sapien
tttttttttttttttggctggtgagagagaagcctttaatgaaagatgagttgcaggcttggaccgctactcttgcgcccttggggggggtgggggtggggtgggcaggggtggggttatggagagggataagtggggtgaggtggaagcaggggg

SEQ ID NO: 4457 - DNA, 412 bp, Homo sapien
tcgtatggctaatggtgacacactttattaatttaaaaacacgcccttcccacatagtgcgtgaggcatgtgcacattttcctagaaggacatgaatagtgatgtggaggtacggtggaggtcaggcatctacagggtcattcgaggaggaacagattcaagctttcggacgatcagtgttttgtaaatagcagcatcatcagatctaagacaacattggacctggcagggctttttctttgggtggcattaattactccagattcagaccaggccatcctctcccggcccaggatctgcctctccctcctctgtccccacacctagacatgaaagccataacccttgggcccctcagagggaaaacacaaggggtgcgaggggttggggggcggcgatggggggcatgttg

SEQ ID NO: 4458 - DNA, 490 bp, Homo sapien
ttttttttttttttagacaaaccacaactgtttattggtgaaagactcagcttcctcatgtgctcgctgcaaaataaataaaataccagatgctagtatcgtacactatttacaacctgcagctgaccaagcaggtcctgaagccttctctgtggaccagtactgcactcttctgaggctacgggagaggtccagcagccgggccagggactaaaaggaaacgaaggatctgttttatttcgagctcgggggcaggctgcacttctcgcagatctgaacgggcagcatgtgagtcaaggaagtactgtttatggccaccagcagctgcaacttgcccatacagtcctccagcgccgcctccgggtggtctcccagtcgcaagtccacgggccgcgagaccccagcatgctccgccagcgcaggcagcagatcgccggagggaaggggatagctggtgaaggatagtcggccaactcagtttgccaccccc

SEQ ID NO: 4459 - DNA, 463 bp, Homo sapien
caaaaacaaaaagatatgaaatttaatgtgaatggactatgaaagtttttaccacctagagattttcagaattagaatgcattttcttcttttaaaatactttatcacctgttgaaatatgaaagtagttgaacaaaagcttttttatttttcactttagatcttatcatatttgtaactgtgagcattttttgtaaataagattttcatgacctaggtcatattctacttgtttttaaaatatagaatatatttaggtatataaaacttaaagctttttgtatcaccataatgtgtgcatgcacacatacactgaaataaatgggaccaaccataagataatatctgcaatgcttggtaatcaaaagtttatttttatttttatttatttatttatttttttttttgaggtggagtctcgctctgtcttccaggctggagtgcagtggcgcaatctcgggct

SEQ ID NO: 4460 - DNA, 500 bp, Homo sapien
gcatggttggggggcatcagcaggacaaaccaacaggtactccgcaagtgtactggcacagcaagcccaccaattattagcagctcttcatcagcctgctgtctactcagacgcttgcctactgaagggacctgtccagagatcttctggaatcccaggttgggaatctctgcagaatgtcgtgacagttgtggcccaactagcttctgagtagaaacaaggaagctaccctgagatatagtcagctgcccacctgccatagtatttgctactgaatgccagccttttaacataccatttcagatttgtccttcaacaaaaatataaattgcaagtcataccatttaagggtcttttacaaatatgtctaaattgtgtgtcatttttaagttccaaaggtctactggactaagtactatcagaccagctgtagaacctgatggcgctgatccggggtggaataaccctcagtactggtgtgtagaagatgaattgtaggc

SEQ ID NO: 4461 - DNA, 150 bp, Homo sapien
gtggaaactaagccactaattgagtttctgactcccctcctggggttgtaagttttgttcattcatgagggccgactgcatttcctggttactctatcccagtgaccagccacaggagatgtccaataaagtatgtgatgaaatggtctt

SEQ ID NO: 4462 - DNA, 109 bp, Homo sapien
gacctaggatgatcaccagtaagacgccatctaatgtgtagcagtcctccagcaccccaaccctgcagacaggacagcctcctacgatcacgatagagttggcaggata

SEQ ID NO: 4463 - DNA, 498 bp, Homo sapien
gccttctcgacgtggacatggatggctcctcgggtacatactggccagtgaactcagaccaggccgtgctgagcttgatttgggctggctctgaccttcggcttcagggcaccgaggtgacaccttggtgcagccaccgccccccgacagccccagtatcaaggatgaggcccgcaggatgatccgttccgcccagcaggtggtggccgtggtgatggacatgttcactgatgtggacctgctcagcgaagtgctggaggcgcggccgtcgggtcccagtctacatcctgctggatgagatgaacgcgcacacttcctggacatggccgacaagtgccgtgtcaacctgcaccacgtggatttcctgcgcgtacggactgtggcgggccccacctactactgccgcactgggaagtccttcaagggccacgtcaaggagaagttcctgctggtggactgtgccgtggtgatgagtgggagctacagcttcatgtggtc

SEQ ID NO: 4464 - DNA, 526 bp, Homo sapien
ggcgcctggaacatctccctagcaaccgtgaagcaccttgttattagggatgataaccacaacttccctggcaactgcagtgtccgacaatttagaagggaccatccttggcggcttctctgaatatactgagtttggttgctaaaggactcatagcttagcaaccatagcccttcaaggcttttcatggctgtggcgggccccattaggtaccaaaagaagaagaaccccattgtcagtgaactgtaccacccagcccacccaccttcctaccctacaggcaccctctgggccaccctcccttgctgccctagcaagtctgacagccagagggccattgcctggccaggatcccttccttagcatccggggctgggacactagcaggcgtcgggagggggcctggctgagctgcatgtctgtcccccaccctcatcctccaccccccagtccggagaaggcggcttccttggagtatgactatgagaccatccgcaacatcgactgctacagcacagatttctgc

SEQ ID NO: 4465 - DNA, 471 bp, Homo sapien
ccaggcaggatgccagtctttgagctgagattggaaggcagtgaggctgcagggtgccaagaatttccccaggggttcacccagcgagggaaggggctacatgccccagctgtgtgcagggaggacacatcagcccactaccgctgccaacaccaatgcctaaaacttgtttcatacattggggttttctatatatttcagttgggaaaagcttacatttaaccttttgaaaaaataaatacgtgattagcctcaactaaacattgctgactataaagacagtatattcaccatgtcgctggcaatatgtcattgcgtaacaccaaataaccccccagaagtagccagagcgcagtttgaacatcacaattctaagtgttttagtaactatttctggcgtgagtcaacagatcatgtagatagagtcaattattgtttgtggagttttttcagctataggggaggggacta

SEQ ID NO: 4466 - DNA, 371 bp, Homo sapien
ttgaatttaccatgatattatttatcacagaaatgaagtgaaaccatcaaacatgttccaaaagtaccagatggcttaaataatagtctggcttggcacaacgatgttttttttctttgagacagagtctctgttgcttgggctgcaatgcagtgatgcaatcttggctcactgcaacctccgcctcctgggttcaagtgattctcgtgcttcagcctcccaagtacctgggactacaggtgtgcaccaccacaccaggctaattttttgtgtatttttactagagacagggtttcaccatgttggccagcatggtcttgaacgcctgacctcagatgatccacccaccttggcctcccaaagtgctggga

SEQ ID NO: 4467 - DNA, 252 bp, Homo sapien
cctcgcggccctcgattgtatcaagggcttaggcgacacgaaatcattctcatcctttgggaagtctgatcgtgtacttggaagtggacgtcaacgcgaatccgtctcggtgagtggtgctagagctgactgcagacgtcgtcgcatatacagctgacaactttatagctccgagcattcgtgataagggctttggctacaaaggtactacagattacagggtgattacttcctttaatgtgtcatggcggg

SEQ ID NO: 4468 - DNA, 461 bp, Homo sapien
caccggagccgcggggtaggcggggcagtgcgggggcgtcctggagccagtggtcgagcgccatctgtgcgacctcagcctcagcctggctgactcgggccacctgccggacgtgcatgggttcaacagctacggtagccaccgaaccctgcagagactcagcagcggttttgatgacattgacctgccctcagcagtcaagtacctcatggcttcagaccccaacctgcaggtgctgggagcggcctacatccagcacaagtgctacagcgatgcagccgccaagaagcaggccgcagcttcagccgtgctaggctggtgaagctcttcaaccacgccaaccaggaagtgcagcgccatgccacaggtgccatgcgcaacctcatctacgacaacgctgacaacaagctggccctggtggaggagaacgggatcttcgagctgctgcggacactgcggga

SEQ ID NO: 4469 - DNA, 492 bp, Homo sapien
gttttttgagacagggtctcgttctgtcgcatagctggagtgcggtggcgtgatcatggcactgctattcttgaagcactccacccacctgggctactttttctttagtgcagaggtgcactgtcttcttttaggtgggatcgcgtaacatgagctggtagagcacggagaggcaggcagccaggttacgaagactaagccaattattcactgaagtcatcctcctctcccccaccattcgatttgatctacctctaagccaggctgtgaagaaaaggaaggcactttagaagacctcagcagtgtggttctgtgtctacttccatgacctgtacctgagtatcttagccagccagccttaggaacaccaccaaggttactttgaaatctatgtatatagctagttacagacgggagctatgtgtttcttcattattttgcagctcctcgttgttcctgtgattcctgaacacctttttggaaatatgggtc

SEQ ID NO: 4470 - DNA, 297 bp, Homo sapien
gcaggcaccccagggcggggcagcaagcaggcaggaggggcatccccgggtggccttctagggaggatgtaccctggctgcccagcacgagccctgcttggccgtgtccctgccacaagcatgcaggacacaggagggatggcactgcccacggagccctgggctcatggcaccttctgcagagtgagccgggagcagagagcctcttttccccactctgtgaggccgggcattttcctcagccctgccctaacccccaccattcctgtgatgggcccaggtgctagacgggccttg

SEQ ID NO: 4471 - DNA, 302 bp, Homo sapien
tggctgcgggggaccatgaggcggctgacggctgtgccgctggttggagcacctgccccgggtgctgcaggagtctgagagacccctgcccagggcagctctgcactccttcaaggctgcccgggccctgctgggctgtgtcatggtatagtctggtccagccagcctgaccatctgtgagaaggccagtgggtacctgcaggacagcctggctaccacaccagccagcagctccattgacaaggccgtgctgctgttcctgtgtgacctgcttcttgtggtgcgcatcagcctgttggggc

SEQ ID NO: 4472 - DNA, 167 bp, Homo sapien
ccttgtcggaggcaccgatgtcttaggggaactggtcaggtgacaaagcctccggttatcatggatagtacggcgtgagggattatcacaaattcctgtgcttggacgatcccgttctagatgtcgccgttgcacgcgaagagccctgtgtggcccaactaggctcg

SEQ ID NO: 4473 - DNA, 409 bp, Homo sapien
tttttttataattttctacaatgaagagatatttagagatgttcaggtattcatatattcagaaaaaagtcagtgttattattttaatttttaattattcaggtaacatctatacacaaactcaacacagagagagaggtgaattgtgtgggtgcgtgtacttcattctatccaaagttctaaaaacaaggtcagatttcaataattcaatcatctactcatacatagtaaaaatataacaaattataaaagagggagaatacaaaaatccttttgactttttttaagacaatgcatattcctataggattgcagcatctagaaatcagaactaggtgtgcataattgtcttcatgtagtacctagcatagtatcatgtacaaccaaattcttttgatgacaatgactt

SEQ ID NO: 4474 - DNA, 201 bp, Homo sapien
atttttatttatttatttattttttgccaaggttcaggacagatccaggtgtctttctccaaagatgattatgatggtgttaatatttaaaggggaaagtggcctagaggggaacaagggagggtatgatcatattactgtatccacatgttgcaggagaaatggagcaggtacaggaatagtcaattatgtgttcttctc

SEQ ID NO: 4475 - DNA, 508 bp, Homo sapien
gtttttgttttgctttttattgtggtaagggacatgtgttgcaaaatttaccatctcaaccatttttaagtgtacagtttagtagtgttaagtataatcacattgctgtgaaacagatgtccagaacttttttatcttgcagaaatgaaactatattcattggacaacaattcccttttgccccctcccttcacccctgctaaccactgtgtactttgtatacctatgtatttgactagcttagatgccttatgtaagtggaatcataccgtatttgtcctcttgtgattggcttatctcattagcataaagccctcaaattttctcatattgtagcatgtgacaatgtgctacaatattttcttttttattctgtgtagtattccattgtatgtgtatatcacattttgtttatccattcatacatcagtggacatttgggttttttccaccttttgtctaccagtgctgccatggagggtgtgcaaatagctctggagactctgct

SEQ ID NO: 4476 - DNA, 427 bp, Homo sapien
ttttttttttttaaatataatagagagttaatatgaaaaagctaaagcacaagtgctttcacccacccctaaattctgttttgggccctcacagattcggaatgcattttcatccaccctttttcacaaagtcaggagagctcaggaaatataaagtcaaaaatatacaaatctttgttgttattataataagatttttttccatgaatgaaattaccaaggaccatgaacctggaaaaagaaaatcaaaaggaatttacagcaattatttatcttcaaagttcagaactggtcacttcacagaaagacttcaggatttgttgaaatttttcttctaaaagtcattctgtagtggagttttctaggaaaaattaaacagcttttaataactggcccgctggtgtgagagctaccgtggaataaatta

SEQ ID NO: 4477 - DNA, 475 bp, Homo sapien
gaaaaacatagcatattgaatcatcacaaggcagccaccccttcatagccacacctggcccctggcatccactgacctgtgctccatcaccagaattccgttgtctcaggaatgttcgatgaatggaatcctgtgtggcctgagatgagtgtctttcatgccacgtgacacccttgaggtccgtgcaagctgttggcatgtcaacagttagctgcttctcattgctgagtggcgattggtcctgtcatggtttattcagccatgtggtggatggctacttgtcttctaagccacttgccttctgattgctggactgactctctcgccctctcttggtgcagccctcgggaggctcagtcacactctccgagagcacagccatcatctcccacgacatcacaggcctggtcacatgagatgctgccctctacctggcagaatgggccatcgagaacccggcagccttctctcatag

SEQ ID NO: 4478 - DNA, 446 bp, Homo sapien
tttttttttttccataaaaatggatttattgccaaactttaagaaaggcgcttcataagcagaagacacagaatgccaccctcctcaaggaggcaagcacggaatgccaccttcctcaagcacgcaagctaggcaggccctgcacgttctcactcctctcccagaagccagcttcctgcctagggcccagcctgctaaaggatggaaattaatagcatttggtcacttgaggtggccccagagctacttgcctacccaccaggccccagggagagtggctgggcctcaacctgtgacctacatgcagggtctctgcacccacagactctgccctcagtccagctgctgcagttagctacttgacacaggagggaactgaggctccaattcctggcagtaggtggcttggctaacgccccagccagccatggctggctggtggggga

SEQ ID NO: 4479 - DNA, 382 bp, Homo sapien
aaacagaaaaataaggatgtttattaaggacatttctagcccacagctagggctcatactcggctctatgaccactgtccgacctcatccccattcaatgtgaatgacattcgggaggccgggccacaggtagatcccactgcctggctaaaggggccatagcaaggggtccctcccatgcaaggggtctctcccatagccaggtatagaatagatacactgctgcggatgaagagggaaatctcattggactaatacattcccctacaccctgcctggaccctctcattcctccccacctcccaagatgatgggtcaaaggtacctagcactattatgtggggtacaaaggaagcccctttatttgtcccagaactgtggg

SEQ ID NO: 4480 - DNA, 480 bp, Homo sapien
cattgtataatttaaaagctttatttccccccataatttgcaaatagatttcatattagttccactggaagttttcttcgtacagttgcctttctcattgactatgctgttggtggggaaaactgctttctcatgaggggaagggttagatttcatagagatgctctgagctaatcacataaacaagagggtttgacctggcagcctctgaggcagtcaaggaggtcaagaaatcctttcagctaaaggcctagtcaggtgggactagttgccaggatcctctctgcagaactgcccaaacgtagctctctttgaccaggaagcctggaagtcagaccatcttctcaggccctgccaaattcccatcctcagtcctgtggcctcatgcgggaacattttatccaagcaaaccactggctttcgccttgaggtccaatgtgcactcttcaccaagtgcaagattgatcttcactccaaagt

SEQ ID NO: 4481 - DNA, 453 bp, Homo sapien
tagaaaaacatagcatattgaatcatcacaaggcagccaccccttcatagccacacctggcccctggcacgcactgacctgtgctccatcaccagaattccgttgtctcaggaatgttcgatgaatggaatcctgtgtggcctgagatgagtgtctttcatgccacgtgacacccttgaggtccgtgcaagctgttggcatgtcaacagttagctgcttctcattgctgagtggcgattggtcctgtcatggtttattcagccatgtggtggatggctacttgtcttctaagccacttgccttctgattgctggactgactctctcgccctctcttggtgcagccctcgggaggctcagtcacactctccgagagcacagccatcatctcccacgacatcacaggcctggtcacatgagatgctgccctctacctggcagaatgggccatcga

SEQ ID NO: 4482 - DNA, 521 bp, Homo sapien
acggtgagcacgccaggcattttaatccgcattctcatctcagcctcacgactgccccgtcacatagataacagtattcctgcccaccctgctccccgcatctccctactccaccccacatgcgtgtgacagatgaggggactgaggtggaacaagtttcagcaggaaggcagatccagggctagagttcgagtctcccatctcctcaattaagactctcgtttccaggcctcttcagcccacccagcttctgctcctgtggccctgtgccaacggggcaggatttgggagctaggccctcagctcagtgggtgtatctggctgccggcaggggtgagacacctggaaggcctccaagaccagcagcctcttgttgatggagctgatggtagggtagggggtgagatcaccttgaatctttcagcatttgccacctgaggcaccaagcacagatcagccatggtcacctcgtctcctacacagtatatgcccgctgtgctctgtaggatctgctcaagggc

SEQ ID NO: 4483 - DNA, 218 bp, Homo sapien
ttttttttttttttttttgtttgccgttgggttttcgtttggctggttgtgtgtacatagtgtatacaagttgagttgtacagaagcccaagaaagagcaagagacaaagggtagtgggagcagggggtggggcgggggcgagaaccgggaggaggggaaaggagaccgataaaaaatagaaccacatccagacaacaatgggggatgggcagtgggt

SEQ ID NO: 4484 - DNA, 520 bp, Homo sapien
tgaatataatcatttatttgtctttacagtgatgatggaagaatgtacaggtgtcccctttcaataaagtataaaaatatgtttatatacagtgaagtcacaataatctttaactgggaaatttatttagaattcctgatctgttcttattaaaactgtgggggaaacaaatgttttacgtaagtgctacatttccagtagattgcacctggcatcaaaagctcagcttcatcttagggtcctgcttgatattacaaaagactaattttaagtcctaggactcaaaataaacatgattttttgaataatagatatatacatcaaaaatacatctaaaaaggcattggttagtgctattaaaaagctctatgtgctcgggtacattttttttcttacaggcaaaagccagtggaaacatttttgttcaatttctaggaattttctcttggggaaagtcggtcgaaagttacctgatcatattcttaggcttcatctccactgtccatttcaatatccatct

SEQ ID NO: 4485 - DNA, 464 bp, Homo sapien
ggatccccgacaaggccacggacatctgcatgcgctgcacgcagacgcgcttctctgccctcacgaggcgccaccactgccgcaagtgcgttcgtggtctgcgctgagtgctcgcgccagcttcctgctcccgcgcctgtcccccaagcccgtgcgcgtctgcagcctctgctaccgcgaactggccgctcagcagcgcaaggaggaggcggaggagcagggcgctggggtccccagggcagccagccacctggcccggcccatctgcggacgtccagtggagatgacgatgactccgacgaggacaaggagggcagcagggacggcgactggcccagcagcgtggagttctacgcctcgggggtggcctggtctgccttccacagctgacccccggcctgcagaacatctgtccccaagccagctccactgcccaggcccccaagagggcagctccagaagct

SEQ ID NO: 4486 - DNA, 453 bp, Homo sapien
gagccctgacctctgacctctacgcacccatggctggctggcgcgctggcccgccgtgagcatagtcttgggcctttgacctccctctgtccccacctcggcccaaacccagtcagtcccagctcccagccccaacctctgccagcctagggataggggggtgttctaggtccccagacctgggacagcaggtaggtgatgccatgtaagacctgtgatctcacttctccccattgtcacccccaatccccacacagtgggcaccgtgactgtgatcagccccctggagcttatgcggacaaagctgcaggctcagcatgtgtcgtaccgggagctgggtgcctgtgttcgaactgcagtggctcagggtggctggcgctcactgtggctgggctggggcccactgcccttcgagatgtgcccttctcagccctgtactggttcaactatgag

SEQ ID NO: 4487 - DNA, 472 bp, Homo sapien
gcaaatcagatttcagtctaaagcgaaacatcagtaagttaataataaacctatctttcgggaagttgaatattaatctgtacccaaaacgtatttagtaaaatatttgcccccgccaccctgccatgctgacataacaacttttataatgttgaatagatgatatgggaaatactaataacaacaatgtaatttttgcagacagctttaacttatatacattgcttgatttttttcaaaagactaaatatgtcatttatactttgtttattttctaccaaagaaggtttgtaaaaatatgcctgctgcttttccttttgaaggacacaaacctggtcccaacatgtgtggattttaactctgagtggggtgcattaaatcaaaagagagaggcagaagatgaaatgctaaagaagggtcaggcaaacttctgtttcagtataaaattcatcatgcaggcttctgagtgaaa

SEQ ID NO: 4488 - DNA, 427 bp, Homo sapien
cgagggagagtgagagtttcactcttgtcgcccaggctggagtgcaatgacgcaatctcggctcacgttgcaacctccacctcctgggctcaagcgattctcctgcctcaccctcccaagcagctggggtcacaggcacccaccaccacacgcagccaatttttttatttttagtagagatggggtttcaccatgttggccaggctggtctcaaacttctaacctcaggtgattcaccaacctcggcctcccaaagcgccaggattacaggtgtcaaccactgtgcccggccctcaacatttctcaggcttcaaagaaaagcaggccgctgcagcagctcacgcctctaatcccaggacggcaatcttacttgagcccaggagtttaagaccagcctgggcaacgtggcaaaaccatctctatcaat

SEQ ID NO: 4489 - DNA, 484 bp, Homo sapien
attcggcacgcgggggagaagccctacatgtgcaggcagtgtggactgggctttggcaataagtcagctctaattacacacaagcgggctcactcggaagagaagccttgtgtgtgcagagagtgtggccaaggctttctccaaaagtcacacctcaccttacatcaaatgacacatacgggggagaagccatatgtgtgcaagacgtgtgggcggggcttcagctcaagtctcacctcagcagacacaggaagaccacgtctgtccaccacagactgccagtgcagcccgaccctgagccgtgtgcagggaaccttcggattccttatactctctctgaaggcaaagatggggacaaggactaagagtcagaatgttgacactttgatgaaatggagtagagaaatgcattctgtaagtggtcaaaggacatttgactgtttactttctccacactaagtcttctccatgttttgtggccctc

SEQ ID NO: 4490 - DNA, 327 bp, Homo sapien
ttcggaacgcggcggcgggatgtggttgacgggaacttctacactgctacgctggccggggaccactgctttgatgtcctagacctccactttcacttccggcatgcagtacagcaccgtcatcgggatggtgtccactgggaccagcatgcacaccgccacctctcacacctgcttctgacccatgtggctgacgcctggggctggagctgcccaagcgtggctatccccctgacccgtggattgaggactgggcagagatgaatcatccattccagggaagccatagcagaccccagacttcggggagcacctggccttgctccc

SEQ ID NO: 4491 - DNA, 415 bp, Homo sapien
attcggcacgcggaaagggctcatactagatgttcagttaaatatactttagcacaaagtcaaactagagaatgtgttacggagggaatgtatatgtcttggtagaccaggaggcctttgccagcaatttaagcaacagatgtgaatacttcacaaagctgtaaagaccattgtcttaaatactacaacaacttaacacccttttgtgaagatcacagcatttatctaagaaactgtgaggctttctggtttacatatatcttacaggtgtttttttgtctttttttttttgtttagtttgaaatgtgtaagctttgatttaaaccaagtttacttcagtatgttaatgatgtagtaaaaatatttattgaaaggtgaattcgagtattttaatgttatacctgccattttgttt

SEQ ID NO: 4492 - DNA, 419 bp, Homo sapien
ggggtggcgtgatttccatcaccatcagcagtgactgggctgaacccagagatccctctaaccaggaggatgtggaggcagccaggagatatgttcagttcatgggaggctggtttgcacatcctattttcaagaatggagattacagtgaggtgatgaagacgcggatccgtgacaggagcttggctgcaggctcaacaagtctcggctgccagaatttacagagagtgagaagaggaggatcaacggcacctatgacttttttgggttcaatcactacaccactgtcctcgcctacaacctcaactatgccactgccatctcttcttttgatgcagacaggtaagtccaccaacagggagcccggagccatctctggaaaaggcagaaaggtgcccttggctgtgctctctgaggcc

SEQ ID NO: 4493 - DNA, 322 bp, Homo sapien
cgtcctcctcccgctcggaaggtcccaaggtgagacaccttcagcaggtctcagggaagatggcagccctaggggacattcaggagtccccttctgtcccgtcccctgtcagtctctcatcaccggggacacctggaacccagcaccacgagcctcagcttcacctccatgggcatcaacatgcctaaggtgctctcccagccgtccgacctggatctccaagacgtataggaagtggagatcggcagagacaccttctggcccgactccgagcccaagccggagcaggctccacgctctcctggctctcaggcccctgacg

SEQ ID NO: 4494 - DNA, 471 bp, Homo sapien
gaaatgactatttcattcttgttgtggtgcttctgtaaccttgtgttctgtcccccatgtggacagtgtgccacatctagtttctgcatagatttcaagagagacataaggacaagttttttatgtgtgaggatgcagcttagggcagcaacattgcacaccaattataaaccaataaagttcttgtccctgcctctccctcagcgtctccctcaccagccagtatcagcagatggtctatctcattcttcatgggaaaacagaaactgttcatcttatgcttgggaagcctctctctcttaaccttgagatttcccttcagagatggtcgtttcctccttccctcctgcctaatagaataagttattctcttcgcctaatagaataagttgttctcttcgcctaatagaataaagttgttctcttctcttttacctcttttgagacttagcctctttaaagattcctttt

SEQ ID NO: 4495 - DNA, 419 bp, Homo sapien
atgttcggggatgtgggccacggctgctcatgttcctcttcgccctggccatggtccttgcggagaaccgaccggctgtgaaggccgcgcagaacgagatctggcagactttcttcaggggccgctacctgctcctgcttatgggcctgttctccatctacaccggcttcatctacaacgagtgcttcagtcgcgccaccagcatcttcccctcgggctggagtgtggccgccatggcaaccagtctggctggagtgatgcattcctggcccagcacacgatgcttaccctggatcccaacgtcaccggtgtcttcctgggaccctacccctttggcatcgatcctgtgagtcctgggatggagtgtccgtgggtggtgaaggcagctgggagtgggggctggggctcccctcggttca

SEQ ID NO: 4496 - DNA, 285 bp, Homo sapien
acgacgctacctggggccatcagttctgttctttcagcgactatgacatcgtcattctggaggtctgcccagaaaccaaccaggtcctcatcaacattggcctgctgctcctggccttcccgtcccccactgaggagggccagctccgaccaaagacctatcacaccagcctcaaggtggcatgggacctcaacacagggatcttcgagacagtcagtgtaggcgacctgactgaggtcaaagggcagaccagcggcagtgtctggagctcctaccgcaagagct

SEQ ID NO: 4497 - DNA, 432 bp, Homo sapien
aaaccatagcaaatcccatttcttaagctcctgtagtgtgtcagggactttacctacttcctcttacttacttttcataggtaagaaaacagacagagggtaagggcttcgctgcagtctcacagcaaggaaatggcacagctgggactagaactcaggcctccggcactggtagcctcttttgtctcctagtagctgtgtcttagtagaaaaaatgacttgaagttcagtgggaaagacgagaatgttattcggcagttgctatagccaagcaccctgccaagtgctgtatatgtataagctcctcaaatccttcacaacaattcaacacacaggaatagttacttttttggtaggtgaggaagcaggctgagagagattaagtaacatgcccaaggtcacacagccagtaaaacggtgggctggaattag

SEQ ID NO: 4498 - DNA, 420 bp, Homo sapien
ggaccaccaccgttcgaaagaggagctgcttcccagcctcgctgactgccagccggggtcccatcgctgccccccaagtgcccttggatggagcggacacatcagtcttccccaacaatgttgtcttcgtcacgggtaattatgtgctggatcgagatgacctggtggaggcccaaacacctgagtatgatgtggtgctctgcctcagcctcaccaagtgggtgcatctgaactggggagacgagggcctgaagcgcatgtttcgccggatctaccgcacctacgccctggggcatcctggtcctagagccccaaccctggtcgtcgtatggcaagagaaagactcttacagaaacgatctacaagaactactaccgaatccaattgaagccagagcagttcagttcctacctgacatcc

SEQ ID NO: 4499 - DNA, 434 bp, Homo sapien
gaagtgagcccctcttccacgttccactcccaccatcctcctggcaccccagcctgcatgccccccaaaagatgcttttgcactgattcaacaaagcctaaagatgcaaaggcctaattgaagacctgtgaatggcatgtacggtcctcagttcccagctgaggggccactcgggctccccatattcccctcagcctctccatcttccaacaggggtgtggagtgcatccatggccatgagtattgatctgtcccagcctgtgcattgctccgaggcagttctgagtggatgatgtacagatgggattcctcagctcatttgcgtggttgacgttatggctgcgggttttactgccacaactcccaggcccaacctggcttaatgtctaagttttaagccaaaaaagatggggagcagagctttgtggcagggc

SEQ ID NO: 4500 - DNA, 404 bp, Homo sapien
cgtgactctgtgcagatacagggactaccgcaatccccccgattacaacttctccgagcagttctggttcctcctggccatccgcctggccttcgtcatcctctttgagcacgtggccttgtgcatcaagctcatcgccgcctggttcgtgcccgacatccctcagtcggtgaagaacaaggttctggaggtgaagtaccagaggctgcgtgagaagatgtggcatggaaggcagaggctgggtggggtgggggcaggctctcggcccccaatgcctgcccatcccaccccagcatccatcttcagtgccaggagcacagacgtgtagggccagagccgtgccagaggccaccaggagctgagacagtgccaccaccagcacctcccacaagcccaccgctgtg

SEQ ID NO: 4501 - DNA, 319 bp, Homo sapien
agtgacctccagctggaaggccccagcaccctcagggtcctggactagaaccttgctgacccccaagcagaagacagacctctggttttctttgacctcaagattgacaatgaaagtgggttctcctggggctacccccacccctttctaatttagtctctgagtcccaaaaagaagtgcaggcagagcatctgccaggcccaggagagctctgagctctggccaacaactgcagccaggctgggcagagcactccggctcacctgggctcctggcgtgtcatttgctggcttgaataaagatgtccgccttaaaaaaa

SEQ ID NO: 4502 - DNA, 179 bp, Homo sapien
ggacctggacctgttctcaccgtcctggcactgctcctagcctccaccctggcctgagggcccactcccttgctggccccagcctgctggagtccccgcctggccaggagcaggcacgggtggtccccgttccaccccaagagaactcgcgctcagtaaacgggaacatgccccctgca

SEQ ID NO: 4503 - DNA, 419 bp, Homo sapien
aaaactgtaacaaacctccatcagacaaagctaccaagtgaccataatggatcaaaatgaaattctgtaaccatgtctccgataacctaaaagaaaacagacttcaaactttaaaaatgaccagaaatctcctaatatgacttgtgcttcttatgaattagtgttagtgccactctattctttctgcctcctagataagaactattagaattttccaaggatggaattgagttcacctaacagcatccaatacaaacacctcactttgttgaatggcaatgaaatcacctaaaagaaacacaaatcctataagaagtcctcttgagcaccctcttatggataaccctccgtcattgatgctttgtgttcatccttatgacaactctttacatgccactctttgactataggtgtgattc

SEQ ID NO: 4504 - DNA, 339 bp, Homo sapien
gccttgcaaaataggtattattatccccattttacaggcaagaaaactgaggtttaagtaacttgccgaagtgccatatacagggctcacattcagtattgcagttgcaaagctcatgatctatagtgccaagttgcaatattgtagtcaatgtcacaattattacccctttttatattccttgatatttttccatggcaaacaattagctatttcatttaataatcacctaaaacttttcagtcttctgattaaaattacgctggagtgatagaatgtattttcatgatagaaattgggaaaaaaaatggggaatgaagtttatcagcatttcagact

SEQ ID NO: 4505 - DNA, 426 bp, Homo sapien
aaaactattaaaactgataaagcgagttcatccaggtcgtagaatacaagaccaatgtgcaatgatcattgcattttgtttttgtttgtttgtttttttttgagacagagtctcactcttgtcgagactggggtgtagtggcgccatcttggctcactgcaacctctgcctcccaggttcacgcaattcacatgcctcagccacctgagtagcagggattacaggtgtgtgccaccatgcctggctaatttttagtatttttagtagagatgggattttcccttgttggtcaggctagtcatgaactcctggcctcaagcgatccacccatcttggcctcccagagtgctgggattacaggtgtgaatcaccatactcagcctcaattgtatttctgtacacctctaaataaatggaaatacattc

SEQ ID NO: 4506 - DNA, 443 bp, Homo sapien
caggaggaataccacaagcaaaggcagatgaggtggcaaagtccacatccaaccccagaaagtcttcttccccacccatgtctgcatggccccccaggaggctgtccccttcactggcccacccagaacccccatccaggaggaagatttctggagcacaccttttagccatgcccacccgcttccgggcagttctttttcagcaaacccctgcggatcctcaacatcctcctgctgctggagggcgctgtcattgtctatcagctgtactccctaatgtcctctgaaaagtggcaccagaccatctcgctggccctcatcctcttcagcaactactatgccttcttcaagctgctccgggaccgcttggtattgggcaaggctactcatactctgctagcccccagagagacctggaccaccgtttctcctggagccctggg

SEQ ID NO: 4507 - DNA, 439 bp, Homo sapien
ctctgttggcccataaccttcagctgtgagcgggtcggtcccacagtattggttgggtgttggtttgtgtgtggacaagaggtggttggtgggtggtgaaggctaatggcagagttagcaccccactctcccaagccacccctgcaagcagcacagcagggcatataccagtcaggaatgcccgttacctggttccttgcctggtctgctttcttccaagtttgcctggggcctagccctgctagaggctacagcactttacaagcaaggtatgctttcttccagcccctaggctgtcgggcactgtatacaagtaggaacttcctttccttcacttcccttttaacccctagtcagagcatttcagccgtttgctacctcgattcctcctgtgttggacagaggctgggggcagtgcagcctgattcttccgacctac

SEQ ID NO: 4508 - DNA, 446 bp, Homo sapien
cccagcccatcatagaccagttggctgaggaggcacgggccttcaaccgcatctacgtggcctctgtgcaccaggacctctcagacgatgacatcaagagcgtgtttgaggcctttggaagatcaagtcctgcacactggcccgggaccccacaactggcaagcacaagggctacggcttcattgagtacgagaaggcccagtcgtcccaagatgctgtgtcttccatgaacctctttgacctgggtggccagtacttgcgggtgggcaaggctgtcacaccgcccatgcccctactcacaccagccacgcctggaggcctcccacctgccgctgctgtggcagctgctgcagccactgccaagatcacagctcaggaagcagtggccggagcagcggtgctgggtaccctgggcacacctggactggtgtccccagcactgaccc

SEQ ID NO: 4509 - DNA, 426 bp, Homo sapien
caggaagggtctggcttctcagagtcactcagcatttatagttcttaaacagtttcagtggaatgggggagttggaatgaagcccgttggcaagtcctgctgtaagggggagaatctctctttcataataactttgccaggacccctcccccacgaagggaccctttgtgctagtgcctcgcttccaactggaggcttgatgtgttgcgtgctgaacctgcaaacatctccacttcaggcattagctcatcaccttctgccttccccttcaggtcaagcaagggatgagagcctcgcttacgaacagacaaatatagaggaaaacgagggagtgctttctcatcttttcattcaggttgcagagtctcattcttctcagtcccagaattccagaagttttattgttaggaagaagaagatgatatc

SEQ ID NO: 4510 - DNA, 224 bp, Homo sapien
tgaacttatgtaaagtctgatttactgagcatgagaagaacacataattgactattcctgtacctgctccatttctcctgcaacatgtggatacagtaatatgatcataccctcccttgttcccctctaggccactttcccctttaaatattaacaccatcataatcatctttggagaaagacacctggatctgtcctgaaccttggcaaaaaataaataaata

SEQ ID NO: 4511 - DNA, 361 bp, Homo sapien
gccatcagcttagtagccattgatgcaaatactagggaaagactaggaggatgagccagggttgctactaaggactaagtgtcgcaccaaggtttgccttttgtatttgcataaagaaaggagttggagctgggtgcagtggcttgtgcctgtagtcccagctacttgggaggctgaggcaggagggttgcttgagactagcctaggtaacatagtgagaccctgtctcattagaaaaaaaaaaaaaggcatggtggcacgcactgtagtcccagctactcaggagactgaggctagaagatcctttgaacctaggagtttgagaccagcctgggcgatatagtgaggccccatctcaaaa

SEQ ID NO: 4512 - DNA, 335 bp, Homo sapien
accagcagtcaatgaagggattctacatgttggacagcaaacggcaaaagcagacgacttattctctccagaaattcatagttacgctcttcaggtgaaggtaagtacatagtaacagcatctaacaagggctgtatccctttgtttttcagggcacttccacaaagcacaggcactgctgtctgagctagtgtcactctatgtattgcagtctgtagcttttcagctggtaacagatcaaaattctcacaaaattcttctaaaaccaagtcagcagattcatcatccaaatctgcaacttgttcaattaaggcattccttgcttcagttgtttc

SEQ ID NO: 4513 - DNA, 399 bp, Homo sapien
gtgagcttttgagagtgactgaccttgttgattatgtctgtaacagtgaacagttataagactttttttccatttttgtgctaatttattccacggtagctctcacaccagcgggccagttattaaaagctgtttaatttttcctagaaaactccactacagaatgacttttagaagaaaaatttcaacaaatcctgaagtctttctgtgaagtgaccagttctgaactttgaagataaataattgctgtaaattccttttgagtttcgttttccaggttcatggtccttggtaatttcattcatggaaaaaaatcttattataataacaacaaagatttgtatatttttgactttatatttcctgagctctcctgactttgtgaaaaagggtggatga

SEQ ID NO: 4514 - DNA, 217 bp, Homo sapien
agttgatgagtcagcctgtcgttcaggcaactaggcccgcgagatagacgagagcctgatcttctacgagaagttggagctggaagcctgcgtcaatgcagcccttctattcagccagatggacagcgtgaatcgcatctccttcatctacgagcagttggacgtcataaagcataaactggatgagctctacccagaatgcttaccccgtagtctg

SEQ ID NO: 4515 - DNA, 355 bp, Homo sapien
aattcggaacgaggcacctatgagagaaggctgccgggttctcgatggcccattctgccaggtagagggcagcatctcatgtgaccaggcctgtgatgtcgtgggagatgatggctgtgctctcggagagtgtgactgagcctcccgagggctgcaccaagagagggcgagagagtcagtccagcaatcagaaggcaagtggcttagaagacaagtagccatccaccacatggctgaataaaccatgacaggaccaatcgccactcagcaatgagaagcagctaactgttgacatgccaacagcttgcacggacctcaagggtgtcacgtggcatgaaagacactcatctcaggc

SEQ ID NO: 4516 - DNA, 122 bp, Homo sapien
ctgggaccaggaattgggccgtttctaccatattctcagcagcctaaggtggtggcctgctgatgtggagactactcaccttgagccatgtggtccccaggacagaaatggtctttgttttg

SEQ ID NO: 4517 - DNA, 447 bp, Homo sapien
ggagacccagttgctctgaactataccttctatcaggtgatttcagcctcctcccagacccctctggcactacgctccctgcagaaccgctgtcttgtccctggctactattctacccatctacaacgctggctgacttactacccctctggacagttgctgattgtggatgggcaagagctgcgtaccaacccagcagcctcaatggagagcatccagaagttcctgggtatcacaccctttctgaactacacacggaccctcaggtttgatgatgataagggattttggtgccagggacttgaaggtggtaagactcgctgtctaggccggagcaaaggccggaggtatccagatatggacactgaggtaagtaaagccaggggcaggggaatccctctccacttccaggatctgattctgtgtcccacttcttaccatttctgc

SEQ ID NO: 4518 - DNA, 344 bp, Homo sapien
aaagattaaattagcctatattaatcataataactgtttatcgcacatgtaccccttaacctaaaagatgaagaagaaaataaaaaataaaataaaatttgaagaaaatgttaaacaaaaatgaaaccataccagtactagaagaaaaatgggtgaattcctctttaacctaggccatggaaaggcttctctggctcccaatctggatttaattaatcctaaagtttgtatagaatcacaaaatacctcaaatagccaaaacaatcctgagcaaagagaacaaagctggaggtatcacactaccagatgccaaaatatcctgcaaagctgtagtaaccaaaaca

SEQ ID NO: 4519 - DNA, 137 bp, Homo sapien
ggtcgcgagtcccagcagctggcactcttccaatgccctggcgtgccttacaggctgccaggcggacagcccaagcctgcttagccccttgcatcaggacttggatctgatgctgccatattgaaaagaaggcaaca

SEQ ID NO: 4520 - DNA, 414 bp, Homo sapien
ttgagacattgcattctgttgccaggctggagtgagactctgtctcaaaataaaacaaaaaacaaaaacaaaaacccgatgaacatgtactgttttaataaaatgtatgcacatatatgtatgtatacacacactctcacattttatataattaaaattattgtaatataaaagattaaacaagattaaataacctgcctaagattaacctaccagtaaaagaaatagaccagtatctctccatgtctggcctgctctcccagggagtcttaagctctattgtcttttctattaaaactcccattctctaaataaaaatgtctcattcaagtattctgtgttactcagggtgatagaaattcacatgtgaataatatctgctgcttctctacaagagttcagttattacaaatg

SEQ ID NO: 4521 - DNA, 417 bp, Homo sapien
agaaatgaaaacatatgtcccacaaaaaattatagataaatgttcataggaacattatttataagaaccaaaaactgggaacaacccaaatgctcaactgatgactggataaaaattaaatgtggcatatctatacaatgaaataatgattcatgctatgacttggatgaatcttgaaaacatatgatacgggaaagaagtcagctttaaagaccacacattgtgtgactccatttatatgaaatgtccagaataggcaaatctatagaaacagtagattagtagtttgctagggttaaggggttcggggaaaatagagaatttctgctaatgagtgtgagtttcttttaagggtgatgttctaaaattgattgtgtgctgatagttgtacaactctgtgaatccacttaaaattat

SEQ ID NO: 4522 - DNA, 418 bp, Homo sapien
agactgtttccacactgtggaagctttgtactttcactctgctcaataaagcctgcagctttttctcactctcagtccatgtctctttcactcactgtggtcagcttccacaccatttctttggtgtggcttggcaagaacctcaggtgttacatcttggcgagccagacaggagactccagaaaaggtatctagatcatcatgcagatcaaagccatcaagctacaaatgatcttacaaatggaacctcaaatgagctcagctcacggcttctaccgaggacccctggatcaacccgctggtccctcaattaccctagaaaattcccctctggaggacaccaaactgcagggccccttcttcacccctaaccagcaggaagtagccagaacgactgccacacggttcccaacagcag

SEQ ID NO: 4523 - DNA, 295 bp, Homo sapien
agcataggcagcctcccgtgtctggagcacgtgtctctgctgaacaaccctctgagcatcatccccgactaccggaccaaggtgctggctcagttcggagagagggcctcagaggtctgtctggatgacacagtgaccacagagaaggagctggacactgtggaagtgctgaaagaattcagaaagccaaggaggtcaagtccaaactgagcaacccagagaagaagggtggtgaagactcccggctctcagctgccccctgcatcagacccagcagctcccctcccactgtgga

SEQ ID NO: 4524 - DNA, 524 bp, Homo sapien
attcggcacgacggcggcgctcgcatgcttcctccgaagacttccgggagagtctgcgagctgccgtccccgcgtgtgaggcacagaagggctggatgtcagaaccgcataattattcattaaactacaaactttttttaacccaaagaatatcggtgatttttgtccactgcgaggagaagaagagagagcccagggccatgaaatgcagcagaatccttatttataaacaggccgcggtagtgatatatgcaaccccagtctactcagtgagttttctatcctatggatatcggtcttgagagttgagattggagagcagcccgtctgtactgggtcctgcagcctctgtcctttcaatgcctggttttttctgtgactgctggccttccctggagatcagagcgctcctgtatgccatgggctgtattcagagcatcggaggcaaagcagagtcttccggaagggatcacggtgattgatgtgaaagcctccatcgaccccgtccccactagcatcgatga

SEQ ID NO: 4525 - DNA, 390 bp, Homo sapien
cagacgagtggccaacactggagcccaggctattgcttcccagtctggtggtgaatcgtccatagtctgggacaggcaggggagcccagcggcatgctggatatgaatgtatcttcagccttcaagttaccattggccagagggaagagtggccccaaactctgaagagcgctggcaaggctccccatcttcctctccctagcctccacaggaacatcacagtatggcttggcattttttttttttttttgagacggagtctcactctgtcacccaggctggagtgcagtggtgtgatctcagctcactgcaagctctgcctcccgggttcatgccattctcctgcctcagcctcccgagtaactgggactacaggcgcccgcagcacgc

SEQ ID NO: 4526 - DNA, 571 bp, Homo sapien
gggccgccgagggggcgaactgggttccggccctcggaggctgacggaaggcggtggctgaggagcggcgcctctgcgttgagcgctcgccgtgtgtcccgcacctgtctgtcctgccgccgcccggtaagagtctcactctgttgccaaggctggagtgcagtggcgggatctcggctaactgcaacctccccatcccgggttcaagcgattctcctgcctcagcctcccgagtagctgcgattacagacatttgccaccatgcccggcacagcacagcaccgcacatctccagtcggactggctacatttcaagggctcaaccatcacggcgttaccagtggctactgcatcagactgggcagtgctagttggggagtcataagagaaaccaagtgatttccatgttcaagtggtgaacaggctaagaagagaaacagagtcctcgctgtaatcccccaggctggagtacagtggtatcgatcttgggtcagtgcaagcgatgcctcctaaggttcaagtgagtcgcctgcctcagtctcccgattatactgggattcaagagcccgcc

SEQ ID NO: 4527 - DNA, 527 bp, Homo sapien
acagattctgaattctgattcacagtccctagccagatgggaactgggaaagagacagaaggcgtctgggtgcttttgaaccctgtctcaaatgtttgggattttctctctcactattctttggttggggatgatgtcctctttagacccccacgtaatggtatgagaaggtggcaggcagtggctcagccagcctagggggcaccaagtcatgcagccagcgtgagacctgcagttcacctaagcacagaacgagatctcagtatgcctccatgtaaacagattcacataggcctccaatttcaatgagaccttttgcattttttctcaaagcccttatgttctaacccatgagaaccattttacctgccctctaagggcaccagcttcgacctgcctcaggggacagcagcacagaccagtggctccctgtccaaggccgcagagcagacgccatcccactgtacaatcgaatttgctggacaaacttgataggtttctctgcttagcaacgagcctatagttag

SEQ ID NO: 4528 - DNA, 559 bp, Homo sapien
tgggagtagtcatgcttgctggtctggctgttccggacaaggtagctacactccttgcagagtcgcagcaggttctcggcgtctcctctgctgatggctccgtgataccatatttgcttctccagggggacggcaggatccaccctttctcctaggatcccgcagaactcagggctcccatgtttgataggcttaaagcccctccagggcacgaagctggcgccgccggtcccgcgaaggtgagggggatgactgccgcttctcgttgccattaaactgtgctgccagtgctgggatgctgaccccgttgcactcccaaggctggtcgtactcatcggcgggcctgtcgtcatcctgagggcagcttgctctcccgcagtcggtggctgactgtgctcttcgagtccgagtcaacactttccccttcaggttcgtaaggggtttcatataactggatacctttatgctgggaccggacactttcctgcctctgaaattctgtcatgatactctgatgctcatagggctccatgtagccagaagtctccccttttccggg

SEQ ID NO: 4529 - DNA, 490 bp, Homo sapien
atcaaacccccaaagatctggaaaccgtgcaacagcggacccagctccctctcttttgtagcagttgtagagcatgtctgtcctatgtgtctggatgttcgagctctccttttagctcgttcatttcccagtgaggaagctgaggccgtaaggtggtaagttctgcttgctggaggctccctgttggagctctttgcgcacccagcagggtccctgtgcagctgggggaggtgcactggcagagctgcgtcccagtccatgccatctgtgagaagcagctgcctgtaggcttgtgtgggggacagagtaaggtaatgcatgtggaactctgaggatgatgcctggtactcgggagctctccatcagctgtagcctaggccttcacaggctgcctggctggccacatcccttagagagacgaattgctgttttctaaacgctggaacactcaggaagttctcctctctcccctccaaagggcttatgagaa

SEQ ID NO: 4530 - DNA, 210 bp, Homo sapien
ttcacctgcaaaatatgattgctatttacaacgggcaacctgcaaacgagaaggctgtggatttgattattgtacgaagtgtctctgtaattatcatactactaaagactgttcagatggcaagctcctcaaagccagttgtaaagataggtcccctgcctggtacaaagaaaagcaaaaagaatttacgaagattgtgatctcttatta

SEQ ID NO: 4531 - DNA, 302 bp, Homo sapien
cagcgtggttcaggactatgactcgtgagtacctgcttctctgggctatacccgctccctgcagatgcttcagcctctgagcttacagtcccctcactgccttttgcccaatacactgtcctcccacagagacaagctgttccctgcatttggatttggggcccaggttccccctgactggcaggtgagctccctctctttctgccactcctgttttcagtttcagggtcctgattttgggggatgtggtaaatttacttgctacttggcactcagctttaagaggagatgcagggttggat

SEQ ID NO: 4532 - DNA, 436 bp, Homo sapien
cgccacacccagcctaatggccgaggaccctgggcatcgcagccttgcctccagtgccctgtctcctttggccctcaatctggtcccaaatctggctgtgtcccaaagggtgtgtgggaagtggggggaaagtagaggatggctcgatgttttgcagctacctcttttccccgtgtttctttttagacaaattacactgcctgaagttgcagttcccctttccctggggagccccaagaacagagtcaggcaaggggtggggagtccagggatcttggggacccctcctaggagagctgcagtctcttccctcaggggaacatcccagaatgcatatcgatcagctctcagccaggcttcgacaatctcgcagcccccactaggtggacacattaatgatttggtttctcccctgggcagccaacctgccccagag

SEQ ID NO: 4533 - DNA, 417 bp, Homo sapien
agagaaatgaaaacatatgtcccacaaaaaattatagataaatgttcataggaacattatttataaaaaccaaaaactgggaacaacccaaatgctcaactgatgactggataaaaattaaatgtggcatatctatacaatgaaataatgattcatgctatgacttggatgaatcttgaaaacatatgatacgggaaagaagtcagctttaaagaccacacattgtgtgactccatttatatgaaatgtccagaataggcaaatctatagaaacagtagattagtagtttgctagggttaaggggttcggggaaaatagagaatttctgctaatgagtgtgagtttcttttaagggtgatgttctaaaattgattgtgtgctgatagttgtacaactctgtgaatccacttaaaatt

SEQ ID NO: 4534 - DNA, 388 bp, Homo sapien
ttagaatgacgacagcccctggggttggggcaggcgagtgtggccacatcatccaagccctcccagagacacaaataggcttttttgctctaaaaataaataccagcccttttttggtcacaaatccagcatctcagcagaaaactgcctgacatgaaaagtcccctgaggaactgcatctgcgtttcaggggcttttcattttttctccttttttaaagtgtagattgtgggtgcttcctagaggcctgccttcttctggaactggaagtgggctatcaccatgggcaagcccttgggtgcaggctccccacctgcctgggaactctggcagctctcctcagctccttgggcttgagcagctgcaactgccccagatttgctgtgga

SEQ ID NO: 4535 - DNA, 440 bp, Homo sapien
aggccactgggtaacaacagaagaatacttcagttggatcctccagatagccactgccttttcctcaagggagcaacgttagctttcctgaatgatgaagtttggaatttgtcaaatgtacaacagggaaaatatctttgtatcttaaaggatgtgatggagaagttatcaactggtgttttcagacctcagtcggatgaacatattccagtatttgaagccagaattttctttggaaattgttgagaaaaaccaaggaagataaaacaagttgcatttttaagcacgtttctctgctaagacaagatgctcagttgacacatttgaaaagtgtttgaaaaaatccttgtgcaaatgatccagataattctataattaacatcttaagggaatttttctaaaaaccttttcattgtttctatatattttgcccctgctat

SEQ ID NO: 4536 - DNA, 227 bp, Homo sapien
gtgtaggatgccttcagaatatccgagaagcagcattggggtgtctggagatgcaaatgtgaccatgtggggacacagtccaaaggcaacccttgaggtagagttgtgaagaccactctcctagacctgagtgctggcgacaacagtaccgggcatctgcagtgtgtaaactagtgccaggtgctgcacacacgtggtcataaatccatctgttggcacatcaggga

SEQ ID NO: 4537 - DNA, 258 bp, Homo sapien
taaaaagagcccatcaataattttgaggtttacatataatttctcataaagtttacctggtttaaatatgatttataggaggataaatatgattgattaccaaaaatctgtaataaaaaataaccaactgagatacacaaagttctttaaattcttcagtgatctgttttatatatttactagacaaaactatttatctcccaacttcacatagagaaaagtactgtgaggaatttattggataagctcttaagagtc

SEQ ID NO: 4538 - DNA, 362 bp, Homo sapien
ctctgctggagcaggacttcagagtgtttgttttcaacctgcttttaaagtgatttgaagagagcggctttgaagattatcgcggaacacctgcccattaatcttgaccctgttaaaacaataactgcctatccagatatgccacacttctgcctgctgttggcaaccctcctggactaggctgctcttgttaatcacatggatgttatataagagttcggaccgcccagcacacaaggtcagcatgctgctcctctgtcacgctctcgctatagctgttgtccagatcgttatcttctcagaaagctgggcatttgccaagaacatcaacttctataatgtgaggcctcctctcgacccta

SEQ ID NO: 4539 - DNA, 255 bp, Homo sapien
ttcggaacgcggcacctatgagagaaggctgccgggttctcgatggcccattctgccaggtagagggcagcatctcatgtgaccaggcctgtgatgtcgtgggagatgatggctgtgctctcggagagtgtgactgagcctcccgagggctgcaccacgagagggcgagagagtcagtccagcaatcagaaggcaagtggcttagaagacaagtagccatccaccacatggctgaataaaccatgacaggaccaa

SEQ ID NO: 4540 - DNA, 315 bp, Homo sapien
cacgccatcacttgtggctttaacgccctggagcagatcctacagagcacagcgtgcatatactgtgtaggagacgaggtgaccatggctgatctgtgcttggtgcctcaggtggcaaatgctgaaagattcaaggtggatctcaccccctaccctaccatcagctccatcaacaagaggctgctggtcttggaggccttccaggtgtctcacccctgccggcagccagatacacccactgagctgagggcctagctcccaaatcctgccccgttggcacagggccacaggagcagaagctgggtgggctgaaga

SEQ ID NO: 4541 - DNA, 247 bp, Homo sapien
aattcggaacgaggaaagtgaacaaagaagtatagttgtgccagcttcgtagttgcccatgtggacaagtcagcaggatcaggacacgaggaagagtaaatgtgagacagtcaatgtgacttctgcgataaacagatttttaaaccccgaaattttgcaaaattttggtgaaacctgaactttcttcgttgcatatactggcactatctgtaccatcatacaactgtctcacattaaagctattttt

SEQ ID NO: 4542 - DNA, 425 bp, Homo sapien
aggcacacgaccaccacacgagcacgtgccacgcatgcctcgtgtgctcatctcacacacacacccctcccgggtcacgcagacaccccccccccacacacatctcatgccgtacacctgaggctgctcacgtctcacgcccagtgttggtgcacatttgcctacaacatgctgccctctccacccacccagggacaccccacggctcctccctgcccctgcccctcccccagccttgaggtgccctgcccggcggggctggtgaatatgcaatgggagtcccaggctgtacagtggtgagtgtgtgtgtggcgtggcgtgcccgtccccagggctggctggtgcccacgcgggcgctgtcatgtgaagctcgtgtcctgactttgtcttaagtgcattcacgcacttactcttggccttatgta

SEQ ID NO: 4543 - DNA, 338 bp, Homo sapien
gctcggggctgcagtgcgctctaatggtgcctgagaaataaccactgcattcagcctgggcaatgaagcgagaccccgtctctaaaaaaacaatcgaggggtcaaagaggatgccaaacttaattagagactgagacagggcagggtgccgaggtgtctgcatgcgtttcatgtggatgcccgtgtctattctggcctgctcctgggccccctccccactcagccctggctgatgagaatgggacagggactcccttctcgtgtccctgtgcagcgtcggcccaggaggtagcagagcagtatatgcacatctgggtgtgccctcctgcatgtcccca

SEQ ID NO: 4544 - DNA, 370 bp, Homo sapien
taggaacagccatggaatgttctaatgcttgaaatacagaccatagcatgcacccatgtgcatgccatgtatttcttgttgagagtttcttgggaaccagtgaatttggctggaccatcagaaaattttgtgacttctccctctgcctgttgtccaaatggtggagagatggacccttgtggccagagaacacactggtgatttctcagacttcccttagcattttcagaggatctcagggtgctctttccctttctcctccttattggcttctttgttcccatggaatcactgatgaagcccagccctcctggagttaagtgtggtcaaatggtaaaaaatcccaggtgtttgttgctattcatctttg

SEQ ID NO: 4545 - DNA, 442 bp, Homo sapien
ttttttttcttttttaaccaaaaatataattacaagtaggaaggggatacaaaattttagtttctatacagagtggaatgttttacttaagggaaaaaaaattaaatagacaatttttctaatgctcaggtagttgaaaacagttgcttaaaaaattgaatctctagaattgtagcacgggtgtttactctcagaagcacgactcctgatattgattttcaggaagtacattaataaagaactcctaattgattttttttttaagacttcgcttgttgccttttatttgaaggtgcaaagaagggcccgggatgctaaagtgttctaatgagatgcttagctaacagaggcaccttaagcagagtgccttggagtacgggaggcagcagtgcatttaatgacttcattcaacagtcccgctcatttatgacctcagccgtgc

SEQ ID NO: 4546 - DNA, 207 bp, Homo sapien
actctgaaatcttaatccacaatatcccacaaatagtgacttaggtggaggaatagttcagtcagaactggtatctcctattggatcgtgcagaaggaagaactaagaacaaaaaaatggtagaccacaacgggtgagatgaatggcaggctggaagacaaaaatactaccagtaaaggaacatttacctcacagaaggggtgggag

SEQ ID NO: 4547 - DNA, 381 bp, Homo sapien
ggaccgggcgcccggaggaccaagcgagcgcatcccgcctactcgtgctgggacatcacccagcctggacgccgctcctcgcctttcttccccgcgcatcgccagcgccaaccaaagatccccgccgggaaagcctctctgccaagctggaaagcgctgaaggcggatcgtctctcagacttgggtttgcaggttcacaaggcccgggaggcttacggtgggcgcctgcctaacagagggtccttgcggagaagcgcagaacgacaaatgccagaggcggtgaccgcgtcctctggataccagcgccgcaccgcgcacccgcgccgcctgcgcgccctgcagtcggctgggccattcggccttatataccaggcggacccg

SEQ ID NO: 4548 - DNA, 420 bp, Homo sapien
tgaaaaagaaagaaaatgggttaccactcattatgtgtaccatacatgcaagtgctatcggctcgagaagaaaaaagaattctgtgaggcacgagaataggaaactaacttgtaacagttaaatctgtttacttgcaatatcttgagctggtacgaacatctctgattggaatgcaattgcaggaaacagcaggagttgtgacagtggttaacgggcagatcttgcagagttttttaaaaacagatgtgcagccctgaagcaatgcatttttattcccttcccttgccccctccacacgcacacttcatacacattctctagctgttctgagaaagcaagctagaatccaaacaaaaggatgaaaccaagtaattgtcagattattttgaaaataaaagtcagacctcattaatttgtaa

SEQ ID NO: 4549 - DNA, 116 bp, Homo sapien
atgaaaaaataaaatttactgtttatttctttgttacacaaaggtggtccaagacatcttagtccatctcctatgtccttttggccataattacacacacaataatggcaagctag

SEQ ID NO: 4550 - DNA, 242 bp, Homo sapien
tcccgctctcctcgggctctctgcccccgccccgtttctcctcccccatcgcgagggccccttccctcccctccctgcgggcgggcaattcaaacccgaaagtgcaggaaggcggcgctcggggttggcgggcgggggaaagcgctgccgccaaaaaaccgccgccgagatgggcgctcttgtgcggtatggccccgcccctcgcccacgttccccgcgcacgagacgcgcgctgtcgccgc

SEQ ID NO: 4551 - DNA, 175 bp, Homo sapien
agacaaaggaagacaaatacttcttaaaacaaagactcaggtcagagaactagaacgccatgagggaaatctctacagggtcgtagttcaaggcaattgcacataagaggggctgggctcttcactcagctggggaaagttctggagctcccacggaaacccccagccagctccc

SEQ ID NO: 4552 - DNA, 396 bp, Homo sapien
tttcagatcacgacaacaggtaacctttagtcagaactcaccacccactgtgttaagccttacatgacaatcaccatgaagatttacatacacatgttatatcatagtctcctcacaacatgtctaagaggtaggcacgtcattgttcccattttgcagatgaggaaactgaggttcagagagggcacttggcttgcccaaagtcacacagcagggagtggcagaggaagtcaggttgggtgaccccagtaactgctctcagaggctgggtgatgaccggcttcctggcttctctggaataaacctttgccaccacttcctgcatttcagcttcagtacaggcagagaatggggataggtgggggaatgaggtgagaggggagatgtttagaggtg

SEQ ID NO: 4553 - DNA, 268 bp, Homo sapien
ttttttgagatggagtcttgctcagccgctcaggtgtgagtgcagtgggagactccatctcggaaaaaagataaaagaaagatatttttgtatagctgtactgtgtttgtgttttaagctaagtgttactacaagagtcaagaagttaaaaaaaaaagtttataaaatgtaagaaagttacagtaagttaggttaatctattattgaatgtatgtttttaaaataaatttagtatggccaagtgtacagtgtttgtaaagtgtacagt

SEQ ID NO: 4554 - DNA, 210 bp, Homo sapien
aatgtagtcgtcgtcgccgccggcggccgggcaccgggatgagaatctgatcctcgaagccgtcctcggcgcgcacccgatccgagtcgtcgccgcccaccacctcctcgcgcgtctgcaccaggatcacctcctggtggtggtgcacctgggtcgggtcgtcggtgaccagcggctgtagagcgatcatgggcgggtggtggtggtggt

SEQ ID NO: 4555 - DNA, 469 bp, Homo sapien
gcggccgcaaaagtcgtctgactctctatccaggcaatgtcgctgtcattgagccagaggtgaagcagatggttaccgtctccggtcgtatccgtgcggaagacggcacactgctggctaacgcacggattaacaaccatatcggccgaacccgaaccgatgaaaacggcgagtttgtcatggacgtggataagaaataccccactatcgattttcgctacagtggcaataaaacctgcgaagtggctctggaactcaaccaggcgcgcggtgccgatctgggtcggtgatgtggtctgcagcggcctctcatcgtgggcggcggtgaccgagacaggagaagagaatgagagttaacctactaataacgatgataattttcgcgctaatctggccagtaactgcgctcagagcggcagtgagcaaaacaacctgggcggatgcaccggcacgcgagtttgtgtttgtc

SEQ ID NO: 4556 - DNA, 402 bp, Homo sapien
tttagagaaaaggtctcactctgtcaccaacactggggtacagtggtgtgatcatagctcactgcagcctcaacttcttgagttcaagccaacctcctacctcagcctcccaaacagctgggactacaggcatatgtcatagcacccagctaatttttaaaatttttttggtagagatgggtctcactatgttgctcaggctggtcttgacctcctaggctcaagcaatgttgagcctcccaaagtgttattaggattataagtgtgagccaccatgcctgaacagtattatattatttctccaaattagttatgtgagaaattccctaggatttaatactaaacttgttttaaattctggactaattgtaaatttttcataaaaaaagacttagtaactgt

SEQ ID NO: 4557 - DNA, 415 bp, Homo sapien
caggtttttatttttttatttcttatattttttaagacggagtttcactcttgttgcccaggtgcagtgcaatggcatgatctcgactcactgcaacctccacctcccaggttcaagggattctcctgtctcagcctcccaagtagctgagattacaggcatgcaccagcacacccagctaattttgtatttttagtagagacagggtttctccatgttggtcaggctagtctcgaactcccgacctcaggtgatacacccgcctcggcctctcaaagtgctgggattacaggtgtgagccaccatgcctagcccctggggacacttttttcagaggccagatgtcaacttccatctccacatgcctcagtttacacatcattgcatctcagcacagagccccatcatgtagggt

SEQ ID NO: 4558 - DNA, 430 bp, Homo sapien
ttaaataaataagctgtattatctgtacaaaaaatacaaatacagttttgtgttttagaggagaaagtgcctccttccacattagccagcagccttcattgtcttgtggtgctgctgagttgcaattcacagaacaaacattaaatgtacattcatttcatgcaacgagcattctgcttcccacccaaacctaggttctgccagctcactgagacccactgccaactgctccaacccaacatggagctggaggatgcttgctctttaggaaatgtaaatagtgaccactgattttcaatcactatcgaactagaaataattaaccacattagtagtagtatggaatttgtctgtctttatcattccatgcataactattatgccacaaatgaattccctcttactgcctcagcatcccatgttagttttt

SEQ ID NO: 4559 - DNA, 389 bp, Homo sapien
ttttgggaaagaaggaagtttatttctgcagccacttacagggagaagcgccaggtaaatcaccagatcaactcaaagttacaagtttttttttctagtgcttatatatatcttaagctccatgtgggattgcacctacaagcaggagtgtttcattcaatcaacatctaatctttaactcgggtctagcgtctggaaagatttccctagagtcttggaaagtttttgaatcttaagacaggccgaggtgaatgtgtacgaacgctatcattattcgatcagattttagggtctgagaaaacccagacggggtctcagtgggtttgttttcacattccatccgtgatactcaggcaccagtttctccatttctttaacgttaacttatg

SEQ ID NO: 4560 - DNA, 127 bp, Homo sapien
atgcattattaataataataacaaaataaaataatatatactatataggcttacaagagaaaaagaggtagtagacttgaggagacagatcatcatgctcaggcccacaagtccactttagagagac

SEQ ID NO: 4561 - DNA, 118 bp, Homo sapien
gaacacagaagctcaacaacagaagaaaaaaaaaaaggatcaaaggagaaaacacatcaaccacaaacaagagcaatccatagaagaaaataggaaaaccacaaggccacaaaaagga

SEQ ID NO: 4562 - DNA, 283 bp, Homo sapien
tgtatctcgtaaatctttttaaattttcaaaagaaaccagtgtagaaacttgtgatggaacatctcagatacggcaatataataattttgcaaattccattatttaggttactgccatttctaagtcacagaataattcaacagtaataaatatcatgtaacagaataatttaacgcactgattgctactttgatatttatcatcagctttccatttcagaaaacatcacggaagtacaaataaaatctgcttttctgaatattccaaaaggcagacagcagc

SEQ ID NO: 4563 - DNA, 288 bp, Homo sapien
ttttcagtatttaatgccattttattcacatgctcccatgttctccctccctcccattgtagccttgctgcccaggggagggatatgtcttcctttatgcatctgggaaaccaggaacagaccctgcgcaggagagtcagagggggaagagttagaatgggtcagtggctggaacaaagttctggttaaggaggagattagtgccacccacggtgagaagcagagaaggcacttgcatcctatgcagccctgaagaccaggctcctttgggcaaaaggcaagactctg

SEQ ID NO: 4564 - DNA, 428 bp, Homo sapien
cgaagaggaaatcaacatgggcgagtacgctggcagtgacaaactgtaccatcagtggctctccactgtccggaaaggaagtggagcaattctgaatactgtaaagaccaaagcaaatccggccatgaagactgtctacaagttcgacattgccgagaatggctgcgccccaccccagaagagcagctgccaaagactgcaccgtccccactggtggaggacaaggaccccaagctccgagaagaccggcggccaatcacagtccactttggacaggcaaattttcaaaaattttgaggagacagcacggctgaggtcataaatgagcgggactgttgaatgaagtcattaaatgcactgctgcctcccgtactccaaggcactctgcttaaggtgcctctgttagctaagcatctcattagaacact

SEQ ID NO: 4565 - DNA, 406 bp, Homo sapien
gctgagcttaaaagcaaaaaacaaaaagtacacagacatatttattaaaatgtaatacagtttattgaactttctaggtatggagtttgatggacagggctgcctttaatgagtgtgaaggtcactaagtcacttagacatctcaccgtggaagtttgtgagcctgcattaggagatagactgattaccatacatgacataaaaaggaacagtggatagctcatactttatggtggttcttctcctccgaaataatatactgcagaaatcccagacagagctccttacaaacctttaattgtaatatatttttgatgattattcacattgaatgcacagaccaagaattcagtgaatgtcattttttaaaaaactaatttgtattgtctgctctagtgatacaagt

SEQ ID NO: 4566 - DNA, 428 bp, Homo sapien
gagacagaggccactctgttgctcaggctggagtgcagtgacgcaatctcggctcactgcaacctccgcctcccgggtccaagcgattctcatgcctcagcctcctgagtagttgggactacaggcatgcaccaccacgcccacctaattttttttgtattttcagtagagatggggttttgccatgttggccaggctggtctcgaactcctgacctcagtggtgggattacaggcatgagccaccacgcccaacctgatgccttctttttctgaccatttcctctccagcaatcccaccgtggccacaggaaaacctggcccaggagattccaatgttcttggcttcccctcctgtcacagcctcagtgattttgtgatttcatcttgcttctcagggcttgcttttatcaaaagggttggttagtc

SEQ ID NO: 4567 - DNA, 428 bp, Homo sapien
agtagttcttccggaacttcagacagattcagccgggtactcaagcacatcttgacccagaggagctactacccactctacccgccccaagaagacatggccattgactatgagtcgttctatgtttacgcacagctgcctgtcaccccagatgtcctcatcatcccgtcagagctgaggtacttcgtgaaggatgtcctcggctgtgtctgtgtgaaccctgggcgccttaccaaagggcaggtgggaggcaccttcgcccgactctaccttaggaggccggcagcggacggggcagagaggcagagccatgcattgctgtgcaggtcgtcaggatctgaggcttctgtcctctgctgttctctgctgtgtgggccttaaagtcttagccaagagccaagacatagccctgtgacaaggtgaacagt

SEQ ID NO: 4568 - DNA, 416 bp, Homo sapien
gaaaaatggaaaaatgtaaaaggcagcccctccccaggctttgtgagcctggcccaagccagtacaagagggcctggggacgatgtggtcagccaggaagcataggatgccatttcttttatagattccttggtatttctggtggggtaaggggcaggccagggctgttcacgcccatgagggaagaggaaagtgccacatgggcaaggtgtcccaccctcccctcctgaccctcctacgaggcttatcctggcaatggggtagtcactgccacccttccacacacacacacacacacacacacacacacacaaaaatcccttccttgtgggattcttgggcatctcctgcctccctcactctcacggtaattaatgtcttaattggctgttgcctggggaacaggagagctgctg

SEQ ID NO: 4569 - DNA, 483 bp, Homo sapien
cggcacgagggatgaacaaaagtgcagggatgactcctgagggtcttacttattaaatgggtcaggcaatgaatgaagactggcttgtaagctacaaggtagtttcgcccatttacacgaagacaatttcatgtattatttaacccgttcctatacactggtgtctctttgctgtccagcatgaaataaatatgaaataaatataagcttacaaattaatgaggtctgacttttattttcaaaataatctgacaattacttggtttcatccttttgtttggattctagcttgctttctcagaacagctagagaatgtgtatgaagtgtgcgtgtggagggggcaagggaagggaataaaaatgcattgcttcagggctgcacatctgtttttaaaaaactctgcaagatctgcccgttaaccactgtcacaactcctgctgtttcctgcaattgcattccaatcagagatgttcgtaccagct

SEQ ID NO: 4570 - DNA, 149 bp, Homo sapien
gtgggaaaacttgaccctgagctagactcctaatctagcttgccattattgtgtgtgtaattatggccaaaaggacataggagatggactaagatgtcttggaccacctttgtgtaacaaagaaataaacagtaaattttattttttca

SEQ ID NO: 4571 - DNA, 407 bp, Homo sapien
  misc_feature (1)...(407): n = A,T,C or G
tctggggaagctagtgagctcggtggcggcccagggactggttttggacactcttccaggtgtgaagatctccaaagcccgtgacaaatctccctgccgcagccaggcctggtggagctgctgaaccgggtgcagagcagcggggcccacgaccagaggggccttctgaggaaagaggacctggtacttccagaatttctgcagctgcccgcccaagggccagctccgaggagaccccaccacagaccaaatcagcagcccagcccatcgggggatccttgaactccaccaccgactcagccctctgacagctacccaacagtccaggacagctgcatggcacccggcnggccgagcatgccatgggtccgctctgcatgccctgtctgtgccatgagtgtccctgg

SEQ ID NO: 4572 - DNA, 423 bp, Homo sapien
gccctggctccgcctggcacttcagaaacgctgaaacgtttcatggcagagcagctgaaccaggagcagcagcagattcctggaaaaccaggcactttcacttggcagggcctgtcgactgcacatggttaaaataaacctgtactggacccagtagtgccttttaaggtgaaaggaatggtaaatctgtacctttaatatgtcctacttttggcccctacctgaaagttactttttttccatcatctgtatataaaattatttttatcatgatgtatattatgtacataaataaaaggccatgattattgatttatataatagaattgtatagattatttttgcacagttttgtcataaattagggtggtaatgaactggattgaactactatatgtgcattatattgaattctgcttgtca

SEQ ID NO: 4573 - DNA, 292 bp, Homo sapien
cctcgtcgccgtcaggccccatcctgccaaggcgaacggatgagcacgatctcatgttgctgaagctggccaggcccgtagtgctggggccccgcgtccgggccatgcagcttccctaccgctgtgctcagcccggagaccagtgccaggttgctggctggggcaccacggccgcccggagagtggagtacaacaagggcctgacctgctccagcatcactatcctgagccctaaagagtgtgaggtcttctaccctggcgtggtcaccaacaacatgatatgtgctggact

SEQ ID NO: 4574 - DNA, 166 bp, Homo sapien
gcggttcttgttgaaaaccctcattggcataaccttaaccctggaggtcgacccaagtgaccccatggagaatgtcaagcccaaatttagagacagggagggtatcccccgtgcccaaaagcctctgatatttccgggaaaacggctggggcttgcgcgcactctc

SEQ ID NO: 4575 - DNA, 475 bp, Homo sapien
aagaacacaaaaatgcaaacacatggtagggaattacatactgcttattctcaacagtaccacagaaccagtgtttgagtgctgacaccatatgcaacatggggcatccgggctggagtgatccagttttttagttggtggtggcgatgatttttctttccttttggtttataattttctgttcatttttccccctttctcccccacattcattaagaaccctactgaaaccctaggtgacaaaaggtgtgccttctgttgccacatttgacccaccacaggactcactggactggacttctatttatattgtattaagtaactgatatatatatatatatatatctttgattgacaccaaaaaattaccttggcacaaatgccagacctgtgaaggtcagaggcccgctgcttttcccaggagggagggaactttttggttgtctgtggcaattcctctgtacagattgtaact

SEQ ID NO: 4576 - DNA, 101 bp, Homo sapien
cgcctggcgctggctccagaccccagaggcatacatgcagcagcgagtgttccgatcactggcctacatgcggccactgagcatatgggccatgcagctag

SEQ ID NO: 4577 - DNA, 217 bp, Homo sapien
gttaccaatctgaagtgggagcaatacaaagcccatcacggctacaacagaaggactcagaaggaaatctttgtgaaacaagttaatattggccttgaataccatataagaataaaaagacagtcatttgtgttctcacttctcatattttagagtagagaatatgaagtgaacaatatttttgtcttaaaaaggaagggtctcaagactttttgct

SEQ ID NO: 4578 - DNA, 176 bp, Homo sapien
gccaacatttccagcaattaaaacaatgatgggaaactccaatccatgaggaggctggtcagtcacctcaaggatactggcctaaagaagtctgaagtggctgatgaccataacttctgagtctgtttccaaaagaaagactcttgttaatgctgttaccagagagtagagatttt

SEQ ID NO: 4579 - DNA, 366 bp, Homo sapien
gcaggacccgcaggccgttagggcccaatgcggccaacccggaatggcattgtcctttaagccccaatttcaaaaggaatggaaacgggcgtttgccaactggttaaacaaaccggcccgtaaattcccagacattaaggcccttaaaaccaagggcgccccatatggccgcgcgccgcgttgtgtgccatatggggcatagtgcgctttcccacaggtttgtatcacaccaaagtttgcgcccggcggggtttagactttaggaggctcaaggtggtcgggatttacaacaaaagtgggcccgagcatcgggaattttgtggattccaggaggcgggaaaagttcacggagtgtcttcagagcaa

SEQ ID NO: 4580 - DNA, 168 bp, Homo sapien
gtaaaaacaaaaaaaaatgcagactgcgctttgattaattcagtgaacaaaacatatgctgttggttctgttctatgaaattcatatatgatcaataaaatcttttaaaagagcaactttggcttttagaattatactgccgaccatgttttttgtcccagttaactc

SEQ ID NO: 4581 - DNA, 223 bp, Homo sapien
gcgacgggacgcgctgggaccggcgtcgggggtcgcggggaccatgcagcggaggtgggtcttcgtgctgctcgacgtgctgtgcttactggtcgcctccctgcccttcgctatcctgacgctggtgaacgccccgtacaagcgaggattttactgcggggatgactccatccggtacccctaccgtccagataccatcacccacgggctcatggctggggtc

SEQ ID NO: 4582 - DNA, 368 bp, Homo sapien
tgttttgtccttttgcattctaaagtctttaggtggatcttttggatatgattcttcttgcaataaattgccaagaaccagggtttcatttctgtacagagcaatttttaaaacttttcctttttaaacttttcctttttcctagttactaaactggcattttaacctctttttctccttttagctttgaatctgtctttcttaaacttgtcttttactctttttcttctcatatgtattaataactatagtcagtgttttatatttagtttttagtactcagcgggaggtcatgtaactaattgtcataccagggataaaactaataaggtgcccattttttgtaagtaaaaggaaccacggaagat

SEQ ID NO: 4583 - DNA, 129 bp, Homo sapien
cacgggcacgccggccaccaccaccaccaccatcaacaccaccaccacccgcccatgatcgctctgcagccgctggtcaccgacgacccgacccaggtgcaccaccaccaggaggtgatcctggtgcag

SEQ ID NO: 4584 - DNA, 188 bp, Homo sapien
tatcagcagaatccatgccagtctcatgtgctggacaactatgatgatagctagctgccctcagagatcactgagcgaatctctgggtccaactctaggggacagcggcagctatgattaatccgcggggtccagggctattgatgattctgactattactttgaaggcgtggagccgcaagcactgg

SEQ ID NO: 4585 - DNA, 492 bp, Homo sapien
gtcaatattagcaataattgcctgattgacagcacgccagagggaatgaaatgaggccttctctcctacctcccaggagtatgtaactcagatccttagcataaagatccccaggaataccactgctctaacccggtgaacattttttctaatgcagggttaggcttacgtctgaattccacaagacatcctccccctccagtacggaagttccaaggcacttgttttccagcatatcagcctaacctcagtgccttgaaatatggctttaagcgtttgagaactgagatttcctgaaaccataggcccttgccccaggggtttctccacatccgggtgttaagacacctgatggcactgttggtttgtcccctataccccagaaaatctatcctgcaaggtagctacttcaatcttgtcattaaaatgtgtcaagtcacagctcgcaatgccaaaggaatgctggggcagtaagtgaggtggataagtgag

SEQ ID NO: 4586 - DNA, 154 bp, Homo sapien
taaggttgagtctgtgctcaagataatccgtagtgtaattctcgctgtactgttgacagtcctcagtccagcagctatcagcggcgagtccagggagtgcgattgcaaaatcagaacggactgccacaggtctctggcagcgttgaccagagga

SEQ ID NO: 4587 - DNA, 445 bp, Homo sapien
gtttacttctggttgcacggtgttgaaagacttgcctgactttggaatttacttattaaaatgcacataaaagctaggtaatttataatgagagagcctgactgtgagctggggctgagcggtgctctgtcttctgttccttcctgcataatttttattaaacatttaggccatagtaatcatcctgctgatattgcaagtttgttgctagaatgaggttatataatatatacaaaaacattttttcaactgtaaagtgccttagtaatatagggtaataccagcaacattatggatatataattatagtctattgggccacacttaagtttggagtctaataaagtcacaatcaaattctgcaatttcaattgaagataaccttgtctttatattataaattagaagctaaagttgatttttctaagagttctttatttaaatg

SEQ ID NO: 4588 - DNA, 399 bp, Homo sapien
atcgtggcacagagaaagatcaccatccgggaggttggggggtgcatggtccgagtctggtccagttactatggaaactgccgttctctcctgtttgtgatggacgcctctgaccccacccagctctctgcatcctgtgtgcagctcttaggtctcctttctgcagaacaacttgcagaagcatcggtgctgatactcttcaataaaatcgacctaccctgttacatgtccacggaggagatgaagtcattaatcaggcttccagacatcattgcttgtgccaagcagaacatcaccacggcagaaatcagcgcccgtgaaggcactggcttagcaggggtgctggcctggctccaggcagcccacagagccaacgattgactgcacggcagaggcgca

SEQ ID NO: 4589 - DNA, 472 bp, Homo sapien
atcatgttactaaaaaatcagtgtaaagtctgtttaaaataaaaaagaatgttttctatgtctgtatatcttttgtgaatatttattaggatttcttattaaaaaagtgcaatattaataattgtacattgtcatccagaaacaaaactatttgggggactttattaactaacttcctgcagttgtgttcctgtaaactcagtagtgattattatatttttcctatttttaatagaacctggtgtttaactctggatccattcactgtacaggatgtgttgtaaaaactaacatgggatgctgaggcagtaagagggaattcatttgtggcataatagttatgcatggaatgataaagacagacaaattccatactactactaatgtggttaattatttctagttcgatagtgattgaaaatcagtggtcactatttacatttcctaaagagcaagcatcctccagctccat

SEQ ID NO: 4590 - DNA, 415 bp, Homo sapien
cgaggcggagcacaggaatcgcttgaatcccggggacagaggttgcagtgagccgagctcgtgccgctgcgctccagcctgggcgacagagcaagactccatcttaaaataaaataggccggccgagggtgctcatgcctgtaatcacagcattttggaggctgaggcgggtggattgcctgagctcaggagttcaagaccatcctggcctacatggtgaaaccccatctctgctagaagtgcaaaaattggccgggcatggtggcgcatgctgtaatcctagctgctttggaggctgaggcaggagaacagtttcggcccaggaggcggaagttgcagtgagccgagaccgccacattgcactccagcttgggcaagaggattgaaactccatcacaaaaataaataaataaat

SEQ ID NO: 4591 - DNA, 417 bp, Homo sapien
ttttttcttacttttaaattccaacttaaaattatgaggtttcagaaatatattgaaagtttaacaatgtttaaaaatagaaaagcatgagtgttcatgctttaaaatgatttttaaatttgtattttatattgttttatctatctgtctttgcaagcagtcttcaggttaaagatacttctaacaggttacagtacatttcctctgtatgtaaattagatgggataatagaattcataacccataatattctttgaaagctaagctttaaacttcattttatgtcctttcacaaataaattagtttaaaacagaaagtggctacttgccattttgacatcaactcattttgcgaggcttaggcagctagacatcgtttaaaacaaaatattaacttatattacatgtgtatctatc

SEQ ID NO: 4592 - DNA, 190 bp, Homo sapien
atggcaaaggaactgagtgtttccagccagcagccagcaagagctgcaagccttgtgaatgagcttggaagcagatcctcccctcactcaagccatgatatgacaacagcctgagacccagagttctgcatggctggagaggcctcaggaaacttacaatcatcttggaaggaaaaggggaagcagggcg

SEQ ID NO: 4593 - DNA, 325 bp, Homo sapien
gtgaagatgtgtgactttggcatcagtggctacttggtggactctgtggccaagacgatggatgccggctgcaagcctacatggcccctgagaggatcaacccagagctgaaccagaagggctacaatgtcaagtccgacgtctggagcctgggcatcaccatgattgagatggccatcctgcggttcccttacgagtcctgggggacccgttccagcagctgaagcaggtggtggaggagccgtccccccagctcccagccgaccgtttctcccccgagtttgtggacttcactgctcagtgcctgaggaagaaccccgcagag

SEQ ID NO: 4594 - DNA, 394 bp, Homo sapien
caattcggcacgatgggggagagccagctttgctattcccattgtgacagcgatggcaggcctgacaccaggggcagttagagcagcctcgtggagctcgcccctcccctcagcctgcccacctctccctgcatcctgaggccagtggccccgggctggcacagatacctcatcatccacccgctgctactatccgtccctgtcccccagcatcgggggcctgcaaatctagtgccgaatgactatgtccagattggtgacgatgggtgttgctgtttttcttgtcgtttgtgaacgctgtgatgctgtgtgcccaagtggcaagtcaccacccagcccttccttgggcgtctcccccagagtgctgtcgggaccacatctgtcctcaccctgt

SEQ ID NO: 4595 - DNA, 497 bp, Homo sapien
gggattcactctgtcttccctgtcttctctgcgagatcttttgggctaagctcttggagctgtggcctgggcctggcgtattagagccgttgtgtacatgtctgtctccccagtagactgagcgtcctgagggcagtggctgggtctcttcatcctgtccccagcttcacccagcacagggccaggcaccgagtaggcgtcggtagatgtttgctgaattgaattgaatccccacggcagctctgtgaggcaggtagggcgggaattatgagcccctctttccccaagaagaaataaagactcagaaagcacaaaggggcttggacccagcacgtggctgctgacgtgtttgtgtggcaggtggcgagctcttcacgcatctggagcgagagggcatcttcctggaagatacggcctgcttctacctggctgagatcacgctggccctgggcatacttccactccagggcatcatctaccgggagctcacagccgag

SEQ ID NO: 4596 - DNA, 476 bp, Homo sapien
gagcaatgcctggattcagattgatgaagaggcagacatagagacccagcccctcccagctagaggtgtggggcttaccagatacctgccccagagctagaggtgaagcccctgtggcgcacgcagttcaggacctgcatgagtgttgacagggccctaagaagaaccacatggagcagtgttgccacagggctgctggcacaaacattcacaggtctgggccagagcagcttccggaacctccaggccacctctcagaggactcggtccctgccctccctctgttctattggtcgcaggcctccccctgtcccagccccagctaccggggtcttccagggcctggggattgtgggcaggtggcatggagcggatgagcagaactgttgattgacaagcgactggatctagcaacagctgcagcacaagccaggtggaagtgtgctgcccttcagcttgagatggtccagggccgg

SEQ ID NO: 4597 - DNA, 210 bp, Homo sapien
aattcggcaccaggggggaaatctgacatcacagaagacattaattcagtcactttcaaagagtttgtctacaggcggtttctctgttatcaaaggcatttgaaataggattttacttaaacaataatggaacacaggagtatttaaagtgaagaacactttgcctgaatgtgatcagggcacataagtgacattggcgtgcttcatatg

SEQ ID NO: 4598 - DNA, 277 bp, Homo sapien
tccatttgttgcaacctgtgttttaggtgttatatatcgaaacattgccagatccagtgtcatgaaactttttaattattttgccttaagcctttcttctatgagttgttacaaatttggcccttacatttaggttttcgttcaattttgagttaatttttgtatgtggtgttaggtaagggaccaactttattcttttgcatgttgatgtccagatatcccataaccatttgttgaaaagattgtctgctctccattgtgtggacttggtaccttt

SEQ ID NO: 4599 - DNA, 317 bp, Homo sapien
acatcagagatgcctgcagggatcacatggaagggtatcattacagatatgaaatcaatgcggaccccagattaacaaacctcagttctaactcggatgtctgagaaatattagaggacagaccaaggacaactctgcatgagatgtagacttaagctttatccctactaggcttgctccactttcatcctccactatagatacaacggactttgactaaaagcagtgaaggggatttgcttccttgttatgtaaagtttctcggtgtgttctgttaatgtaagacgatgaacagttgtgtatagtgttttaccctc

SEQ ID NO: 4600 - DNA, 336 bp, Homo sapien
atcctttgccctctttttgatggggttgtttttttcttgcaaatttgtttaagttctttgtagattctggatattagtcaaatagtttttttgagatggagtctcactctgttgctgaggcaggaggatcacttgagcctgggagatcaaggctacagtgagccatgattgtgccactgcattccagcctgggtgaaagagtgggaccctgtctcaaaaacaaacgaagaaactgttagtgactttactgaacttttgatattaatcaggtgccttcgcagcagagtctcttggattatactgccttcatataattcaacaactgaataaaaaaac

SEQ ID NO: 4601 - DNA, 368 bp, Homo sapien
caaggacctggggggccattgccaagactgtcatactcaaggatgatgccagctttcctccttgctcctgggccatctcacctcctctgccaggggttcctacctctagtgtggcccatgttgctctggctgtattcctaggcccatgttgctcttgccagcttcttgtccatcctccatgcccatgccttccagctttcacctctggcatctatcatttgctcttctcttaactcctacctgaaaaccccattcctaaattattcactatatttcagacttcttcactcttctccaaaaacctgaatcagcttgtgctgattttttcctatctgctatccctaaaaggactagaccttctttctatc

SEQ ID NO: 4602 - DNA, 355 bp, Homo sapien
tttttttttttttttttttttttttttttttttataaagaaacaaggtttaattgactcagttttgcaggctatacaggaggcatggctggggaggccccaggaaacttacaatcatggtggaaggcaaaggggaagcaagtacatattcacatggcggcaggaaagagatagagtgaaggggcagtgcacacacttttaaacaaccagatctcatgagaactcactagcacgagaacaacaagggggaaattcacccccatgatccagtcacctcccaccaggcccctcctccaacactgaagcccataattcattatgagatttggctggggacacagtgccaaaccatatca

SEQ ID NO: 4603 - DNA, 506 bp, Homo sapien
ttttttttttccaaaacctcactttattccaatgtgaaatgaagacatgatggtttaaaaatgagaaaaagttcctgataagctgtgggggtgcttcacttgccagctcatgcccattccctctgaaacaaggtgtctgttacccataaacaactctctgtaaagccccaggtagaggtcacagctggacgtggctccctcaggctcacagggtagcaatctcctcccccagtccaggcttccacagcaggcacggacaggtgcagagagggagtggccatggcatgtggggtcccctgccaccctcagagctagtctctgcagaaggtgctgtgtggtaagcagcagggctccacagagaggagacaacccttcctgtgtctgcaacctttccccaggatccatgattcaaccctggctccctaggccccttacccagcacaccctccgtgtgtcaggcagctcaggttaaaatggggagaatgatatattccgactgtagaccc

SEQ ID NO: 4604 - DNA, 305 bp, Homo sapien
gcggccgcacctggagcccgacggcctgcggaggctagaaactgctcaacaagtgcgccgcctcagccgcggaggagagcggggccggcaagaaggacaaggtgaccatagccgatgactactcagatccctttgatgccaagaatgatctcaagagcaaagcaggaaagggggagagtgctggctacatggagccctatgaggcacagaggatcatgacagaatttcagaggcaggaaagtgtccggtcccagcattaaggtatccagttatattacaaccctttagaaccttaagggcaaaat

SEQ ID NO: 4605 - DNA, 299 bp, Homo sapien
tttttttttttttttttttttaaggcggacatctttattcaagccagcaaatgacacgccaggagcccaggtgagccggagtgctctgcccagcctggctgcagttgttggccagagctcagagctctcctgggcctggcagatggctctgctgcacttctttttgggactcagagactaaattagaaaggggtgggggtagccccaggagaacccactttcattgtcaatcttgaggtcaaagaaaaccagaggtctgtcttctgcttgggggtcagcaaggttctagtccaggaccc

SEQ ID NO: 4606 - DNA, 167 bp, Homo sapien
tttttttttttttttttctgcagggggcatgttcccgtttactgagcgcgagttctcttggggtggaacggggaccacccgtgcctgctcctggccaggcggggatccccagcagggctggggccagcaagggagtggggccctcaggcacgggtggaggctaggag

SEQ ID NO: 4607 - DNA, 442 bp, Homo sapien
taatgttttagcaacgacttttttctctctgaatattcaaaacattgcaatacagtctttaaagagttgagatgatacaaggtttgtaaataatctagttgaatgcttagcacacaatagctaatacacattagtttctccccttcctcattctggaactgggattgtttccacttttaggctattatgaataacgctgctatggacatttgtgcacaggtttttatgtggatataagttttcatttatcttgggtatatacctgggagaggaattgctggatcatatcgtaactctacatttaaccatttgaagaactaccagactttttccaaagtggctgccccattttacattcctaccagcatgttatgagaatttcaatttctccacatcctcatcaatactagttattatctttttgattgtagacattgggtgt

SEQ ID NO: 4608 - DNA, 431 bp, Homo sapien
  misc_feature (1)...(431): n = A,T,C or G
ggagtataaaaataggacttttttccttatcacatcaattatcaaagaaacagtacgtaacaaaaatacaaagctctggtggatttttttgtcttttgtcccccccaccaccacttctacccaacagccccttgccagggagcccttggctgaagcctggacgctgtccctgaggtgaccccagggctcaggagaaacggtggtccaggtctctctgggggctagcagagtatgagtaggccttgccaataccaagcggtcccggagcagcttgaagaaggcatagtagttgctgaagaggatgagggccagcgagatggtctggtgccacttttcagaggacattagggagtacagctgatagacaatgacagcgcnctccagcagcaggaggatgttgaggatccgcagggtttgctgaaaagaactgc

SEQ ID NO: 4609 - DNA, 389 bp, Homo sapien
ttttaaaaagttttattgagatataattcatataccatacgatttacccatttaaaatatacaatccaataattttaagtggattcacagagttgtacaactatcagcacacaatcaattttagaacatcacccttaaaagaaactcacactcattagcagaaattctctattttcccccaaccccttagccctagcaaactactaatctactgtttctatagatttgcctattctggacatttcatataaatggagtcacacaatgtgtggtctttaaagctgacttctttcccttatcatatgttttcaagattcatccaagtcatagcatgaatcattatttcattgtatagatatgccacatttaatttttatccagtcatcagt

SEQ ID NO: 4610 - DNA, 136 bp, Homo sapien
ttagggaaaaagggacccggccgggggaaaaagggccaaacccccccccgaaagggggggattttccaaagaacccgtagaattggggaagccaaaatgtaaaaattattaggagaaagcccaggagggtgttaat

SEQ ID NO: 4611 - DNA, 477 bp, Homo sapien
tgctaactagatgctcattttatctttttaaaaatatgtatttcagttgcacatgaaatgtactttgaaagaatgagctccaaagttctggggggctgagacaggcgggctgagtgaaatgatgaagaaacagtggctttcagtgcgggccaagagagtagtgagcaatggtcagttattgagctgtggagtgccttcaacaagggtttttagacacatccatctggtgcctcatcccagaacctcacaggcctagggacctgaaatgctccccatgacaaggcaaacttcatatcctcacatgctgagacagactcaactttcagtctggaactgggctgggtgtctgtcagtccacgccacccatatccggagtacatcagagtctgggttcagtggcagccactttcgctgccctctcctgccccacacctagcgctctgcctggcccctttgctgtgggcgtgaaatctggca

SEQ ID NO: 4612 - DNA, 422 bp, Homo sapien
tgccaaatagtttatattttattaacttgaaatgcaaaagaccaaaagcaaaaactaaataaaatggacttgaattgttatttatagttgtggtgggaaaaagtatatcatttgttgatactagccatctctgtgactatatgttgggcttattatttatttattttttataattttaaatacagtttttaattgacaaataataattgtatacatttagggtacaatatgatactttgatatatatctccactgtggaatgatgaactcaaactaagtagcatatccatcacctcatatacttattttttgtgatgggaacatttaaaatttattattttaccaattttgaaatatataagaattattaactacaatcgccattctgtgcaatggaggcctaagctttagtgatgtatgtt

SEQ ID NO: 4613 - DNA, 170 bp, Homo sapien
tccaaatcgaagcagctttattgcaccattaagtacatcactgcatcaaagacagtgccacaaatgcaaatccaatcggagaaggtagccctgagacatgtggtggctgcgagggagaaggacccccaacccttgaggagcagcgctggaagagaatcattccttaatat

SEQ ID NO: 4614 - DNA, 365 bp, Homo sapien
ttttttttgacgtgggaagcgtttcagtgtttggttctgcgtggggagtcccacgttactcgatgactttcggccgcgaagctttgaatggtgcgtttgaaaatacggaaactttcttctactctaggtggccatggctaccgggcaggtgttgttccagcggttcttttataccaagtcttttataccagcaccaatgagaaaccagctgtgtggtggggtttccagagaagaggaaattccttctttcctggagagcgtgcagctgtaactcacagacgagacatccctgagctaccagcccgtggtcctgtactagtcctggcaaaggttccggtaactgcagcaacagatacctcctgccc

SEQ ID NO: 4615 - DNA, 273 bp, Homo sapien
tgcgtccgccactggagacactccctcccgcctcccgggtctcctggcggcggcggagtgaggctgacagctgggaacctgggagacccctccgccctccccgcggtggcagcggccgatccccggctccggcgcgagggacggccgcgatgcgctcggcctgaggttacccggcccggcccttcctcgcttccctcgactattccactgcgtctccgcgccccggcgtcatcctgcgagtccctctgacgggagggaagatggctgcacgga

SEQ ID NO: 4616 - DNA, 374 bp, Homo sapien
ttttttttgataaatggagtttttctttattatatcatatttctaaatcaaggaagctgaaattatatacttaaatatactctggtcaaaatatacatgaaccacaaatattaacttctacctaccaacaatttacagttatgttgtatgtggaatttcattcttgtcagaactcacaatggaaataaaatttctattatgggtgagaagatgagggaaagaattaaggggaaaaaatttggacagcacacacttttctttcattccaaaggtgccagtcagaacacagatccatggagttccacatctagccccaggctaccaagcattaattcaatgtaaatggtgtcactacaacatcaaaaagagcagtg

SEQ ID NO: 4617 - DNA, 421 bp, Homo sapien
agaaggaagatattcagggtttttatttttattttttgagtctgggtctcgctctgtcacccaggctggagtacagtggtgagatcatagcttactgtagcctcgacctcccgggctcaaagatcctcacacctcagccttccaagtagttgggactacaggcatatatcatcatgcctggctaaattaactattttattttaagagatgtggtctagctatgttacccaggctggtctcgaactcctggcttctagcaatcctcccacctcagtctcctgaatcactgggattacaggctggggcatcatgcccagctctaggtttttaaaatgtaggcaaggaggtcagcatttacacaaaagcagggtttgatcttaggaagcttaataaagagaggggtctaatcaaggtttcctgt

SEQ ID NO: 4618 - DNA, 436 bp, Homo sapien
ccacacttcagagcccctacagagaaagcattagcaggaatgagacaaggcagagctgcagtgccccctgaggcttccacacatctttctgaatattatttttcaagtaacaagggcagggacagcggaaacagctgcccaccccccccatcccagcagctcagctaagccctgatgagaatgaagccacaggagttgtctgaggtgaacccagccgctcagccacacatggaagccattgcctttgcacatagttcttgggttctttttcctaaaaaggtaaggagctgaggtgtgtggttttttaatattaagaatatataatggaaaacacacgactgacgctcaggcatcttcccctactccccaacagatccccagaagacagcgtggaaggcagtgtagacagtaaatcgggcttcagttctatagccaa

SEQ ID NO: 4619 - DNA, 434 bp, Homo sapien
aagaaacattttgaagaacacaattccatgaatgaactgaagcagcccatcaataagggaggggtcaggactccagtacctccaagaggaagactctctgtggcttctactcccatcagccaacgacgctcgcaaggccggtcttgtggccctgcaagtcagagtaccttgggtctgaaggggtcactcaagcgctctgctatctctgcagctaaaacgggtgtcaggttttcagctgctactaaagataatgagcataagcgttcactgaccaagactccagccagaaagtctgcacatgtgaccgtgtctgggggcaccaaaaggcgaggctgtgcttgggacacacaaattaaagaccatcacggggaattctgctgctgttattaccccattcaagttgacaactgaggcaacgcagactccagtctcca

SEQ ID NO: 4620 - DNA, 441 bp, Homo sapien
gaaacatgttctgtattattcggggcaagcattggaaagggtgggagggtattctcctctaggagccaggtgaccagcctgcctgcagcccactccgctggaggctttggtccaatgaggcaaccaccaagggatattagtcctgaaagaggcacgtggccatttttcttcctgtatttgtgtgtaaaataaacccttcctccttgttttctagaccttgttcccatcaggatacctaatccctctcacgcagtctcatccctgggggcagagtccattttgtctggtaaagaaaactcaagtgctctttccccaaaccacaggatttacagctccccaattgcaggtgttattccagtgacatcatctgaactcactgctgttaattttccctcttttcatgtaacaccgttgaagctaatggtctcccaacttccgtgg

SEQ ID NO: 4621 - DNA, 437 bp, Homo sapien
gcctcaggttgctgtctctctccttcccactatcgtccgcacagcactgccatctccccacaccctccaggaagttcaggtcgccatcataaacaactctatgtgcaaccacctcttcctcaagtacagtttccgcaagacatctttggagacatggtttgtgctggcaatgcccaaggcgggaaggatgcctgcttcgtgagtgtccctgccaccactcccagcccaggaaagcatcctgtgtccctgtgccttatttgaccctcatgccaaccccgggaggtggagactgttgccccactctgcagatgcagaaacggaggcttggctgctgcagggggaggaggaggatgtgcacccagtctacccagccccatagcccttcccactctcagcccctcccctgccccactcactctgccccaggctgacctcag

SEQ ID NO: 4622 - DNA, 399 bp, Homo sapien
tgacaataaatgagacccctttaaactgtcttattttccaccagattgagaaccagatgttctctacacactatcactgttcaatagagctttcttcagtgatggaaatgctctgtaatctacactgttcagtacaggtagctacagagcatctgaaatatggctagaaactacatttttgttttgattaatttaaatagccatacagttgctaccatactggtcacggcagctgtagactgactgggtccatagttcatcacctcaaaattctttcaaaatttattatctctttctctccttacatgtttatttcccaggcctaccctggtgattagaacagctgaagggcctttcttgttaggctgtccatgccctaaggatgggttcctgtttatc

SEQ ID NO: 4623 - DNA, 436 bp, Homo sapien
agaagtaggaacaatagatcccagtggtgaaacgtgggtgtaagactggttgcataattttcagggcccagtgaatattgagaatgtgtagcttgggcaatgtaatgagacttcatctctacaaataataaacaaaaaattagctgggtgtggtggcactctcttgtggtcccagctactcgggaggctgaggtgggagaatcacttgagcccaggtggttgaggctgcggtgactatgatagcaccactgcattccagcctgggtgacagagcaagagagtgtggactcccttgttcaaaaattattaagaatttcaaaacagtgaaagcagacatcaaaccaagctgggggcccttctaagcatgcccatgacatacagtcatgcgaccctggagctagtcctggctgggtaggagaagggggcatgcatgcgc

SEQ ID NO: 4624 - DNA, 317 bp, Homo sapien
atgatatgtagtaaaagggttttacaaattgtgaagtgctatatgaatgataaatattgtgtgaaagtcattggaattcctagtagaagaaggtctttggagataattatgaatatcaatgaaattatctcatggaacaccaacatctcacaaaattctatacccaaaggttttgagggagttcacgtcaccacaagcaaaggaagaaaggcatatcttaaagtctatgtcttctgtttagacattatcccaattgtcccactgaactaaatgtaaacttctcagaatgccttaactgattctctttaccgctacta

SEQ ID NO: 4625 - DNA, 408 bp, Homo sapien
cgcctgcctgtgcgcccgagcgggtgtggactcttccaagatgcccacgttcgcacagagaccccggatcgcggaactcgcgtctcgaaaggcggtctcacgcctgcccgtcctgggttcacggtttttcatcacctgcggctgtcctgcgatcgaccacagctgtcaggaggggcaggaggtatctgttgctgcagttaccggaacctttgccaggactagtacaggaccacgggctggtagctcagggatgtctcgtctgtgagttacagctgcacgctctccaggaaagaaggaatttcctcttctctggaaaccccaccacacagctggtttctcattggtgctggtataaaagacttggtataaaagaaccgctggaacaacacctgcccggtagccatggca

SEQ ID NO: 4626 - DNA, 387 bp, Homo sapien
tacaaaggtttagttttgtaataaggtgactaatttatctatagctgctatagcaagctattataaaacttgaatttctacaaatggtgaaatttaatgttttttaaactagtttatttgccttgccataacacattttttaactaataaggcttagatgaacatggtgttcaacctgtgctctaaacagtgggagtaccaaagaaattataaacaagataaatgctgtggctccttcctaactggggctttcttgacatgtaggttgcttggtaataacctttttgtatatcacaatttgggtgaaaaacttaagtaccctttcaaactatttatatgaggaagtcactttactactctaagatatccctaaggaatttttttttt

SEQ ID NO: 4627 - DNA, 440 bp, Homo sapien
ttttttttttgaaggcaagactgtacctttattaatttcctcatccccagaacttagcagagtacacccaacagagttcacaggtggtcaaagaggcagacaagtaaactggcccttaatgcacaacccagcaagtgtccttgaaaatgcacattttcaaggtgcttccagagccagaggagatagagaggactcacctccctatctgggcagtcgagaagcttcaggaaggacacaggcttacgcattgcttatcctttgattgggggatccaaaggaaagtcccatacaatgcatagattttttttttttttgagatagggtctcactctgtcacccaggctaagtaaagtggtgcaatgaggggtcactgtagccatgacctccctggctcaagtgatccctcacatcagtgtccgagtagctgggactacgggcat

SEQ ID NO: 4628 - DNA, 437 bp, Homo sapien
tttttttttttcacattaatataatttattaaattcgccatacaaagaatatgccacagacaacaatatcagaaagggaagaaacatggatatcacctgctctgaccccctcattttacaaatgagggaactccctgaaatcccagagcattgttatggacaaagccagaatgtgagcccagtcttgagacacgggaacacacggacttaaggattctggctgcgtgacgcacatagagcctaaacacttaatccacatttgttttgaattttcctgattcctatagtaccatactctgatgcctatctacttctcaaggctgtaggaagagccctagagaaaaacaccatgggccgggcgcagtagctcaagcctataatcctagcactttgggaagccgaggtgggtggatcacctgaggtcaggaattcgagac

SEQ ID NO: 4629 - DNA, 447 bp, Homo sapien
tgataagcagcagaatttattgggtgaaaaggaaaaacaactctcagcaaagcaagagggaatcttgaacaccaggcaaccacacaggaactgaagatgccaggctcctcccttctgcgcaaagtgtaaatgttccagtggctccaccccacccttccagtgtgcaggtgggtccctagtccattgcaggcatacacatacaatgccctgggtaggttccctcatctgcctcctgcatctatcattttgcacctaaagaagtacatctaactgccgttagaataaagataaggatgaagaccaatcttaactgcttcctgctgacagagggtactgttttcagaaaacagcagtctgatctccctcaggggcctatgaaagggttcctggcaaaaaaggttattgtttgaggctccagtctggttgcgtgatggtttggagtttgat

SEQ ID NO: 4630 - DNA, 482 bp, Homo sapien
tgcggccgccacccagtgggaccagtgctatcctcatatgtgctcaagacagtgctgctggcagtgctgctgcgcaagggggcccctgcaaggctgggacgaggagcacctgggaagtgtttggaggagttggtgcagttccttagggactgcctgctgcgacgccatacgctcttccactgcgtcctgggccctggtggggcggctgccgaggtgggtcccctgcccaaggcactgagggaagccgccccagttgacctcctggccgctttcgacgggcacgcccggggacttgcagcagcgcgattgctgtccacgtggcaaaggctgccccagcttctccgggcctacgggggtccccgctaccttgccaggtgccccccaccccggagtcagcgcacccagggcttccttgaaggtgaaccgtaaaccctgacagcacccccacctgaccaaatgctcctaaagcctttcccactggg

SEQ ID NO: 4631 - DNA, 417 bp, Homo sapien
  misc_feature (1)...(417): n = A,T,C or G
gcgtccgcaggagtgcacgaagccgccggctgcgccgtcgtagtgcgcgtgaccgctggcatggagagagcggcgagggtctggtacatctcctccggctgctcgggtgcgaaggggctcagcttggcgccgcggctggaccacagcagcttgctggcggtcgcggcttggtcgaggtcagtgaacagcagcaagtcctcccagctcgacaggttgcccccggggcacgcgaccccaggcgccgaagtcgcgtggggagccccgaagtatgcgaacgtanggaactgagcagcagcatgcgggccgggggtccgcggccgccgtccgtgtcgagctgaggcgtcccgcagttgctggcgccgcggggccccgctctccgccccgggagcaggaggaggacgaggaagagatggggga

SEQ ID NO: 4632 - DNA, 191 bp, Homo sapien
aggcgacgagcgcactcgcgcaccaccgcggtgcgactggtaaccctcgcttctcccccccaaccccgtcgaggtgaagcggaggagggtcctctgcgagcgggtcctacggcagcgctaccataacggaggcagagacagaggcggcggcccgggggatccggtacccccaaggcacgcctctcagatcg

SEQ ID NO: 4633 - DNA, 333 bp, Homo sapien
acaaacggcacggctcttcaatcatggttccagtctagcaagtatcatcgctgcatggccagagggcctaaaacacctcatgactcaatgcatgatctcatcgtactccaccaggactctggccaggtactggaacatcatgctctggatgggggtgctggtgtcctgtaggcagagacacaggacattgtcgtagtcagtatcgagcagcgtggcctcgttagcaaccgtatagttgatcttcaaattcattggattctcagtcttctctccaaggacttcttgtaacacagctgttgttctcccactgtgcagaacatctccaggttgtcc

SEQ ID NO: 4634 - DNA, 449 bp, Homo sapien
tttatttttatttttgagacacagtttcactctgtcgcccagcctggatgtgcagtggcgtgatcttggctcactgcaacctccgcctcccaggttcaagtgattctcctgcctgaccctcccaagtagctggtattacaggcacgtgccactgtgcctggctaatttttgtatttttagtagagacagggttttgccatgttggccagtctggtctcgaactcctgacctccggtgatctgcctgcctcagcctcccaaagtgtttggattacaggcatgagccacggcgccaggctgcatggtcattttttagggagctgggaaaactggacatgcccccaagccccagggtcttccaaatccgattgcagcccccacatggccaatgctgtatcagcaggtgggcccgggaccctgctcatcccttcagccccatcctgcccctgc

SEQ ID NO: 4635 - DNA, 461 bp, Homo sapien
ttttttttttttttttgaacactgccacctgcccagccagatcctggcctcactgtggccaaccccagagaagggccttcagccccggcccagctgggagatgccaaagagacctggggagagggactggggcttagggtgggacagactctatttcctcctcctttagggtggggcgggggaaatcctgaaaaaaagtgaagtgcagagttcagatcacccccaggtcccatgggttgaggcctctgtaccctcccctgcccaggctcagggcctcccccactgcagatagctttggagacagcataacccagctggcagcagcggacctcagacacatccaacgaaacacagactcagacaccatttaccactgctgcccagagaatctggtttccccacaaagggtgaggccaggcactcccaaccaagcctgttccgcacagctgggtaagcaaggc

SEQ ID NO: 4636 - DNA, 432 bp, Homo sapien
tgcggccgccaagaacagactcacccataggaagcaaggtatagggttagaccactagggtcgggctgccttatggggcttagttttgggtatattctaggatgtgattcctgagtgtgggaagtgtagggtggggttagattgaaggagatttagtgctcactctcagggaacggtggcagtgtggaggttcaccccgttcttggtgttaggtggggaaaagttggacttcaatgaggcctttccatcagcctgcaagggtggggacaggaagggagagaggtgcatttgacgagtcgggcttgttggctgatggcactgcagagtttggacatcccaggataccaggagtccagaggccagggttgggtgctgtaaggagggatgtgggcagtggggaaatatgcttttctgggattttaagtgaggacc

SEQ ID NO: 4637 - DNA, 447 bp, Homo sapien
ggtagagacgggatttcactatgttggccaggctggtctcaaactcctgacctcatgatctgcctaccttggcctctcaaagtgctgggattacaggcgtgacgaccatgcccggccttcttcatttctttctaatgaatattatacaaggaacgtttttgttttcattctagttttccttaatgaatcttagtgggaaattcatgtttctgggaaattttgacaacataaagacttacatatctctggttggggtatgcccagcaccatctggccattaagactgtactaaagtatgggcctcattactctcgatcttgtcagaccacttggctattcgggaattatttcatcaagctgaagatattccctaaaagatcccagtgaagcctgttccctacaattgacaatgttttatattttaaaaatacataaattaataacgtt

SEQ ID NO: 4638 - DNA, 457 bp, Homo sapien
tgaaagttcagttcagtttattacagtgtcaagtagatttacaactattgcacttatcattctggtgacagaaggccaaaacagaagattgagattttcctctaataaagataggttttcagaatcttcaatataagatgttaaaattataaaggcaaagatatatacctcatgttccattccatatccttcctgctgttgtacagtttgctgcaaatgataatttaatttggataatgctttaaatcattgatttctcatgaaattacttttgagtgaaatttgacaagaattttctttatactctcttctttaccaaaacgtattagaagtccccatagtccaaaataaaatgtaaccatagaatggggagataactttagtcaaagaccaagtaaatattaccttctttgcagaactccaggttgtagtcacgtaaaagtgtggccacttgttg

SEQ ID NO: 4639 - DNA, 463 bp, Homo sapien
ttttttttttttttttttttttttttttttttacatttattgtgtactttatttctattattattacattgtaatatataatgaaataattatacaactcaccataatgtagaaactgtgggagccctgagcttgttttcctgcaacgagagggtcccatttgggggtgatgggagacaatgacagatcatcaggcattagattctcataaggagcattcaacttagatccctcccatacaattcacaatagggttcacgtgcctatgagaatctaatgcctctgctgatctgacaggaggcagagctcaggtggtaccctgagccgtggggagcagctgtaaatacagatgaagcttcgcttgctcgcccaccaatctcctcctgctgtgctatccagttcctaacaggccatggactgctatcagttggtggcccaagggttgaggacccctggcgtataa

SEQ ID NO: 4640 - DNA, 465 bp, Homo sapien
tgtctaaaaaaggacaaaaatgcatttatttaatatacaagggctcaaccgaggcttaatttaaaagacaaaaacaaaacaaaaataccacagctcaagataaagagtcctatacagaaatcacaaaaaggacagaccatctaaggaaaaattaaaaagacgacacaaggacaggctgggcagcctgggtcagggctcctggctggtgacctgctttgagtaggtttcttgcaggtacttcttaaaagctgtggggtttttccagagctcggcagcatgtgtgttcaagggactatcaatgttgggttctcctagaaggctctggatggagagcagaatggtcctgacatcatacagggcagaccacttttccttcaggatgtccaggcatatgttacactgggtgtccacattggggtgatagcagagcttgaggaacttcactgtgggcccattgtaagggaa

SEQ ID NO: 4641 - DNA, 403 bp, Homo sapien
aactttaacattttattttgtgtaaaaaagggcaaatttagtgaattattttcatcttgtacacaaagttataattttaatgcttttcacatccatgctgaaaatttgcaatttggtaaaaatgaaaggaacataaatttttccaaaggaatttttcacgccattatatatacacttcatgagaaagtttcaaacactttctcaatgatcacgagttaccaagaaaataaaagattaaatttgtacagatattgatctatatatcaaatacatacagaaatgatgtaaaaaccttatgcagtttactttgacctctgtcctcaaaagatttgcccagggacagatgcttttcttttgtataaatgactgtggctttatttaaaatatgaaaatcaaaggaaga

SEQ ID NO: 4642 - DNA, 382 bp, Homo sapien
ttttttttttggccttccaatattatgaggttattttgaggatccagggaggtaacggatgtgaagagcgtgtggtgaactgtaaataatgactatcacatttagttctcctacaatccagtgaggagtagtcacttgctcgaggtcacccagcgctggcaactgctggagctgggatttgaacccagctagcagtgtccatgctacaagagtggggccagccttggcacaggaggttgattgctgcagccagtgtttctagagttccagatatgaagtggtctcatgttctccttgggaggaggcccttggcttcccgaagtgctgggattacaggtgtgagccacagcactcagccaccagagcttttttcaaaccggag

SEQ ID NO: 4643 - DNA, 461 bp, Homo sapien
tttttttttttttttagcaatatctagcaccatttattaccactgaggcagcgggttaaggaatgtattcgcagtgtcaggaaagcacagggtcgccagagtgaattgcatgtggaattctagaagaactttgcttgccatcctatgggatttggactgcaattttaatacaacagggaatcattgtggtctattttctcaagattctgattaagtagcataagcgagtgtggagcatcatgaattcatgctggcaaatcatgagggcagacaggtaaggaatctgccctcatctttgcacttggctttctaggcccatcctcttggagctgtagtggggatctggggacacaggaagagggaaatggccgagtgcacggtaagtcgcccctttatggcgatgagaacctgccacagaacagaatgctgttggctctgttgtgcctgatgaagaaaaggta

SEQ ID NO: 4644 - DNA, 287 bp, Homo sapien
ataaacatatgacacgagcagagtgaggtctgctaatttcagatcatgccctcctcccttcccggtggctggaatatagatacgacagtgggagcaagagcagcctcctcagaccacgaggcagaaaccctgtacgagggtaacagagcaatgagaaagaaggtgtctgggtccccagcacaatgaggcctccgtgcatgtactggacagcttgcacagaggctgcctgcatagataaaaataatctattttattatcctagcctttgtttcaacagctagcccaaa

SEQ ID NO: 4645 - DNA, 376 bp, Homo sapien
gaggcaaggtctcgttatgttccccaggctggtcttggactcctggcctcaagtgatcctctatctcagcctcccaaagtgctggaattacaggcatgagctatgatgcctggctgcaaattcagtttgatcccaatgcagtgtgttggggaacagaagactcagaggactaatgaggagtccagtatgtaggatattggacccccaggccctttatggcgaccattccatgtgtgcataaaatgacaacttaccatgttgaaatgttttaccgttactgccaagtgaagtcttcacttttcaagatctcgagggaaagggaccggatgtatttatgtagcagggagttctgggaagcattggtcctgggagctat

SEQ ID NO: 4646 - DNA, 491 bp, Homo sapien
gcgaccgccacccagtgggaccgatcctatcctcatatgtgctcaagacagtgctgctggcagtgctgctgcgcaagggggcccctggcacaggctgggacgaggagcacctgggaaggtgtttggaggagttggtgcagttccttagggactgcctgctgcgacgccatacgctcttccactgcgtcctgggccctggtggggcggctgcagaggtgggtcccctgcccaaggcactgagggaagccgccccagttgacctccaggccgctttcgacgggcacgcccgggaacttgcagcagcgcggttgctgtccacgtggcaaaggctgccccagcttctccgggcctacgggggtccccgctaccttgccaggtgccccccaccccggagtcagcgcacccagggcttccttgaaggtgaaccgtaaaccctgacagcacccccacctgaccaaatgctcctaaagcctttcccactgggtgggggt

SEQ ID NO: 4647 - DNA, 357 bp, Homo sapien
cccttcactttcagtcttccacacacaaaaaatacctcacagagcttcaccaaatcacagattcaggaggaatttggctttcacactggactcagataccttcttcagtgtgttggaaatcactggcttcacacaggcccaactccagctggtcagggcagagtgatcgtaactaaaggtcagtggggaatagatccgattcagtgcttttgccttatgcatttcagcatcctggctccccagggtggcaggagctgagggagggccacacactggcaagatttcaagaccactctctgcactgaagaggtaaaatttgcactgcaagtcacatccctgaggccagaggtcagtacc

SEQ ID NO: 4648 - DNA, 291 bp, Homo sapien
tcttgaaagaatctgtttattttgagattaaaagagtctcatctccctgcatatccagcaaatactaaatttgatctttttaattttagaaaagggtcaacaaacttcagctggagtatgatctctctttcaaactcccattctggtttaaggagccccaaagggtaactcttgacaaaaaagtggctatgtttgcacatgtgtgtgcatatgtgtgtgcatgtgtgtaatgcatgtgcatagtttataaaatgtttgctgttgtatccataaatcccctgtggacaacgt

SEQ ID NO: 4649 - DNA, 323 bp, Homo sapien
caattaaaaaaaaaacttcattctaaaccaaaacagagtggattgggctgcaggctctatggggtttgttatgccaaagtgtctacatgtgccaccaacataaaacaaaaccaagccttggctcgttctcttctctcttcaatctctggaaaaataagtacatatagttgataacccctcttagcttacaggaagctttttgtattaattgcctttgaggttattttccgccagacctcaacctgggtcaaagtggtacaggaaggcttgcagtatgatggcaggagaatcagcctgggcgctggggatgtaaccaagctgta

SEQ ID NO: 4650 - DNA, 111 bp, Homo sapien
cctcagggaccatcttcaaggacgcacccagaacctctagctggccgacacttcaatctggcccctctaggccgacgaagagttcagtcccaatgggcctccactcgggga

SEQ ID NO: 4651 - DNA, 172 bp, Homo sapien
ttttttttttttttttttttttggtctcctttccgaagggtttttatttaggggaacagctcaactccagctccctgggtgcaatgcgagcctgcccgcaccgagcgcgcttgcaaatatgccccccgccctttccctgggttacgaagtgcccctgtaccgcacggggagt

SEQ ID NO: 4652 - DNA, 199 bp, Homo sapien
  misc_feature (1)...(199): n = A,T,C or G
cagtctttggggctgtcctgcacccctacacctgggccgcctgaccttggactgacctcccgttgcctcctggagccctgcataccttctgtgccacaatgcctgccgtctcccgctaatgtctccagctgcctggaacganatggggctgcggtcactctggggcagtcttctggcctcactgactcctccaccattg

SEQ ID NO: 4653 - DNA, 310 bp, Homo sapien
cctcgctgtaccagccatcagggctggcggggacgagaccaagctgctggtggtggacagggaaactgacgagttcttcaagaaatgcagagtgatcccatctcaggagcacctgaatggtcccctgcctgtgcccttcaccaatggggagatacagaaggagaacagtcgtgaagccctggcagaggcagccttggagagccccaggccagccctggtgagatccgcctccagtgacaccagcgaggagctgaattcccaagacagccccccaaaacaggactccacagcgccctcgtctacctcctcc

SEQ ID NO: 4654 - DNA, 455 bp, Homo sapien
ttcggaacgaggctcaagatgagccatgaggacattcgcaagtggaatgtgacgtccctggagaccctgaaggctttgcttgaagtcaacaaagggcacgaaatgagtcctcaggtggccaccctgatcgaccgctttgtgaagggaaggggccagctagacaaagacaccctagacaccctgaccgccttctaccctgggtacctgtgctccctcagccccgaggagctgagctccgtgccccccagcagcatctgggcggtcaggcccaggacctggacacgtgtgacccaaggcagctggacgtcctctatcccaaggcccgccttgctttccagaacatgaacgggtccgaatacttcgtgaagatccagtccttcctgggtggggccccacggaggatttgaaggcgctcagtcagcagaatgtgagcatggacttgggcacgttcatga

SEQ ID NO: 4655 - DNA, 574 bp, Homo sapien
  misc_feature (1)...(574): n = A,T,C or G
acaaagccgtgcctttctctggctccagaatatgcataatcagcgctctggagtctcctgggcctggaccgcatcccagaggtcaggaatctgccattactctgcggtggtgccagaggttttaggatacctggcatggtgttttcaggtctggggcttttagagcccccgttgtggcttacaaattctacagcatacagagcaggccacgctcaggcccggcatgcgcgatcctaagttcttggaaaccacgtggtgtccctgtgaatggggcgatctagtccatagccggggacgttcagatgttgaaggtactgatagcagatggtcctccatttcacatccagatagtggggctcatggatgggatgttctactcttccctggcatgtcagagccagtctctgctgatggattcctccatccggctcctgtcatccctacatcttggccaacaagatggtggtagatcactttggctgctcattctntcttgatggcacacagtctcagtccagatgcttcctgtcttctggcctttctggacagatgtaccttcgttctatactgagat

SEQ ID NO: 4656 - DNA, 476 bp, Homo sapien
gagttcatctgccattttctcgagtcttctggcacgattggcatcaaacccagctaccttccaaaggtccgctggcctccagggctcaaatccaaccattttcccaagagcctctgggccacttggcacaacccagctaacttcccaagggccactggcatgcagggtccaagtccaactaccttcccaaggtctactggcccattaggccctggtcaagttactttccccaggccagctgccgggcatctgggcccttctccagctggccctgtgggtatcaacccagctcctttcacaaggccaactgggaccctgggtctcaacccagcttcctttccaaggatgaatggccctgcaggcaagagtttcgtcccatttcctagagtggggagcctccctggcacaaacccagctgctttccccagaccagggggtccaatggctgcaatgtacccaaatggaatgttgccccc

SEQ ID NO: 4657 - DNA, 443 bp, Homo sapien
  misc_feature (1)...(443): n = A,T,C or G
gcatgagcagacaggacagctcagaaagcaggaacgggaggaccttgtctcagcctgaggctcggagactgaggagcagaggtctcggggtgtgaccgacaccagagagccgtctcccgggtcacactcggctctacccgggaagaagacggccctgcaggtccctgcacagcaacgaggcattccttgctcaggcaagacacatcttgtcatctgttgaagaattcacagcagctcaggacagctctgcgatggtgggtgaagatgtcggctccctggctctggagagtaagtccctgcaaagccgccttgctgagcagcagcagcagcacgcccgggagatgagcgaggtacggcggctgcaccacgcacacaaggagctggatgatttgagacaacatttagatagatctttnggaagagaacagtaggttaaaatcgct

SEQ ID NO: 4658 - DNA, 321 bp, Homo sapien
aatgacttcctactatgttttattttttaaaaaaagcagattataaaaaattgtttactgtggaaaatttaggtgatacaaagaaaaaataaaagttagtataatcttaactgcctagataaacctttatcaacatatggtgtgtttcctttaaaaaaaattagtaaaccaaattagggtcttagtgtatattatacttagtaacagattttttaaaatgctgcaacaatgtgagaattttctatgtcaattttgaatgacaaagacaccaaaaacaatcatgataaaaacaaaaattgacaaatggtatctaattacact

SEQ ID NO: 4659 - DNA, 515 bp, Homo sapien
tcggcactgagtggggagataaagacagagtagggtttgggcagattcctgttgtttttcttataagctctttgttagtaatttagtattgtatttctaccacatatgttttctaccctatgcaagcatgacaccttttaaacaagatagatataaactgtattaaaatttacaacacagcttgcatgccaacatagtcttccatgatttggtctctgcgagtgtttccagatttgcctcccacctctatcccttgctttctttattccagctgtgatgcacacatttcagcgtgaatgcggccctccttctcatttctacagattgttctgtgctcctgggtcattcctttcttccacctgtccttccctccacttcacaatagaatagagaagtttctgatgtttgggcttccttttgggtagaacaacaacaaaagtcaactagaaaaatgtccttttttagagttatattttcagagtgaggactcatttatcatttatatttatcataag

SEQ ID NO: 4660 - DNA, 417 bp, Homo sapien
tttttttttttttttttcccttctccacagggcaggttttgatttattaaaaatacaacactaaacactattttaccaaatttagctaatggagaaaatatacattgaaattattcacatttgaaaaagattgcagaccattcaagtttaattaagtcctggttaaagatacttaaagatttaacaggaaaaaacaaaaagtgaaaatgttttaatttcttatgataaatataaatgataaatgagtcctcactctgaaaatataactctaaaaaaggacatttttctagttgacttttgttgttgttctacccaaaaggaagcccaaacatcagaaacttctctattctattgtgaagtggagggaaggacaggtggaagaaaggaatgacccaggagcacagaacaatctgtaga

SEQ ID NO: 4661 - DNA, 269 bp, Homo sapien
cctgtgagttgacctgctccgggccgcgggcgccaatggcaggggccgctccgaccacggccttcgggcaggcggtgatcggcccgccggcgtcagggaagaccacgtactgcctgggcatgagtgagttcctgcgcgcgctgggccggcgcgtggcggtgtgtgaacctggacccggccaacgaggggctgccgtacgagtgtgccgtggacgtgggcgagctggtggggctgggcgacgtgatggacgcgctgcgcctgggcccaac

SEQ ID NO: 4662 - DNA, 157 bp, Homo sapien
ggggagaggggggtcccgccggaaaccccgcgggggagccgggggacggcgcgaaaagagttgggcgccccccgagaagccccgatggcgggaagaccccggaagatggcggaggggtcccccctcgccgcgaaaagccacggtagggggtgggcgc

SEQ ID NO: 4663 - DNA, 193 bp, Homo sapien
gggtccccccatcattgggggtccctctcttcctcttgtacgcttgctggggcgaggtggtccaggggactaactccttcgaggccattaggccattgaggtccatcaaccaatcgcggaagccaaattcgtcagccatacccacgaaaggacgctttacaaattgtgtcggtacaggcaaatcccaacccca

SEQ ID NO: 4664 - DNA, 452 bp, Homo sapien
tctactacttcctcttcgcccccaccttgtgctacgagctcaactttccccgctctccccgcatccggaagcgctttctgctgcgacggatccttgagatgctgttcttcacccagctccaggtggggctgatccagcagtggatggtccccaccatccagaactccatgaagcccttcaaggacatggactactcacgcatcatcgagcgcctcctgaagctggcggtccccaatcacctcatctggctcatcttcttctactggctcttccactcctgcctgaatgccgtggctgagctcatgcagtttggagaccgggagttctaccgggactggtggaactccgagtctgtcacctacttctggcagaactggaacatccctgtgcacaagtggtgcatcagacacttctacaagcccatgcttcgacggggcagcagcaagtggatg

SEQ ID NO: 4665 - DNA, 458 bp, Homo sapien
cagactggagctggatctaccatgaaagacttctgaatccaggaagagagactgactgggcaacatgttattcagggtctccctctgttgtccaaggctggagtgtagtagtgctatcacagctgactgcagcctcaaccttccaggctgaagcgatcctcccatctcaacctcccacgtggctgagactacaggtgcttgccactatgcccaactaatatttggaattttcgtatacgtggattccagaggggtgacagcgaaatgtgggaccatccagttgcaggaaaacaagcttaacacgcccactgattctacattatgctcctacctcccggcagcctctccaggcccagaactttctccagtcagcctctacagaccaagctcatgactcacaatggcctatttaggccataccctacctcacggcagtctccgcagatgagcctactgcc

SEQ ID NO: 4666 - DNA, 460 bp, Homo sapien
ctccatcagcagctgtgggctgaagcgtgtaccggcagagtgggttgagatcgtgtctgcgcccacttgccaccagctccggcctctggggaggtggtgctgagagggagggagagtggctcctgtttggctcctggagacagacagctgggtgtccacctcagagtccccagccccctctccactctgctaactctgccggtggagctcacgccgcagctcatgccaaccctgcccttctgttttgcctctcatgactctccccaaattctgccccaggcccccagccagccttcttgccactttcctgccctttactcttgccccttctacctcttgccagggcagcgtcactggctacgtgaggcccagcttggggatgcatggggaggtgtaagaacagctgtgccatgagctgtccttccgggcctctggggctggagaaaccccggggtcagca

SEQ ID NO: 4667 - DNA, 465 bp, Homo sapien
caagctgaaaacccaaactagccctgctcttcataacatgacaagcagcccccatctgatacctaaaccgaccaagtcacagccctccaactcaccctctgcctgcccagacctcaccacatccttgctggactcaaacctcaaccgcactaaatcaaccaaatcccaagtctaaactaatctgaaacttttaaagtaacccagtccttaaacctaacctagcccaatgccaattatatctaccctagccaaaccctaactgcctttgccagtccaaagtgtccactgaatcctcaccttggtcctcacttaaaatcccagaaaagcatatttccccactgcccacatccctccttacagcacccaaccctggcctctggactcctggtatcctgggatgtccaaactctgcagtgccatcagccaacaagcccgactcgtcaaatgcacctctctcccttcctg

SEQ ID NO: 4668 - DNA, 383 bp, Homo sapien
caagtcattatattcattttaaggcacagaatgtataatattgtgagaaaggaggcaaagaagaaggatttggggtcgctgaaccctttaatatgagttctgttaagtttggtaccaagaaaaattaaactctgtggcgtgtgcagtcttgtaaactcttacaatgattgaaatgtgctattttgggatgaaaatgtgaggtttataaattttaaaagctcaaaaaaggaatctagaaaatgactcctgtgcctgttgcatggaggagatggcacctttgactgttggggggtgtctgcctacccctaagtgtctacatcagccccaagttttagtgcgctgtgacggtgtcattgttattttaacactgggagacgttatat

SEQ ID NO: 4669 - DNA, 432 bp, Homo sapien
atttcttatacgccaggggtcctcaacccttgggccaccaactgatagcagtccatggcctgttaggaactggatagcacactttgaggagattggtgggcgagcaagcgacgtcatctgtatttacagctgctccccacggctcagggtaccacctgagctctgcctcctgtcagatcagcagaggcattagattctcataggcacgtgaaccctattgtgaattgtatgggagggatctaagttgaatgctccttatgagaatctaatgcctgatgatctgtcattgtctcccatcacccccaaatgggaccctctcgttgcaggaaaacaagctcagggctcccacagtttctacattatggtgagttgtataattatttcattatatattacaatgtaataataatagaaataaagtacacaataaat

SEQ ID NO: 4670 - DNA, 374 bp, Homo sapien
tgtaaatgtgacatcctcacacttcccatatctttaactttgaaaaatcttcttgtaaacttaaagcctagaagtattccaaagcaagggttacagcagtctttattctcaggctcactgaattaaacccaggactaattccacagcacaggcacaagaagcctgttgtgtagtgtactctgccagtaccttggatttaggagctccatggggaactgactaaaccgggagagagaggatttggagctagtcagtcctggtaatctatgaaatgctcatttatacccaggtttcataagcttccaattctatagcaaacccaggctctgagtgttttagaatttcctaattcatgaagtgtttcttgtcttgat

SEQ ID NO: 4671 - DNA, 456 bp, Homo sapien
ccgggtcctgcgcctcgggggtcggcgtccaggctcggagcgcggcacggagacggcggcacgctggactaggtggcaggccctgcatcatggaaactctttctaatgcaagtggtacttttgccatacgccttttaaagatactgtgtcaagataacccttcgcacaacgtgttctgttctcctgtgagcatctcctctgccctggccatggttctcctaggggcaaagggaaacaccgcaacccagatggcccaggcactgtctttaaacacagaggaagacattcatcgggctttccagtcgcttctcactgaagtgaacaaggctggcacacagtacctgctgagaacggccaacaggctctttggagagaaaacttgtcagttcctctcaacgtttaaggaatcctgtcttcaattctaccatgctgaactgaaagagctttctttatcag

SEQ ID NO: 4672 - DNA, 324 bp, Homo sapien
cccagtccaagcagtacctttatattcattgggatttgggctagctgttgaaacaaaggctaggctaataaaatagattatttttatctatgcaggcagcctctgtgcaagctgtccagtacatgcacggaggcctcattgtgctggggacccagacaccttctttctcattgctctgttaccctcgtacagggtttctgcctcgtggtctgaggaggctgctcttgctcccactgtcgtatctatattccagccaccgggaagggaggagggcatgatctgagattagcagacctcactctgctcgtgtcatatgtttatgac

SEQ ID NO: 4673 - DNA, 407 bp, Homo sapien
cagacaccacgtggtgtcattgctggtcctgccatagctcccaggaccaatgcttcccagaactccctgctacataaatacatccggtccctttccctcgagatcttgaaaagtgaagacttcacttggcagtaacggtaaaacatttcaacatggtaagttgtcattttatgcacacatggaatggtggcccataaagggcatgggggtccaatatcctacatactggactcctcattagtcctctgagtcttctgttccccaacacactgcattgggatcaaactgaatttgcagccaggcatcatagctcatgcctgtaattccagcacttcgggaggctgagatagaggatcacttgaggccaggagtccaagaccagcctggggaacataacgagaccttgc

SEQ ID NO: 4674 - DNA, 443 bp, Homo sapien
gggcagagagatctgtgtctaaaaaccgacagaaggaactttccctgcagctagttcttgcttcttctacgtggacttctctaaaagccacatccttctacagaatccgtctacacagaacaatatttgaaccaattcttgggtctcctgttggatgtcttcccatggtttgcccaggacactctagtgggtgtgaagatgtcatattatactggactgtgaagcgagaaggtgatatttaagccactaaagcttgtggcagccaccaaattttccaatgccttctgcaatcttgcatttaactggcttcaccgccattcccacccccacccagtgggaaaggctttaggagcatttggtcaggtgggggtgctgtcagggtttacggttcaccttcaaggaagccctgggtgcgctgactccggggtggggggcactggcag

SEQ ID NO: 4675 - DNA, 454 bp, Homo sapien
tgttaccaaatgagtcaaaacatggcctagaagtggagccgggcccaatgaaaagcctgagttcacacgtgctaggggctccactgaccggcctctgcagcccagcacccagtcctcttgctctgggtgcaaggcgaggaggcagagtgcacacaccggctcctgtgtccccggcctggctggcaatggtaaaatgggctgcctttcttttgcagcttcttctaatcgaaataccaaagggtactgacctctggcctcagggatgtgacttgcagtgcaaattttacctcttcagtgcagagagtggtcttgaaatcttgccagtgtgtggccctccctcagctcctgccaccctggggagccaggatgctgaaatgcataaggcaaaagcactgaatcggatctattccccactgacctttagttacgatcactctgccctgaccagctggag

SEQ ID NO: 4676 - DNA, 241 bp, Homo sapien
aattcggcactcggtagggttctctggttctctggggcagagttctctgaataccccatcccccaactgctgattttacagccccagggaagacagtggtatcaggctgggagcggcctcctctggcctcccccatcagtttgcaggagcaggggtgcaggatcctgttctgagctgggtcaaacaaagcagggccgggccttcctgccatccccaggtctcagatggaattacactagag

SEQ ID NO: 4677 - DNA, 223 bp, Homo sapien
tggataaagactctgcacaaaactgtaccagggcaataaacaacaaacagttatttggtagagtgataaaagcaagcattgctattgacaatggaagagcagctgagttcatccgaaggcgaaactactttgataaatctaagtgttatgaatgtggggaaagtggacacttaagttatgcctgtccgaaaaatatgctcggagaacgtgagcctccaaagaa

SEQ ID NO: 4678 - DNA, 97 bp, Homo sapien
cggggtggcgatggggtcgcgccgaggcagcggaggttctgcgggcgactggaggttggcagtgggcgggagaaagaggaaggcaggcgcggctggg

SEQ ID NO: 4679 - DNA, 397 bp, Homo sapien
cagtgctatttataatttattacttatcaaagtaactccagctttcttatagcaattcaataagccctctcctagaactcaggggcttttaaatttatgtttttactaagaaaaccttttttaaaaaaatccctaagctatatgtttttaaaacatttaaaattgattttttaaattttgaaagtgaaattataaccatcttcaaaacatacagtaaaatgtattacgtagacaagtatcaattatttcaaacagcatgacaatttaactacaaataatttcaaatcctaacaaatataattacctaatgtttaagtaattttataaataaattaccaaattagaagacagtattggttgactacattttacaaactataagaatatatcccacact

SEQ ID NO: 4680 - DNA, 386 bp, Homo sapien
atcagccgatccagtttaaatgccaaaatggaagagtgtgttaaactaaactgtgaacaaccttatgtgactacagcaataataagcatcccaacacctccagtaaccacaccagaaggagacgataggccagaatcccctgagtactcaggaggaaatattgtcagagtttctgctttgtaagacaattggaataaggtctaagagaattcgagccctggctgtgaaaagaatctcaacatagaagaaagaagaaacaataaatattctgcagattaatgcagcaaagaaagaaggttggtagtgaaacacaaagcttccaatcttaaggatgtgaataaaaccaccaaatggcatttctagacagtttgacctgttatacagag

SEQ ID NO: 4681 - DNA, 210 bp, Homo sapien
aattttttatgaacaatatatttgtattttatggacataaaaggaaactttcagaaagaaaaggaggaaaataaagggggaaagggaaaaaggggagagatgtaaaataaaaggccatttctttaatatcataataaaattaacattccatccatgaaataaaccagaacttgagcttagagtctctctctactaaacacattacttttg

SEQ ID NO: 4682 - DNA, 276 bp, Homo sapien
tttgttgctttattggggaatgacatgggtccccttagagaattattaatacgacttacaggaaaaccccctttattaggcacaaaaatatcaattaggaaatactcctttagcactttgttctaaaatagtaaattttaaaatttgattcacattgcttttccgtggtagaataaatgaatatgctaagaattacaacaccctgtagtattcctggtaatagtaacaaccagaataatcagattaataatccacttcctgtactcatagatagtt

SEQ ID NO: 4683 - DNA, 415 bp, Homo sapien
aagattttattgatgaattctaaatagcaacaggatcctcagtgaaaaaagactcatgcaaagtcccagagcccagagaaagtatggtagtttatcacctatgttagtgcaaaggaaaaggattatcactacttttcatcacattttgaagatctgacttattaagtactttgcagtctctcccgtttgaatctgaagtgtagtggtagcagctagcacttgtcatatttcaggtttggtgtagtttatttttaacctcctgctggtctggagggctacaaaggtcacaccacatagaacaaaccctatagcttgagttgccactcatcttacacccacttctcttctggttgcttttgctttgtcttggcaggagttcaaagaaggacgcagagccagccacacagccccacag

SEQ ID NO: 4684 - DNA, 406 bp, Homo sapien
aattttcatctctaaatcaaaaagtgaagcagaccaaatccaatgtaaatattggcaacctccgaaagctaggaaactttaccaaacctgaaatgaaagttaactttctaaaaccaaacttaaaagtaaatctttggaaatcagatagtagtcttgaaactatggaaaacacaggagtgatggataaggttcaggcagagtctgatggggacatgtcttcagataatgactcataccactctgatgaattccttacaaattctaagtctgatgaagacaggcagctagctaactcattagagagtgtagggccaatagattacgttcttcctaagttgtggtattattgcctcagcgcctcgattgggcagtcggtcccagtctcttagcagcacagatagtagcg

SEQ ID NO: 4685 - DNA, 419 bp, Homo sapien
caatggctagagggctctgctccaagtcattgcatactacacccacaaacattcttcgttctttaaggcctaacttaaagcccagatcctacaggaaaccttgattagacccctctctttattaagcttcctaagatcaaaccctgcttttgtgtaaatgctgacctccttgcctacattttaaaaacctagagctgggcatgatggccccagcctgtaatcccagtgattcaggagactgaggtgggaggattgctagaagccaggagttcgagaccagcctgggtaacatagctagaccacatctcttaaaataaaatagttaatttagccaggcatgatgatatatgcctgtagtcccaactacttggaaggctgaggtgtgaggatctttgagcccgggaggtcgaggctacagt

SEQ ID NO: 4686 - DNA, 433 bp, Homo sapien
tggatcaattctgagactggaaaatggccaaatctttgcaaatgagaaatatttttcttataagttcttattgtaggcaaataattacatagattattcatcagagaatttttaaatgctcataatctcaactctttcatttacaacttgtatttccaatagtttatgggtcatctctgcatagatgtcagaagtcacctcaagtttagtgtgtccaaaatctaactcacaggtctgtttctgacctcccaacttgctttccttgtgtttttcctatgctaatgatccaccataatcaaaataattaacatttatccagtgcctactatgtactattccctgtcctgttttacatttactcatttaaagtccataagaaacattaaatctcatctgccttctgaagaagatacaaccatgctctcttttacaa

SEQ ID NO: 4687 - DNA, 377 bp, Homo sapien
acccatcctggcggcacgtgaacggaccatcctccggccgcggttccggcgggaacgcggagaagacagcctgtccttcaggcaagaaggcccgcgagatagacgagagcctcatcttctacaagaagtgggagctggaaccatgcgtgagatgcggccctgctggcacccagatggaccgcgtgaacgccatccccttcacctacgagcagctggacgtcctaaagcataaactggatgagctctacccacaaggttaccccgagtctgtgatccagcacctgggctacctcttcctcaagatgagccctgaggacattcgcaagtggaatgtgacgtccctggagaccctgaaggctttgcttgaagtcaacaaa

SEQ ID NO: 4688 - DNA, 142 bp, Homo sapien
ggttggaagctaggagcagtgccagaacgttgagaacaggtccaggtcctaggaagcagggcttcccccagagggcctcttgcatgctgaggtctaggaccaggtaccctttggggataccgccctgtagccccagccccag

SEQ ID NO: 4689 - DNA, 195 bp, Homo sapien
tgaggcgcgcagtgaccttgtgtaggaagacgggcttgcgggtgatgggaatcgtggagaatatgagcggcttcacctgcccacactgcacggacatgccagcgtcttctccaggggcggcggagaggagctggcccagctcgccggggtgcccttcttaggctccgtgcccctggaccctgcgctcatgaggac

SEQ ID NO: 4690 - DNA, 150 bp, Homo sapien
ggaattctgactccttccaattcccctgcaacaaagtttgtaccaggagcatttggcgagtgtccagcaaagatgtgcccgtggatgtggatctccccaggccctgcccttcccgcaccctcggcgggctcttaccagctcccctgcgca

SEQ ID NO: 4691 - DNA, 199 bp, Homo sapien
gagagcgctgcccagccgcccaggagccggccccgagtgaggacagaaaccccttccccgtcaagctccggtccacctccctctcgctcaaatacagggatggcgcctctcaggaggtgaagggtgtgaagaggtacagtgccgaggtccggttagaaaggtcgctgaccgtgctcccgaaggaggagaagtgtcccct

SEQ ID NO: 4692 - DNA, 136 bp, Homo sapien
agggcagcagctgggctagaatgaagcagacatctcagctgaagccttcaacctggactactacacagaggttctggacctctcctacctgcttgaccacctggcttctgaccctttcttccgccactaccgccag

SEQ ID NO: 4693 - DNA, 287 bp, Homo sapien
gtagaaaataaactcttgtattgtagcacatttcatcacagcctgactaggaccagtgctcgactttctggtggcagggccagagctcacggacaccactgacagtatggggggtgttctgcttggcaccatgtctggctttttggccagaagtcctttgcagagctgaatatccccttgccagcccgccagctctggctgggtaggacttgctcttgggtctgcagcctgcatcaggagcctccactttccccagtgctggattatgcatcctgctctccagggtc

SEQ ID NO: 4694 - DNA, 431 bp, Homo sapien
gagtaattgagtgatagagtacttttttccagcagacacagttctttagaatacaagtcgcctcaagagtcttcttaatgagatttagccagttagcctgtgttccagacaaggttagttgcagaaaagaggagacgcctgctttcattctgtgacaaacttaccagtagtgttgcgctttcattctgtgacaaacttaccagtagtgtcgcttatcctggcctctcttactcctctttcatggtgcattgatctctacctcaagcctcctttattgcatgggaaggattttcatgagatttctgccttaattctacattttccttctttagttagccactgaacaaaggatggaatttatcctatgtactcaaaatctcacaaaaaggagctagcatagctgtgtctttttgactgatatcgctccccgg

SEQ ID NO: 4695 - DNA, 282 bp, Homo sapien
ttcccagatagctggccttagcatgtgatcacggttgttgtatttttaatttttgtcttttacagtatgagaggtgtaggttaatttgtttatttcctataaatttgtatttatgtgtatataaaatgtacaatgaatgtaaatatgactttctggaaagtttagactacatttagaatctctattcaaaatcaaaatgctgctcaaatgaatttaaccaacatctaggtgcttaatttctcattttatcccacttatgagattgggaaaaagatcaatatg

SEQ ID NO: 4696 - DNA, 520 bp, Homo sapien
ccagcctgtcctgcatctgctcaagctctgagtgttgctgggaccgtgcatccacttcctgaacctgtctgtgcacagccctgcgtctaccccagagtagcccgcctccctgcccgaggccccaggcgtgttttgcagcaggatgagatctgtttgaggccaccctgcccttcttctgcagggctggggcaaaagggctccgcagtccgtctcagccaccccatttctagggcggcctgcttgtggcgcactagcagcctttctatgctgaaggtggtgggggtcttttcagtgtttttctattttctttcctacgaaacagagcccctccatggcaggcccaggcccctcccagcctgtccgggccacagatacctgcagctgtggccagtttccaggaggtctttgagcacacctgcttcagcagccctgagcacacctgcatcttcagtctcagtttgaggggctggaatggggagggaagatgatttggaaggttttggggagagaagagatatac

SEQ ID NO: 4697 - DNA, 115 bp, Homo sapien
  misc_feature (1)...(115): n = A,T,C or G
cttctattcctttactcatgtctattcnttccctattttccccacataccttctccaacttcttcttcccattatctacctttcttttccatctatctttccctacttaatgtct

SEQ ID NO: 4698 - DNA, 430 bp, Homo sapien
ttggacaggatcttgctccatcacccaggctggagtgcagtggtgcgatctcggctcaccgcagcctcaacctcctgggtccaagccatccttccagatagctgggaccacatgtgcatgccaccctgactggctataattttttatttttttattctgtttctgagaccaagtctcactctgttgcccaggctggaatgcagtggcacgatctcatctcactgcaacctccgcctcccaggttcaagtgattctcctgcctcagcctcccaagtagctgggattacaggcacccgccgccatgcccagctaatttttgtactttttggtacagatggggtctcaccatcttggccaggctggtcttgaactcctgacctcaggtgatctgcctgcctcagcctcccaaagtgctgggatgacaggcgtg

SEQ ID NO: 4699 - DNA, 481 bp, Homo sapien
ggtagttaagagtgcagacacatctggggtgcaacgtctgcatcatcctggtggctagccagtgcggggaggccctgcctgggataccagttgtgacaataaagggatggccctcctggcttcagcatcctgcaggtagagcagcctcattccttcacaagatggaaggcaggtgaggatgtcaggatgagatgggaccaggtagccgaggacagtgaggcatgtctgagccacttgaggggcagctgaacagaaggatgtctgtgtgcatcaaccgagcagattgtgcgcacactcgtttccgaactgcctctccccaaagaatgtgaggcattgtcaccttgttacagctatgtgaagcagactgtcacaacttttcctggttggcagcgggggccatcacctgtggcctctgagaccgccccatttacaggaatctgcactgggtctcagtgaatgaacgtatggtagatttttattt

SEQ ID NO: 4700 - DNA, 439 bp, Homo sapien
tgtaactatggatggaggaataacttacctatcactacaacacttacaaatgagaatttctcagaatttcattctaggcaagttccactcaacaccagatcaagcaattctatctatttacactattagcctagttttctcatacagtcatcacaagcataggaagatacttcaaaaccaaaaaaaccaaggtgcatcattaatattcatttaattcaaataccaaatagtttacatagggccagcttagaaatagatactaaatccagagctactgcaatcaaagcttatatgagtgaatatggtagagttgcctgctaaaaggcaatgtaatataattgcagctagaaccctacagtggggaatgaggaattttaaacacacatttgattacagccaccaaaaaaatagacgtaaaaataaaggcatttggctggtc

SEQ ID NO: 4701 - DNA, 361 bp, Homo sapien
acttcccggggcctcggggcacacagctggggctgcccccacccgaaagaccctccacgctcgtcctctacagagtccggcttcgggaagtgccgggtgctcctgggccctgcctggctccctacgacctttgggctcgaggccagctcctccccatgcccgctgtcccagctccttgagactggagagcagccagcaggtgcccggcagctcggcgccacggcttgctgacagctgggagggtttctcggtctggaggcgtagttttgaaactcacatcacccactgtgcagcgtgaggacgggactctggtctgctgtggggggcatgcaggacggcgccactctctgccctgccatgc

SEQ ID NO: 4702 - DNA, 417 bp, Homo sapien
gcaactggttcttctgtgggaagaggttcacacggagtgacgagctccaacggcatgctcgcacccacacaggggacaaacgcttcgagtgcgcccagtgtcagaagcgcttcatgaggagtgaccacctcaccaagcattacaagacccacctggtcacgaagaacttgtaaggccaactgcggcgggaggcactgaagatgcagtcccccacctgtgtcctccctgggcccctggtggaaaggagccctgtggctgccttggctctgccctcagccccactcctgttctgcaactgtccccacaggaaggggctctgttccctgtattgtcctccttctgaagccccttggctctgcattggcccttcccctcaccacgagctcccggcctgcccagactgtggacactggccgt

SEQ ID NO: 4703 - DNA, 495 bp, Homo sapien
cttttagctggctacacatgaggccacttgttttagggtgagctccagggatttgcctggattttgaaatcatgtagaacattatccacgtggctgtggctgtggctgtggctgggcctggcaggtggaaaaccatctcccagaaacctgaaatcacctgccaatgacgcagataaccctggccctacagcctgcttgctccgcctataccacagagcacagcctggacattatggagggtgtggcgggacgcccacacctgggtcctccatcgggaacttttcatgcttctttctccacctgaggtcttggtctgaagaagacctcaggactcacatcttcactcctgggcctttgcacttccagacgacaggtcatcgttcaagcagaatgcagacaggccattcacgagcccaagttgaagagaagagacgcccatccgtgaaggagcagaccatccatccgatcctccccttcccctggtcttccttcgtg

SEQ ID NO: 4704 - DNA, 332 bp, Homo sapien
ggcgcctggaacatctccctagcaaccgtgaagcaccttgttattagggatgataaccacaacttccctggcaactgcagtgtccgacaatttagaagggaccatccttggcggcttctctgtatatactgcctttggttgctaaaggactcatagcttagcaaccatagcccttcaaggcttttcatggctgtggcgggccccattaggtaccaaaagaagaagaaccccattgtcagtgaactgtaccacccagcccacccaccttcctaccctacaggcaccctctgggccaccctcccttgctgccctagcaagtctgacagccagag

SEQ ID NO: 4705 - DNA, 228 bp, Homo sapien
tctttcttctttggaggctcacgttctccgagcatatttttcggacaggcataacttaagtgtccactttccccacattcataacacttagatttatcaaagtagtttcgccttcggatgaactcagctgctcttccattgtcaatagcaatgcttgcttttatcactctaccaaataactgtttgttgtttattgccctggtacagttttgtgcagagtctttatcc

SEQ ID NO: 4706 - DNA, 470 bp, Homo sapien
ttcggcatgagggaaaatagaaattgcaaatacatacatgtatggaaacatattcagattgggaaaaacaatggacattagtttttaaaaagttacgtggaagcaagatttctatatttgtttttttaaaggaagcagtcattctttctactaaatccatttcaagctagttctctgaaaattttgccatttatctacagaaatttgattataaatatgttcctttttcaaagaaactttattctagaacaaaatagtctatatggtacttgatctacatttaagtggaaaaattagcagtatttgaaagctcagtttatgtcattgtcttaacttcagatacaaataactgaacagaaagttttaacctttaatatctcatgttctgttttttattcagtattttcctttatgttaattcaattatatacttctgaatggcaccttactttttggaaacaaatcttctg

SEQ ID NO: 4707 - DNA, 287 bp, Homo sapien
gcactggcatgctgtgctcgaatgtcactttcctgcccttcttgagccacctgccacctcgcttcttacggtcattcttcctgggtcaaggcctgagtgccctgctgccctgcgtgctggccctagtgcagggtgtgggccgcctcgagtgcccgccagcccccatcaacggcacccctggccccccgctcgacttccttgagcgttttccgtcagcaccttcttctgggcactgactgcccttctggtcgcttcagctgctgccttccagggtcttctgctgctgt

SEQ ID NO: 4708 - DNA, 378 bp, Homo sapien
atgatgccgccgccgccgccgcctcccagtgggctgacaggaaccatagagcctcacacaagcaggcaggtgtcttgggatgagcccctggcctgctggggttgtacagaaagggcctcccctccgccgcctcacgctgttccgccggcatgatgttgcccgcccctctctcgctccatggacccttctaactttgtcaccatgatgggcatggggtgcgggcatgcgccttcgggatgcctccagctcccccaccgcctccaccacagaactagacttgttttttaagaaaatatatattatatatagagagaattggtctcgtttaaacacgccgaacctcaccatatggagccagacattgggacgcacgcatgt

SEQ ID NO: 4709 - DNA, 300 bp, Homo sapien
agtagtcttgttgatgatgataaacccaatagagaggtgctatagaaatacaagaacagataatgcactgtgtcacaggaatacagtggaccaaaaaatattactgaaaaacatttatggcacaatagttttggaataaaaagttacctaaaacctggccacaccagaagtttttctacgaatgtggctcttaccgtatctataaggatctggaaagtacaacaacaaaaaaatcctgattcctgatacaacagttgtacaacaaattattgcagttgtaacagtatctaggtgcaaagt

SEQ ID NO: 4710 - DNA, 300 bp, Homo sapien
cggccaccaccaccaccaccatcaccaccaccaccacccgcccatgatcgctctgcagccgctggtcaccgacgacccgacccaggtgcaccaccaccaggaggtgatcctggtgcagacgcgcgaggaggtggtgggcggcgacgactcggacgggctgccgccgaggacggcttcgaggatcagattctcatcccggtgcccgcgccggccgggcgactgacgacgtacattgaacaaacgctggtcaccgtggcggcggcggcaagagcggcggctgcggctcgtcgtcgtcgggag

SEQ ID NO: 4711 - DNA, 609 bp, Homo sapien
agaaacgtaaaaggacatatgagaccttcaagagcatcatgaagaagagtcctttcagcggacccaccgacccccggcctccacctcgacgcattgctgtgccttcccgcagctcagcttctgtccccaagccagcaccccagccctatccctttacgtcatccctgagcaccatcaactatgatgagtttcccaccatggtgtttccttctgggcagatcagccaggcctcggcattgtgcccgagtccctccccaaggtcctgccccaggctccagcgcctgcccctgctccagccatggtatcagctctggcccaggccccatgccctgtcccagtcctatccccaggccctcctcaggctgtggcccacctgcccccaagcccacccaggctggggaaggaacgctgtcagaggccctgctgcagctgaagtttgatgatgaagacctgggggccttgcttggcaacagcacagacccagctgtgttcacagacctggcatccgtcgacaactccgagtgtcagcagctgctgaaccagggcatacttgtggtccccacacaactgagccatgctgatggagtacctgagctatactcgctagtg

SEQ ID NO: 4712 - DNA, 487 bp, Homo sapien
agcctttttattggaagcagcagccacatccctgcatgatttgcattgcaatacaaccataaccgggcagccactcctgagtgataaccagtataacataaacgtagcagcctcaatttttgcctttatgacgacagcttgttatggttgcagtttgggtctggctttacgaagatggcgaccgtaacactccttagaaactggcagtcgtatgttagtttcacttgtctactttatatgtctgatcaatttggataccattttgtccagatgcaaaaacattccaaaagtaatgtgtttagtagagagagactctaagctcaagttctggtttatttcatggatggaatgttaattttattatgatattaaagaaatggccttttattttacatctctcccctttttccctttccccctttattttcctccttttctttctgaaagtttccttttatgtccataaaatacaaatatattgttcata

SEQ ID NO: 4713 - DNA, 326 bp, Homo sapien
tttttttttttttttcaaggtcccggcgctggcttttattgcctcctggcagagaggaggtgtcccaggccaggccaggcaggagagggctggggccaggggagtttcagtctatgtggtggaggctcagatttggagctggaggggttggtggcggttcttagagctgagcttggggccagggtccctgggtctgggctggaagactcagtcagaaataggtattgcttatcctctgggactatgacagcccctccctggggttgggggtgtgacagggacagaagccgacccagggggtccctgagagcccaggggcaggagga

SEQ ID NO: 4714 - DNA, 188 bp, Homo sapien
tactgaaagaacatacagtagtatagcttagcacagcacagaacagaaatgctagaatgaaccacatgcagtaaggcccagtgttatgtagtgaaactttgattttagttttgtgggggtgtgtatttgtgtttgtacagagctgagaaacaaagtctaaaatgtcctaccatcaactatggtcgaaa

SEQ ID NO: 4715 - DNA, 428 bp, Homo sapien
ccaatttaaaactcaggaattgtttatttcatttaatactttcgaaccatggggtaagtgaaaccataagagcgaaatcacataaaacgaaactagacaagagggaatgactgtatttaatctaacaacactaccacagaaacctaagaaattcatcaataaaggttgtccaactaaaagaaacttgcataatcctgtctttgcatacctgaatactttaaagaggcctggacattgaaactcaaggaagcagatacatttgttaccagctgggaactttagtatcacggaaacttgaaaaaaggcatctctaaaggctgacagtttttcccaccattaaaatgtcagttctagcaaaggactgtattatatccaaatatttctagcaactagaaaatttacattgaacataaactagattgtcttgg

SEQ ID NO: 4716 - DNA, 383 bp, Homo sapien
tataaaacacagtatttattgatttcaaggaaactgtcttgaggatgttctatcagcgcatccacccaagtccctgggagcagggtctgaaaggctggcaccagcatgagcatcagttgtggggaggaagatgggagcaccactgcctgaggttgagggagtaggatttggggaaagagggcttccactgagccaagtgatgacctgggggacctctgggtatctccagaagctctagtcaggttcattctcagccctccagacctgctgctgctggaagacctcctctccactgcaggaatctgggcggctcctctggagggagtagagatgccttaggtctgctgaggctagcccagggcgagcatcactttttgtgtggc

SEQ ID NO: 4717 - DNA, 408 bp, Homo sapien
ttttcacttcatttcatcaattcattctttattcaacatacacttgttgatgcccggctctgtgcccgacaagatggtagctgtggagactgatctgaaaaagcaaccttcgtgacaggtggaagttggatgggaacaacccacccagccaattaggttcctcagttgcatgacaccaaggagctgctgtctgggaaatgcacttattacgagagggacaaagtgtgactgagccacaggctcacctcagccagtcaaaaggacttgggcactgcctcattcaagccaccttggagcagacgtggctacgctcccagcagccctgtacccatcggccactgaagatctcagctctcgtcagccttgcaaagcttgctgcatctgagtcttgggctcccggtccactgc

SEQ ID NO: 4718 - DNA, 438 bp, Homo sapien
gagcagacaaatctttattcctgaggctaaaatatgcaccagttccctccctgtaccgcgccactgccagcctgactgcatgcaggccctgtcccagacctggagcgctgaacttggagtcccaggacctccttccctgagttgtgtgtgtgtacatggaggggactcctgggtagcacctggaggcggcctaggggtgaggggcttctcaagggtgccctgcactcacagaggtgcagtcattgggcaggatgtagcatgttcagagtctggtgaccgaaacagggctgtcggggacaggcctcgggtgttggagggcaaaggtgacagcatcatggacagaggcaaagagatgcttcttggtgatggatgcatcgaagaagtgcccagcctcaagctggctgaccacagggctgtggcaggccgccatgtacacca

SEQ ID NO: 4719 - DNA, 106 bp, Homo sapien
acgtatcaacaaaggatcctttattgaccagagcaggaccgtggcatttttatatatatatatatatatatatatatatatatatatatatatatatatatatata

SEQ ID NO: 4720 - DNA, 471 bp, Homo sapien
agtcctaaaaagtttaatttccagagataggtaatttcctaactgaatacagaaacccatagggcccagggatcctgatttcctatgcaaaatggagggtaaaactggaggctaggatctgggctaaaagtatatacttctaacagtagcacaaagatgtttctcatctgattgatcaatattcatttggattgatatatcttaagtttactgggaatattgaacatccattgcaaaaatcaagagtgtagagtgatgacctccttttaggtcatatagaacaaggtttttcaacccccatccatggaccggggtactggtcctggcctggtaggaacagggccgcacagcaggaggcaagcaggccaaccaacaagcattaacgcctgagctctgcctcctgtcagatcagcagtggcattggattctcaaaagagcaggaaccctattgtgaagtgcagatgcgaagga

SEQ ID NO: 4721 - DNA, 326 bp, Homo sapien
catgggtagtcaaagaatatgtttaataaaaaataattaaacttccatttgctctatagaacatcatagaaagtaatttaataaattacaaatgactttttaagacgtttgctcaactacagaaagcaaattcagactacacaaaacacaactggtaaatattgcaaatgtccaaaagaaagattggactaagacttgaatcataaaacctgaaacaagggctataaatacaaggcaataacagctataattcttttagtaactaccaacacatacttggatattctttcaactgcaactttagtattatgtaattctactgattt

SEQ ID NO: 4722 - DNA, 447 bp, Homo sapien
atatgaaaactaatttattaaacctctgtacacaaagatgaacatacctgtatagcaagcatatatgaaggatgaagttacaaaaaagtaaaagtattactaaaattgacacatgtaaatcacttacaaaaataccccaaatgggataaagctgctcatccctgatttttctcatttggttgtaggagttgaaacatgaatttaaaatggtagaattttttcttttaaaaagtgatatattaaacttatatacaggataattagcaaaatgtagaaagggaaaacaatgtacaaaagacagataaaaaccatcactctcgacggatagtcacaatccaaaaatagtataaaccttaacaaaccctctctaaaccaggtcatattcacatctcccccaagttttgtcagtgagaataaaatatactgaactagtgagctcagtctttc

SEQ ID NO: 4723 - DNA, 503 bp, Homo sapien
gcgccgcacctggagcccgacggcctgcggaggcaagaaactgctcaacaagtgcgccgcctcagccgcggaggagagcggggccggcaagaaggacaaggtgaccatagccgatgactactcagatccctttgatgccaagaatgatctcaagagcaaagcaggaaagggggagagtgctggctacatggagccctatgaggcacagaggatcatgacagaatttcagaggcaggaaagtgtccggtcccagcataaaggtatccagttatatgacaccccttacgaacctgaaggccaaagtgttgactcggactcggagagcacagtcagcccccgactgcgggagagcaagctgccccaggatgacgacaggcccgccgatgagtacgaccagccttgggagtggaccgggtcacatccagccctggcagcacagtttaatggcacgagaagcggcagtcatccccctcacttcgcggaccggcgcgcacttcgtgccc

SEQ ID NO: 4724 - DNA, 472 bp, Homo sapien
cggccggcctgcacgatgcacacgccggacttcgcaggcccagacgacgcgcgcgcagttgacatcatggacatatgtgagtccatcctggagaggaagcggcatgacagcgaaaggtctacttgcagcatcttggagcagacagacatggaagctgtcgaggctcttgtttgtatgagctcctggggtcaaagatcccagaaaggtgacctgttgcggataagacccctcacgcctgtctctgactctggggatgtcaccaccactgtgcatatggatgcagccacacctgaactaccaaaagacttccattctttatcgactctgtgcataactcctcctcagagccctgatctcgtggagccatcgacaaggacacctgtttctccccaagtaacagattccaagcatgtacagccacggatgttctccagtcctctgccgtagtggccagagctctgagcgggggcgc

SEQ ID NO: 4725 - DNA, 227 bp, Homo sapien
gagatttgaatggtttaataactctgtcttcgtgagcgggatggcaagctctcacactttacccgcaggctgtgctgtgcacctcccacacagtggtctgagcagaggcggcgtgggaccagaccctcccacagccagcctggccaaggtggcacagaccagagctctgtgcagacaagcacccaggggtctaggaatgctcccccttctctccaggggccagaggg

SEQ ID NO: 4726 - DNA, 133 bp, Homo sapien
ttttttttttttttttttaataatcacgtaagatgcgatcatacttctggcattttcaaaaagtgaaaactgtataaaaataaatattccccatacaaacacacacacaggccaatccaaggttagaggcatc

SEQ ID NO: 4727 - DNA, 112 bp, Homo sapien
aaaaaaattgccccaaagcccccgggaaagggcccccctttgttgggctttggggggccaccttttgggggagctagctttcccccgggtggggggaaaaatggcttggccg

SEQ ID NO: 4728 - DNA, 448 bp, Homo sapien
ttcggaacgaggtcgagaggagctgacagccttcctgcaccccgaggagtgaggtgggccactgggtgctgccccctgcccaggaccagcccctggtggaagccaaccacctgctgcacgagagcgacacggacaaggacgggcggctgagcaaagcgtaaatcctgggtaattggaacatgtttgtgggcagtcaggccaccaactatggtgaggacctgacccggcaccacgatgagctgtgagccccgcgcacctgccacagcctcagaggcccgcacaatgaccggaggaggggccgctgtggtctggccccctccctgtccaggccccgcagaggcagatgcagtcccaggcatcctcctgcccctgggtctcagggaccccctggtcggcttctgtccctgtcacacccccaaccccagggaggggctgtcatagtcccaga

SEQ ID NO: 4729 - DNA, 438 bp, Homo sapien
aatctagatcctctagcctgggcagtagaggaagaaatgctagcctggaagctcggcatttggtttcactaagggccatgtggttccctgcagcctcatgcctggccccttgacacatccaaagcaaagggagtcctgcaccctccccccacttcctttctaccctgcctgtgcacagtgggtgggttggtgtgtctggacactgaggacttcctccccctttgcctgtccttccctcggccctgtgtgcctcagggagatatagcaagctctttcgaccatagttgatggtaggacattttagactttgtttctcagctctgtacaaacacaaatacacacccccacaaaactaaaatcaaagtttcactacataacactgggccttactgcatgtggttcattctagcatttctgttctgtgctgtgctaagctat

SEQ ID NO: 4730 - DNA, 452 bp, Homo sapien
atggaagattcactgtcttcttaaacaaaagtgccaagcactctctctgcacattgtgcctcccagcctggagactctgcagtgtacttctgtgcagcaatcacttataacaccgacaagctcatctttgggactgggaccagattacaagtctttccaaatatccagaaccctgaccctgccgtgtaccagctgagagactctaaatccagtgacaagtctgtctgcctattcaccgattttgattctcaaacaaatgtgtcacaaagtaaggattctgatgtgtatatcacagacaaaactgtgctagacatgaggtctatggacttcaagagcaacagtgctgtggcctggagcaacaaatctgactttgcatgtgcaaacgccttcaacaacagcattattccagaagacaccttcttccccagcccagaaagttcctgtgatgtcaa

SEQ ID NO: 4731 - DNA, 410 bp, Homo sapien
gcgaaacgctatgtctttcgccgcagcttcctgatgacttgtatctcacttcgaaatctgatataaggccgtccttccctggagcagctggcccaggaggtgacttatgcaaacttgagaccctttgaggcagttggagaactgaatccctcaaacacggattcttcacattctaatcctcctgagtcaaatcctgatcctgtccactcagagttctgaagggggccagatgttgggtgcagatgtagaagcagccagtcacagacccattctatgcaatggacatttatttgaaaaaaattctcaaaagttttttttttttttttgggggggcggggttctaaagctgtttttaactccgagattacaacttagaggaaccaaggaaataaagcaaataagatttaaca

SEQ ID NO: 4732 - DNA, 392 bp, Homo sapien
tttttagtttaaaatgaagtatattgaatgtttgcctttagcaccattttatttggtttgtcccactaaaatgactcgagaagtgtttagacaaactccccttaagatgtgcactccatctttaagaacgtgttagccttaactttgaggttctatatagtcagagactatgacaccactaaggttcagaataaagtttaggccacataaaattgctgtttaatgtagtcgatggaagactttaaactatgcttctagcttatttttccctcattcattcagcaaatctctattgagttcttcagtgagaaggagcaggcactgggcctggaatggaaggcgggaatgaatgggcctctgatggtgagaggtgacggggtccctcagctgtg

SEQ ID NO: 4733 - DNA, 432 bp, Homo sapien
gatatgaagagatcaaagaagaaatacaaatggccaacatgtagatactgttcggtccacttgtgattaaggaaatgcaagatcagaatatcttctatttaatttggaattattaaagtttatattagttttgaaatgtttagttttgaaaatataggagaaagctttctcctgtacctttgtacaaagaaataagagtggaacgtgtgtatgtggtttgcgtgggttgggaaatctacctactacatgattgatggccttgctcccaggaagtagtgatgtggatctgagtgagtatgggtgggagcattttaattttgtaattctaatttcaaaagagatttttattttattatttttttgagacggagctcacatctgttgcccaggctggagtgcagtggcatgatctcggcttactgccacctctgc

SEQ ID NO: 4734 - DNA, 442 bp, Homo sapien
ggcggagtgatgggctgagaatgtgtgtgtgtctccaacagttcccaaacgtctacattttcaagaaaaaggcaatctacatcatctggaaaattgtaacttagtaattaattaggataatttccctaggttctctgtgctgcatgagaccacagcgtattcattaaagaggaaagctgaatattggcggaaaacagggttgtaaatttgtaacaagttgttctatcagaaaatgaaatgcaattttctgtcctctctgagcttttaccacatagctcttagcaatgggtgttttttctgtcattccactcaattctcactcgagtaaacctccaagcaataagaatgttgtctttcctgtttagactagactgactacctttccaggacagtccattaagttgatttccagtggtgaagggtcagacacgcctcccctggg

SEQ ID NO: 4735 - DNA, 435 bp, Homo sapien
gtcagttgtggagcaggaagtaatctgttttagaacaccaaaacactggcttcactggttctcttctggacttctccatcccacattgggactgggtctctagtcttgggcctctgcgttcatagagctccctgctaacctccaactcagtgtattttctccatctaaaacattctatcaagtaagaacactagctttagagtcaggctgtttttgaaccccaggctgtgggaccctggctccctttggggatgttctctgaaggatggagacacatctcatatgaaatgtgtagcacaggtcctgacacggggggtttctcatggcttgctttgttaacacccagtactgcaagcatctggccctgtctcagccattcagcttcacccagcaggacatgcccaaacttcgtcggcagatctacaaggagctgtg

SEQ ID NO: 4736 - DNA, 449 bp, Homo sapien
ggaatcatgtgatatctcttttgtgactggcttcttccactgaatgttttctagggccgtccaagttgaggatgtatcagtacttcattcttttgtattgctgaataatacttcattgtatagatagaccacatttgtttattgattcatcagttgatggatatttgtgtgtttttactttttggctactctgaatgatgctgctatgaacatatttctacaagattttgtgtggacatatgttttcatttcttttagcaatatacataggagtggaattgctaggtcttacagtaactccgtgttttaactttttgagaaactgccagactgttttctatagcagctgtaccattttacattcccaccagcaatgtatccaggtttcaatttgtctacatcctcatcaacacttgctattatctgtctttttgcttttagcatcctaa

SEQ ID NO: 4737 - DNA, 417 bp, Homo sapien
gttaccaatctgaagtgggagcacaggaaaaggacaagggtgtctgtcagggatggcactgtgttaaaaagtgggcgtgcaagggccgcattcccgggcagccgctgcaacctcagcccctgggcccttacctccgcagcctctcccagcatccagctacccagactccaaggccccaggcgagacaggctctcggtacctggagctccacaggtcccagaatcggggtggatcagagttcaaattctggttctgctactgtctaattgcgtgctgcagggactcaatctcttcatctgggaaatgggagtaataacccttggcaggaatgttgcgatcctctgggatgtcagaggtgttgatgaatgttagttcccgggacttcggaaagaggtcccgttggaagagatgtgaatt

SEQ ID NO: 4738 - DNA, 347 bp, Homo sapien
tttttacaaagaaagaacagcggacgaaggtggccattttattttctcaaagccacactacctgctgctacacaggacataaaagtgcaaaattccaccaggaagggaaacaaaacagtcttgagacagccatgtctcagaggtgaagattggaggagattttaatatagggtgtgaattccaattcacatctcttccaacgggacctctttccgaagtcccgggaactaacattcatcaacacctctgacatcccagaggatcgcaacattcctgccaagggttattactcccatttcccagatgaagagattgagtccctgcagcacgcaattagacagtagcag

SEQ ID NO: 4739 - DNA, 164 bp, Homo sapien
gggatgcagaccataccctttgtgctctcagccagccttcatgggggcgacctggtggtgtcctaccccttcgacttctccaagcacccccaggaggagaagatgttttctcccacgcccgacgagaagatgttcaagctgctgtccagagcctacgctgacgt

SEQ ID NO: 4740 - DNA, 243 bp, Homo sapien
ttttttttttttttttttttggaaagtggatcaaaacactttaataaaatggcagcggctttgtgggatgtctgtggcagacaaaatcaagagccaggagcccgggatgcggagatgggcctcggtctccacatcctggcgggtgctggggccggggctagtacttgagcagccagcgtggcctgtgggtgctcagcgatgtgaagtaggaccaccaccagggcttactcccgtcggccgagg

SEQ ID NO: 4741 - DNA, 362 bp, Homo sapien
tccccattgcctggggagcagccctcaatttcgccttgtgcctcccctcttccaggtgccaaatagccataacctcgtcttggaactgttatgtggcctctctggggtccaggtttcctggtcaagcctgggaatgccagggaggaaagggggtctggctacagcgaccctggtcttaggcaaggggaacatttctcctggagagcaggtctacctggctgcctgctgccagccagggcgatgcctggaagcctactgacattgcagggagtcagcctcgcccccaccccctactggttttccaatgctttggctggagggcaaaattttactactactcatctttttggagaccagggctg

SEQ ID NO: 4742 - DNA, 419 bp, Homo sapien
ctgggggctgcttttatggggacgacctgacagagggcatggtccgtacaaaaccgggaacaatacatacatatatatattatatacagagatgcggccctcccgacggctgggcaggggtggccgctggccatagcagcccgaagcggccccgcccaccacggttccgccccctccatctgccggggtgaagtgcgcgacgccaggactgagacagccagctccttcaggggatgggggcacatctggggataggaaggggtggggacaagaaatactgatcgaagtcatggtctatttacaggggacaagaagccaaaacggatgggatgggtggtctgtttttaaaaaatgaacaaaaacccagttagggcaggggcatgaagtggcaaaatgagatggattttgaaaggggaggg

SEQ ID NO: 4743 - DNA, 290 bp, Homo sapien
ggatagtggtacggcctacctcatagggttgtaatgagcactaaatgtgaagtgcttggcacagtgcctggcacatggtgagccacagctactgtgagtttctgtttatccccctttttttttttttaagcccattgtttattctttgagaatttgttgtaacttcttcaggataacacctgagtccacaggctgagcagctgtggcccagacagaactgctccggcttggctgttccagcaggtggggcgctggcatcggtgagggcacagcagcaaggttcacggata

SEQ ID NO: 4744 - DNA, 389 bp, Homo sapien
tttttttttttcacgtttccaattgagttttattctagaacaaatggttttacaacaaagctgatcttaaatagtacatttccccgctgataacagcgccatcttccttcgacccccagaccaagggatcaaagctactgctcaattgagtttgacatcagctaccgacttttaaggaatctagaacaaagttctggagccaggccagaagtggtaaaagattcagttagccccttcctctgtgctgtgctgacagggagggagccagtgactggacaatctatgaccccaagtttgtggaacgtggggcttcagctgagggtggggtagtgtgatttcagcagtgtctccacctccctgacccctgcgctgctttgctctgttgtcac

SEQ ID NO: 4745 - DNA, 332 bp, Homo sapien
gcgtgatctcggctcactgcaacctctgcctcctgggttcaagccattctctgcctcagccttcccattagctgggattacaggcatgcgcaccaggccagctaatttttgtgctgttagtagagacggggttccaccatcttggccaggctggtcttgaattcctgacctcgtgatccacccgcctcggcgtctcaaagtgctgggattacaagcgtgacgcatccgacccctgcctgaggattctgccttttaccaatgcaggtgaaacatctggcaaggagacacctggagtgtaggtgttccttggtcttgaagacctagaggtggcc

SEQ ID NO: 4746 - DNA, 457 bp, Homo sapien
gtcactggagtcccctctttgctgaggtagtatgtatcagctgagctactctcttgttatttagccaccagggctggcctttagagagggagcgatttttatttgaggtatagatgctggcttcttccactatgaaatgatttagggaaaagctacacactaaagttactggcagtatattatacatgaatcagccacctgcagtgcccagagtaggtgaagaagatactttagttctcgaaatcccgtctcttgctttctagacattcactactttcactgcctaagaatcctggaccttctcaaaggcacagaggcctccacgaagaatatttttggccgatactcttcacagcggatgaaggattggcaggagattatagctctgtatgagaaggacgacacctactgtaggtaaagtggcccggcctgggagccctggtatccatggggaagc

SEQ ID NO: 4747 - DNA, 421 bp, Homo sapien
cgagaccctccaaggcatcctctcgtggggtgtttacccctgtggctctgccagcatccagctgtctacacccagatctgcaaatacatgtcctggatcaataaagtcatacgctccaactgatccagatgctacgctccagctgatccagatgttatgctcctgctgatccagatgcccagaggctccatcgtccatcctcttcctccccagtcggctgaactctgccccttgtctgcgactgttcaaaccgtctgccagccctccacaccgtctaaacatctcccctctcacctcattcccccacctatccccattctctgcctgtactgaagctgaaatgcaggaagtggtggcaaaggtttattccagagaagccaggaagccggtcatcacccagcctctgagagcagttactggg

SEQ ID NO: 4748 - DNA, 430 bp, Homo sapien
ttcagatcacgacaacagggtaaccgtttagtcagaactcaccacccacgtgtgttaagccttacatgacaatcaccatgaagatttacatacacatgttatatcatagtctcctcacaacatgtctaagaggtaggcacgtcattgttcccattttgcagatgaggaaactgaggttcagagagggcacttggcttgcccaaagtcacacagcagggagtggcagaggaagtcaggttgggtgaccccagtaactgctctcagaggctgggtgatgaccggcttcctggcttctctggaataaacctttgccaccacttcctgcatttcagcttcagtacaggcagagaatggggataggtgggggaatgaggtgagaggggagatgtttagaggtgtggagggcggcagaggtttgaacagtgcagac

SEQ ID NO: 4749 - DNA, 475 bp, Homo sapien
tggggtggggagaggcgggtacctcatagggcggcggggtgctgttggcgttggcaacggccccctgggacatggtcaggcagctgcagcttcttcgctcaactcctatggggctcagggttcctcccttgcctcctatggtaaccagccatcctcttacggcgcccaggctgcctcttcctatggggttcgtgcagctgcttcttcctacaacacccagggagcagcttcctccttaggctcctacggggctcaggcagcctcctatggggcccagtctgcagcctcctcactagcttatggagcccaggcagcttcatataatgcccagcccttcgcctcttacaatgcccagtctgccccagatgctgcacagcaggctgcttcctactcttcccaacctgctgcctatgtggcacagcagcccacagctgctgcctatgccagccagccagcagcctacgccgacaaagca

SEQ ID NO: 4750 - DNA, 482 bp, Homo sapien
cggggtggggagaggcgggtacgtcactagggcggcggggtgctgttggcgttggcaacggccccctgggacatggtcaggcagctgcagcttcttcgctcaactcctatggggctcagggttcctcccttgcctcctatggtaaccagccatcctcttacggcgcccaggctgcctcttcctatggggttcgtgcagctgcttcttcctacaacacccagggagcagcttcctccttaggctcctacggggctcaggcagcctcctatggggcccagtctgcagcctcctcactagcttatggagcccaggcagcttcatataatgcccagccctcggcctcttacaatgcccagtctgccccatatgctgcacagcaggctgcttcctactcttcccaacctgctgcctatgtggcacagcacgccacagctgctgcctatgccagccagccagcagcctacgcggcaaagccaataacc

SEQ ID NO: 4751 - DNA, 219 bp, Homo sapien
tttttgagacagagtttaactcttattgcccaagctggggtgcgtggtgtaatcttggctcatcgcaacctctgcctcccgggttcaagcaattcttctgcctcagcctgggaagcggaggttgcagtgagccaagattgcaccactgcactccagcctggggacagagcaaggctccgactaaaaaacaaacaaacaaacgaacaaacaaacaaccaa

SEQ ID NO: 4752 - DNA, 389 bp, Homo sapien
gggagaagtgggggcctttattaaggtctggcagatgtggtggaggtggaagtacaaacccaggcctgggcctaggaaagggcagaagaaaggcaaagggtcccttggagcaggaacccatccctctctgcttatacccagcacccctcatcccaggttcctttcttcaacctccgcctgcctctgggaacacagagcaccaagaactgacaaaccgggaccctccagggccacagcgtgtggcagagtccaggcttctgtctccccgcagtgggagatctcggggagctcagtgaacctcctcaccctcctgccagtatgaagttgggaagcgccttctctgtcccccagaacagaacaaactcttgttctctgtggttggggaaaag

SEQ ID NO: 4753 - DNA, 468 bp, Homo sapien
cgaccgcctggcaagccaggccgtgcaggaagccgacctccacccgcttcagccgcttcacctgcttgcgccgccgcggccggtacttgtagttggggtggtcctgcatgtgctgcacgcgcagcgctctgcctcctccacgaagggccgcttctccgccagcgtcagcgcttccacgacttgcctgcacagtggaaggaagggggagaggggcgcagggcttatcggctgcgctcccgctccaggccccacctggccccacctggacgcacctcccccctcagactttgaattgcgcaaccggggtgaagttaaagagggagatctgggactcctgagtccgagcccttggggaacacccgtcctctaaaggcatccctttcttttggtctcctggaagcggctttccgctcacccatcacccggtcgttcgaaaaacagaaaaggacactaactagggaaggggtc

SEQ ID NO: 4754 - DNA, 115 bp, Homo sapien
gggggggggggagaaaagggggaaggggaaaaggatgcctccaaaaaaaagggaccccccccaagaaaaaaggaggggagggccaaggggtgggggcccaaaaaaaggagaaata

SEQ ID NO: 4755 - DNA, 351 bp, Homo sapien
tttttttaagaaaagagctctttattccacgtcgtccgatatttttacacaagtaaaataaaatgcatatctctatataccgcgatctgggtgggaggcggcgttctggaacaaacgctgccgccgaaccctgtaaacatgatggggtggagatgggggtggcgggcggcaggcgtccatcagggaggacctggcctggcctgccccacgggtcggccgcccggctggcttggcggcgttggagagagaccccgtatgtacacacacctggctgctgagcacgctcttgtgtccgctgggggtcagcagggcccaagcactgtccacagcaccagcgccaggcccaggggg

SEQ ID NO: 4756 - DNA, 515 bp, Homo sapien
cgccgcccgtgagggaggaggccgaggaggacgcggcgccggctgccgacggaggaagcgctccaccagggcccccgacggcactcgtttaaccacatccgcgcctctgctggaaacgcttgctggcgcctgtcaccggttccctccattttgaaagggaaaaaggctctccccacccattcccctgcccctaggagctggagccggagagccgcgctcatggcgttcagcgcgtggcagatcctgtcccccgtgcagtgggcgaaatggacgtggtctgcggtaccggcggggcgcggctgaggacgaggctggcgggccgagggcgaccccgaggaggaggattcgcaagccgagaccaaatccttgagtttcaggagtggctgtaaggtgaagaagcatgaaactcagtctctcgccctggatgcatgttctcgggatgaaggggcagtgatctcccagatttcagacatttctaatagggatggccatgctactgatgaggagaactggca

SEQ ID NO: 4757 - DNA, 452 bp, Homo sapien
gccaggcggaaatatttatttgaaaaattgaaaacacagatgcaatgtattatacaaagaaaggtcttaataccataataaaagtattgtcggagggaaacagaagccagtggccacctgccctgggaaggtaggcactcagtgaaaaatgaaattcatttcaaggaactaccctaatggaaacccaggggaaaggttaaaaacagaagaaaaacaaacccaaccctatccctgcaaactgaaatgtgaaagagtctgttataagtttgagacaactgcattatcaccaagatgtaaccgaaccccctcggtttgtccctatgagtggtaatcagtttcatttagggccttcaaacctgaggtagttgagggtcactgaaagacatgtctggaaaaatctactctcagaatcgaacccaacagcattgaattgtttcctgttgctttggctc

SEQ ID NO: 4758 - DNA, 451 bp, Homo sapien
tttttttaaacaacagaaatctattgtctcatacatttcatctggaggctagaagtccaaaatcaaggcatcagcagagcggttcctcctgaggcctgtgagagagaatctgctccacgccgcaccccttgctccttgtggtttgctagcagtctttcgtgttccttagcttgacgatgtatcactcaatctctgccttcatcttcatgtggtgtactccctgtgtgtgtgtctctgtgtccaaatttccccttctgatgtggacatctatcatatttgattagggcccgctctgatgacctcattttaacttgattacctctgttatgaccctgcctccaaacaaggtcacaatctgaggttcattaacatataattcttgagtagaaacaattcaatccatagcagcttgcatttttctcacatgtgagagggatcttagcctgtgact

SEQ ID NO: 4759 - DNA, 380 bp, Homo sapien
taaattgaaggtttgtagcagcctggcatcagaagtctatttggcaccattttccaacagcatgtgctcactttgcgtttctgtgtcagcattttgaacagtaaatatttttaaattaaggtttgtatatttgttagacataatgctattgcacatttagtggactgcaatatgcagtaaacatgacttagatgcactgggaaactaaaacaatgcgcttccttgctttattgtgatgttggctttaccgaggtggtctggaactgaacccacaatatctccgagatatacctgtactttttactaaaaatatttcatttgagaagtaaacctcaagaactaccaggacttttcagatgggaagagcgaggccctggcag

SEQ ID NO: 4760 - DNA, 533 bp, Homo sapien
gtcagatgtaccttactctctgctactgtacagctttaggatttgtcatcacctcccggaacgtgtaaaaccccaggcttcctcttcttgtagtccatctcccagacttgtgactatggcttttcattcttcaattcatgacgagtgccaaacttgattttctctaggcacagctttctccctctgtgcctcctgcttcctttctctctcctgcctctcctctgctccccatcccactttctcatctgcctccttttctcacttctgtcagtctgtaagctttgataacctgcttaatactccaaagtgtgagttcctctgatctcttgattccttagttctaatctcacgttttgtttttaagagatggagtctctcactctgtggcccaggctggagtgcagtggcatgatcatagctcattgcatccttgaaatcctgggctcaggtgatcctcccgcctgagcctcctgagtatctgggactacagatgcgtgcaccaagcctggctaattttgtctcatgtcttctaa

SEQ ID NO: 4761 - DNA, 295 bp, Homo sapien
cataggcagcaggttgggaagagtaggaagcagcctgctgtgcagcatatggggcagactgggcattgtaagaggccgagggctgggcattatatgaagctgcctgggctccataagctagtgaggaggctgcagactgggccccataggaggctgcctgagccccgtatgagcctaaggaggaagctgctccctgggtgttgtaggaagaagcagctgcacgaaccccataggaagaggcagcctgggcgccgtaagaggatggctggttaccataggaggcaagggaggaacc

SEQ ID NO: 4762 - DNA, 422 bp, Homo sapien
gataagatttattgagatacatacccatagaattgcctcataggacttcttgcagcactcaatctagagtgaatccctgtttacttagaccctcttccaaatcatgtaaaccaaatcccaaatcgtatagtgggttctttcttacattcttatggagacaccagtggttccctgtggtgtgagttctctcttgccatgagtaataggcccagctcattcaattgtaagagtagtacaatcagcttacaatttttcactttcaaaagtctgtgaatattgtttccaaagtcttctacatctcactttttcaagaggaggggtcacagactaaaatgtttcttcttcctttgtaggtaagatgttgtttcgttttgctttattttcttcctgcttgcttgttaaattatatcttgatatcgaaa

SEQ ID NO: 4763 - DNA, 497 bp, Homo sapien
ctacaagcgacttgggacttctgggaaacatggtggcaacgtctctttggatgttttaccagtcaaaggtcctcagggttctcctcttctctcacgggcggctcgccctccggatcagctggcctccgaagagccgtggactgtcctacccgagcacttgattctggtagctccttctccttgtgacatggcaaaaaactggacgtttccagattgtgaataactctgtgaggttactgagatttgagctgtgctggccagcgcattgcctcacagtcacgccgcagcatggatgtgtcgcgccagagagtaaactacaaattcttgtgagtcctaattcctccttatccacaaaacagtcaatgttcccgtggagtggtttgatctatatacactgtgacgatggacagaagaaaattgtgaaagttcaaattcgagaagatttaactcaagtggaacttttaactcgtttgacctccaaaccatttggaattctt

SEQ ID NO: 4764 - DNA, 524 bp, Homo sapien
agcataggcagcctcccgtgtctggagcacgtgtctctgctgaacaaccctctgagcatcatccccgactaccggaccaaggtgctggctcagttcggagagagggcctcagaggtctgtctggatgacacagtgaccacagagaaggagctggacactgtggaagtgctgaaagcaattcagaaagccaaggaggtcaagtccaaactgagcaacccagagaagaagggtggtgaagactcccggctctcagctgccccctgcatcagacccagcagctcccctcccactgtggctcccgcatctgcctccctgccccagcccatcctctctaaccaaggcatcctcggagatgagtgagtgaagcaggtctcatgagcgtgtctgctggcccggccccacggaagaggggagggtgtgccgtcccgagtggagccgaggctcgggacacgcaggaaaggacgccgcctgcccgggctcctggagacgcagaacttggtgtgaggtcttgggaaaacagttca

SEQ ID NO: 4765 - DNA, 160 bp, Homo sapien
agccaattcctcaatgtttccagataagggcacagcagaagaactaaaggaaaaatataaagaactcaccgaacagcagctcccaggcgcacttcctcctgaatgtacccccaacatagatggaccaaatgctaaatctgttcagagagagcaaagcgtt

SEQ ID NO: 4766 - DNA, 453 bp, Homo sapien
agcgttacgtgtacaagtttgtgtgtgagcccgaggcctcttctctttggccttcccggacaatcagcgtccactctcaaggctgagtttgaccggcctgtcagtgaggaggacacagtccgtttgtcccacttggatgagagccccgcctacctcccagagctggctggccccgccagcatttggcccaagggtggctactcttactagcccccagcggctgttccccctgccgcagtgggtgctgccctgtgtacatataaatgaatctggtgttggggaaaccttcatctgaaacccacagatgtctctggggcagatcccactgtcctaccagttgccctagcccagactctgagctgctcaccggagtcattgggaaggaaaagtggagaaatggcaagtctagagtctcagaaactcccctgggggtttcacctgggccctggagga

SEQ ID NO: 4767 - DNA, 454 bp, Homo sapien
ctgttctttgcgagcctgacgcccaaaaccaggggtgtgtagcggccacgtcctttcttaaggctctgggttcccttcccgcttcccgccctccgaccctccaaagcagctttccgccttgctctccggctcccggattccccaggtggccggggcgcgggtccaacggctctgggaaggcgacttccggcacctccgggcggcgcgagacacccttggccctgaactgggccggttgtgtccatccctcgaccccttccctagttaggtgtccttttctgtttttcgaacgaccgggtgatgggtgagcggaaagccgcttccaggagaccaaaagaaaggggtgcctttagaggacgggtgttccccaagggctcggactcaggagtcccagatctccctctttaacttcaccccggttgcgcaattcaaagtctgaggggggaggtgcgtc

SEQ ID NO: 4768 - DNA, 376 bp, Homo sapien
aaaaaaaaaaaaaaaaaacctttcctctgagcccatcttcctttcgctccttgactttccttgacttgctgttggaaagtctaatatgaaaagggctgaaactaggcattaaatataactgatgctcaaaggtaagatttccatccaacagattccttctccctcccaagggtcttcccaggcagtgctgctacttatcccaaataaaatggtaaaagaataaagacagccgggcgcggtggctcacgcctgtaatcccagcactttgggaggccgaggcggacggatcacaaggtcaggagatcgagaccatcctggctaacacggtgaaacccgtctctactaaaaatacaaaaaaaaaattggctgggcgcgg

SEQ ID NO: 4769 - DNA, 285 bp, Homo sapien
gttcggcacgcagggggagaagggtcccctctctctgcccctcccactccttttcagcggcgatttgtctgtgtcttctccccacccactgcccagcccccattgttgtctggatgtggttctattttttatcggtctcctttcccctcctccccgttctcggccccgccccaccccctgctcccactaccctttgtctcttgctctttcttgggcttctgtacaactcaacttgtatacactgtgtacacacaaccagccaaacgaaaacccaacggcaaacaa

SEQ ID NO: 4770 - DNA, 419 bp, Homo sapien
acagcccgcccgaacggtctggccacgcacatcaatgactcaccctttggactctgcctggctctgctgagccccgctcactgcagtgcggcccgagggtccgagccaccagggttccccacctcgggccctcgccggacgcaggctgttcacgcaagaaccgcacccgcagccactgccgtctgggcaggcaggagcgggggtggcgggactggtgactcagaaggctcaggtgccctacccagcctcacctgcagcctcacccccctgggcctggcgctggtgctgtggacagtgcttgggccctgctgacccccagcggacacaagagcgtgctcagcagccaggtgtgtgtacatacggggtctctctccacgccgccaagccagccgggcggccgacccgtggggcaggccagg

SEQ ID NO: 4771 - DNA, 476 bp, Homo sapien
ccattcatttgcttcaatctctttagtaattatctcttctcttattaaggtgagcacggctgtcttgtctgattcgctgaggcagatcccatccagggggctctcacctccacaggacaccgacacaggggccttctctgcagaggactccagcagcccaagcacagtggacccgtcttcttccatcttctggcacgtctccttctctatgcctgcttctgaggatgaaaacgcatgatttatggtagacacaggaacattggaacattcaaagtactccaggtcttcctctggctcacctttcacctcggcaccagctgatttctgaccacatgacgtggatgccagtttctcctcatcagtagcatggccatccctattagaaatgtctgaaatctgggagatcactgccccttcatcccgagaacatgcatccagggcgagagactgagtgtcatgcttcttcaccttacagc

SEQ ID NO: 4772 - DNA, 456 bp, Homo sapien
cgtagcatagaaaaccaccaccacggacctgccagccatcgccatcaaaccagccagctgtttgctgccaaattccttcctctcccaggtccagaccaaatacaagatcagcaccacaccgtgtgttgtcaggagccaaagcaacaggaaacaattcaatgctgttgggttcgattctgagagtagatttttccagacatgtctttcaggtgaccctcaactacctcaggtttgaaggccctaaatgaaactgattaccactcatagggacaaaccgagggggttcggttacatcttggtgataatgcagttgtctcaaacttataacagactctttcacatttcagtttgcagggatagggttgggtttgtttttcttctgtttttaacctttcccctgggtttccattagggtagttccttgaaatgaatttcatttttcactgagtgcctacc

SEQ ID NO: 4773 - DNA, 521 bp, Homo sapien
gagttgtttcataacatgggtcttgcctagaaaataggggcaatactacaatgcatctggccccactgagcaagtctgtcatgaaatggagcacacagcaaattgggtttaatgtaaaaggatcaatacctccacctctcttcacttgaacactaggtcccacagctagcggttgatagatgcatttcatcacctgatagatgcatttcaaggtttttctttgttttgtgtcttttaaaagtcacaggctaagatccctctcacatgtgagaaaaatgcaagctgctatggattgaattgtttctactcaagaattatatgttaatgaacctcagattgtgaccttgtttggaggcagggtcataacagaggtaatcaagttaaaatgaggtcatcagagcgggccctaatcaaatatgatagatgtccacatcagaaggggaaatttggacacagagacacacacacagggagtacaccacatgaagatgaaggcagagattgagtgatacatcgtcaag

SEQ ID NO: 4774 - DNA, 333 bp, Homo sapien
ggctggggaagctcaggaaacttacaatcatggtggaagaggatggaaacatgtccttcttcacatggtggcaggaagaagaagaatgagagaagtgcagaacaaaggggtgggggaagcccttcacaaaagccatcagatcttgtgagaactcattcactatcacgagaacagcatgggggaactgccccgtaattcattcacctcccatgaggtccctctctgaacatgtggggattacaattcagattaaaattcaagatgagatctcggtgaggacacagagccaaaccatatcagatcagaagcaatattttaataaataatggctgc

SEQ ID NO: 4775 - DNA, 208 bp, Homo sapien
tacatgaaaggtatcattttattatagaggtaataaaataaagaggtaataaaggtataatgtcattacagaaaaatcagtggaagagaaaagaccaccaaactgttctttgctataattattatttcatgaagtcttatcagacgtgtatttctctcctctcatgtgcaggcaccttcctgggcaggaagcagacctagcagaactg

SEQ ID NO: 4776 - DNA, 469 bp, Homo sapien
tttttttctaacaacagaattgtggttttatttaacagtccttatcttttagacatacatattgaaatatttacaaatgaaatgatttgctatctgggatttgcttcaaaataaataggggttcaaagatgaatggcatttagataaatcaagattggccatggattgatcatgttaacatgagttcattatgcaattgtccttttacatatacctgacatacgccattaattttttaaaaagcactcactccgatgtctcctatgtataagaacacaggcagctggcagcaactaaatggtatcaactaaatttttataaattccaagagtcgttaattctcagctatctcaaaagtaaaatctctgggaaacttaatattaagacagtaactatctgcacacagtaatctgtacaaagtttaattaccaccaccagtcagtcataggctagtcgagtagctgtatca

SEQ ID NO: 4777 - DNA, 619 bp, Homo sapien
gcggccagcgcactggactgcggcgccgacccgcaccctgggcccgagggctgcagggctcgccagccctctcggagccgagcctctcccggtccaggcggcccctgccctggcctgcccgggtgccgggtctctgctgaagttagaaccgagacccccgcttgctggtgaccccgagtttggatctttgctcctgcgccgcgttctagagcaagcgtttgcctcagcatggagggcggggcgcggcagcacccccacagcactgccttactacgtggccttctcccagctgctgggcctgaccttggtggccatgaccggcgcgtggctcgggctgtaccgaggcggcattgcctgggagagcgacctgcagttcaacgcgcaccccctctgcatggtcataggcctgatcttcctgcagggaaatgccctgctggtttaccgtgtcttcaggaacgaagctaaacgcaccaccaaggtcctgcacgggctgctgcacatctttgcgctcgtcatcgccctggttggcttggtggcggtgttcgactatcacaggaagaaaggctacgctgagctgtacaggctacacagtgggtgcgggatccttgtctttgtcctg

SEQ ID NO: 4778 - DNA, 100 bp, Homo sapien
gggctcacaccgggagcacaacccgattttacacgtaaacgcccccaagccccctcgcttctagcaaaaacggggcaactccttaggattcgaaaatcac

SEQ ID NO: 4779 - DNA, 395 bp, Homo sapien
ttttttttttttttttttttttttttttgagaggctttatttggctttatttagtaaaatgttaaaataaataaatacaaattgatcagctgctctgtatccccccccaccccctcaaaacaaaaaccaaacaaacaaaaacaaaaactttgaagcacaaaactccaaatacaagtctaccaagactgaaatcacaaagggcatggacaagagacagggttggggtctggctggctcttctctgctaggagctggctgacctctggcctgcccgtcccatcccgcctgactgcagctcaccctgggctgaggacccacggacaccggagagaggtgagggtccaaaggctgctggggaaggggtaggggggtggggtcctcagggaggaagggcc

SEQ ID NO: 4780 - DNA, 479 bp, Homo sapien
ttttaaaatcagtcaatgattcttgcctgagtcagttattgtgatggtggtttgaaaaaggtgcttttctaactctatcattccatccacataaatttactagttgcacctttaagttttgaattcgtagcctcatttgaatccagacctttcttggtttggggaagaattggtgggcaacttgcactgacctttatctgattaatataagatctatgtccacatgttacctttgttctatttcagaccaggtggatgcaacccttattcctattacaaattttagctgtgggatatttgctggtattctggcctcactggtaactcaacctgcggatgttatcaaaactcatatgcagctttatccactgaagtttcaatggattggccaagcagtgacacttattttcaaagtaagactacaaaataagtactggttcttgtggtgtttaaggatctctttctagagcagtagttct

SEQ ID NO: 4781 - DNA, 450 bp, Homo sapien
aatttagataaagtctccttacattgcccatgctggtcttcagctcctgggctcaagggatcctcctgcttcagcctcccaaaatgctgggattaccagcatgagccaccgcacccagcctctactatactttttatcttcaataccaccatttgtccatttatattagagcaagcttgttcaacccacagcccgcagctgcatgtggcccaggacagctttgaatgcagcccaaaacaaatttgtaaactttcttaaaacattatgagatttttttggtgacattttttctttagctcatcagctatcattagtgttagtgtattttatgtgtggcccaagacaattcttcttccaatgtggcccagggaagccaaaagactagacacctgtatattagagcaaactgctagaataaaacaatgtgtttgtgtgggttttttttttccc

SEQ ID NO: 4782 - DNA, 443 bp, Homo sapien
gtcgcaggccttggcccttgccagacattagcaccatgagcttcgtggcatacgaggagctgatcaaggagggtgacacggccatcctgtcactgggccatggtgcaatggtggcagtgcgtgtgcagcgtggggcacagacccagacccggcatggtgtcctgcggcactcagttgaccttatcggccgccccttcggctccaaggtgacgtgcggccgaggtggctgggtgtatgtgctgcaccccacgcccgagctctggacgctgaacctgccgcaccgcacgcagatcctctactccacagacatcgccctcatcaccatgatgttggagcttcggcccggctctgtggtctgtgagtctggcaccggcagtggctctgtgtcccacgccatcatccgcaccattgcacccacgggtcacctgcacacggtggagttc

SEQ ID NO: 4783 - DNA, 425 bp, Homo sapien
ttgttttttttttggagcctgacaaagagcgtgggctttattgttcattcatgattagaaaagtgggtgctgggatgtccaggaagacggcgtcggccacgtggctcacgccaaagccactgcggcacacgtcctgggtgcgcacagtcacccagcggcccacacggtgctcctggaactcctcccgggccttctctgcccgctgctggtggaactccaccgtgtgcaggtgacccgtgggtgcaatggtgcggatgatggcgtgggacacagagccactgccggtgccagactcacagaccacagagccgggccgaagcttccaacatcatggtgatgagggcgatgtctgtggagtagaggatctgcgtgcggtgcggcaggttcagcgtccagagctcgggcgtggggtgcagcacatacac

SEQ ID NO: 4784 - DNA, 253 bp, Homo sapien
tgggagcgggcggtgggcgggcttgctgggtgcccccgccgcagcgacgggctggacggcctgtcttctttccactggccccccggcatgggatgggccagggcgccgggtcgggtaccggagtgcaagctcgaaagagagagagagaaaacactgagacagcattagtggagtgaaaggcggacacagatgagcctgcagaccatgcccccaaccctccgctgcccatcccctctaccccctctagagccaa

SEQ ID NO: 4785 - DNA, 229 bp, Homo sapien
ttttttttttttttttggctctagagggggtagaggggatgggcagcggagggttgggggcatggtctgcaggctcatctgtgtccgcctttcactccactaatgctgtctcagtgttttctctctctctctttcgagcttgcactccggtacccgacccggcgccctggcccatcccatgccgggggccagtggaaagaagacaggccgtccagcccgtgcccgcctg

SEQ ID NO: 4786 - DNA, 349 bp, Homo sapien
ggactgatctacttgctccaccacccctcccttaataataacatttactgttatttcctgggcctaagacttatgttccagaactgtcacagctccccatgtcacacccactagcttgtgatctttgtcaaataactgaaatcttttaagcctctagtttcttcctttgtaaaacagagataaaatgttgtggtttttaagtgagataatccaagtaaagcacctaacatggagtagtgaatgaacatcggttgctactaaaagtggacatcctaccgcatccttaatgccactaggcatttccatacaatctggggaccaaaacttcaatcatataaatgtatgaggt

SEQ ID NO: 4787 - DNA, 237 bp, Homo sapien
gcgaagagagggctgaacccgtccgctgcccgggcggtggagccccacggcgaggcgctgcgcgtcggtggagactcgcgttccctccagcccctgggcgagaactttctcgccccccctcctccgtcccccgcagtcggactccctccccagcgtgtcagtcctcccggagtagaaggcgccgcggagacagcccgggcgggggcctaccttccccagggcaggcatcatgtcggc

SEQ ID NO: 4788 - DNA, 101 bp, Homo sapien
accccgacggtcggcggcggccgggaggaacgggctgtcctggaagcagccgtgcgcccgcttcagctggcgcgctgtctcgatcacgaattcgatgcgat

SEQ ID NO: 4789 - DNA, 473 bp, Homo sapien
gtgtgttccagaaccccaccacactgccagatcctaaaggaaaattcgaggttttctcctccccaaacttccattcctgtatcataagaccccagatattcaaaatatttcttactcacagcaaacagcccaccagccattgttggagacctgatgacatcgacgggggattgcatccgtatcctctccctctcaggaactgtgtgccagcgtgaacaccagcctccagtcgaaaccgccgatctggggctccccggagttccccaggtattcgaaggtgttccagtcgatcacatcaatcaccgggcacaccactgccgactcctcttcatggatcctctgcagcagcggctccagcacccttcgtggcactcacagtgacagtccaggaaggtcagaacatcgcccctcgccgcagacgcccccagcagccgggctcgcaccaggccctctctcttgttggcgcggataag

SEQ ID NO: 4790 - DNA, 496 bp, Homo sapien
gcgccgcggtgccggaacgcgctgggcgggagcgaggcggtgcggctgcagctgcagggcgaggagctgcggctgcaggagagagagcgtgcgactgcaccagattaacatctacctcagcgaccgcatctcactgcaccgccgcctgcccgtgcgctggaacccgctgtgcaaagagaagaaatatgattatgataatttgcccaggacatctgttatcatagcattttataatgaagcctggtcaactctccttcggacagtttacagtgtccttgagacatccccggatatcctgctagaagaagtgatccttgtagatgactacagtgatagagagcacctgaaggagcgcttggccaatgagctttcgggactgcccaaggtgcgcctgatccgcgccaacaagagagagggcctggtgcgagcccggcttctgggggcgtctgcggcgaagggcgatgttctgaccttcctggactgtcactgtgagtgc

SEQ ID NO: 4791 - DNA, 352 bp, Homo sapien
atggtaagaatttttattctgtaagaatcttcaaagctcagcatgaagatacacatctttcccatgggaatccaggctagagaaatgcaagaaggcggttccctctagagtctcctttcctgggagatgcagctccagatgggtgggtttctgggcaggaggggagaggagggtggtgtttattcaactgtttatttgggatcatgttatgcgtcttcaaaaagcgatataagagaaaatattggaaagatatttcaaaataagaattaccttgaagtaattcccataattaatgggtaacatttttgtgtatgtattttggctttttattgtaaaaataatgtattttcat

SEQ ID NO: 4792 - DNA, 329 bp, Homo sapien
ttttccaattacaaatttattaacccctaaaataatgttatagtttcagagaaaattagaagcatagaaaaaaaaaagcaagattgtggtgacatatatgtaattaactgaacaagcaggaagaattcaaaagcatttgaattgagatcctagaattcatagctggtctccctgcccaccaagaaggcatgttaatctggattctttagagataatagaaatgtcttaaattcctttgggtgcagtaaaatggccctagcttgcactagccccattgaaaggtagagattaaattgaagataaccaagcacctgtcattcttcccactg

SEQ ID NO: 4793 - DNA, 518 bp, Homo sapien
ctgtataaaagtatattttatttaaaaacagtgatattgacatgtatgttatagcccttacagaaaaataacacgttttatagtccttttatttgaaattcagtgtaaatcactcttaaactataaattcacagttgttggaggtttttttttactttaaatgatgtgaaagcatttgttccattcaaaggcccctatgcctttgaatgacatattctcagtaacttctttgccagtaactagagtatgtgagactgagtaactataatgtgcatatttcaagaattagcttcccgctgcattataacacatttcctaggaaagcctttgtatttttcatagccttttcacatatccctcatttaagaagtcacagtgttgcagttttactttgtttcagaggggaaggccatcttgttggcataagggggacagaagatataatatactctacactccggcctcttccctacaacctaaaagggagaggagttgaggcagatgggctaggactaggc

SEQ ID NO: 4794 - DNA, 251 bp, Homo sapien
tcggcctaggggaagagggggtgctggtttgaaggtcacactgcagttctgctagacttgcttcctgcccaggaaggtgcctgcacatgagaggagagaaatacacgtctgataagacttcatgagataataattatagcaaagaacagtttggtggtcttttctcttccactgatttttctgtaatgacattatacctttattacctctttattttattacctctataataaaatgatacctttcatgta

SEQ ID NO: 4795 - DNA, 427 bp, Homo sapien
gtcagcgaagagtggtgctgatggctggtgctttggctctgttattgtttgtaccaaggttgatacagctactcgactagcctatgactgactggtggtggtaattaaactttgtacagattactgtgtgcagatagttactgtcttaatattaagtttcccagagattttacttttgagatagctgagaattaacgactcttggaatttataaaaatttagttgataccatttagttgctgccagctgcctgtgttcttatacataggagacatcggagtgagtgctttttaaaaaattaatggcgtatgtcaggtatatgtaaaaggacaattgcataatgaactcatgttaacatgatcaatccatggccaatcttgatttatctaaatgccattcatctttgaacccctatttattttgaagc

SEQ ID NO: 4796 - DNA, 551 bp, Homo sapien
gaaatggggactcctttcttcatgctaaccatgaacgacttcatactgcaattaaattccctgcaagtcaaaaactcatcagcactaagtcccaattcatcagtcccaagcatcagaaaacacgaaaattagagaagcatcatgtgtgcagtgaatgtgggaaagccttcatcaagaagtcttggctaactgatcaccaggtaatgcatacaggagagaaaccccacagatgcagtctatgtgagaaagccttctccagaaagttcatgcttactgaacatcagcgaactcatacaggagaaaaaccttatgaatgccctgaatgtggcaaagctttctcaagaaatcacggctcaacatacatcagaaaacacataccggagagaaaccctatatatgcagtgaatgtggaaaaggcttcatccagaaaggaaatctcattgtacaccagcgaattcatacaggtgagaaacttatatatgcaatgaatgtggaaaggcttcattcagaagacgtgtctcatagcacatcagagatttcacacggaaaga

SEQ ID NO: 4797 - DNA, 534 bp, Homo sapien
tgggagtagtcatgcttgctggtctggctgttccggacaaggtagctacactccttgcagagtcgcagcaggttctcggcgtctcctctgctgatggctccgtgataccatatttgcttctccagggggacggcaggatccaccctttctcctaggatcccgcagaactcagggctcccatgtttgataggcttaaagcccctccagggcactgaagctggcgccgcggtcccgcgaaggtgagggggatgactgccgcttctcgttgccattaaactgtgctgccagggctggaatgttaacccggttccttccccagggtgggcctacacatatggcgggcctgtcgtcatccttgggcaacttgctctcccgcagtctgggggctgactgtgctctccgagtccgagtcaacactttggccttcaggttcgtaaggggtgtcatataactggatacctttatgctgggaccggacactttctggccctgaaattctgtcatgatcctctgtgcctcatagggctccatgta

SEQ ID NO: 4798 - DNA, 483 bp, Homo sapien
cacgccctgccctcacccctcaccaccatctgtgcactgatgagtctcagtttgccaaggcttcgttcctggcatggagaatttgttcctggctgctgtgtttccagggggtgctgggggaagggttccgtggagcgagacaaggtgtcctcgggagcagggttccaccgggaagcgtttgggagccctgtatcacacggggcaggcgggtttctcttccggggtctctgctcttatgcatcaggacgaccccgggacgctgtggggccccacactgcacccacagggctctatgcgacaggggcccaggaacagcctgaggcaccacccagcaagcccgccttatcacccattccagctcacccagaaccttcaccagcaaacctcctgctgaggtcctggcaggaggcaccgtcttgttaccgtttccttttcgtttgctgagggtcacagacccaacagggaaatcagtatctgtcttcc

SEQ ID NO: 4799 - DNA, 469 bp, Homo sapien
agccagtgttgagatccattcatttgatggacattttctaagtacctgtgagccaggtgctgccatttcaaagtctcttcttaccacgctcctcagtggctagacattttcacgtggccagaaagtcccgactcttgctgggcgtccctggacaagttgccttcctcctctgagcttggcgctccccatctgtatagtggagacccttggctcccctctgtacggaagggccgatgcgaacgtgcagttaaaaaaggctcacatgctcctagcctcgtgcagtcaggaggggagaccaggacagttggaaattatgattgcaaatggctttgcattttagatcattcgtgtgtgtggatcagagaaacgcacaagttccctggcacaaaggaagccctcagtagacacgtcttagggcaggcttgagagatcagatggcgtgaaaggcttgtgatctgttcgtctcagg

SEQ ID NO: 4800 - DNA, 533 bp, Homo sapien
tcctgcagggcggccttggccacagtcctgaaagccctgaatcaccactttccagaatctggacctatagtgcgggatcccaaggctacaaagcaggatctgaggacaattttggaggcacaggaaactttttaccagcaggtgaagcagctgtcagaggctcctgtggatttggcctcgaagctgcaggaacttgaacaagagtatggggaaccctttctggctgccatggaaaagctgctttttgagtacttgtgtcagctggagaaagcactgcctacaccgcagcacagcagcttcaggatgtgctgagttggatgcagcctggagtctctatcacctcttctcttgcctggagacaatatggtgtggacatggggtggctgcttccagagtgctctgttactgactcagtgaacctggctgagccatggaacagaatcctcctcagcaacaaagactagcactccacaatcccctgccaaaagccaagcctggcacacatcttcctcagggagcatcttcaaggacgc

SEQ ID NO: 4801 - DNA, 488 bp, Homo sapien
ttcggcagaggggggctgcagggcgcgtgaccttggggtgggttggggagcggccgtcgcacgcggacggcccagcctccaggaactggtgcgggcggcgggtttcctccggctcggcccacttggggctccccagctagtacggtgcatttattctttccgtcgcccacgcagcacttcattcattcggttcttacgtctggaaccgccactggcctctgtggcagaagctcgcgttccagcgtggggcacaggtcctagatgcgccgacccaggcgcggcgtttgttggctgcggtgtctggttgagtgcgggccgctgcagagccgcagtgctgtggggaacagtgaagagcagcgaaaagcttatgttttcttttccagtttgagtctagtggtgaagtcttgggtctcttacggacttctgggtgaccaaagacactcatgaggaccatgatacttccactgaggatacagacgagtccacca

SEQ ID NO: 4802 - DNA, 474 bp, Homo sapien
gttcggaacgagggcctgtcgcctggacaacaaggaaagcgagtcctggggggctctgctgagcggagagcggctggacacctggatctgctccctcctgggttccctcatggtggggctcagtggggtcttcccgttgcttgtcattcccctagagatggggaccatgctgcgctcagaagctggggcctggcgcctgaagcagctgctcagcttcgccctggggggactcttgggcaatgtgtttctgcatctgctgcccgaagcctgggcctacacgtgcagcgccagccttggtggtgaggggcagagctgcagcagcagcaacagctggggctgtgggtcattgctggcatcctgaccttcctggcgttggagaagatgttcctggacagcaaggaggaggggaccagccaggcccccaacaaagaccccactgctgctgccgccgcactcaatggaggccactgtctg

SEQ ID NO: 4803 - DNA, 183 bp, Homo sapien
ctccagttctagtgactcagagggctctggcttcctgtgcaacctgaggtggcactgaagagggtccccagccccaccccagccccaaaggaggctgttcgagagggacgtcctccggagccaaccccagccaaacggaagaggcgctctagcagttccagttccagctcctcctcttcatct

SEQ ID NO: 4804 - DNA, 154 bp, Homo sapien
tggacacactgttcctgctggccgggccagacacggtgctcacgcctgacttcctgaaccgctgccgcatgcatgccatctccggctggcaggccttctttcccatgcatttccaagccttccacccagctgtggccccaccacaagggcctgg

SEQ ID NO: 4805 - DNA, 275 bp, Homo sapien
gcgtggggcatgccgagggagcaggatacaggccgagctgagccccgcccatgaccgtcgcccactgccaggtgtggacgaggccatcactgccatctgggagacccggctaaaggcccaaccctggctcttcgacgcccccaagttccgcctgcactcagccaccctggcgcctattggtctcgggggccacagctgctcctgcgcctgggccttacttcctaccgagacttcctgggcaccaactggtccagctcagctgcctggctgcgaca

SEQ ID NO: 4806 - DNA, 428 bp, Homo sapien
atgagataagcctgcaacctcttgaccttcagctcctatgcaggcttctcttgagcccagagacaaggcagcttggtctagtggagatagcactgtgcttggagttcaggggacctaggacaaatcccagccagttagttattcactgtgctcctgtttcctcagctgaaaaaggaagttggttatgccaccttcttggccttaatggcattaaatgaaatttataggaagaaggtttttgctcagtacctggcatgcaacagacattggataaatgttagttggatccagatatacacagaaagatatctgcttcctgccaggctggataactgttgaatggacacttgtccatagtctagaaagccagtgcttctaatccttaagccagatctttgactaccttttcagttgcttctttaacactc

SEQ ID NO: 4807 - DNA, 407 bp, Homo sapien
gcatgcacggctgcctctccagccacctctgatacttctctcttggggccatcagagcctcccttgggctgtcacctcccagctcacacacactcttcagtggtttcctctcttcattctcttatagggcgtggtccttcttatttatctaaagggctgaatttaggagactttttacccaggggcaaaaggctcttagggtgatgagatggatggtggcccaggtgcattttccagggcctgggttctccagatcccgtggcttctgttgagtggaggcaactttgctctgtgtgaacctcgcccctgtccctctgccgggcacccctggcaggaagcaggactcccatcctcaccctgacttagactgtcctctgagtcacctcctctccaagacaggagtgggc

SEQ ID NO: 4808 - DNA, 376 bp, Homo sapien
tttttttttttcaggccttgaaattttatttacatgtctctaacacacacacatacacttcctattttttaatacaaaaagtacatagtagccccccgtatctgcgggtggtatgtttcaagacccccagtggttgcctgaaaccaagatggtaccaaactctaaaaaaaaaagaacaactttaacaatataccgtaataaaagttatgtgaatgtgatctttcaaattttttttgttttttttgagacagacttttgctctgtcgcccaggctggagtgcagtagcgtgatctcgacctactgcaacctccaccttccaggctcaagctaacctcccaccccagctgggactacaggcacatgccaccacatttg

SEQ ID NO: 4809 - DNA, 423 bp, Homo sapien
aattgtttaagccaaacatttaacaacatacaagagaccttacaaaaagaaggaggtaagtcctaatgctggagaattggttaatcaggtgactggcaaagaggaggatgaggcctaggaggaagtctccagaagcattggaaaccagacagtgtcagagcctctgacctgcaggcgggaggccggtggtcagtctgcacagtaccccttgggaagccggagttccggaagcaaagcgcttggagcccgccctgcacgccgagtccccagactctgacaggtccccacagccagctgagaaaggtctgttttcaaagcatgcgggcagcggtttctaaaggaatcccagcagctcccacggcatgtcgggcagagcgtggcaggtcgagtgaagtcccaaacatcccagaaagagagggaagg

SEQ ID NO: 4810 - DNA, 333 bp, Homo sapien
tagtagagatggggtttcatcatgttggccaggcttcccctcactatcctaccccacccgctccttgaagggcccagattctaccacacagcagcagttacaaaaaccttccccaggctggacgtggtggctcacgcctgtaatcccagcactttgggaggccaaggtgggtggatcacttgaggtcaggagttcgagaccagcctggccaacatgatgaaaccccctctctactacaaatacaaaaaattagccgggcgtggtagcgggcgcctgtagtcccagctactcgggaggctgaggcaggagaatggcgtgaacccgggaggcgga

SEQ ID NO: 4811 - DNA, 440 bp, Homo sapien
tggacatgttttccagtttttattaggatatttggcatggtacagataacaacttgtcccttaccaccaaacacataatagctggtcaaaatgattattttcaaaggaaactatttaaaataaagccactagtacatataaattaggaaagaaaagtcaagctggagccatcttgatattctaatgagcaggcctatctagttctacatctttttgtttgagatggagtttcattctgtcgcctaggctggagtgcagcggcacgatgcttggctcaccgcaacaagagcgaaactccatctcaaaacaaaaacaaaaacaaaaccaatcttgtcattacctaggaataataagcatatttacagtcacctattttcagggatctttcgggacctgttaaaacactgactggcttgacattacatttctgccacagctgt

SEQ ID NO: 4812 - DNA, 240 bp, Homo sapien
gggcttcccttttttaaataaaaaacaactcggggcaaccaggggtttcaaaggtgcccaagggaccggtaatttttaaaaacccaagattttgggggacgggggggtaccccggggggtttgaatttggagtataaagggccttaaaaacggccaccttttaaaaccccagggaaaaccccccccccggcctttggaaaatgggggcccaatcccatatcccccttggaatcaaaattc

SEQ ID NO: 4813 - DNA, 435 bp, Homo sapien
taagtgatgaaagactgaccagtagaaggtggtgaagatgaagaatagtggaactggcaagtaagaactgttcagacaagcattcattgtgtaatatccataaacaaaactataatccaaaggacttccattttagtatgttctgatgatgtactctagactgtcacctcctctggcttacagaataatccagaactttccatagacattaatcttgcttaacaaaggctgtttacctattatacacacacatttttaagggaaatatatgtatatagctttatctatacacacacatatacatacgtgtatatatagatttatacaaatgtataaataaacataatacttttcaatctttccattgacaaggcaagttcacattcagcaaagtgccaccacatcccatatacacatctctgtacagatatacac

SEQ ID NO: 4814 - DNA, 145 bp, Homo sapien
agatgtccgaaagctcaccagggggctcgttaagcatctggatgaattgctaatggtgaagaatgatttggtgtaaaagctgagggttctaatggagtaattgctggaagagggagcgcagcagcgcagggttttgagaaataag

SEQ ID NO: 4815 - DNA, 155 bp, Homo sapien
ggggggaaaaaattgggtgttgtttggggagtgatggtggggaaagggaagagagtggataaagttgaaggtaaataggttagaaaagataagggaaaaggtaggaggggagaggagagtgagaatgtgtagattggggtgtgggtgtagggtta

SEQ ID NO: 4816 - DNA, 121 bp, Homo sapien
ccgtgtgtgtgccaactcctgggtttctccagggtgcctcgaaacttgggttatgtgtttgtaaaggccctctctgtgtttttcccctcatgagaaaccccccgcttgtgtttttgccctt

SEQ ID NO: 4817 - DNA, 385 bp, Homo sapien
cctcgtcgaaaacgtcttgagggagattttgacaagtcacccattccaggtgccacaggcaggggatgtttagtaatccaggatttctctgagaactgggatatgtggcctttttttttttctttttatcttttatctggaaactgggtttgggtcaaccccaggagtatttgcagaaggcccagcacagtggggggtattggctgcagggcagggaaggcattgcgagctagataaccgtgtgagcttggactgagcgttggtggttcttcccaaaggaaaggaatttctcccggcctgccaggtctctgggccttcagcgcgggtcctggtgctgcggccacaccaccctggggtgctcattgacagagctgccataatgaac

SEQ ID NO: 4818 - DNA, 355 bp, Homo sapien
cgaagagcaggttctggactggatcagctaccaagtggagaagaacaagtacgacgcaagcgccattgacttctcacgatgtgacatggatggcgccaccctctgcaattgtgcccttgaggagctgcgtctggtctttgggcctctgggggaccaactccatgcccagctgcgagacctcacttccagctcttctgatgagctcagttggatcattgagctgctggagaaggatggcatggccttccaggaggccctagacccagggccctttgaccagggcagcccctttgcccaggagctgctggacgacggtcagcaagccagcccctaccaccccggcagctgtggcgca

SEQ ID NO: 4819 - DNA, 332 bp, Homo sapien
ggcaccatttacaacttcagtggctgcatcacaacgtcttcgtgcagcggctcctgaggccacagcgcgtatttgatctgcagcagaactgggcagcgtcaatgtgagcacgggctgtgcaccgccctgcaaagcccagaccccgggcctgggggctagaggactgcaggccacgccggaaggcctcccgcgcagccgtcagcccgcccggcatcctgcctgcatgctgcccccacacctcaggaccacccgagactcctaccagtttgggggttccctgtccagtcacctggagtttgtgggcatcctggcccgacataggaactgatgga

SEQ ID NO: 4820 - DNA, 252 bp, Homo sapien
gctcagtccagcctgactcacttgcctcaggtcagagaggtcaccactgacgacgccgggccctcaagccgatcctaatccagcttggttctctcagcctcagccagaccatccgttcttgcctctgtcccaccacgtgcaggtgtaagcttccgccgcacttcttgtctgaatctgccaagaagaaactgcatctttcagctaaattcttttcactgatcagggtagagtttagcggttttttttttaaga

SEQ ID NO: 4821 - DNA, 463 bp, Homo sapien
atcattgcctgaatttagctttgtgactgcaagagcaagaccagttcctgtctggagacgactgttacaataatatcatcctattattttatgttcactctttatcaatttgaacagatgtttacatgtactataattagcattttatctctacagttctctaagagtacatctgagtccaaagtgtatctgaatgtgtgctctgaccttattcttaaatgttttctccccatactttatagccatttattttttaaacaccttaagaaggaacgaaaaagttctcttggatgacgtatattcaagtctgagccaaattgaggattgtgtctaggaaatctgtaaagccatactactgtgttcattagcatgagcaattttatgaaaatgaattaaaaagttaaacatgagtttggttttaatttcggggggatcttaagatatatttctgggagtaggatag

SEQ ID NO: 4822 - DNA, 316 bp, Homo sapien
ccacccagtcccttgccaggtcctggacccctgctccagtacctgagcctgcccttcttccgagagatgaatgtggatggggactggcccccgcttgaggagcccagccctgctgcacccccagattacatggatacccggcgctgtcccacctcatctttccttcgttatccagaaacccctcctgtatcccccagggaatcacttcctggggctgtggtaggggctggggcactgcagagcccccttacacagccctggtgactggacactgagggagcggctgctgccaggccttctccctgctgccctcgag

SEQ ID NO: 4823 - DNA, 524 bp, Homo sapien
gcaggagcctgactccacagcatgttcgagctcattcctctccagcttctctgcagttgggagctgtttctcctgggacactgacccccactggagtagtctctggcccagcagctacacccacagctcagcatcttcgacagtcttcttttgagatacctgatgatgtacctctgccagcaggttgggagatggcaaagacatcttctggtcagagatacttcttaaatcacatcgatcagacaacaacatggcaggaccccaggaaggccatgctgtcccagatgaacgtcacagcccccaccagtccaccagtgcagcagaatatgatgaactcggcttcaggtcctcttcctgatggatgggaacaagccatgactcaggatggagaaatttactatataaaccataagaacaagaccacctcttggctagacccaaggcttgaccctcgttttgccatgaaccagagaatcagtcagagtgctccagtgaaacagccaccacccctggcttcccagagc

SEQ ID NO: 4824 - DNA, 387 bp, Homo sapien
  misc_feature (1)...(387): n = A,T,C or G
aattcggcacgcaggggaggttttgcttccgtggcttcctagcccaaggggtgaggctgttagctgcagtgagcccgttttctcttcactcggcctgtcaaagcggcgcaggggccganattagcttcctgccccgcgacagtgcacttctggcttgcggggcgaaccgaggggctcggagaccttcagccacgcgaggcccgccagtgagcagtcagaaatcacctcggctttggcccacgcctgctccccggtgacagtcgtccgccctatccgcgtctagctggcgacaaccgcaggggttcacttttggccgtcagtgccacccggagcagaaattaggggaacttgtgggattggatcacggtgaagggtcggggcaggaat

SEQ ID NO: 4825 - DNA, 502 bp, Homo sapien
tttttttctgcccaatttcattattggggtgtgaatccttgttgatgtttactgtctatttattttgaagatactaatcctatatttttgtaagtcaatgtcctccggccaggactacaagaaaccaactttaattaagcaagttggttttattactcagtcatgagttatggagaatttcagggcatctcagcacgaggatgttaggaagatcctatacagattttgggcttttatttggggattttggaaagggttgaaggaagcaggctttgctccagactgaatgctgcaggaagatactcagtacagtgagtatattttatatatcttttgtatagggaggacaggtgagagagatactaaagctgtaattggtcaagaagtagcagctatagtactggtataaagatagatacatcgacctgtctctattctggaacagaacaaacccttgcgtgtggagtcctaattagggaaaaggagtcaggctggctggacg

SEQ ID NO: 4826 - DNA, 462 bp, Homo sapien
ttcggcacgcaggggaaaatcatttttcagctcaattacagagctcttgatatcttgaatgtcttttctgtttggcctggctcttaatttgcttttgttttgcccagtatagactcggaagtaacagttatagctagtggtcttgcatgattgcatgagatgtttaatcacaaattaaacttgttctgagtccattcaaatgtgtttttttaaatgtagattgaaatctttgtatttgaagcatacatgttgaaaatacaccttatcagtttttaagtacagggttttatagtgtaatatatacagagtaagtgtttgtttttgtttttcaactgaggtcaaaatggattctgaatgattttgcatatgggatgaggaaatgcttggatccttaaggagtttacgaaatctgctgttttatcaaagtgaaaaaaaattgcttattactcttcattttacact

SEQ ID NO: 4827 - DNA, 142 bp, Homo sapien
tggaggccgcttacgtaaagcgcagtggacattcaacagcccctactacacaggccactatccagccagcattgactgcacatggaacattgaggtgcacaacaaccagcatgtgaaggtgcgcttcaaattcttctacctg

SEQ ID NO: 4828 - DNA, 420 bp, Homo sapien
acaacctggagatcgttctgcacagatgggagaacaacagctgtgttgagaagaaggtccttggagagaagactgagaatccaaagaagttcaagatcaactatacggtggcgaacgaggccacgctgctcgatactgactacgacaatttcctgtttctctgcctacaggacaccaccacccccatccagagcatgatgtgccagtacctggccagagtcctggtggaggacgatgagatcatgcagggattcatcagggctttcaggcccctgcccaggcacctatggtacttgctggacttgaaacagatggaagagccgtgccgtttctagctcacctccgcctccaggaagaccagactcccacccttccacacctccagagcagtgggacttcctcctgccctttcaaagaata

SEQ ID NO: 4829 - DNA, 205 bp, Homo sapien
cacagacctagtgatataggtggctctgtgacgagaagtatttgtaaaatgcctgtgaatgcatctatttaagacgtgtatgccccaaattgtatacatgagggtgcagatattgggaacatatggttccttgcaatgttgaacaaccccagaggaagggtttgactggggctgggtccacaagtacctcctgaggctcatgggc

SEQ ID NO: 4830 - DNA, 283 bp, Homo sapien
gttaccaatctgaagtgggagccgccgcggttttttttttttttttttagaaaataaactcttgtattgtagcacatttcatcacagcctgactaggaccagtgctcgactttctggtggcagggccagagctcacggacaccactgacagtatggggggtgttctgcttggcaccatgtctggctttttggccagaagtcctttgcagagctgaatatccccttgccagcccgccagctctggctgggaggacttgctcttgggtctgcagcctgcatcagg

SEQ ID NO: 4831 - DNA, 268 bp, Homo sapien
tactgttagtttttaccttggatacaatgcaatgcaggatttttttcctactatgtccatgaagccaaatcctcagtgtgatgacagaaattgcaggaagcagcaggaggaatataagaaaaaggtagcagcactgcctaaacaagaggttatacaagaagaggaagagataatccatgaagataatgaatggggtattgagctggtatctgaggtttcagaagaggaactgaaaaatttttcaggtccagttccagacttacctgaa

SEQ ID NO: 4832 - DNA, 443 bp, Homo sapien
attaccagaggaacaaaaggaatattgaggatgcgctcaaccaactcttccgaaacagcagcatcaagagttatttttctgactgtcaagtttcaacattcaggtctgtccccaacaggcaccacaccggggtggactccctgtgtaacttctcgccactggctcggagagtagacagagttgccatctatgaggaatttctgcggatgaccggaatggtaccagctgcagaactttacccctgggacaaggagcaagtgtcctttgtggatgggtaattctcccaccagaattgagcccttaactggggaatcctgaccttccctcctgggctgtcatcctcatcggcttggcaggactcctgggactcatcacatgcctgatctgcggtgtcctggtgaccacccgccggcggaagaaggaaggagaatacaacgtccagc

SEQ ID NO: 4833 - DNA, 364 bp, Homo sapien
tgtgaatttcccaaatcaacaatcatctcctaatgtttcccagttcctgtcacctgttggcgaggttgatttctaaaacttaaatgagtctacctgttttgcatttaatttcagtgttccgatttctttttttttttttttttttttgagacggagtctcactctgtcacccaggctggagttgcagtgagccaagttcgtgccactccactccagcctgggtgacagagcaagactctgtctcgaaaaagaaaaaaaaccatgaaggatgagtactagagtcagtaatagaagtagttcagcattatttaactacaacacaatgctgcaaatatttcacagtaattatcaaaatttaatgggc

SEQ ID NO: 4834 - DNA, 325 bp, Homo sapien
gcaggcaccccagggcggggcagcaagcaggcaggaggggcctccccgggtggccttctagggaggatgtaccctggctgcccagcacagccctgcttggccgtgtccctgccacaagcaggcaggacacaggagggatggcactgcccacggagccctgggccatggcaccttctgcagagtgagccgggagcagagagcctcttttccccactctgtgaggccgggcattttcctcagccctgccctaacccccaccattcctgtgatgggcccaggtgctagacgggccttgtccttgccgaggaaacccatgcaggctggg

SEQ ID NO: 4835 - DNA, 292 bp, Homo sapien
gcttcagtctttccccatttccggtctttcctgcattgcaccaacagatctgtcctcctataaaaccacagcctttatgactcttccctggcaaaggttctacgatggctcccaattcctcattaggttcattctcaatttctcaaaagtagaaattcaagcctctctctaacccagccaaccttagttcccttctccctactccaaactctccagtacaggaaggcctgtctggcttcttgttcttcctgacttgcaccattttcatttcaatccctagaccttggctcat

SEQ ID NO: 4836 - DNA, 116 bp, Homo sapien
agtagtcaccgaaagttatgtttctttgcttacttcatttttttctctaatctagactggaacaaaagtataaacattatttatttcaggtagcatttttttcgtgtagttttttt

SEQ ID NO: 4837 - DNA, 427 bp, Homo sapien
cgccatcgagggtggcgcaacacccgccagcccctgcctaggattgtcactattcagagaggcggctcagctcacaactgtgggcagctcaaggtgggccacgtgattctggaagtgaatgggctgacgcttcggggcaaggagcaccgggaggccgcccgcattatcgccgaggccttcaagactaaggaccgtgactacattgactttctggtcactgagttcaatgtgatgctctagaggccaaggcctgagggctcccaccactgcccagcccctggtcccagtccctttccaccgttggcttcatcaagctccttgcggggttggggctgcatggccagggtggcaggaagacatcccccctccatcccagcccactggaccagaactgggagaggaagagagcaggacaaggcagacagaa

SEQ ID NO: 4838 - DNA, 370 bp, Homo sapien
  misc_feature (1)...(370): n = A,T,C or G
aattcggcatgaggtgcagcccgcctgctgggcaggccggcgcgcgacacctggagtcctacgacatcatcgccaaccagcctgtggtcatcgacaacgtgaggcccggcagccagggggagggcgggcgaccgcccagggggcgacggcgncaggcgcagagcgagagacccccgcccgcctcgggcgtcctccgctcactgcgtggccgtcgcccccgccggccgctggtatcgtccgggggcagcgcctacttggtcttgtaaggcggccatggggcgagcccctcgccggcgtcgcagagcctcttccccgacccctccccgagtcgggcggggaagttcaggagagcttgagtgacagccgggcg

SEQ ID NO: 4839 - DNA, 242 bp, Homo sapien
gacctgtaaacccaacagctcacctccgcctccaggaagaccagactcccaaccttccacacctccagagcagtgggacttcctcctgccctttcaaagaataaccacagctcagaagacgatgacgtggtcatctgtgtcgccatccccttcctgctgcacacctgcaccacggccatggggaggctgctccctgggggcagagtctctggcagaggttattaataaacccttggagcatg

SEQ ID NO: 4840 - DNA, 523 bp, Homo sapien
  misc_feature (1)...(523): n = A,T,C or G
gagaatgccacctcggaaagatgctgtacagcaagatggtttcaattctctgaacaccgcacatgccactgagaaccacgggacgggcaaccatactgcccagtgacccactacttcccagggactctcacatctcgggccccaaatggacagatcacccgaggagctggaggggtcggccaagctgactgtaaatttcacagtctctctgaagaaaccattgtgcttctgagaccctagcccccttcctggatggaggcttgagggccctgggacatgtgctatctgataagattgggtcatcgctgccaaggtggagagcagtgagcaaggggcttggggcaatttccagtggagggcatccacacctccattttatgcttgtggttcacacatttaagtttacaaatcagatttcttttccccttcagtagaattagattttgtntttcaatcatgatttccaatgcaatcctaagagctaatgtggacttttctttttccatgaatgtctttaaggatg

SEQ ID NO: 4841 - DNA, 371 bp, Homo sapien
taatgctgtgatacttaaatgttaaatcagcattttcatgtgatctgaagtatttcaattacatatgagcattcattgttttttgcaaaaactcagtattaggtaatagttacatactactacaataacattcctctgctgtacaaattaaaccatttaaaagaaatgagcattctaagaattatatacaaaagaaaccttgaagcagtgttgaaatgaaatgcaaggtgtcattgctagctctactgttttaaagtatctttgaaaagtaaaattaacaaatacccttcaacatatccaggtttacaagtctcaagaaaatcaaatgtcaaaaaattctagaaagctgtgaaaagcatatatacattttc

SEQ ID NO: 4842 - DNA, 523 bp, Homo sapien
  misc_feature (1)...(523): n = A,T,C or G
aaaccatagcaaatcccatttcttaagctcctgtagtgtgtcagggactttacctacttcctcttacttacttttcataggtaagaaaacagacagagggtaagggcttcgctgcagtctcacagcaaggaaatggcacagctgggactagaactcaggcctccggatctggtagcctcttttgtctcctagtagctgtgtcttagtagaaaaaatgacttgaagttcagtgggaaagacgagaatgttattcggcagttgctatagccaagcaccctgccaagtgctgtatatgtataagctcctcaaatccttcccaacaattcaacacacaggaatagttacttttttggtaggtgaggaagcaggctgagagagattaagtaacatgcccaaggtcacacagccagtanaacggtgggctggaattagaataataatgccaaacacttgttagccggtgagcagaagtattcagctaaatggtttttgtgtgtgtgtgtgtgtgtgtgtgtgtgtgtgt

SEQ ID NO: 4843 - DNA, 484 bp, Homo sapien
gttttatgtttgttgttcctgcagcacctaatgtaaagtgccttgcaagggtaggtgctcatgacgtgtagaatgagtgagtaacttcctgcctcatcaggatgaaatgtggttcacttcccctgtgttcaacactacaaagctactcctgccagaagagggcagagttctttcttgggtttgaactggcttttttgggttgaaccagatcatcccacatccttagcactacttaaccttcttttcctgaagattacatatcagtgtcctgcgtttttatctaatattagagctgaggttcctaggaaaattttgaagtggggaagattatggagaaaatgaaatggaaatttggggagggtggtttgtcagtataaggccctgtggggtaatcatattttagttattacttgttaaaagggtaacagaacctctgtttctttaccaagtcgctggttggccatttctccaattgatgaactac

SEQ ID NO: 4844 - DNA, 439 bp, Homo sapien
acagtgacctactgttgccggggagaggaagaaaatatgatgatgagaattgcccagaaatgtaatatcaaccttctccctttaccagatcatattccttctggtctgatggaagaatgtgtggattgggatgtggaagttaaagctgctgtgcatacatatggtatagcaagtgtacctaaccaacccttaaaaaagcaaattcagaaaatagagagaacccttcaaattcagaaagctcatggtgaccacatggcttcctctagaaataattctgtatctggactatcagtcaaatcaaaaaataataccaaacaaaagcttcctgtgaaaagccactcagaatgtggaatcatagaaaaagcaacgtcaccaaaagaactgggctgtgacaggcaatccgaagagcaaatgaagaattctgttcagactcccgttg

SEQ ID NO: 4845 - DNA, 366 bp, Homo sapien
cccatgacctgtatccctaagcgaatcgcccacagtccatccttacagcttttgccttccctctagagtttaaagaaacccattatccccaaagagtttgggggcaaagtccccaccgtcatccgccagcgctatctcaacctgttcatcgaggagtgtctcaagttctgtacctccaaccaggaggccatagagaaggcactgaacgaggagaaggtggcctatgaccgcagccccagcaagaacatctacctgaatgtggccgtgaacaccctcaagaagctcaggggcctggccccagcgctgtgcccggcctcagcaaaaccagtggccgcaggttgtgtcccacgaggtggtgttgggggg

SEQ ID NO: 4846 - DNA, 467 bp, Homo sapien
taaaaatagttgctgagtaaattttacttgtaatctacaattggctttttaaaaataacctgttgatatataattgtcagtccaaatgaatatgtgaaacagctggaattgtacaaattttggttgtatttaaagctcagtttcctttttgttttattgtatgcgttgggtttgcagcatgaacttgcacagataatgcacgttttctggttaagtaaacatgatgcacactattctgtaacagaaagccctattgtgccttacctgtgtgcttttgtgggcaccttgtttatgaagaataaaaaatgatttgttatctgaagagaataaattttaaattctcagtttatgtctcagatgctaacgtgtgaaaatataaatatatataatatataaagtaaccagtcttcctgtattttatgtgcatcatagtgatttatctgagcttagtgacccccatcttgtaa

SEQ ID NO: 4847 - DNA, 216 bp, Homo sapien
ataaaagcagatattttacgaagcttgagtactgaacagctattccggttattatcagattcagatttgaatgtgctgatgaagacattgggacttcttagaaatctcctctccactcgtcctcatatagataaaataatgagtactcatggaaagcaaattatgcaagccgtcactcttattctagaaggggaacataccattgaggtcaaagag

SEQ ID NO: 4848 - DNA, 503 bp, Homo sapien
cccaggctggcctcacatgctcagtgaatatttgactgaagggtccctcatagcttgggagtattcacaggcctaaatgttagttatactattagctaagcctggtcctttgttacgaaatttaaaaatgaaattgcaacattcttgtggaaattcaaagacatcattttctttcaacaaattcacacattcgttcatgcttcttctataccttttacccctaaagtcatccactcctgagttcctcctgctggtttcccaaactgcgcaatgactgccccatcataggcagtggtccgtggagtcggcctcactttcgcctttccccgcatctacttgtttccaaggccagtggtacttaactgggtcaagttgcctgtggaccttcaggaacagaattgccatgttcctcactgcctgcaggaaaggctccattccaagcccagtgaagatgtgtgcctatccagccgcccaccaaggatgtcatctgtagaatgggtgga

SEQ ID NO: 4849 - DNA, 331 bp, Homo sapien
gagagcttgttccgaagcaagcaccctgcagccctagcgatccagccctcaactggaccctaggtcacggcaatcaaccccctgctgtggttcccgaaccccaaggccagatgggtcccgaaggggtcgcgcagaggccagggcgctttttcggcgtctacctgctctaatgcctgaacccccggtaccgggcaagcgtctaagtggggttcactgtcaacactgctcgtcgggtccagcagcacaatgggggccgcaaaaaaggcggggcatggcggaccagcgggcgagggccatgggagatggtgctcgtcgtgcacggcttcccgtc

SEQ ID NO: 4850 - DNA, 415 bp, Homo sapien
  misc_feature (1)...(415): n = A,T,C or G
tgcctgtagaggctctgcagaaaggctgcccgcacacctggagctgagggcagctttctgcagacctcgacaggcagctgaaggggaatgctattacggttgatgccggtgctcacctccaggacctggagctgggggcagcagctgcccagcaaatcgcccaggatggctgtcgtctgggagctgtaggtcagccacaacttgcgcattcgggaccctgcctcctccaagaagctcaccacagctgtggactccaccatggagtgctgtaggtccaggctatggagctggcagcaggctttggctagcatgaccagagcgtcacangtcacaccgtggcagccggagagcttgaggaaagtgagccgaggacagcactcacctaccagcttcaacacggggtgtacctgagact

SEQ ID NO: 4851 - DNA, 133 bp, Homo sapien
cagaagcttcagctgccaatgaggcgcagagaagaggaagcactcaaccgaagccactgcccaccagaagaaacgactagcccgcctggagacaaaacccgaggagctgcccgacgcaggcggcatggaacca

SEQ ID NO: 4852 - DNA, 435 bp, Homo sapien
aagatgacagcattcgtatccaggtctgtctggcttctaaaagagcgcgctttatacttttttttttttaaacggagtctcgctctgttgtccaggctggagtgcagtggcttgatcttggcttactgcaacctccgcttcccaggttcaagcgattctcctgcttcagcctcccgagtagctgggattacaggggcgcgacaccacacccagctaatttttgtattttcaatagagacagggattcaccatgttggccaggatggtctcgatctcttgacttcatgatccaccttcctcggcctccctaagtgctaggattacaggtgtgagccaccgcgcccggccgcacattacagttttactccatttttgagaaggtctgaggtcaggaatgactcattgtaaggaagcaagctgttgcatatttaggac

SEQ ID NO: 4853 - DNA, 111 bp, Homo sapien
gcactatgtttgggagcctcatcattggttaatgcaggaacgcaatctctgaagcaacagctctgctcatacgcaactctgggctttgcgtgctctgaggacatggggctc

SEQ ID NO: 4854 - DNA, 468 bp, Homo sapien
attcggaacgaggccggcctgggagccttttggtatctgcgctggcgacacgaccgaggccagcagccctgtccccaagaggccgggctcattagccctctgagtcctttgaaccctctgggcccaccgactcccctgcctcctttcccattcccacccccaggcctccccacctatgagcaggcgctggcagcctctggggtacacgacgcacctccacccccctacaccagcctcaggaggcctcactgaagagctgctttcgagacccggctctccgaaccgtgcccctgattcataccggattccggaagccgtagctcatagacgccgaagctggacttggagtggggaatggtgggagtaggggtcatccggcccgaggctgccctggcacacgcgtttccgccgcgtatggatatacacatgttttcggcaacgtgttcccgtgtcctggcccctcacggg

SEQ ID NO: 4855 - DNA, 503 bp, Homo sapien
ggcccagccatgtcagcctggtagagacagcacctgaagacagctcaccccgtgggacactggcaagcagtggagatggatttgaagaaggtctgactgtggccacagtagtggagtcagccctttgtgctctgagaaattgtatagccttcatgcccccagcggaacagaacccggcccccctggcccagccagagcctctggtgtgggtcagcaagtgggttgactactccaataagttcggctttgggtatcaactgtccagccgccgtgtggctgtgctcttcaacgatggcacacatatggccctgtcggccaacagaaagactgtgcactacaatcccaccagcacaaagcacttctccttctccgtgggtgctgtgccccgggccctgcagcctcagctgggtatcctgcggtacttcgcctcctacatggagcagcacctcatgaagggtggagatctgcccagtgtggaagaggtagaggtacctgctccgccc

SEQ ID NO: 4856 - DNA, 549 bp, Homo sapien
gagcgatgtgctgcagccctgatggccagccggcgtaagagtgaagccaagcagatgcccagagctgcacctgccactcgggtaacacgccggagcacacaggagagcctgacagcaggcggaacagaccttaagagggagctgcaccccccagccacctcccatgaggctcctggcaccaagcggtcaccttctgctccagcagccacctcctctgcctcttcttctacatcctcatacaaacgggcaccagctagctcagccccacagcctaagcccctaaagcgtttcaagcgagctgcagggaagaagggtgctcgcaccgtacagggcactggtgcagagtctgaagacctgtatgacttcgtttttattgtggctggcgagaaggaggatggcgaagagatggagattggggaagtggcttgtggagctttggatggatcagatcccagctgcatggggcttcaagcactgggagcttcacgaagattccgcagcatcttcaccttggaggctattacaggttcactcttcacagaggcagcc

SEQ ID NO: 4857 - DNA, 437 bp, Homo sapien
gtgaagatgaatagtcgaaaagttttggcagttaatcatgtgtttgaaattattctggaatacctggaaacaagagactggcaagaagcattttttactatcttgccccaacggaaaggagctgttcccacagacaaagcctgtgaaagtgcttctcatgacaatcagtctgtcaggatggaggaaggtggatcggacagtgattccagtgaggaggaatatagcagaaatgaactagattcaccacatgaagaaaagcaggataaggaaaatcacactgaatctacagtgaactctctgccacactaatgttacctggtttccttttagtttaaggaaaaattaggagaaagtgaggtgctatatagaatattgaaattggaagaacattttattttctcttatttctgttgtgattttaaaaacttttttttgga

SEQ ID NO: 4858 - DNA, 398 bp, Homo sapien
gagaaacactatttatttatttatttatttattttgagacagtcttgctcttattgcccaggctagagtgcagtatttacaaattacacacacataaaatctggatttctagcttcttatgacaaaggatctggcaacaccgggcccacattcagccccacaggccacaggtgacttgacttgcctccagttcacccctgcccctgccagctttgtctcctgacaccgaaacagcccgtcagagctgtcactcgggttcatgcgtgttacctgtctggccctggaaaggccctggagttggtggcgccactccaggtcaacaggcatgtttagaaggagcctgccaggggctgcatggccgaggagccacctctccctgcagaggaaagggatcctgc

SEQ ID NO: 4859 - DNA, 459 bp, Homo sapien
tgcggccgcgcccgcacccgcaccggcacccacgcccacgcccgaggaagggcccgacgcgggctggggagaccgcattcccttggaaatcctggtgcagattttcgggttgttggtggcggcggacggccccatgcccttcctgggcagggctgcgcgcgtgtgccgccgctggcaggaggccgcttcccaacccgcgctctggcacaccgtgaccctgtcgtccccgctggtcggccggcctgccaagggcggaggtcaaggcggagaagaagctccttgcttccctggagtggcttatgcccaatcggttttcacagctccagaggctgaccctcatccactggaagtctcaggtacaccccgtgttgaagctggtaggtgagtgctgtcctcggctcactttcctcaagctctccggctgccacggtgtgactgctgacgctctggtcatgctag

SEQ ID NO: 4860 - DNA, 454 bp, Homo sapien
acacattcctcgatctttaaaagagtattatgtggcaaaagtactccccgctcctcccatccccaaaatgaaatttcaaaatccactctttccaggggtcttagcagccatcagcagcacttcaaagggggtagacaagagacaggtataaatcataagcaatgctcatctttcaaaatattttgaaaacaatactgttaaaacaaagacacctgaattccaagataattaatcccctcaaatgtgagtaaatggactgccatttgggagctgttattgaagttttgccacttacattctaagccattttctaaccccaaaatactgatatccttctgggaaatttatatgagaaaattctttcaaacaccatttaaaagagcccactagtttgacagtcttagctgagaaaacttcctagaagagtaagaaattgaaataagagaaacgctat

SEQ ID NO: 4861 - DNA, 298 bp, Homo sapien
tttgttttaaaatcacaaataatttattcttccgttagagttgatacagttttaaatagcaacaaagtacacagtggtggaaaattggcacagaacctacaagcatttcaatcacaataaggctgtccatgatttatctgttcaaacttgatgtccattttctactgatcaagttgaaagaaaaaacctattctggccaggcacggtggctcacgcctgtaatcccagcccaattaaacatattctaagatgactcaaggttcaaagatgaacattaacaaaaaagtagtaaatactc

SEQ ID NO: 4862 - DNA, 302 bp, Homo sapien
gatgaggatagttatgtatttacatgcatattatcacatgtgtatttgatttatagaaacaaacattagtatgcatattcttagagaagaggaggcagatgcacctataaactttattcatcttaagagccaacaaatttaaaaaaaatatggaaaaaaaaaccacagctgctaagagctgttccattttaaatgcaggtaaagacaaaattgatctttcaatagcaacagccttataaaataatttagtctgcaaaattcaattttataattgaagtaacttatcaccattgtaagaatta

SEQ ID NO: 4863 - DNA, 443 bp, Homo sapien
tgcggcacgcgcggcaggtgtcgcggcagacgttcctcagccacggcgacgacttccgcttccagaccagccacttccaccgtgaccagctctaccagcagcagtaccagtgggacccgcagctcaacgccggcgcgcccgcaagcctgttcgagaagcttcgcgggggccgcgcgggtttcgcggacccggatgacttcaccctgggcgccgggccccgcttcctggagctcggacccgacgggcaccagcggctggactacgtgccgtccagcgcgtcccggaggtgcgccacggctcggaccccgccttcgcgcccggaccccgcggcctggagcccagcggacgcccgcgccccaacctgacccagcgcttcccatgccaggccgcggcgaggcgggcccagaccccgctcccgaggcggagaaagacgcaggggctgg

SEQ ID NO: 4864 - DNA, 407 bp, Homo sapien
ttttttaatccagtcatttattcacttcactcttctaacaaatctgtattaaacgctgcacatgccagcattgcactaggtactggaaacacaagataagctcactaagtagacaactgggagagaggcagtttaaagagaaaagaatctaaacacagactgatgcaattaaagaagacaagtagaaaactgcagcaaaacagaacaacagaacacagtggattgggggatgcaggtaagatgggagaagaggacagggaggaggtgggggtgggggaaggagtctaaagggtgctgggggacacacagacaagactgcaggaaggaaagagagcaaagaggttgctgaaatgacccacaaaaggtgaaggccagaacaaagaaaatttaagatttgagaaaaggtc

SEQ ID NO: 4865 - DNA, 370 bp, Homo sapien
aggcaaacagctttgttgacgagcacacggtttgcggcgttgcaaaggtgggaaagagattctgctgtcagccgatcacatcatcattgctactggagggcggccgagataccccacgcacatcgaaggtgccttggaatatggaatcacaagtgatgacatcttctggctgaaggaatcccctggaaaaacgttggtggtcggggccagctatgtggccctggtagtgtgctggcttcctcaccgggattgggctggacaccaccatcatgatgcgcacatccccctccgcggcttcgaccagcaaatgtcctccatggtcatagagcacatggcatcgcatggtacccggttcctgaggggctgtgcc

SEQ ID NO: 4866 - DNA, 446 bp, Homo sapien
caaggctcagctgcctggacagagaggatggaaatactccctgtgtgaaaaaagaaaaggaaaagaccccagatcaggaggcaggaaatgcagtttggcagagttggttgatgccacttacttctggacaagaagactggaggcttggcacccttgatggaaattgcagcagaaccatctctctattctgttgattcccgcaccaggctggcaaatagcttttgtcttttctgcttccttgttgcaaaagggtacaaaagcctcccacccaccccacccccaatcgccctttgtgccattatctttcaaggtgacttagcttttgaagtccctgccatctgctctgcaggcctgtactttgcaggatgtgagagcaccgcgttcccagaatgccttctgttctacccgacgtggctactgatagctctgcctgtgaggggaaaaga

SEQ ID NO: 4867 - DNA, 359 bp, Homo sapien
ctttggtttaaagtagcaggtttaggttttgctacattctcaaaagacagcaggagtatttgacacatctgtgatggagtatacaacaatgcattttaagagcaaatgcaacaaaacaaatctggactatggataaataatttgagagctgccacccacaaatataaatacagtactcatgctgactgaaataataagacatctacaaatttataaacaaaaagtgattgtcattatcctgcttatgtactagattcaggcaagcattatagactttttggttgcggtggcttttgcatttatattatcaatgccttgcaggaacgttgcattgataggcccattttatttttttattt

SEQ ID NO: 4868 - DNA, 321 bp, Homo sapien
ctctcctgtccttctccactgccattggcaggacgtgcatcacggacctccagctgactgtgggcggggccaggccagcggacccttattggcgtggggcagtctgtgactcagtgggccgcatcatcgcccctctcctctcgggggttgcccaggaggtcagcccttgcggcccccccagcctgggtgctgtgttagccttagtggccattttcataatgtctctaaacaagcgacactctagtggtgatgggaatagtaaattaaaaagtgagtagatggaaaaaaaaaaaaaaaaaaaaaaaaaaaaagaaagaaaaa

SEQ ID NO: 4869 - DNA, 520 bp, Homo sapien
tctcccactgcccctcagggtcctgcactaatggagcagcagagccatcttcaaggctcctggtgtctttttaggctttagctgcctccctgctctgaaacctcagtagctccctaaggcctgcaggaaccatcctggagtgtttagcctggcttatggggtcatggggtcctctgcgccctgaccccaggcttcctttccatcccctactcccttctgttcactcttgggctctctcctgtactccaagccaagtgccccagggcccagcacaggccaggactgggcacagctgaccccgtagagattagggaggaacagtgcctctctttaccctgctgtgagcaccactggcctttccttcagatagcttgttcacctcccaacacatccctcacccacaggggagatcgtggtgaaatggtttgaggctgtccagactggcctgcgcatgtgcatcctgggtgcattctttggaccgatccgacttggcgctcagagcctgcaagtgctggtctcg

SEQ ID NO: 4870 - DNA, 466 bp, Homo sapien
cgagggtactagagtgagatttggaatattagtccacatatcacaaactgcttgcctacatgtatagattttttttttcacccaccttcctaaccaggaatttgtttccttaaatttgttgttgttgttgttgttgtttgttgttatttttttgagaagagtcttgccctgtcgccaaggtgggaatgcattgacgtgatctcagttcactgtaacctctacctccccggtttaatcgattctcctccttcctaaccaggaatttgtttccttaaatttgttgttgttgttgttgttgtttgttgttatttttttgagaagagtcttgccctgtcgccaaggtgggaatgcattgacgtgatctcagttcactgtaacctctacctccccggtttaatcgattctcctccttcagcctcctgaatagctgggattacaggcaccacatttttagtggagatggggt

SEQ ID NO: 4871 - DNA, 602 bp, Homo sapien
tagggagtagtcatgcttgctggtctggctgttccggacaaggtagctacactccttgcagagtcgcagcaggttctcggcgtctcctctgctgatggctccgtgataccatatttgcttctccagggggacggcaggatccaccctttctcctaggatcccgcagaactcagggctcccatgtttgataggcttaaagccccctccagggcacagaagctggcgccgccggtcccgcgaaggtgagggggatgactgccgcttctcgttgccattaaactgtgctgccagggctgggatggtgacccggttccactcccaaggctggtcgtactcatcggcgggcctgtcgtcatcctggggcagcttgctctcccgcagtcgggggctgactgtgctctccgagtccgagtcaacactttggccttcaggttcgtaaggggtgtcatataactggatacctttatgctgggaccggacactttcctgcctctgaaattctgtcatgatcctctgtgcctcatagggctccatgtagccagcactctcgcctttcctgctttagtcttgagatcattcttggcatcaaagggatctgagta

SEQ ID NO: 4872 - DNA, 610 bp, Homo sapien
caaacttctccttcagtgcgtgacccacctggcggaagggcggcacggctcgccagcacgtctttacctcacaggagcctgacaccccgtggcacttgcattccacccgcatgtgtgtcaggatggccttcctgccggcctcattgttgtggaggttcatgagggctctgctggacgaggcccccttgcttctctcccgcacatccacaaacgactgtgagaaggccacaccgtaggcgatgttgtcagagcatcctgaccactggaagccctgtggcgtgaccccatgcactgtcctgtcacagccgcacttctccagctccccactgctgcacgcccgcgtcactgcaaaggccacacctgccgaagagatggcgtacacgaaggccgcctcccgagtcccttgcgtcaccaccttgccgaagacgggcaaggagtcgagtgtggagcagttccagcgccggttccggaactggtactggcactcctcaatggccagatgccgcgcgcggcgcaccgagtccatgacttccaggttccgcttgcacatctgcacctgcgtctggatcagggccttgagtttctcgcaagtctcctcctctgagatggt

SEQ ID NO: 4873 - DNA, 455 bp, Homo sapien
cactgaggtcaggagtttgagaccagcctgacatggtgaaaccccatctctacgaaaaatacaaaaattagctgggcatagtggcgggtacctataatcccagctactcgggaggctgaggcacgagaatcacttgaagccgggaggtgggggttgcagtgagccgagatcacaccactgcactccagcctgggcaacaagagcaaaactccgtctcaaaaaagatgaaaataaaataaaatatatatttacaggcctacaacttttgcctcagactgttccccttttctaagggtattcaagttttcaccttttaagcttcatatcctcagtgcttgtagaatgatgagcttagaggtaccaggtcattgcagttgtttgcttaaagacttattgaaatggttactggcgtaaatacttggccaactcaactttattgcccctgatcttttcca

SEQ ID NO: 4874 - DNA, 462 bp, Homo sapien
caatatggaaatttcagaaggacagaggtgaggagggaggaagaagaaagtatactcctccagaatttcagtgatctgttgtggcagtccagtggaaggaaggtcttttgaggtcacttagaagcatctttttgggacatccttttgggatctctgtaggctaggcatctcatatcttgagactcacccccagcctccaagcctctctccatttctctaacctatgcattttagagcgagaggaccgcctcactagtgtcaccatcctgccttttctaaaacatgcaggctcacacattctactcctgcttaatgtctgtgttaaacgttttctaaccatttttgttttatttttctgaaaaagttaacccctcccaactcctcacacattggctcttcctcttgagccacaaagttttgattcttgcgatgtatgtgccttattttatgttaatcttgtca

SEQ ID NO: 4875 - DNA, 424 bp, Homo sapien
caaaaaggaaagtaccaagaggcactttcctacctggtatatgcctaccagagcaatgctgccctgctgatgaaggggccccgccggggtgtcaaagaatccgtgattactttataccgaagaaaatgccttctggagctgaatgccaaagcagcttctctttttgaaacaaatgatgatcactccgtaactgagggcattaatgtgatgaatgaactgatcatcccctgcattcaccttatcattaataatgacatttccaaggatgatctggatgccattgaggtcatgagaaaccattggtgctcttaccttgggcaagatattgcagaaaatctgcagctgtgcctaggggagtttctacccagacttctagatccttctgcagaaatcatcgtcttgaaagagcctccaactattcgac

SEQ ID NO: 4876 - DNA, 409 bp, Homo sapien
gacaaccaaatatacattgctggtcacccagctgtttgtcaactactctaccagccagaagatctcccgccctggggactcggatgactcccggagcgtgaacagtgtgcttctctttaccatcctgaaccccatttattcgatcaccacggatgttctttacactatctgtaatccttgtggccctgtccagagaattgtcattttcaggaagaatggagttcaggcgatggtggaatttgactcagttcaaagtgcccagcgcgcaaggcctctctcaatggggctgatatctattctggctgttgcactctgaagatcgaatacgcaaagcctacacgcttgaatgtgttcaagaatgatcaggatacttgggactacacaaaccccagatctcagtggacgaggt

SEQ ID NO: 4877 - DNA, 439 bp, Homo sapien
agcattcgtatccaggtctgtctggcttctaaaagagcgcgctttatacttttttttttttaaacggagtctcgctctgttgtccaggctggagtgcagtggcttgatcttggcttactgcaacctccgcttcccaggttcaagcgattctcctgcttcagcctcccgagtagctgggattacaggggcgcgacaccacacccagctaatttttgtattttcaatagagacagggattcaccatgttggccaggatggtctcgatctcttgacttcatgatccaccttcctcggcctccctaagtgctaggattacaggtgtgagccaccgcgcccggccgcacattacagttttactccatttttgagaaggtctgaggtcaggaatgactcattgtaaggaagcaagctgttgcatatttaggacctgtcagccaag

SEQ ID NO: 4878 - DNA, 420 bp, Homo sapien
gtcagatcattaaatcagatttaaagaactccaacaggactgggaatctagcctcctcagacctgcgatgatgttccttgctcttgagatctgttcacctatcccagagaactaagacattcaactaagaaaaacagactccacaactttggcaatctgggagggggagcccagtgggtgggcctgaaatactgacatgaaacacgtcataaacaacagtacagctttggtcccaccaacatggccctgtcaggctgggtaccagagggggactggtgccgtgaatctctggaaacaagaagtgaagcagcccggccgacctgtgccaggaagcactggtggacacaccccgtcaaacagccagggctttctcgctctgctgcacaacgcccagacactcagggttagaccaaaggctct

SEQ ID NO: 4879 - DNA, 490 bp, Homo sapien
cacaaaggagctgaactcaatggcagctgcatgcggccgggcactgggaacagccagggtgggggtggtggcagccagcctcctggtctgaactcagagcagcagccaccacaaccccctcctccaccaccgaccctggccccatcttcacccaccaatcctggaggtggagtgcctgccaagaagcccaaaggtgggcccaatgcttctagctcctcagccaccatcagcaagcagatcttcccctgggatgaaagagtctcgacagaactccaagcagaagaacagctgtgccactgcaggagagagctgcgaggacaagagcgcgccaggcccagcatccaagcgggtaccacggcatacacgagcgcgcacgtggtggaattggaaaaggaattccacttcaaccgctacttgtgccggccgcgcgcgtgggggatggccaacgctgctgattctccggaacgccagatcaagatctggttgcaga

SEQ ID NO: 4880 - DNA, 106 bp, Homo sapien
gccctcagcagtcaagtacctcatggcttcagaccccaacctgcaggtgctgagagcggcctacatccagcacaagtgctacagcgatgcagccgccaagaagcag

SEQ ID NO: 4881 - DNA, 481 bp, Homo sapien
tgctgctcccgctgcccgccagcacctatgtctcagctaaatgtagccgcatccgggacacagtttgtgccacatgtgccgagaattcctacaacgagcactggaactacctgaccatctgccagctgtgccgcccctgtgacccagtgatgggcctcaaggagattgccccctgcacaagcaaacggaagacccagtgccgctgccagccgggaatgttctgtgctgcctgggccctcgagtgtacacactgcgagctacattctgactgcccgcctggcactaacgccgagctcaaagatgaagttgggaagggtaacaaccgctgcgtccactgcaaggcagggcactttccagaagtacctcctcccccagcgcccgctgccagcaccacaccaggtgtgagaaccaaggtctggtggaggcagatccaggcactgcacagtccaacacaacctgcaaaaatccattagagccactg

SEQ ID NO: 4882 - DNA, 378 bp, Homo sapien
gcagatcatgtatttcccggagacgtgggaccttgctggcatgtctccttcacaatcaggcgtgggaatatctggcttaggactgtttctctctaagacaccattgttttcccttattttaaaagtgatttttttaaggacagaacttcttccaaaagagagggatggctttcccagaagacactcctggccatctgtggatttgtctgtgcacctattggctcttctagctgactcttctggttgggcttagagtctgcctgtttctgctagctccgtgtttagtccacttgggtcatcagctctgccaagctgagcctggccaagctaggtggacagacccttgcagtgatgtccgtttgtccagattctgccagt

SEQ ID NO: 4883 - DNA, 286 bp, Homo sapien
ctgactccgaggacctagaccccaatcctgaagatctggacccggtttctgaagacccagagcctgatcctgaagacctcaacactgtcccggaagacgtggaccccagctatgaagatctggagcccgtctcggaggatctggaccccgacgccgaagctccgggctcggaaccccaagatcccgaccccatgtcttcgagtttcgacctcgatccagatgtgattggccccgtacccctgattctcgatcctaacagcgacaccctcagccccggcgatccaaa

SEQ ID NO: 4884 - DNA, 374 bp, Homo sapien
ggaggtaggagtttccctagtgttgcccaggctgatctcagactcctgagctcgagtcatcctcttgccttggcttcccagcatggtcggattacaggtgtgagccaccatgtctgacctgatgtttgttgaatgaataagtgactccatgcccttgagagttggtcagatggtgggaggggctgcacgaatcagtgacaccctctaagtcccctcttcctgcctagcccagccccctaccccacccctctaggcctgaaggggctgatccattttacagattaggatggtggtgggcatttctaggtccttatgaggttcctggctccttttgaggtgctggaggtacaaggcccagtgtaacccagtgcctg

SEQ ID NO: 4885 - DNA, 231 bp, Homo sapien
ggagacgcagagacagaggagaggccggcagccacccagtctcgggggagcacttagactcccgccccggctcccaccctgtccggggggctcctgaagccctcagccccaaccccgggctccccatggaagccagctgtgccccaggaggagcaggaggaggtgcatcgcgctgaatgcccacggtgcgcccggggcccctgagcccatcccgctcctagccgctgccct

SEQ ID NO: 4886 - DNA, 461 bp, Homo sapien
actcccgatattcccaggccctcattggcccagttctacgaggggctaccggccccacttttaagctgcactcagatgatgtggcagggatccaggctctctatggcaagaagagtccagtgataagggatgaggaagaagaagagacagagctgcccactgtgcccccagtgcccacagaacccagtcccatgccagacccttgcagtagtgaactggatgccatgatgctggggccccgtgggaagacctatgctttcaagggggactatgtgtggactgtatcagattcaggaccgggccccttgttccgagtgtctgccctttgggaggggctccccggaaacctggatgctgctgtctactcgcctcgaacacaatggattcacttctttaagggagacaaggtgtggcgctacattaatttcaagatgtctcctgggttccccaagaagctgaat

SEQ ID NO: 4887 - DNA, 467 bp, Homo sapien
caagtctcaaaagggatctgctcctcctagtcacgagcaggtggcaccatgaggtcattgctcctcgtcctgacgattcctgggagatgctcttgtcttcctccttctccagtttcttgggtctgccacttgggttgcttcatggagttgtggtggttttccgggtcttggcagcatccgtgtcttcgcttccctttggtcgggccctaggtctcttaggtgttggcacttcgttgggctccttctgactccctaccagcgctgtcccgggactcaccggaggctgcttgcgcggcctgctccggctccgcttctcagtgccgtgcttttcctgcttggaggtcaagggctggctggacttcgagctctactcactcatcttcccttctctaaggagcaggtggaagagtgatggatgggatgcgcgagctcggccgccggcttcggtgcgctctccgggttgccgg

SEQ ID NO: 4888 - DNA, 405 bp, Homo sapien
aactttctagaaatgttttatttaatatatgaaaataaaaactttcaaggaaaggaggaggaaggaatcaatgggaaacatctttttactaatttaaaaggaaatccataaaattaggatctagaaaaggaagaggatctcagatacgtaagagtagtgtaaaatatgctttaaacttataattccttaaagtttcttctaggaaattaatagttataaaatttgttcacccatacgttcatttattcaatagatatttattaatgtttatgtttttagcactgtcctatattgaaattaagaaaatggaagaaatacatgagtaatcaagaaggaaaaaaaaagctgccggagaattaactcaggagttctggtccatctggcatcacagactctgcaactttc

SEQ ID NO: 4889 - DNA, 409 bp, Homo sapien
gatttctgttctttttattattttctttatctgcttacattgtgtttaatttgctcttctctttccagtttctgaaggtgaaaactcaggtcactgatttgagacctttcttttttgttataatataggatcttagtgcttaaatttgcctccaagcatacattagctgcaactccctgattctgatatatcgtgttttcattttcagctcaatgaactttccaatttctcttttgatttcttatttgaataatatactttggctctatgtctccacccaaatctcaccttgaattgcaatccccataatctccaggtgtcaagggtgggactgggtggaggtaatttaattatgggggtggttcccccatgcaatctgatggtctgatttttttttttttttttttgc

SEQ ID NO: 4890 - DNA, 417 bp, Homo sapien
ataaggtaaagcgaatgtttaatgaactcagaataacaacataccataaaagtttttcttataaaaactgaatgtggtatgagacatttgttggccaaaaaaaattctctttgctaacattaccggcggtgaccaaacaatgtgtttgggcagaaacaaaatcaatatcaaatattaatatttaaagctgaaggaatcttatagcaatcaagaacttttggaatttagacgcaataaaattgaggctaagagaagtgaactgatcatttagctagaaagtcaagaaattcttcataagctcaaataaaaacaaatgttatcatttatcaccctctaacaatacttgacagcattactgaaaacaacaactcaaataagatactctccatttctatacacacggaatatatacatatc

SEQ ID NO: 4891 - DNA, 222 bp, Homo sapien
ctggtttaaaaatgatctggttccctccagggcgagcaattgcacaaatgtccactgagtctggtccagggatcaaggaagggaaggtcttaaaagataaaagggggggttgctaccccagtctcagggccccaactctccgactccccaagcctactgcattttagaaaacactcctcatcctcttggaatcggtggtttaaaaaatgtccatgcacggga

SEQ ID NO: 4892 - DNA, 369 bp, Homo sapien
tttttttttttttttttttttttttggctctagagggggtagaggggctggctccccagggaaggaggagctgcgccccagggtgtggtggtgttcagcctgggcgcagaccgggccccggagagtgagggtttgttgtacggtgcaaaggcctggtgggtcccaaacacagaagcggtcctgtgtggggggtgctgggggacggggtatgcagggaggttggtcatggagtggcggtacggcctgacacggggccagttctgctgccactgaggcactggtggcaagagcaggcgacgctgtggtggcccggcggacgattgatggtggtcaccgggtaaggcggccctgcttggcgccgcacgctgc

SEQ ID NO: 4893 - DNA, 380 bp, Homo sapien
cgaatgaattgatcagtctttattgatgattattacatttttcatttgcctggaacttaccacaccctaaagtattctggctctccatattttctgttcataagaatatgcagagcagttgattatcttctgggtcctttagccctttagctctcctgagggtagcagaggactccctggttttcctttggatggaagtttcctgactttctacttctggaaccagggccagtgtccttgacatgggcttcctccaggatgaaatcggacaactgcccaatgacagcaagtaaagaaagtatactcgcctataatcccagcactttgggaggccaaggcgggtggatcacgaggtcagctggataacatactggctaacg

SEQ ID NO: 4894 - DNA, 360 bp, Homo sapien
aaatttaaaaatattttatttctattgaaagaataagtattgtgaaactgccatattatctaaggtgatctctagactcaataaactccctgtcaaaattccagtttttcacagtaatgaaaattacaatcctaaaatgtacacgaaaccacaatagattttgaatagccaaagcaatcttgaggaaaaagaacaaagcagaaggacattatactttataatttcaaactatatatatatacatcgagagagagtcttgctctgccgcccaggctaaagtacagtggcatgatctcagctcagtgcaacctctggctcctgggttcaagcaattctcctgcctcagccacccgagcagct

SEQ ID NO: 4895 - DNA, 405 bp, Homo sapien
gaaggtgacaagtaggatttatgtgctgaaaccttaataagcaattgctcaagggccagggaaggcgaggatgattgcctagttgatcctcgatgaggacacctggctgatgccgtctcagtctcttctctggttttttccagcatgtcccacggtggtgggcagacacgcagagatgcaaggtgctggggatggcaagatgggcacagcctagtgtgagtgccgccccacaggccttcacggttgctctcgaggtgcactggggagcggccaacccgcctggcagccagcaggatgtgggagccctatggcccacaggacggtgtcaaaggtgcccgtgtcctccttgccggtggttctgtcctcccaggtgacctgcagctggccatcagggagcctcctgac

SEQ ID NO: 4896 - DNA, 263 bp, Homo sapien
tggcagctggtggcacagagattagagccagttactgggatttctctttggcaagtccatcctgggtttgcatctgggaagatctttcacaaaaggagatgtggaaggcacaaccatcccctcgtgcccaattcagatgcagctcgatgcgggcagagcctggcaccttggctatgcagctgcaggggaaaggggtggcggccacctgcaagggttgggccaatgctgcacaggattcgggctcaagacaccaacaccctgct

SEQ ID NO: 4897 - DNA, 476 bp, Homo sapien
ctgctcgagacaagtgcgccgcctcagccgcggaggagagcggggccggcaagaaggacaaggtgaccatagccgatgactactcagatccctttgatgccaagaatgatctcaagagcaaagcaggaaagggggagagtgctggctacatggagccctatgaggcacagaggatcatgacagaatttcagaggcaggaaagtgtccggtcccagcataaaggtatccagttatatgacaccccttacgaacctgaaggccaaagtgttgactcggactcggagagcacagtcagcccccgactgcgggagagcaagctgccccaggatgacgacaggcccgccgatgagtacgaccagccttgggagtggaaccgggtcaccatcccagccctggcagcacagtttaatggcaacgagaagcggcagtcatccccctcaccttcgcgggaccggcgtcgcagcttcggtgcccct

SEQ ID NO: 4898 - DNA, 434 bp, Homo sapien
tttctgaggactgacccaatgctgccctctagtgataaatcttaaaagggctgccatgagctattgaaatgtgatgactggtgactcttggagggctgtgtaataaggcgtcatccatgtcccatcagcttaaaatgaggggattctgaatctcttccacttcagataaatatgcatggctttctcttccgagaaggataataattattggggtacctagtatttggtgttgatttttgttccactgatgtaaatttcaaaagtatagaactaaacttcaaaaataagctgactcggggactggcctatatttggggaaagcttgtctactgattgcctggattttttaccttctagaaccaccaaagccagctcccagacaagtttccctgccagttaccaaatctactgacaatgcatttgagaaccctttc

SEQ ID NO: 4899 - DNA, 524 bp, Homo sapien
gctgtagatatcagcccagtggaaagcacaggtgtttcccactttgcaacctatgtggcagccatgagggccatcaacatcgcagatgagctgccccgctcccgtgcccgaaaactggcggatgaacagctcagttctgtcatccaggacatggccgtgcggagacctgctcactaacctggtagaggtagacgggcgcttcgtgtggagggtgaacttggatgccctgacccagcacctagacaagatcttggctttcccacagaggcaggagtcctacctcgggccaacactctttctccttggtggaaactcccagttcgtgcatcccagccaccaccctgagattatgcggctcttccctcgggcccagatgcagacggtgccgaacgctggccactggatccacgctgaccgcccacaggacttcatagctgccatccgaggcttcctggtctaagagttgctggcaagaagatggccgggcgtggtggctcatgcctgtaattccagcactttgggag

SEQ ID NO: 4900 - DNA, 111 bp, Homo sapien
agtggggaataaaaacaagttgcttagaaataattatagatctaaagtcaacaaaaaaccttttctaatgtaaaaatacatacttttttcagagggagggggaacaactta

SEQ ID NO: 4901 - DNA, 487 bp, Homo sapien
gttaccaagctgaggtgggaggattgcttgagccatatgctctaatatattttaaaatacatattttaaatatattttgagtggtaaaatgtagcagataatgttacataaaagaagccatggtaatgacatgacattactggttttgagttgtttgtgtagtagttagctattaatactcaggtataatgatttgctatttaaactacacaaatgctcaaagtccagcgataccctgcacccaaattcagtggctagattaccttcttaggaaagcacaacacttcaatggagtgacactggcatgagtccactagagggtgtgtatacatggcctgagttcaaattgttcctgctgtgagtactgcttttcagcttcaagttattcttatcggccacagtactgtttattccacttagtaacagttctgtttacagagcactttaacataaattctgatttttaacatgaaaaaaaaaaaaaaaa

SEQ ID NO: 4902 - DNA, 492 bp, Homo sapien
gagtgcaccggacaccatgaagagatactccatgtacctgacacccaaaggtggggtccggacatcataccagccctcgtctcctggccgcttcaccaaggagaccacacagaagaatttcaacaatctctatggcaccaaaggtaactacacctcccgggtctgggagtactcctccagcattcagaactctgacaatgacctgcccgtcgtccaaggcagctcctccttctccctgaaaggctatccctccctcatgcggagcaaagccccaaggcccagccccagacttggaaatctggcaagcagactatgctgtctcactaccggccattctacgtcaacaaaggcaacgggattgggtccaacgaagccccatgagctcctggcggaaggaacgaggcgccacacccctgctcttcctcctgaccctgctgctcttgccttctaagctactgtgcttgtctgggtgggagggagcctggtcctgca

SEQ ID NO: 4903 - DNA, 447 bp, Homo sapien
tacttgtccaatggaaagtgtattggctcccttaggggagagaacccctatgttctaggttcttcacatttggtaacttgaaagagtttacttaatatcccaggggcttagctccccccttgtaaaatgtagaaacaggctgactgttttcttatgagatacagcaagagaatgagaaatgcggtcagtataaccatcttcaaggaaccagtgctagacatggaaacctgtcttgatgctcaccaggagttgccccattcactatccatacctgcttctgaagggtggcccagatattatagtacaagttagtttgtacactgtttctatatttctcagaatgagggagtccttgaattcagcctttagttcctaacagtagtatcctcatagttaatttagaaggttcacaaagagataatatccccacttgatagttggtgaatc

SEQ ID NO: 4904 - DNA, 442 bp, Homo sapien
tagatattccaatatctaaatattgttggaaatactctcctgaagtgttcattgaactctaagagagacagcttgtgtatcagtggcagggtttaaggttcattttttattcccatattaatcctttaatatttagacaaatttccttctgagtttaaggataaaatgggatgggttctgcctgggcctggcatcatggggacatcaaagggcaatgttgcaaaaaaaaaaaaaaaaaaatcagaccatcagattgcatggggggaaccacccccataattaaattacctccacccagtcccacccttgacacctggagattatggggattgcaattcaaggtgagatttgggtggagacatagagccaaagtatattattcaaataagaaatcaaaagagaaattggaaagttcattgagctgaaaatgaaaacacgatat

SEQ ID NO: 4905 - DNA, 461 bp, Homo sapien
cgcgaacttcctcccggcgcggcccgtgccccgccggccgcctgcgaacacctcggcctccgcctcccctcaggttgatgccggcccaggatggatcagtactgtgaactacccagaagaaattgtctgctgcccttttccaatccagtgaatttagatgcccctgaagacaaggacagccctttcggatgatccagattccagtaccagtacattaggaaacatgctagaattacctggaacttcatcatcatctacttcacaggaattgccatttagactggccttgtcatgttgcccaggctggcgtcgggactcctgggctcattcgatcctcctgcatcagctagaactacagtagtttcagattttgaagtgtgtatgtgtatgtgtgatatgtatatattccgtgtgtatagaaatggagagtatcttatttgagttgttgttttcagtaatgc

SEQ ID NO: 4906 - DNA, 422 bp, Homo sapien
atgcctgatgggattatcttcagcttgttgagcttctaagtttctttcccttcattctaccctgcaagccaagttctgtaagagaaatgcctgagttctagctcaggttttcttactctgaatttagatctccagacccttcctggccacaattcaaattaaggcaacaaacatataccttccatgaagcacacacagacttttgaaagcaaggacaatgactgcttgaattgaggccttgaggaatgaagctttgaaggaaaagaatactttgtttccagcccccttcccacactcttcatgtgttaaccactgccttcctggaccttggagccacggtgactgtattacatgttgttatagaaaactgattttagagttctgatcgttcaagagaatgattaaatatacatttcctacac

SEQ ID NO: 4907 - DNA, 454 bp, Homo sapien
aatcagcctatcaccccttgaaacatcttccctgtgtccctgggggcccctgatgctttctccttgggtgatagtaacatgcagagacttacacaaagctccctctttggacataccccacgtcgacctgtcacaggcctggctgtagcgagcacatccctatgacgcagaatgcttcttgggaattatcttactcctctggagggttagtccatcaatgttttgcttcttgtcccaatactactgtgaccctctctgatcgcacagaaatcactgcctatcacatatatcctgttaagcactgaagaccctattgaaattagagttctacagatgccaaaagctgtactttccatcaggcagatggcaagcttactgccttgatgcacatctggagccactggagctccttcctctctggttccagcattaaggtggagaactccatgtagct

SEQ ID NO: 4908 - DNA, 390 bp, Homo sapien
cctcgtcgagcagggactccttgggaagatggccatggcccaagcccttccctggtgcaggtgtacaccagcccccgcgctgtggcgtgtgggaatggcaggacgggctgggcacctggcacccctacagtgccaccgtctgcagcttcatcgagcagcagtttgtccagcagaagggccaacgttttgggcttgggagcctggcccacagcatcccctatggccaggcagacccctcgctggccccttacattattgacctccccagctggacccagttcccgcagacaccggcaccatgcgggctgtgcggagacacctgttcccccagcactcagccctggcgaggtgtcgtctgggagtggctgagcgacgatggctcctggactg

SEQ ID NO: 4909 - DNA, 498 bp, Homo sapien
atgtgatgttagagaactacagaaacctggccttcctgggtattgctgtctctaagccagacctcatcatctgtctggagaaagaaaaagagccctggaatatgaagcgagatgagatggtggatgaacccccaggtaggtgagagtgaatacaacagatgacctggatgagaggtccaacgtcaagaagaaagccagtctttaaagtgatttggaaagctgcattccaaaggaaaccgtttctggaaagcctgaaatttaaaaaaaaatatactctcagataggggcatcttctgcttatgcttataaaatctctaagaattctactctcccttcaatgatcttccttaacgtttacagtgacagccaaagtactgttcatggcatataaaagagtgtacaatctgactttttttttcttgtttttgtggacagatagatatctgcatagttttgagacactctatgttaaaatttttttttgttttagaaggagtt

SEQ ID NO: 4910 - DNA, 425 bp, Homo sapien
tgagatgagtctcgctctgtcgcccaggctggagtgcagtggcgcgacctcggctcgctgcaagctccgccccccgggttcacgccattctcccgcctcagcctccgcgcccgccaccgcgcccagccaattttttttttgtatttttagtagagacggggtttcaccgtgttagccaggatggtctcgatctcctgaccttgtgatccgtccgcctcggcctcccaaagtgctgggattacaggcgtgacacccgcgcccggctgtctttattcttttaccattttatttgggataagtagcagcactgcctgggaagacccttgggagggagaaggaatctgttggatggaaatcttacctttgagcatcagttatatttaatgcctagtttcagcccttttcatattagactttccaacagc

SEQ ID NO: 4911 - DNA, 363 bp, Homo sapien
ttttttttttttttttttttttacactttgatatttattaacaaaaatggtccagaaaaggattgagtcaaaattacaaagtgattaagagttaaaacaaaagttgttctttattgtagtttctgggggactttaaccagtccccaaagctgtttttatctcctaaaataggacttaaatgacatcactcaagtgacagattttaatagaaactcctcctctttccttctgtcaaagcaaaatatagtgaaagtctctgttgttacctcaaacctcctttcctaataagtgtgcatgcctgtagatggattgggatgcagtgaagagagaagttaaacaaaaaggttaaaaaaaaaaaaaaaa

SEQ ID NO: 4912 - DNA, 432 bp, Homo sapien
tttttttttttgagattttaaaaatatttattacatttgtttctagaaatcatagaaaataaaaattgatacaattttgatatacaactttagaaaggcatatttatcctttcacaccagagaagtttatgcaatgccagacatggaaataccaaagccactggtgacaaagggtaaacgctactgatagaagaaagccttgtccatttttatagttttcttctctaccattatttatttttgagcaaataccagtccagtggaaagagttctgaacataaaaggcacctagagtaaaaattagaccttaactaataaaacagctgtacacgtttacatcaagaaaaaaaaacccggccagcacagctcatgcctgtaatcccaggagttagcctcggcaacatggccaaacccccgtctctacaaaaaaat

SEQ ID NO: 4913 - DNA, 458 bp, Homo sapien
accaatatagtaccatgtttattttatattttattgagatacagtatagtcccattagaatgaacaattcttctcagaatcacctgggggagaaaaaaaaaagaacagatcctaaatgttcagttcagtggcttttgaaaattttatctaaccactactcaaaacagatacagaacattcccattattccagaaagtctcctgattctcacctttttgaattataattttgtgccatctgtaggattttccaaccatcatattagcattgtgttattatggcatcttttatcttctgtatctattttttccttgcaggagactgaagagccaattgtagagtgtcaggattgtgaaactgaagtttccccttcacagactgggggctccgtaggtgacctgggggatatcagctccttctcctccaaggcatccagcttacaccgcacatccagtggg

SEQ ID NO: 4914 - DNA, 409 bp, Homo sapien
gcgccgcctgcgtcagccaggccgtgcaggaagccgacctccacccgcttcagccgcttcacctgcttgcgccgccgcggccggtacttgtagttggggtggtcctgcatgtgctgcacgcgcagcgctctgcctcctccacgaagggccgcttctccgccagcgtcacgccttccacgacttgcctgcacagtggaaggaagggggagaggggcgcagggcttatcggctgcgctcccgctccaggccccacctggccccacctggacgcacctcccccctcagactttgaattgcgcaaccggggtgaagttaaagagggagatctgggactcctgagtccgagcccttggggaacacccgtcctctaaagccacccctttcttttggtctcctggaagcggctttc

SEQ ID NO: 4915 - DNA, 371 bp, Homo sapien
aaaaatatataatttaattccacattaaagccaagctatcgtggtgggaagaaggtgtaaaaatcggtggaaaccctgaaggccgagtacacacacgaagagagagggagttagctgagaagcagcatccagggaaagaaaggtctccacaagctgagatgatggccctctgccctctgaactgttcattaacaagtcaccagtcccagttctttgttcaaatcctcaaacttggagaggcactgctccaatgagacagctacagcaaccacagggaggaagtgctttgggctgcaggagagacagtcaaagccaaatcacgtccaggcgggatgaagtaaacctggaccgaggagcctgacccagctgcg

SEQ ID NO: 4916 - DNA, 470 bp, Homo sapien
ccggcaacccggatacgcgcaccgcaggctcggcgcgaaagctcgcgcatcccagccatcactcttccagctgatccttagagaagggaagatgagtgagtcgagctcgaagtccagccagcacttgggatcacaagcaggataacgacggcactgagaagcggagcctgggcaggcgcgcaagagcatccggtgagtccgggacagcgctggtaatgagtcagaaggagcacagcgaagtgccaacacctaagatacctcggagccgatcaaactcgaagcgcaaacatagggtgatgccaagacccggaaaaccatcacaactccaggaaggaaatcaaggggcagacccaaaaaactggagaattaggaagaagatggcatctcgcaggagtcctcggaggagcagcagtgacccatgcgtgccgctagctcctcactgaaggagagctttcatctgggactggaca

SEQ ID NO: 4917 - DNA, 405 bp, Homo sapien
tttttttaaaaaaagtgttttcccctttattacagaactgatacatatacattattgaacattaaaaaatacaaagaagacattttaagaatgcaattaccaaacattttcccatccaaagataatcacttagttttttggtgtatccttctccccgccacccaactcttagtttgcaaaatttcaaacccacagcaaagccacattgatagtacaatgaacatctgtcgaccagtcacctagagtcaccaagtgttgtcattttactacatttgacttgtctctttctttctttatattcatatgttttatatttttccacttagtcactggaaattcagtggcagacactgtggtaattaatatctaaaaacttcagtatgtttgctaagaacagaatgttct

SEQ ID NO: 4918 - DNA, 419 bp, Homo sapien
tatccctccctttcctcgtgggggagcacgggctgacttggctgaagaaaatgccagttctgtggatgtggccgtgacaagaggacgtgcggctggaagaggcagaaggggacgaggaaaagcatgctttgaagagaagaataaaccagcgaccccaaccctttctgcaaattggtgctattacttgtgggatccatttgctttcattccctcccaccccaccgctgaagaaaccttgccctgaggctcgagagccagccccctgcagccgggggacgcttctgggttggaggaccttctggatgtagcgtcggtggaacctttagatactctcctctggaaaagccaccatgaattcggtagctgggaataaagagaggcttgcggtctccaccaggggcaagaaatacggggtgaat

SEQ ID NO: 4919 - DNA, 426 bp, Homo sapien
aaaaaaaaaaaaaataaacctttcctctgagcccatcttcctttcgctccttgactttccttgacttgctgttggaaagtctaatatgaaaagggctgaaactaggcattaaatataactgatgctcaaaggtaagatttccatccaacagattccttctccctcccaagggtcttcccaggcagtgctgctacttatcccaaataaaatggtaaaagaataaagacagccgggcgcggtggctcacgcctgtaatcccagcactttgggaggccgaggcggacggatcacaaggtcaggagatcgagaccatcctggctaacacggtgaaaccccgtctctactaaaaatacaaaaaaaaaattggctgggcgcggtggcgggcgcggaggctgaggcgggagaatggcgtgaacccggggggcg

SEQ ID NO: 4920 - DNA, 411 bp, Homo sapien
cgccaagtagcccgagagagcacctacttgtcctccttgaagggctccaggcttcaccctgaagaactgggaggccctccactgaagaagctgaaacaagaggttggagaacagagtcaccctgaaatccagcagcctcccccaggccctgagtcctatgtacccccataccgccccagcctggaggaggacagcgccaccatgtctggggagagtctggatggacatttgcaggctgtggggtcatgtccaaggctgacgccgccccctgctgacctgcctctggaattgcagcccatgggctatggagccgacacatcctgcagcagacactgatggacgaggggctgcggctcgcccgcctcgtctcccacgaccgcgtgggccgcctcagcccctgtgtgcctgcga

SEQ ID NO: 4921 - DNA, 368 bp, Homo sapien
ggtgtaagtagctgattaagtgttagaatgcaaacagctagaatccatgtttcaggtattaagttttaaacaagtactaaaacagcttttgaaactcatatatttatagctttgccatgcattaatgcaatataaatttccttcctttacaggtggatgattgtggcttttctttgaatcatcctaatcagttcttttgtgagagccaacgtattctaaatggtggtaaagacataaagaaggaacctatccaaccagaaactcctcaacccaaaccaagtgtccagaaaaccaaggatgcatcatctgctctggcctctttaaattcctctctggaaatggatatggaaggactagaagattacttt

SEQ ID NO: 4922 - DNA, 427 bp, Homo sapien
ctttggtttaaagtagcaggtttaggttttgctacattctcaaaagacagcaggagtatttgacacatctgtgatggagtatacaacaatgcattttaagagcaaatgcaacaaaacaaatctggactatggataaataatttgagagctgccacccacaaatataaatacagtactcatgctgactgaaataataagacatctacaaatttataaacaaaaagtgattgtcattatcctgcttatgtactagattcaggcaagcattatagactttttggttgcggtggcttttgcatttatattatcaatgccttgcaggaacgttgcattgataggcccattttatttttttattttttttttcgagacaggatctcactctgtagcacaggctggattgcagtgcatcctgcaattctcaatc

SEQ ID NO: 4923 - DNA, 423 bp, Homo sapien
ggcgtgactggagccttccctccctgtctgatgccaaggcctgcatcaccatcctcctcacacactggcgtccctgtctgactgaccccttttctaggactagagaatgaagacaagttagtctgatagcacctgctactgaatcttttcttcacaaagtctccccttggccctcagactacatgacaggcctacatgtgctgagcctttggggcagcaggaagctggttcacacacccaccaccaaaatctcatgcagggagtggggagcgtgggataacaagtaaaggacattctccttcatgtaagtctattccctctgacaaagcttcctactgctgctgcaaaaacagcacacccaatttctgctatgccttctcctctactttaggctctggacacctgcaaagaataacaaaaagc

SEQ ID NO: 4924 - DNA, 223 bp, Homo sapien
atcattgcctgaatttagctttgtgactgcaagagcaagaccagttcctgtctggagacgactgttacaataatatcatcctattattttatgttcactctttatcaatttgaacagatgtttacatgtactataattagcattttatctctacagttctctaagagtacatctgagtccaaagtgtatctgaatgtgtgctctgaccttattcttaaatgtt

SEQ ID NO: 4925 - DNA, 311 bp, Homo sapien
gtaccttctgctcactggacatctgcctggcacagctggaggagcttggcacccttaatgtgttccagacggtgtcacgcatgaggacccagaggccttcagcatccagacccctgagcagtactatttttgctacaaggccatcctggagttcgcagagaaggagggcatggtatcctctggccaaaacctgctggccgtggagagtcagtaactctcctacgaacctcctacctgttggccagccttccttaaactaccctggacaccgctgagcctataggttgccatcagttacgctgaagccatgg

SEQ ID NO: 4926 - DNA, 407 bp, Homo sapien
acaagggattcccttaattagatgacacatcaagacagatctgattcccaccacttggagcagtttgaatcgatgaccccaggttcaggcagaagttctgcagcctctgaaatcttcagggtctggaccctgagatgacgttaacaggacccctggccagtttccatgagatctgggtctctgtcactttcagggggtaggctcctggaggcggccaggtgtcctgtgcctgctaggccacctgtctctgagattcctgttgctgtacctgtgtgctctgcagggtgctgcggggggcctgtgggggccctggggttgggaggctgagagcagtggagagacctggggatgtaggtgccggctccgcaggcctagtaagcagttctgtggggaagcggggcagcaga

SEQ ID NO: 4927 - DNA, 405 bp, Homo sapien
atttttaaggaaatgcagctttattactttcaagtacaaacaataacttgggcttggctaaccaaatttgcctaattgagggaatctgctttaatgtacagatataaatgatttatagttaacacaatcactcacgggtaaaaagagtgcttctatgatgcaagaaaataacttctcatcttagagacatcttgttccacaatcaccccactatttgcttaagcaacctcttcttccccctaccccacacagttcaaatataaactttatctcatgccctctaaatcacaacatacatcaaattcgtgaaatatgagttgattactttttccacattgctatagatgttggattgctgacagaactatctcttcaacctgagcattctcatcaagtatactaagt

SEQ ID NO: 4928 - DNA, 413 bp, Homo sapien
ctgccttttctgtgttcttggttcctcaatagacaaggctcaaaaagatggcaattttctagtaaaggaagcaacacagtaagtttttaaaaagatggcacatatctagtaaaggaaccaacacagtctcaatggaagaactgatcactaaaatgtttaatttccaaattattttcaacttttaataacatttccaatcaattcctttaccagaaattctaggttatagacatcaagaaagtacaactttttcctaacctatggaaagttctaagtcaggggtgtctaatcttttggtttccctgggccacactggaagaaaaagaattgtcttgggccacacataacatgcattaacactaatgatagctgataagctaaaagaaaaaatcacataatgttttaagaaagct

SEQ ID NO: 4929 - DNA, 120 bp, Homo sapien
gcgtccgcgatcgggcttagtcggagctccgaaggagtgactaggacacccgggtgggctacttttcttccggtgcttttgctttttttttcctttgggctcgggctgagtgtcgcccac

SEQ ID NO: 4930 - DNA, 401 bp, Homo sapien
aagaaaagagctctttattccacgtcgtccgatatttttacacaagtaaaataaaatgcatatctctatataccgcgatctgggtgggaggcggcgttctggaacaaacgctgccgccgaaccctgtaaacatgatggggtggagatgggggtggcgggcggcaggcgtccatcagggaggacctggcctggcctgccccacgggtcggccgcccggctggcttggcggcgtggagagagaccccgtatgtacacacacctggctgctgagcacgctcttgtgtccgctgggggtcagcagggcccaagcactgtccacagcaccagcgccaggcccaggggggtgaggctgcaggtgaggctgggtagggcacctgagccttctgagtcaccagtcccgc

SEQ ID NO: 4931 - DNA, 119 bp, Homo sapien
atttattatgtaagacatggggtgaagaatggtcaaggaaagttatggccgtgagtgacatggaattagatgaaaaggctcaagtttgctgaagagagtttaaatttggcttttgctct

SEQ ID NO: 4932 - DNA, 487 bp, Homo sapien
ttgtttttaaagcctttttatttttttaaaaaaacaaaaacccccaaacaaaaacaaaacctaaattaaaatatttcccattggaggctatttctttttttgtcttttaaaaattttattacacaaatatcacccattcccacgtgtcagaggaaagatgtccttgctctctctaaaaccaatagtggagaacttttggaaaacaaaacaaagtccaactagcttcctccttctctggcccaaaataacctcaatgtgtcaactgagatagcataagacttatccccttaatgcttacatttaatttaaactttttagcacaacattggagattgactctaaatcagcaacaaaaaaatatatatttacaatatttctccgaaaaacaaaaaacacaaccaaaccctttaaacataagtgactttaggagttttatttatggagcagttatttttttaatcaccaagtgattttatattatatatat

SEQ ID NO: 4933 - DNA, 405 bp, Homo sapien
  misc_feature (1)...(405): n = A,T,C or G
ctttcaaactttgtttattcacctgtaaaaaacttcacacacacacacacacacacagagagagagagagagagagagagagagaggcagacctaagatccctgttccaatccccagactcacctagggggtcagcacatacattccataccaaggtgacccaaacccactatcagggtctgtgcctgggcacaaaggggcaggcaggggcagtgcatcgtttgaaactaggtctgtctggttgggggcctcctttgcaggtccatatgccttttcacagcctcacatcagggatgttcacagcagagtggcctgttcggggtgggggactggctgtcgataggctggtagcgangccctagtagcatctcggcggcggcggaaggccaggaattcctcccgaag

SEQ ID NO: 4934 - DNA, 154 bp, Homo sapien
tttaaaaatccacaaagcagcatatttattccaggctctagtagacagccccctgatttcattcccattcatcatcaccaataaaatgaggacggatcctgggctggctgaggctctgtggtccttggctccttgccctgtgccttctcagctt

SEQ ID NO: 4935 - DNA, 219 bp, Homo sapien
tggaaaaaatttgctcttccctggggaattattccggggaaagggaagaaaattgctcaaccctccagttaaatagcctggaaagcccaaggccaaagtctgaagggaaaaggcaattaacatttccaaccttgggtcctggtttaaggttatcccttctccctgtgccttcccatctcgtccattagcccaggtctttgagcctttttttttgaggct

SEQ ID NO: 4936 - DNA, 167 bp, Homo sapien
gcggccgcgcggtcagcacatggcggtgttgcagtggagcgtgctgggccgcgagctgcagctgcacgaacatcatgtggtcgcccacacgcaaggccagtgtcagtggcgaacggcccgacagaagtcactgacctgcgtctccgtgagactctcgagagcttgca

SEQ ID NO: 4937 - DNA, 321 bp, Homo sapien
cagattcatttaacaaactcttatgtagcacttactgtgggctaggcactctttcaaattgctttacaaatatgaactcatttgatcctttcattcccctatgagataggtatcattattattcccaccttacagatcagaaaactcagccacagtgcagttaagtggtaggaaatggcagagccaggcagggttcaaacgcaggcaaactagctcttaacaccgaacttcacactgtgctttctttttgtatgtttgctggctgaattttcctctcagataaagcacatctaaaccagaagtgaccttaattactgttaa

SEQ ID NO: 4938 - DNA, 322 bp, Homo sapien
aaatatggctctttattttccttagtgtccattatgaaaaccagtatcaagtttaccatggaaattaatatatccattcagttcctcattctaaggctgttcagttgatgcatgtagactttattcccttacatttttgcttagattagattaggctgtattacttttctgtcaataacaaattaagcttggacttacttacttaaactattttaaaataagttctaggctagtaagatgaacagtgtctactactataataaatattccaaggatacttttggattaacatggtccataattattaactccaacaaaaatg

SEQ ID NO: 4939 - DNA, 315 bp, Homo sapien
  misc_feature (1)...(315): n = A,T,C or G
aaaaaaaaaaagaaaagtttatgcttgaaagtgcaacaggctccagggcaacgctcactctagctgaagatggcaaaagctgtcctggcgggggtgcaggtgttgaaacaggagtggagtccaggccgccaccgcccaggcagagggagcagcgtgctttccgccaggngtcttagttccagctgtggctgggcctccctgcggcctgtgctttcggccccttgaggttctggtctgttttgctttctgctggaagcctcatcatctctgtccctctcctgggcctgcttcttgggctgtctcagaggcttcttg

SEQ ID NO: 4940 - DNA, 360 bp, Homo sapien
attcggcactcggggaagacgcgcgtccccggccgcggcgccgaagccggcatgggggaccgcctggtcctgggccagagctgggaggcggtgttccgtgagccgcctggtctggggtgcggggggcgggaacggccccttcgtgtgcgcttgggcgaggcgggcgggcttctgtcctcctactcggacccgcaggtttctggtcctcataccgtgtggttgagtgaaatcaaaacttccacgatagcaatgctgattggacaaagaatgtgttgtggacacaaaaccaaactctggaggacagaggattcattccaagggtctgcttgtattcaatgactggtctacgtgggggtgtga

SEQ ID NO: 4941 - DNA, 505 bp, Homo sapien
cgcggccaatgtcagagcagacgccggccgagcgatgctgcgggggcccgggaggacgcctgtcgggattatcagtcatcgctcgaagacctgaccttcaatagcaagccgcacatcaatatgctgaccattctagccgaggagaacctgcccttcgccaaggagatcgtctctctcatcgaggcccaaaccgccaaggctccttcctcagagaagcttcctgttatgtaccttatggattctattgtgaaaaacgttggaagagagtatctcactgcctttactaaaaatctagttgcaacatttatttgtgtgtttgaaaaggtggatgaaaatactaggaaaagtttatttaagttacgttctacatgggatgaaatattccctttgaagaaactttatgccctggatgtcagagtcaattcattagatcctgcttggcctattaaacctctaccccccaatgtgaatacgtctagcatccatgtgaatcctaaatttttaa

SEQ ID NO: 4942 - DNA, 564 bp, Homo sapien
aattcggcactaggtgggagtagtcatgcttgctggtctggctgttccggacaaggtagctacactccttgcagagtcgcagcaggttctcggcgtctcctctgctgatggctccgtgataccatatttgcttctccagggggacggcaggatccaccctttctcctaggatcccgcagaactcagggctcccatgtttgataggcttaaagccccctccaggggcacgaagctggcgccgcggtcccgcgaaggtgagggggatgactgccgcttctcgttgccattaaactgtgctgccagggctgggatggtgacccggttccactcccaaggctggtcgtactcatcggcgggcctgtcgtcatcctggggcagcttgctctcccgcagtcgggggctgactgtgctctccgagtccgagtcaacactttggccttcaggttcgtaaggggtgtcatataactggatagctttatgctgggaccggacactttcctgcctctgaaattctgtcatgatcctctgtgcctcatagggctccatgtaagcagcactctcccc

SEQ ID NO: 4943 - DNA, 547 bp, Homo sapien
agtgggagaggaatccatcagttccattcctggaaagaggctttttaaaaatcccatgagtgatgtcctaatggacctttcaggcagaggctggcatgctcaccagtgggctccccgggctctctgcagaggcgattctgttcagcttgccaacctctgcctgccagcctgggatcttcttggtcgtcatgtggcgccgggcatgcttcgtcaggtggtcactgcgcatgaaacgtcggtcacacaccgggcacacaaacttcttctcccctgtgtgagttctgcggtggcgtgacagctcatccgaacgagcaaactttttatcacagccatcccagctgcagttgaaaggcttctcccctgtgtgagtgcgaagatgggccttaaggtgggaacttttgaagtaggtcttccggcaacctgggaagctgcaaacatagttcctccttcgggaaaagtctacctgagggacacagttttggctagaggtgatgaacactggagcaggggcaaggggcaacaacttggtattcccggcagccatgac

SEQ ID NO: 4944 - DNA, 243 bp, Homo sapien
cggcacgaggtgaagtgggagccgcttggttgcccctctggcccctggagagaagggggagcattcctagacccctgggtgcttgtctgcacagagctctggtctgtgccaccttggccaggctggctgtgggagggtctggtcccacgccgcctctgctcagaccactgtgtggaggtgcacagacagcctgcgggtaaagtgtgagagcttgccatccagctcacgaagacagagttatta

SEQ ID NO: 4945 - DNA, 491 bp, Homo sapien
ttcgtgcgaattcggcaagatctctttctaattttggcttctgctcctccgtttctttacttagttgaaatgaataagcctgcttctctgataacttttctttaacattatttgccaaatgttctataacatctaatgtattttccatgctctgtagaaaaaatattaacatgtattttttagaatcagaaattgacttttataacttgtcatttatcaagtattcatttaattttaattcatttatttttgtacataatatacattatttctgttgatgtacctcttaatgacatctcggtcaatgatggactgtatatatgatggtggtcccataggattataatggagctgaaaaattcctgttacctagcgacattgtaatgtggcacaatacattagtcatgagtttgtggtgatggctggtgtaaacaaacctgcattgccagtcatataaaagtctagcacatacaattatgtacagtgcataa

SEQ ID NO: 4946 - DNA, 449 bp, Homo sapien
gttaccaagctgaggtgggaggattgcttgagccatatgctctaatatattttaaaatacatattttaaatatattttgagtggtaaaatgtagcagataatgttacataaaagaagccatggtaatgacatgacattactggttttgagttgtttgtgtagtagttagctattaatactcaggtataatgatttgctatttaaactacacaaatgctcaaagtccagcgataccctgcacccaaattcagtggctagattaccttcttaggaaagcacaacacttcaatggagtgacactggcatgagtccactagagggtgtgtatacatggcctgagttcaaattgttcctgctgtgagtactgcttttcagcttcaagttattcttatcggccacagtactgtttattccacttagtaacagttctgtttacagagcactttaac

SEQ ID NO: 4947 - DNA, 145 bp, Homo sapien
tggcttaccactccaaggctgctggaacaagtgatgcctctaaccttggattggcctgtgtgtgtgtttgtacatagaatatttatttttatacagttttcactttttgaaaatgccagaagtatgatgcatcttacagattatt

SEQ ID NO: 4948 - DNA, 511 bp, Homo sapien
actggctttcatacttagcattccagtgaaatgttcttagactcaccagtggacaaataataaggcctttttttattattatttcttgtcttttttgatctaatttatattttatattgttgaattctccctcctttggcttgtgggatcctttttctctaatatctgtctttctttttttagttgatctttccacccactcccctttctcctcttctccactgagaataatctccctgtcttttattcacttcattttctatactcctatttatccattttgattgtttatacctactatttgtattcgaatgacttcatttttcccaccctgtggtcagtttgtgacttttggaattttccacaggtacctgtacaacttgatatttgaaaacaggattcatcaccatatatccccagcccccgttttctttttaaacaggcctcattgcgtaattcctttgccctgaaaagtgtcaccacctttatatttttaccccagccttggagt

SEQ ID NO: 4949 - DNA, 321 bp, Homo sapien
aaaatgaaactgcatgagaggcttgggacccagcctgcatgggtttcctcggcaaggacaaggcccgtctagcacctgggcccatcacaggaatggtgggggttagggcagggctgaggaaaatgcccggcctcacagagtggggaaaagaggctctctgctcccggctcactctgcagaaggtgccatgagcccagggctccgtgggcagtgccatccctcctgtgtcctgcctgcttgtggcagggacacggccaagcagggctgctgctgggcaccaagggtacatcctccctagaaggccacccggggaggcccctc

SEQ ID NO: 4950 - DNA, 445 bp, Homo sapien
tcatttgaaaaattgtttaattcactgccaacatttattctttttagtaggacacttcacccctcaggccctttccaccctcaaaccttctgcacaggagactcaacaggcacagccttctttccccgttgctttagacggccccgcgcgtagactctgagcaggagggcagcaaagaccacagccacccccagccctcccaccacagtgacagtgtggccatagagaaggcaggaaagaaggatggcaaaggcctggcggagggtcatgatgatggtgaagacggcagccccaaactgcccaatggtgtaaaagatgaagagctggccacatgcggacagatggagagtagcagggcatgggcagcaaactcactgtgtcgccccatgaagcgggttccctccagtagggccccctgttctagcagtgagcccactgtgaagag

SEQ ID NO: 4951 - DNA, 325 bp, Homo sapien
tcaacagcttccttctcccccaagaacccagaaggcatggaacatggacgacctacagggcctgctggagaagaccaatgggtgcatgggatgaccggcagcttccctcaagtggcttcccagagactactaggagaacttggtcctatcgctgcccccacctggaagctggacttaaggatcccccaaagaacggggcaattagaaacctcccacccagcgaagggataagcttctcaactcagtcccaccactcttcatcgcaaccctctgagtctgcagcagaaacaaacatctccaagttacagaggaggggatggaatcc

SEQ ID NO: 4952 - DNA, 201 bp, Homo sapien
tgctccaagggatatataataacctctgacagagactctgcccccaaggagcagcctccccatggaagaagtgcaggtgtgcaacacaacggtagatggcgtcacagatgaacacgtcatagacttctgagctatggttaatcattaaaagggcaggaggaagtcccacggatacgacagtgtggaaaggtgggagtctgg

SEQ ID NO: 4953 - DNA, 450 bp, Homo sapien
tgatttatgttctcttatcttttagtttttcagtgaatatgagaagttacttcattcagaaaattatgtgacaaaaagacagtcactgaagcttctcggtgaactactactagatagacacaacttcacaattatgacaaaatacatcagtaaacctgagaacctcaaattaatgatgaacctgctgcgagacaaaagtcgcaacatccagtttgaggcctttcacgtttttaaggtgtttgtagccaatcctaacaagacgcagcccatcctagacatcctcctcaagaaccaggccaaactcatagagttcctcagcaagtttcagaacgacaggacggaggatgagcagtttaacgacgagaagacctatttagttaaacagatcagggatttgaagagaccagctcagcaagaagcttaatctccaataaacatctatgttaaatc

SEQ ID NO: 4954 - DNA, 418 bp, Homo sapien
actaatcaaatctattgcttttattgtttttaagtaagtggtggtatatgtcatctttttaaatgtttcttttgggaagatcttatagaaaatggcaccctgaaactttcagctctatgtcccaaaaattatctttcaacaatctgatgaagtttcttaaagaaactcttaaaaatgaagataatatacctggcctaaatcaaaacaatctgaaaaatggatgtgtcccagtggaaagactcaagtcttttcaagtttatcagaaatgccactatacaccactgtactataagtcgaggaggatggatatccaaaggtatcatttgttgacagttcctgatggtctcaggtatatcctataatcactggttactatgcatcatttcttgtagataaatggtattcatgtgataagctg

SEQ ID NO: 4955 - DNA, 415 bp, Homo sapien
ttttttaaaatccatacaaacatttattctgtccctgcctggaggtgagggggaagggagtccggagagccccgcagaggaggacggggctctagcgggaagacagtgtccggaggccggtgggctccctctagacggcagaccctggggctaacgaggggccagctgggttctcagaggtcacggactctaggaggtggggcggcgagtggtggaagccggcgcccccgaagaccggccagcccctggagcacagaggcgggtccagcccacactgcgctgagtgaggccctggccccactggggtctgtcccacccccaccccgcaggagggaaggcagcaggcccgctcttcccggtgtgaaagatgctgtgcaagtcatcaggtttaaattaaaaataataaaaataacaa

SEQ ID NO: 4956 - DNA, 259 bp, Homo sapien
gcagtttgaatttatattttattattttgaaatacaaaaatttaaaaacatttcaaaatacaccagtacatgtttgttgtaaaaatttcacctaggaggatataaaatagaaaagccgaatattccttctaactctcccctctacctcaattcccttcagaggtaacacagcaaaaaaaaactggggaaaagcaaacaactttccagacctctactattctaaaacacaaagagcattacagcttgctatgcatttttt

SEQ ID NO: 4957 - DNA, 147 bp, Homo sapien
accctgctgctactgtatgagccgcgccaggcccagcgcgtggcccatgcagatgtcttcgcacctgtcaagcccatgtgcagactggagcgcgtttcccggtgccggtgccatgggtcagtgtgcagacagccgcaccctcaccac

SEQ ID NO: 4958 - DNA, 391 bp, Homo sapien
cagaccacccacgaggagttgctgctgctgaggcgggacggcgggacacagcctggagctggaacgcgcacggtcagaggctggggaggcgctgagtgcctgcggaggctgcagcggcgcgtctccgagcaggaggaggagtcacgcctccaggacgccgacgtgtccgtgcctcgttgcagtcagaactggcccacagcctcgacgacggcgaccagggccagggcgccgacgcacccggagacaccccgaccacccggtccccaaagacccgaaaggcgtccagccccagccttcacccccggaagagatcttagagccccccaagaagcgaacatccctcagtccagcggagatactggaggagaaggaggtggaagtggccaagctt

SEQ ID NO: 4959 - DNA, 413 bp, Homo sapien
ccgagcgccggtccgagcagcggcggctcgtgagcgccatcggtacctccgccatcatggacagtgacctgctgaaactcaaccagctcaagttccggaagaagaagctccgatttggccggagccggatccacgagtggggtctgtgtgccatggaacccattgctgctgacgagatggtcatcgaatacgtgggtcagaacatccgtcagatggtggccgacatgcgggagaagcgctacgtgcaggagggcattggcagcagctacctgttccgggtggaccacgacaccatcatcgatgccaccaagtgtgggaacctggccagagtcatcaaccactgctgcacgcctaactgctacgccaaggtcatcaccatcgagtcccagaagaagatcgggatctactccaag

SEQ ID NO: 4960 - DNA, 317 bp, Homo sapien
ttaaatgttaaatcagcattttcatgtgatctgaagtatttcaattacatatgagcattcattgttttttgcaaaaactcagtattaggtaatagttacatactactacaataacattccgctgctgtacaaattaaaccatttaaaagaaatgagcattctaagaattatatacaaaagaaaccttgaagcagtgttgaaatgaaatgcaaggtgtcattgctagctctactgttttaaagtatctttgaaaagtaaaattaacaaatacccttcaacatatccaggtttacaagtctcaagaaaatcaaatgtca

SEQ ID NO: 4961 - DNA, 351 bp, Homo sapien
tgcatcaatgtctgccagcctctgtggccacacgtctccacctgtctgttcttccacgtctgtctctgaccttgggtcctgtggcctggcagcacaagggcattgagggtgggaagcatgctgcttccattggcctagcccatggagtggggccgagggatcactgggatttttggaggggatagggattaataactggccttcgagatgccttgtccctcctgtcccacagctccaggcccctctgcggcggttcctgagacaggagatggtcattgaagtgaaggcgatcggtggcaagaaggaccggtctctcttcctgttcacggacctcatcgtctgcaccactct

SEQ ID NO: 4962 - DNA, 406 bp, Homo sapien
ccaatctgaagtctagaatcaccagtggatccacacaatggtcctcatgggcttcaaatgacgaaatgtgattcactggaaacagcagcaaccagggagggctctgaggctgcagcaccagcccacctgccggtgaccctcacacctggctgtgcagccctgggtaaggggaagcccaactcatgcagccaaagctatcagcaatgataacccaggccatctctctcccgggaaagacttctgacctcactgctatcccctgcatagattctagaagcagcgaccaagacaaaagagagcaatcaaccaaccgccagatgttctgtccactggacagcatgcgcctggaggctcataaccacccagaggactcgctgcatttttcactttctggtacgtgtggggg

SEQ ID NO: 4963 - DNA, 403 bp, Homo sapien
gggaattgctatccctggggaaatcagcctcagaagagaagctcactgctctcctggaaggaatgtttctcgacagtattctgatgcttgcaaaaagaaatactatcataccacgttgttctgtgacagaaagcttctaagataagtttttggaattaagaagtacacattattgcatgagggtcataataatagccagcatttatttgggcactttccacgagccaaacaccatctaagtcctttacatgcatcctctcctgagaattgtcttatggaggcagcgttattattattttaaagattttctacattgtattctggtgatgtttgttgaagtacttagtggtgccattgtttccttgccccagaaagtcctctttgccctgtgtgccttgaatgc

SEQ ID NO: 4964 - DNA, 365 bp, Homo sapien
ggggggtgggagtctctaaagagagactgtcatgggtcattccccacaagagccacatgctcacacctgacagatgcacggcccaaggcgtgcagccctgttgcaattccatgcttcccccgccaaccagctcctgctgccatccccagggaggtggcccaggaaggtgcctggcccagaataaggaactggcatactgcaaagtccccagccctgcctctggtggacagcatcgtcctggaatggccacggagtactgagttgtgtgcttgtccctggcagtggcaggctgtgtcctatggacatcttgggaggacatggaatttggcctcatgacaggcccaactagggataggaaggaaaat

SEQ ID NO: 4965 - DNA, 431 bp, Homo sapien
gtgaagatgtgtgactttggcatcagtggctacttggtggactctgtggccaagacgatggatgccggctgcaaccgtacatggcccctgagaggatcaacccagagctgaaccagaagggctacaatgtcaagtccgacgtctggagcctgggcatcaccatgattgagatggccatcctgcggttcccttacgagtcctgggggacccgttccagcagctgaagcaggtggtggaggagccgtccccccagctcccagccgaccgtttctcccccgagtttgtggacttcactgctcagtgcctgaggaagaaccccgcagagcgtatgagctacctggagctgatggagcaccccttcttcaacttgcacaaaaccaagaagacggacattgctgccttcgtgaaggagatcctgggagaagactcat

SEQ ID NO: 4966 - DNA, 434 bp, Homo sapien
caatggctagagggctctgctccaagtcattgcttactacacccacaaacattcttcgttctttaaggcctaacttaaagcccagatcctacaggaaaccttgattagacccctctctttattaagcttcctaagatcaaaccctgcttttgtgtaaatgctgacctccttgcctacattttaaaaacctagagctgggcatgatggccccagcctgtaatcccagtgattcaggagactgaggtgggaggattgctagaagccaggagttcgagaccagcctgggtaacatagctagaccacatctcttaaaataaaatagttaatttagccaggcatgatgatatatgcctgtagtcccaactacttggaaggctgaggtgtgaggatctttgagcccgggaggtcgaggctacagtaagctatgatctcac

SEQ ID NO: 4967 - DNA, 416 bp, Homo sapien
ggagctcattgtcgaggtccttgaagatgtcccgctgaccatgcacaattttgtacggaagaccttcttcagcctggcgttctgtgacttctgccttaagtttctgttccatggcttccgttgccaaacctgtggctacaagttccaccagcattgttcctccaaggtccccacagtctgtgttgacatgagtaccaaccgccaacagttctaccacagtgtccaggatttgtccggagctccagacagcatgaggctccctcgaaccgccccctgaatgagttgctaaccccccagggtcccaggtagggatgccttagctgaagagctgctgggggagaaaaagatcttggggctcttgtagaccacgagccatactttattcatttgtttacttgacaaacatttattgagca

SEQ ID NO: 4968 - DNA, 400 bp, Homo sapien
gcggccgccagctggggcaccgccgcctcgtgctgcagctgtcccaggacgtagccgacctcgtggcggaagagggcgctcccacagtgcagaccctcggccagcgccagggcggcctcctcgcctcccgcgttgcgcagggcgaacatggcgcggtatcgctcgaagaggccggggactcatccagcagcgcctcccgcagcgccccacgtcacgctcctcagccggcggggcagggtccacggagaggtagggtcccgccgccggctccccgccgtgctgctgcagccactccagcctgcgcacggccagctggcaggtctcggccacctcgatgacggggtccgaggaatactgcttcaggatctccagaacttccgggtccccgatggcccccagg

SEQ ID NO: 4969 - DNA, 514 bp, Homo sapien
ttttgtatattaccaatttattaataaattaacgttataccattttccctgaaagcaaaagtatttttccacctctgctcggtgaaaattaagaaattatgtgtaagaacagcatttagcaaatagctattaaaaaaagagagaccaattttctaggtgcattgggacatccatttaaaatcaatacaaaaaataactccttgtaaatatataatatatatttatacataatttgaatatatttacatacatccagcacctatatactgcatttgtgctctgtaagtgtgtgctgacataaatcttctccaattattacaaaattaacaaggaaggcagaacgcacgtccaccttgagtcctactggtccacagccagtacgcacggcaggtgagaggggttacatggtggcttgtggcagtccactgctccagaaaccttcttctcctcctggggaagattacaagttttcaactggtataatctttacacatatgcggattacttttcgaat

SEQ ID NO: 4970 - DNA, 104 bp, Homo sapien
cagctgtggcatcaggaacggcaagcaggacagggcacaccatcacgttcctaagtgcacgcttcaacgtgggctttccagggggcataattagcacggtcact

SEQ ID NO: 4971 - DNA, 379 bp, Homo sapien
  misc_feature (1)...(379): n = A,T,C or G
tgtcaggcctcacattaaatacatttcacattttatcacatttagtccttctatctacctatgaaaccagtaataaatagcattcactccattcaacacttgaggcaactaagaggtcaactaactcctcaaggtttctccataacctggacggccaagattccaggaaggctggctattgagtccacaggactcagtacattgcttctgctgagtgaggctgactttacagaagtagcaactgaggccccgagagggganacgattttacaccggcatgctgccactataattagaggcagggcaaaaccaggctaaacaaactacaattcccatgagcctccgggggcaggggccagccagggacgctgcaggctac

SEQ ID NO: 4972 - DNA, 362 bp, Homo sapien
tcaatttttattatgaatgtccaaagtgacagcatactgtgaaaatgctaagttctcattgattaaatttcaagagaccacagactacagcattccaagcactttaatttttgacagagccaaaaacaaataaaagaatgataaaaatattcttttgggtgtaaagagtattcatatttgagtttttgtatttttttcttccctgcaggtattgtgaacactgataatttccaaaacataaattctggtctggatacttgcagcaaatttttataatctctacctggataagaagctaataagaaatgtacttataaagtatgtttacgatacagtgtgatatgtttgtttatcttcatttc

SEQ ID NO: 4973 - DNA, 334 bp, Homo sapien
actggtccgcgcggccacgaagcatgggcgcgctcgcggcgatcgacagtgagggctgaggggagcgcaagggcacggaaggaggtgggggccacgagactggtgagcgggcggcaggacaggtgcccgactcagggctggcgtttgcaggcggtgctggagcggccggtgctgaggtggcggccccggtggtgaaagagctgagactagccttgctggccccggcggactgcagcgccctggaagagcagaaccggcaggaaccactcatcccggtggagcagattgtggaggcgtggaaatgccatgccctgcggagaggggatgaggcccg

SEQ ID NO: 4974 - DNA, 121 bp, Homo sapien
agccccccgacaggtcaaccaccaggtctgtcagctggtccagcgtgtctctggccaggcggtccttcaggtcgtccctgcatgacaggttccacaggatccctctgacatttttgccaat

SEQ ID NO: 4975 - DNA, 314 bp, Homo sapien
ggatcggcagtctggagagaagatgcgtctgcagccaacagagggacaatgtcaccaacagtaacgtgaccacctggatcctccagggagtttatgacagtaccgtcataacactcatttacagatggggagactgaggcatggggaggctggtgcatttgtgcaaggtccttcggttggtgagtgacactttggttggtgagtcacctctggaatgctggaaccaggatcctgagccctgggtgacgccgcctgtcagggcagaggaggttcaagggcaagagggagccctgctgctcttggggggctggacg

SEQ ID NO: 4976 - DNA, 275 bp, Homo sapien
gttgttgtgtgtgttgtgtccttgtggtgtaggctgtgtgggttgtgcgtcgttggtcgtccttgcgtggtggtcgtctcgtgcgtgggtgtgtggtgcctgctgtgtgctcgtggtgtgtgtttgtgcgtgtgttggtgtggtgttgtgtgggtggtgtcgctctgttctgtatgtccatctgttacgtgatgtctgcgtgtctgctgtgtcgtctccttgtgcgctcgtgtggtgtgctgtgctgtgtgtgctgtctgtcgttgtcgtgatag

SEQ ID NO: 4977 - DNA, 393 bp, Homo sapien
gatgtcgtgtgtgatgctctgtacgttctgcttggtgcgtgtgtgctgctgtatatgatggtgcgtacgctgtgctgtagctgtgtgttgtgtgtccatggaggtgtgaccgtgtgtggtgctgtgcggtgttgtgtagctgctgttgtgatgtggtgctcagagcgtgttggtggtgtatctgtgtgtgtgtgtgtgtacggtgtgcacgcgtttgctgtgtgatgccgagtgtgctcgtatgtgtgttgtgtgttcgtgtgtttcggtgtcgggtcctgttgtgtggttggttggtggtgccgatgtgtgagtcgtgtgtgttgtctgtgtgttgtggtagcgtttatgcggtctgctgtatgtggtgttgttgtggtggtgtgtcttgtg

SEQ ID NO: 4978 - DNA, 465 bp, Homo sapien
gcttgaacccaagaggcggagctgcagtgagccaagatcatgccattgcactccagcctgggcgacagagtgagaccctgtttcataaataaataaaatcactctttttactttatatgttttttgagacaggatcttgtggtacgcaggctggagtgcagtggtgtgtgatcacagctcattgtagcctcgacctcccctgggctcaagcagtcttcctgcctcagcctcctgagtagctaggactacaggtgtaagccaccatgcctggcccttaattttttttaatgagcatgtacagtagtcccgctttatccatggtttcacttaccacaatttcaattacctgttttcaactgcagtcagttacttttcttaagatattttgagggttataggctcatgctataaccccagcactttgagaggccaaggcagcagatccttgagccaggagttcagaca

SEQ ID NO: 4979 - DNA, 404 bp, Homo sapien
ttttgaaacttggaatatattgctttcataatatgaagttttattgcctatctatctgaagtgtctaatttttcaagtttgtaagtttattatgtggttttaacattgggtgtttttgttttgtttttactatgaaaagacagcttaaggaagagctaaattctgttaaaatatttggggcatgtttgtgcactgctgttgtgaggatcagcatatgaaattgacatcatggttagtcatggtactgcagcttagggggctacacggttgctgtgtgagtggagagatgcagtgaggcagttgtcattattctaaaaattgtactactttcacttttcccaaagattatataatgttcataatccaccatgaaaacagcattggccaaaggtactgaggctgct

SEQ ID NO: 4980 - DNA, 365 bp, Homo sapien
attaccaaaaggaacagagaaactctcagaattctttgaatcatagaatgttagtgctggaaaggactaggaagtgacttgtacaaccccttcattttacaaaggatcagagagaattggttagtagagtcccaaatctgcttttagaagtaatatggtgatcatcagtttagattcactgtaggaagggcagccctgttaaagtttgtcaggagaaaaagggaaggtatcactttttgtatgttcacccagttgcttctgtagttttcatacccctgttttctcaattttcttagaactgtctttaatggcccagctctaccagggcttgttgtctaaggacattaacttgtgctcccctcagg

SEQ ID NO: 4981 - DNA, 215 bp, Homo sapien
ctcttcattagacttggcctctccgaagtagaaatctcatattatctcatcgagtgatggagtgagctcatgctcactctctttagaatgtactgcatttaagaaggcagatgtttccaggtgctgacaaatgcagtaggaatcagcgagtacgggacagtggtgatgctgttccacacgtctaatgttggatcgtagcagtccaaagtcttgca

SEQ ID NO: 4982 - DNA, 514 bp, Homo sapien
ttcggcacaggctggcttctggagctgaaggtctgcgtcacggtgaaaattcgggatgtttacagagcatcacaaatgcctctctctcgccgctctctcattttctttgtataactatgcagccttccctctctttctgggatgtttgggacttcactcgacctgcacgggctctggcacatgccgtgggagctgctgggattcctttagaaaccgctgcccgcatgctttgaaaacagacctttctcagctggctgtggggacctgtcagagtctgggactcggcgtgcagggcggtccaagcgctttgctccggaactccggttcccaagggtactgtgcagactgaccaccggcctcccgcctgcaggtcagaggctctgacactgtctggtttccaatgcttctggagacttcctcctaggcctcatcctcctctttgccagtcacctgattaaccaattctccagcattaggacttacctccttctttttgtaaggtctcttgtatgtt

SEQ ID NO: 4983 - DNA, 466 bp, Homo sapien
actattataagcattctttatctgtgctgtccaaaaaagcagccattaggtagatgcagctctttacatttttattaaaattatttaaaattaaaaattcaattgctctgacacacaaaccataatgcaagtgttcaatagctacatttggctactggctgccttattggctagcacagatagaatatttccattgttgcagaaagttctattggatggtgctgttttaaaagcaaggataagcagaaagggacatggattttagttgatggatgactcactcactacattcaactgaactgaatctgctctataccagcaaagggacaaattcagaaaataaattgaagatggccatgctgtaacttctaaacatggtttgcttctcagatttacctaaactaagaaaggtttgtgttaatctctctgttttagcttattaagaaagagttgtttgaaatgtttt

SEQ ID NO: 4984 - DNA, 449 bp, Homo sapien
cttgtttttactggggtaggctggcatgcgtgcgtgctttagggagcattttaaacctttgccaaaattgcaaatgggacatgtacattcttctgctccatcctacttaaacacctatcagctatttttatctttaaccttttctgtatgtttgaagtgtgtggggggtgtgtgtgtgtgtgaaagagcgagagaatgatgtcatctaaagttttttgaagaattatttggttttcattgcattaaaattctatcactcccagctttgttttcatttaaaagaatatacaaagagctttgtaaatacaacacattttatttctcccccttcttttaatgtacagcttttttgccacttatatatacttaaaatattcccatgaattatgtccagttcttcttggaaaaaaatttggttttgaatgaacctgcaaagcatcctgcagcgt

SEQ ID NO: 4985 - DNA, 478 bp, Homo sapien
gataatttatagactaagctataactcatgtgcctttactatttctagttacagagaatctgtattctgattcaaaacagatttacaaaatacttctacaactaatttctcattgtctagtagcaactgaaaatgacactttgaaggggtgtgctttgccagctgtggcagaaatgtaatgtcaaggcagtcagtgttttaacaggtcccgaagatccctgaaaataggtgactgtaaatatgcttattattcctaggtaatgacaagattggttttgtttttgtttttgttttgagatggagtttcgctcttgttgcggtgaccaagatcgtgccgctgcactccagcctaggcgacagaatgaaactccatctcaaaaaaaaagatgtagaactagataggcctgctcattagaatatcaagatggctccagcttgacttttctttcctaatttatatgtactagtggctttattt

SEQ ID NO: 4986 - DNA, 445 bp, Homo sapien
gggagatgccatctgcatcttccgggagctgcagtgtctgactcctcgtggtcgttatgacattcggatctaccccacctttctgcacctgcatggcaagacctttgactacaagatcccctacaccacagtactgcgtctgtttttgttaccccaccaggaccagcgccacatgttcttcgtgatcagcctggatcccccaatcaagcaaggccaaactcgctaccacttcctgatacacctcttcttccaggacgagcacatttcgttgactccgaacatgaacgaggaagaagtggctaaactctttgagggccggctcaccaagaacctgtcaggatccctccatgagatggtcagccgggtcatgaaagcactggttcaccgcaagatcacagttgccggcaacttcctagggcactcaggggccacgtgcattaactgt

SEQ ID NO: 4987 - DNA, 434 bp, Homo sapien
cgatttatttccaaaatttttcaaaaaacttttactcagttctgctgttatttattaacttaagagtgctcccatccccatattttagctataggaaaattgtgctacccctgattcatatggaattaaaaaaaaaatacatccctttattttgagttttaagttgttattttgctatacatttattactggagtatctggtggtctgaaatagtcaaaagtagagttggtattaaatgttccaatgacatttatttttaatacttaaaaaatcatgtactttgaaatatgtcaaagcaacttctgataatatacctgaatttgtagttgtctcttgagcatcatttacttcatcttagatatagtgaagatctaggaaagctctatatgctgttcttttctacagttgtatttttgcagcatctcctggtttc

SEQ ID NO: 4988 - DNA, 127 bp, Homo sapien
caccatttacaacttcagtggctgcatcagcaacgtcttcgtgcagcggctcctggtgccacagcgcgtatttgatctgcagcagaacctgggcagcgtcaatgtgagcacgggctgtcgaccgccc

SEQ ID NO: 4989 - DNA, 207 bp, Homo sapien
ggcgattgtggcagaaatttctggatgactattcacgactttgaagattggctgaagtcttcagaaaggacagctgcttttcccagctcttctggggtgatctatacagttgccaaggaagaactaaagaaatttgaggctttccagcgacaggtccacgagtgcctgacgcagctggaactgatcaacaagcagtaccgccgcctg

SEQ ID NO: 4990 - DNA, 480 bp, Homo sapien
  misc_feature (1)...(480): n = A,T,C or G
cgtaacaaacctgcacattgtgtacatgtaccctagaacttaaagtataattaaaaaacaaaacaaaacaaaacaaaaacaatgaggtgctattgttttagtggtgagtatccggagacctgggagttctatttaccaggtataacctgggctcaaaattccaggctgacttcaggcatgtcctcatctcatagatgccagcactaaggcccagagagggcangctcattcagcccacccatcttctcacccctgactgcatttcccgggggtccttctgcagccaggtgctgctgtggtactttgggatctattggctgagctcccagagaagggtcatggattgggctagtttggaacaagtgaagggactgaagatgggctcagtatggggcgaaaacttcaggaagggtctgcagagtgagtaggggggttttgactaggaaaagttccaccctgccgggccgctgtcagagaaaa

SEQ ID NO: 4991 - DNA, 393 bp, Homo sapien
caatcaacactgcctcatgagctactgtctcctgctctttgaaaagacaaatccttatttctttgtagtgatccagaaggcagtgggaagaatgacaggtgcttggttatcttcaatttaatctctacctttcaatggggctagtgcaagctagggccattttactgcacccaaaggaatttaagacatttctattatctctaaagaatccagattaacatgccttcttggtgggcagggagaccagctatgaattctaggatctcaattcaaatgcttttgaattcttcctgcttgttcagttaattacatatatgtcaccacaatcttgcttttttttttctatgcttctaattttctctgaaactataacattattttaggggttaataa

SEQ ID NO: 4992 - DNA, 466 bp, Homo sapien
cgaagtgctgggattacaggcataagcaccgcgcccggtcaacagcatggttttatagaagaccaactccctatcattttacaattttatcagctggaaaagctaaaagaacagctagtggaggagaaggattctgagacgtcctatgctgtagatggtctattctcttctcatcctagcaaacgagaaatgggagtctcgccatcttgcccaggctcatttcaaactcctgagcacaagcgatccttcatcttggcgtcctgaactgctgggattaaaggcacagtggctcatatctgtacgaccagctacttggaagattgaggagggagtatccctgtgagtccaggagttccgatcagattgagcaatataaagagaccccgtcacaagacaaaataaacaagaaaaaatttaatttgtatttatgggagacggggtttcaccatattgggcaggctggtct

SEQ ID NO: 4993 - DNA, 262 bp, Homo sapien
  misc_feature (1)...(262): n = A,T,C or G
tgagacagggtcttgcccaggctggagtgcagtggcgtaatcactgctcactacagactcaacctcctgggttcaagggatcctcccacctcagcctccctaatagctgggaccacaggcacatgtcaccatgcctggctttctttttcttatttatttatttatttattttttattatactttaagctttagggtacatgtgcacattgtcatggttacttacatatgtnacatgtgccatgctggtgcactgcaccacta

SEQ ID NO: 4994 - DNA, 456 bp, Homo sapien
cattttatcccaggcatttttgaatagaaaacagttgcgtgcttttattgaagattgttaaaataatcaccatagtaacttgatatgttagtatttttctttttccttttagtatgtttcaagtgcagtaatcgtacttgtctatccagtttctatgtatgatacgagttgcttacacgatgcatggctaacttgttaatttagttttctccttagagactttgagacccttaagagacaagattgagaaagagccatgtggcttggctctagaaacgtcattatcattaggaccatcagattttagattaagctgctattgaattaataaaatcccaatgaagcagagttatagggatagatttatagctggcagagtggtatcaaaggagaaaaacagtgaaaaagccaatttcactggttcgttcaatccagcttgttgctaatattagttac

SEQ ID NO: 4995 - DNA, 553 bp, Homo sapien
gatgggaggactgcttgaggccaggagttcaagaccaacctggccaaaaatactttttataaaaagaaaatacttcttgtagaagtgctggttcagtaatttaatagctacaagactttgtagctacaagcctttgttataaagtacagaagactactgcaacttaatcattaaattaatcatcactttccttgccagtagttgaagaatgcatctctaatgctgcttagctgtaagtacatgcgggttatttatgcggacttccactattttcaatattaaataaacagttgcataacgcggagtttcaaaataatttatgattaatcaatgtttagtattccaaataaactcccaaaactcacactttaaactttaggattcaaatgtagagaaaaacagaacggccacaaagactgaactgatcatcttatgcccatctctacactttcacaagctaactcaaattaaccatttcagggttttcgacccgaaactaaaatggagtgccataataatgagggccaatccttggcggaaaaacagctattcc

SEQ ID NO: 4996 - DNA, 115 bp, Homo sapien
agcagtcagttgtcattgccatgacaaggcctctatctccaggcacaatgtccctgctgtctcctaatccaatggacttgctctcaccccagggatgaaacacccagaaactcac

SEQ ID NO: 4997 - DNA, 190 bp, Homo sapien
gaagctgcaggccgccagacacgctgggtccgtacagagcaaaggcctgcgtgttcccaaacagccgttgcccccgtggccgtggtaggtaatccatattggatgtcataaggaccagggggatatttaaagagagaaacagaaaatatatagagatataaaattatattcacagtttatctacagattt

SEQ ID NO: 4998 - DNA, 134 bp, Homo sapien
gcaggaccagcgttccctgtgcaggcgccactgcgtttcctgcagattccgaccggcactgcaacggattccctgccggagctgaggtcaccaacaggccgtcgccatggagacccctggtacttctcattccc

SEQ ID NO: 4999 - DNA, 316 bp, Homo sapien
aaatacagttacccaatattcctgtttgttcacctatttgctactttcactcagtagcatcccattttgtaaaatgaattccatggtcaccctgtcacaggaagtaatgaaaaatccagtgttcagtgtagtggtgcaaactgagggcatagagctgttcatagagggctcttgttatagccaaacagacacagcaacaatctcaccatttatatatatatttttaacttgtccagctcatctatggaaaactactcaggtggtatgctgtttgaagcctcatcttcctacatgaaaattatgggcatttgtccca

SEQ ID NO: 5000 - DNA, 390 bp, Homo sapien
ggagacagggtctcgctctgttgcccaggctggagtgcagtggtgcaatctgagctgactgcagcctcaacctcctggactcaagcaatcctcccaccacagcctcccgagtagctgggaccacaggtgcgcaccaccacacctagctaatttgtaaaaaatttgtagtgatggggtcttgctatatagcccaggctggtcccaaactcctgcctcagccattttttgtttttaatataagcaaattatctcctccatccctccctggggcaggagacagctaaggtggggaaggctccccagagggttgcacgagcctggtcgagggagaggcacctcggagaaggcgcttcccagcctgggctgaaggcgttttttctctatcagctc

SEQ ID NO: 5001 - DNA, 552 bp, Homo sapien
ttgttttttttgctgtttacccattaaagaggatgctacaaatgtttattcattaaagccactcataacagcatagtacaaccctatttaaaaaagaaagacatattttacatgtatgtgtagaaaataatcaggaagaatgtacaccatattaacaggagattattcctaaggtgaagaattatgagtggttcttatttccttatctacttaagttttttctctccaatgggcaggcattgcttgtaccataccttaagcaaggaagtgcatgtttgggacagcagtttgggctctcagcctccttaagagagtcaggtctgcctcatccctgtatctgctagttgagcagaggccagggctgtgtgaggggctctccaacaattgtctttacaaagtataaaaagtcatcagtgatcccaggaacatgtttggatctcaaattcagagattcaagagggccctagtttaacctcactgatgctcaaatctaattgtaagggggagctggtccccttcagggccccctcggcatgcaaggcctggagagca

SEQ ID NO: 5002 - DNA, 401 bp, Homo sapien
tgagatggagtctgtgttgctcaggttagagtgcagtggtgcaatcgtggctcactgcagccttggctcctgggttcaagcgattctcgtgcctcagcctactgattggctgggactacaggcgtgcaccaccacgcctggctaatttttgtatttttagtagaaatggggtttcaccatgttggccaggctggtctcgaactcctgacctcaagtgatctgcccaatttggcctcccaaagtgctgagattacagggatgagccaccgcgcccagcctcaagttctaggataaggtgagaaaagaaaaacattcaaaatacccaatgttttttacatacatgaaattaaaaagcacagcacagaaaacccactacaaagatactgtaatcatacccgtta

SEQ ID NO: 5003 - DNA, 246 bp, Homo sapien
acaagaagctattcttattaactttttattctctgtttcttactttgaccaaaattggaacaacatatttacttcgccaacatttcaggtcttaggtagaagaatattcacacatcaaaggatttttatgacttgttcaagagctagatagccacttcttacaatacaaattatttttaagaatttaaacatcaatttctgagacagaatgttcatttaaataatatttctctgaacattctgtct

SEQ ID NO: 5004 - DNA, 295 bp, Homo sapien
tgacctatttcattcctaaaatattctaacatctgacttctcccccaaaacaaatcatatatatttaatgaatagccattattgaaaaaatatatactaaaaagtaactacactggaaaacccatgatgtattgttactattgtaattgggagagaagtcagatgttagaatattttaggaatgaaataggtcaaaagaaagaaaaatgtgaaggatatgaataaacagagaaatgtaggagggacaaaaggacaccctctttaaactgtcaatggcaggctagaactgtttgtg

SEQ ID NO: 5005 - DNA, 253 bp, Homo sapien
ttgtttttttttttttatctcaaatttaacacaattttagttaaaatagcacctgcgtactaattattggaataaacaaaaggttgaattacatattggggatatcaccttgctgaaataaagattccataccagcttgataagatagctttgggttgagcttttgtaggccaaacataatcttaagaaaatgtgggaaattgaccaggcgcagtggctcatgcctgtaatcccagcactttgggaggcggaa

SEQ ID NO: 5006 - DNA, 419 bp, Homo sapien
tcggtgctcgctcccccgtcctgcccccgggggtgggtagggcgcccacacgcgagatccctggggatctccctgtcgccggctcccgaagtggacgaggcatggccgatggcgccgccggccgcgatccatccccaccctcgcctgggacctagagctgaatttcctgggctccgcggtgggaggaaggacttgaattttcctggtgggggtgggggatgggtctgactttttttgctccttgtgaacgggcgggggaggtgtggacgggggctgcaagtccaggtcggggtagagaacagggtggtgagcccgcagtcggctcccgtgcttgatggactagaactggagggtccctgcgctcggtttggggacgcatatcctgctttgggggcgggtgagctgagcatagccgctgg

SEQ ID NO: 5007 - DNA, 511 bp, Homo sapien
ttgttttactttagaaactttattgaggacaaaagtgggcggctcccagtcccatgggcagaccgacaataaataagggctaaaaggaagaagtacggcagggcaggagtggttgtctcatcatggagagccctggggggcagcagaaccaactggaatgaaacacagggcatcctgccattcgagtaatgtagccacagggttggtgcagacccgggtggggcctgagggaggggctcggctggtgtaaaaggcacactcatcgtccagacgagcctcgtggaagcagtggatggcggttaaacacgatttgaggcgctccctcagggctagggttcgaggggccagattgctgaggcctgcctggcctgctgggggtctcaaagactggagtgagcagataggggggctggccaaagcgggtgttgggaagagaagatcaggctggtggttgctgaacccactgactgcagcaaggttgtagactggactctagaattctatgttccag

SEQ ID NO: 5008 - DNA, 353 bp, Homo sapien
taaaattcagcatagtttttttaatccaaaaaatatatatcaacactcccccatgccaacactccctttgagtgaggcagattcctcaggattcatgtggcagccacacatgagcatatgaagggacagagaagccaccagctggttctgcctgacattcagcttctcctgcatgaggctagctttgttttggccaagaagtgtccaatgggacataaaatctgagcagaaatgtgtcccagaatcttctgtatttccttctcctctgcctttgccttgctttcttcttttcctctccttatgcctctctttctcctccttctcctcagaaaatcattgttttgaaaaaaaaa

SEQ ID NO: 5009 - DNA, 305 bp, Homo sapien
tggttgatgatgcggcccaggtttggggagctctgggggtcgtcgccatagaaacgggtgatggtgctctgcagggcgggcagcagctctcctgcatctcggggctgcacaggacgtattcaggggccacgcaggtctggccggcattgaagtagcagaaccaggccacgcggttggccacggtctgggggtcgcagttgtcgtccacgtagcaggggttcttgccccccagctccagggtgacaggcgtcaggtgcttggtggcagcagtcatgacaatcttgcccacacgagggctcccgtgt

SEQ ID NO: 5010 - DNA, 406 bp, Homo sapien
ttttttttttttttttttctggtgtcttctgccctctctttaattttgcctcttgaggggtagcagatgtgtcagtgcattttattacttgctgaaacattcaggcttacatttcttattagtttagtattttaaaagatttaattttctgaatgaggcatttgaattgtaccagcaatggacttttaaaaaattggatgtaaaaccattcagggtgatttttcttgtcagtggacagtgacgaacagagatttgaaatcccttacctccaataataagccattcagcctaaattcatttttatgaataaatctcttctttctcatggtaaatgtggcttgtgccactcaaacactagtgaaagggtatgtacaaccgcaacatcaggccaggacaccatttattt

SEQ ID NO: 5011 - DNA, 576 bp, Homo sapien
gtattatagaatctgctttatttagcaattgcaaagagtgaagagcacagaaatcatcacagagatacaggctttgtacatcataggactagtcacttgtgctttcatggatactgcctgggtgggggttcacaacacttataagttagagagtttgagagccagtggaaagtaagtggaagttgttctgaaataagcccctggcaattttctgcaatgaaaaggagcagaggtcattttcttataatgctcagcctcagagatagaacactggaggcaagaaattaataatttagtaacagtgaagctccagtggtgattacatcatgatgtaaaatcagaggttgatctgatggtgagcaatgggtgctcagatggtatagagagagagagaagagtgagggcactagcattcatcccagctctacctgggacagcaggggagactggaggccaggagaggacaggcaacctgaggagagggctctcagccagagaagggcctgaggactgtgggactgagagctagcagacgcactttatcgttatagctctcctgctggaggaggagggggt

SEQ ID NO: 5012 - DNA, 256 bp, Homo sapien
ttccatcctggggaggctctaaagagctgcaggtgaactcctggactgcaagaagttgactccctcctgcggggccgccagtccgccgtttccacgtccagctcagcaaccctaagtttggggcccactggcaggcgccagtccaccactgtcatcatcagggacccagatgaactggaccggagcttcacgagtcagatgttgtcatcacagtcatccgtctcacgtctggcctgggccgcccgtataaccccaa

SEQ ID NO: 5013 - DNA, 473 bp, Homo sapien
caggtatcctcattctagattataacctttattcttatcaaatgcctccagtcccacaattcgctaagaattctctttctggacttgatagtgatttaatgattccccccgcccatggaatggtaggctcctaattaagtggatttaaaggcaaaaagggatgtgtgagaaggcacaagaagtggcttcatcttgcaaggtgactgtcagacaagtgggttccacctgttaaaataagggaggaatggccacatcccgtagactgctgtagctgaccaggaagacacaatgagggcagcagacagggctctccctgtccgctgagtcctcccatgaactcatgtttccaaaggccccactctttcttggtcagtgtcccagtttttatagaagagacctgatgaggctgtggagtaattgtataaaagcttgcactgttttcctgacttgacctgacaatgtggcgttatctt

SEQ ID NO: 5014 - DNA, 504 bp, Homo sapien
gacagcttcccagctcttcgggtacaaccctgagcaggtcgggggacacagggccgaggcaggcattcggggcccatttcgcctgcttccgggcagggacgaggcctggtgtcctcgctccacccacccacgctgctgtcacctgaggggaatctgcttcttaggagtgggttgagctgatagagaaaaaacggccttcagccaggctgggaagcgcttctccaggtgcctctcctcacactctgacccctggagccttccccaccttagctgtctcctgccccagggagggatggaggagataatttgcttatattaaaaacaaaaaatggctgaggcaggagtttgggaccagcctgggctatatagcaagaccccatcactacaaattttttacaaattagctaggtgtggtggtgcgcacctgtggtcccagctactcgggaggctgtggtgggaggattgcttgagtccaggaggttgaggctgcagtcagctcagatt

SEQ ID NO: 5015 - DNA, 552 bp, Homo sapien
  misc_feature (1)...(552): n = A,T,C or G
ctggagggaccttgtctcccagctcagggctctttcctccacaccattcaggtctttctttccgaggcccctgtctcagggtgaggtgcttgagtctcctacggcaagggaacaagtacttcttgatacctgggatactgtgcccagagcctcgaggaggtaatgaattaaagaagagaactgcctttgcaangnttctataatgtaaacaatatcagactttttttttttataatcaagcctaaaattgtatagacctaaaataaaatgaagtggtgagcttaaccctggaaaatgaatccctctatctctaaagaaaatctctgtgaaacccctagtgtggaggcggaattgctctcccagcccttgcattgcagaggggcccatgaaagaggacaggctacccctttacaaatagaatttgagcatcagtgaggttaaactaaggccctcttgaatctctgaatttgagatacaaacatgttcctgggatcactgatgactttttatactttgtaaagacattgttggagagccctcacacagcctggc

SEQ ID NO: 5016 - DNA, 437 bp, Homo sapien
gaatcgcttgaagccaggaggtggaggttgcagtgagccgagattgtgccattgcaacccagcctgagagacaagatcaaaactctgtctcaaaaaaaaaaaatactgcacataattctgtgtgatagacttctttgtatgactggcagtgcagtgggtggctccaccaatgccagcctctccttcccctgccccatgtggctgggtctgcagcctgctcggcctcccctctctcagaccgggggagctgagggggtgaggtagagacggcccaggggcagagcaggggggtcgggcttggtgcacaggcagactctgcctttgctacttcctgcctctctctctgtgaccctgacctcccttctcccctgtcccaggacctctgggaactgacactgtcctggccaggccccagcatctcacccaggcagcccagc

SEQ ID NO: 5017 - DNA, 433 bp, Homo sapien
ctgtttaacatgctttatagagcattaggcacaacagcacatgcggttagatacaactgtttttagaagattctgaaagaaaataggaattgacacagtaagaaggaaagagaagatggagtgggtaaaatccagatcttatagccagggactttgatggagtgatggtgaagaaactgagaacttgcaggttaaaaacgcaatgtacagcaataagaaatcaacgttatagtccatgtccctcttttatatgggtgataatttcaaagtactatagccagagtcccaggaaggttctagtcacccttgtaccccaaaagccagtctttccttaggctctgagctcctcaggctagcgctggtcccagtctgcacatctcagaccataccctcttcctatacaggaggtggggcaggctttcagcctcaggtc

SEQ ID NO: 5018 - DNA, 264 bp, Homo sapien
ggaccgggagaggaggagcggcgggacggcggcggtaactcggaaggagcgagaaacagccccagcgcgcgagaggggagggggcgacgggggcggggcgcgacgcacggactccgaggacggtcaccgcggcgacggccggccgggcgcgcgcaccgtcccttcctctccgcgcccgggagcccgaaaaagattcccaccctcgcccgcgccgccggcccctcccccacttccggcgtctcctagcgacggcgggggtagggg

SEQ ID NO: 5019 - DNA, 433 bp, Homo sapien
aaatacaatcgactttattctgacaccgtgctacaacttccattgatgtagaatatgtaaaagaacgacacaagagctaggaccccattatctgaaaacgacgtcgaaccttatagttctcaatcggaagaccttttcacatgcctgttacttttcatattatcatccttcggttttctgacatcatttcttcataaaagtacatgcacactcaaagataggagctgtgtttccaaatgaattgaatctataactcttggcccagcaccatggctcacacctgtaatcccagcattttgggcggccgaggctgatggatcacctgaggtcaggatttccagaccagcctggccaacgtggtgagaccccgtctccagtgaaaataaaaaaaaatcagccgggcgtggtggcaggtaaccctaaatactcggga

SEQ ID NO: 5020 - DNA, 250 bp, Homo sapien
acaaaaacaaaccagtttatttgttgacattgaaagaacttcaaacatcagcaaacgaaagcaatctttaatatttacatgtggtacagcaaaatttaatctatgtttaataaacaaaataaaaatatcactttaaaatgtcgatatcacgatagtgaagaggcaaaagcaacccaagagtccatccacagatgaatgagtaaataaaatatggcatacacacacacacaggagtatcattcagccttaa

SEQ ID NO: 5021 - DNA, 262 bp, Homo sapien
gacatggcctactgatatctcccatgcgcagttcggggcggtacttgaccttacggatcatgtgtatgatgccgatgaccgtgtcgcaacattcagagttcatggtcatccgcacatagcacgtctcacgtttccactggccatatctccatttaatgaccaccacaacaccttttccttaagtgcctggtctatgaccagattcattcccgtgaatcaatcgcttgtattggaacaaattgcgggcctccaacttatttgg

SEQ ID NO: 5022 - DNA, 357 bp, Homo sapien
taaaattatgcacagataaacttttatgcaaagtcaaatgtcaaaagacaggaaaacaaattgaattcgtatcacaaaggctcacatttttttaatatgtaaagaactcccaaatcaataggaaaagccccagtagtatcagtcttgacagatagtgacaaaaagctctaaaatctcaatggcttaaacaacacatgcctttctcaagagtgcttttcatccctcatgggtgagttggggctgttttccatgttgctttccttgcaggacttatgcccagaagcagcggtctcctgacccattcttgataactgtggcagagggaaagaggctctgcaggatcttgtgctgccaatt

SEQ ID NO: 5023 - DNA, 186 bp, Homo sapien
ttttttttttttttttttttttttagaaggccacatgaggaacatgcctttaatcaatgtccccaaatctgtttgcttcagggtaccgtgaggtcacatattatacaatatacttggcttatttgagtcaagcagttgtgaacctaaatgtattagtaaaggtgcacttagcacatgaaatctgaa

SEQ ID NO: 5024 - DNA, 373 bp, Homo sapien
gaaatgaagaagacacaagagaagaaattttcatgcagtagatgaaccaatagcaaccaggtacatgagaaagaccatcacatagtagaagaataacagaaaagagggaaagcatttacatcatgcaaagatgaggaagaaagttcaacaataaatgagtcatatgaacatacagatcaggaatacacatggaagaagtacaaagtgtacaatcagattcatgaagatagatgaaagaccggacccaaggaagagaaggaacagaaaaagaccaacgatacaatcagcatatagctatatgacgatacagacgtgatctaattacaatgtgaaagggaatgtacagactgggtgatcaaatggcaagtgtaaa

SEQ ID NO: 5025 - DNA, 352 bp, Homo sapien
tggtgttacggtgagcacgccaggcattttaatccgcattctcatctcagcctcacgactgccccgtcacatagataacagtattcctgcccaccctgctccccgcatctccctactccaccccacatgcgtgtgacagatgaggggactgaggtggaacaagtttcagcaggaaggcagatccagggctagagttcgagtctcccatctcctcaattaagactctcgtttccaggcctcttcagcccacccagcttctgctcctgtggccctgtgccaacggggcaggatttgggagctaggccctcagctcagtgggtgtatctggctgccggcagggtgagacacctgg

SEQ ID NO: 5026 - DNA, 251 bp, Homo sapien
tcactttttatactgattttatattgaaatgaaaatattttggatagactgggttaaaaaaaaattaagttcacctgcttctttttactttttgaaatgtgactgtcagaaaatttaaagtcacatatgtggctcacactatttctgtgggacagccctgcctctagctaggggctttggtgagaaccagatgagttgatgggtctcctctgggccctgcttccctggctgctgaggtgcaggaactgtga

SEQ ID NO: 5027 - DNA, 429 bp, Homo sapien
ttgtgataaaaataaatacttttattggtctggttaaaagatacaaatgacttgaatctgataagcctgctgaatgaatgaatgaatgaatgtatccatctattatgagggttgggctttggctctttcctgtagtgagggagaaataatactttgaagatgtttgacggggctgcggtcaccaaggcctggtgctgcgacgttcctgcaggtttcgaatgaacctggcgttgagtatgtccccacccactgtccaggactgggctggcggggccggggcctgtggaggagctgtgtgcatgggcttctccccagacccatcctgtgacaaggcctgctcctcactggcagacctattctttgtttcctgttctccctgcttggagtcttggttgcctgtattgggggatgaggaattcacccccccat

SEQ ID NO: 5028 - DNA, 432 bp, Homo sapien
ttcaccgctagatagctttattttcccttccatccagttaattccagatgaaacccggctctgcgccactcaatgcccccaggtgaagatggtttgcggctgttcagcagccacgtctcctgcccaggggctgccctgggctcccgctagaccgtgtccacctcgcggagtgtgtagtccaggatggtgtcctgaccctggaacttgaagtacccgtggaatttcttcttctgaagcaggagtggaaaccagtagctgtcgtcgggccacatgtccttgaaggggatctgatccagctggaaccagcatgggcgcatttcgtcgctctccacgggggtcccctggatgctgtctgtgcagaagacatgcacgtccatgagctcaggctcgcccacgaactcaaacacgatctggcccaccttgtgcagggcg

SEQ ID NO: 5029 - DNA, 148 bp, Homo sapien
ccgagacccgctgcgggctttattggtccccaggatctgggaggggtcgggggaagggggacagggacaggggggacggggacgggggacggggacgggggaacggcgatgggagacggggatggaggatggggacgggggaacggag

SEQ ID NO: 5030 - DNA, 432 bp, Homo sapien
tccccattgcctggggagcagccctcaatttctccttgtgcctcccctcttccaggtgccaaatagccataacctcgtcttggaactgttatgtggcctctctggggtccaggtttcctggtcaagcctgggaatgccagggaggaaagggggtctggctacagcgaccctggtcttaggcaaggggaacatttctccctggagagtcaggtcctatcctgtgctgccctgtctgcccagcccagggcagtgcctggaagcctactgacattgcagggagtcagcctcgcgcccaccccctactggttttccaatgttttgtctggagggcaaaattttactactactcatctttttggagaccagggctgccctgctggcagctgccttctaagtgaaatcgactctgtttccccactttaaccccaaatt

SEQ ID NO: 5031 - DNA, 419 bp, Homo sapien
cctcgtcgacgccggacgaaagacacgggcctgattcgtcgagtctcactgagccttagtcgtcggcaggtcccaggcgcgaagtttctcggcctggaggagggggtcgcgcgaagtccagatgcaggcggggaagccatcctctattcctatttccgaagctcctgctcatggagagttcgaattgctctggccttgagaggcatcgactacaagacggtgcccatcaatctcataaaggatgggggccaacagttttctaaggacttccaggcactgaatcctatgaagcaggtgccaaccctgaagattgatggaatcaccattcaccagtcactggccatcattgagtatctagaggagacgcgtcccactccgcgacttctgcctcaggacccaaagaagagggccagcgtgcg

SEQ ID NO: 5032 - DNA, 275 bp, Homo sapien
cctcgtcgcctcgtgccgcacgtgccctcccctcacagttcctgcacctcagcagccagggaagcagggcccagaggagacccatcaactcatctggttctcaccaaagcccctagctagaggcagggctgtcccacagaaatagtgtgagccacatatgtgactttaaattttctgacagtcacatttcaaaaagtaaaaagaagcaggtgaacttaatttttttttaacccagtctatccaaaatattttcatttcaatataaaatcagtata

SEQ ID NO: 5033 - DNA, 494 bp, Homo sapien
agttcccgttcgatgtggacgcgctgttcccggagcggatcacggtgctggaccagcacctgaggcccccagcccgccgacccggaaccacaacgccggcccgtgttgatctacagcagcaaattatgaccattatagatgaactgggcaaggcttctgccaaggcccagaatctttccgctcctatcactagtgcatcaaggatgcagagtaaccgccatgttgtttatattctcaaagacagttcagcccgaccggctggaaaaggagccattattggtttcatcaaagttggatacaagaagctctttgtactggatgatcgtgaggctcataatgaggtagaaccactttgcatcctggacttttacatccatgagtctgtgcaacgccatggccatgggcgagaactcttccagtatatgttgcagaaggagcgagtggaaccgcaccaactggcaattgaacgaccctcacagaagctgctgaaattc

SEQ ID NO: 5034 - DNA, 557 bp, Homo sapien
  misc_feature (1)...(557): n = A,T,C or G
ccaggagtcgtggtttcttgccttgatgtactggagcaatcagatcacacggcggcttggagaaacccagggaccatgggcgcctccaggctctataccctggtgctggtcctgcagcctcagcgagttctcctgggcatgaaaaagcgaggcttcggggccggccggtggaatggctttgggggcaaagtgcaagaaggagagaccatcgaggatggggctaggagggagctgcaggaggagagcggtctgacagtggacgccctgcacaaggtgggccagatcgtgtttgagttcgtgggcgagcctgagctcatggacgtgcatgtcttctgcacagacagcatccaggggacccccgtggagagcgacgaaatgcgcccatgctggttccagctggatcagatccccttcaaggacatgtggcccgacgacagctactggtttccactcctgcttcagaagaagagattccacggtacttcaagttccagggtcaggacagcatcctggantacaaacttcgccaggtggacacggtctagcgggacccaggg

SEQ ID NO: 5035 - DNA, 157 bp, Homo sapien
agtgttctgtttgcttttattatgtattcggagtccttattgccattctggctggcctcgtcgttggccaaggagaaatgatggggaaggagctcggtcgcctgctcccagctgctcagtcccaactttctgcccgcatgcgcccgtcctacccttg

SEQ ID NO: 5036 - DNA, 180 bp, Homo sapien
tgaacaataaatgttttatttgctttaaaagtgcctctgaaagggccccccagaagtgagcagtgcgccgtcaagcgggtgtgcagggcaccagctgcacggcacagtgtgggtctgagtcactgccggaggagggaccagggtggtctgggccgcagccctgttaacaatctgcccttc

SEQ ID NO: 5037 - DNA, 227 bp, Homo sapien
cactgtgccccataaatatataattttcttaaatagaaagaggttgtgattgacagggtgggatgttgctggtcagctaggttaggtgaggatggtgaagccactgtcggacctggtgatgtggagacactgatgttgtgggagactctgccatcaggacctgtccgggcaagcatcacaggtgtgcagggcaggggcagggatgctcagggattacagcagactgc

SEQ ID NO: 5038 - DNA, 422 bp, Homo sapien
ctaggccctgcgcggccaacgcccagggatccgcaagctgcggcccacgagtttcagcacccatttggactttcacaatcagagatggcagcggtaaaggcatcaacatcgaaagctaccaggccttggtattctcatccggtatatgcaagatactggcaacattatcatcaagcaatggcttggatgcaaagccatcacaatgcctacaggaaggccgtggaatcctgtttcaatcttccatggtacttaccttctgcgcttcttccccaaagctcttacgataatgaggctgcgtatcctcagtccttctatgaccatcatgtggcctggcaggactacccctgcagttcttcacatttcagaagatctgggcagcatccacgttacagcagtaggatccaggcatccacaaaagaaga

SEQ ID NO: 5039 - DNA, 185 bp, Homo sapien
aattcggcagagggcctgggccagggtaccagagctggctcccagcaagggtaggacgggccgcaatgcggcagaaagttgggactgagcagctgggagcaggcgaccgagctccttccccatcatttctccttggccaacgacgaggccagccagaatgcagataaggactccgaatacataat

SEQ ID NO: 5040 - DNA, 352 bp, Homo sapien
agagacagggtttcaccgtgttggctgggctggtctcgaactcctgaccgaagcgatgatccagccgcctcagcctcccaaagtgctgggattacaggtgtgagcccctgcgcccggcggaagagtcttcatgttgttttgcggcaccctgcagatctggccctcccctccgtccctcccccgtcccgtgacctctgatgtgcgcttgtctgctgactctggggctgggggctgtgttcttccctaggactgcgggctgcagctgagcggggaggagggacgccgttgctatcccctggcgggccacctactgtgtcgtcgttgccacctgcggcgcctccaacctgggcct

SEQ ID NO: 5041 - DNA, 106 bp, Homo sapien
gggctcacacgcgagcgggcagatgcgccacacgtggcagagagcccctaccgtgcgtgcgcacggcgagcgcagagagcaagccaacgacggcaacaaacacacc

SEQ ID NO: 5042 - DNA, 223 bp, Homo sapien
gaattcggcacggagggtgactagggttccccccagtgaagaccacacatgaacagcagctcattaccagcctgatttcaggatgaacttttatgcagtcacggagtagctgaacatgcatgattcttagtgtgacatcagaacacaaggcctccagagggatgccaatgcatgtgagcaaaggcaggcagcctgactggtacttggcatctcaagactcagc

SEQ ID NO: 5043 - DNA, 312 bp, Homo sapien
gccccagcgtggccccggcccgatctacagtgtggggactgtggcttcacctgtaaacagagccgttgcatgcagcagcaccggcggctcaagcacgagggggtgaagcccgatcagtgccccttctgtgacttttcgaccaccagacggtaccggttagaggctcaccagtcccgacacacaggcattggccgcatcccctgcagctcttgcccccagacgtttggtaccaactcgaaactgcgcttgcaccggttaagggtacatgacaaaacacctacccacttctgtccactttgtgactatagtggc

SEQ ID NO: 5044 - DNA, 220 bp, Homo sapien
aattcggaacgaggccacagctcgaccacaggggctgtgggtcctgcgtccccttcctcgggtgagcctggcctgtcccgttcagccgttgggccaggcttcctcccctccaaggtgaaacactgcagtcccggtgtggtggctccccatgcaggacgggccaggctgggagtgccgccttcctgtgccaaattcagtggggactcagtgcccaggccct

SEQ ID NO: 5045 - DNA, 211 bp, Homo sapien
cggcacgagggaacatcagtaggattcttatgatttcagatttcatgtgctaagtgcacctttactaatacatttaggttcacaactgcttgactcaaataagccaagtatattgtataatatgtgacctcacggtaccctgaagcaaacagatttggggacattgattaaaggcatgttcctcatgtggccttctaaaaaaaaaaaaaaa

SEQ ID NO: 5046 - DNA, 365 bp, Homo sapien
tgtttttttttcattatgacaagaaactccatgtagccttcatttagtgatactgaaattacaattgcagctcacatagtttgtgaaagaggaagtagagaatatgaccatgaaaagtgatattttaagcctcaacacatgccgctcatcactgacttgacttgcagcatatatttcaacaaaagcacacagtgatttaatctcaacagtaattcagtctgcagccatatgagacaagaccatcattgcagacaggctgtaatttgtgaaattcaggtgctggggattaggaccacctgttgaatttaatcttggaactgttaatgttaacaacatcatgtaactgagcttatacactacatatt

SEQ ID NO: 5047 - DNA, 423 bp, Homo sapien
tagaagaatacttgatgtttatgatgattgtggtacaagatagttttaagtatgttctaaatatttgtctgctgtagtctatttgctgtatatgctgaaatttttgtatgccatttagtatttttatagtttaggaaaatattttctaagaccagttttagatgactcttattcctgtagtaatattcaatttgctgtacctgcttggtggttagcaggaggctagaagatgaattcaggcactttcttccaataaaactaattatggctcattccctttgacaagctgtagaactggattcatttttaaaccattttcatcagtttcaaatggtaaattctgattgatttttaaatgcgtttttggaagaactttgctattagatagtttacagatctttataaggtgttttatatattaga

SEQ ID NO: 5048 - DNA, 401 bp, Homo sapien
aaggctgggtggtgtggctcgtgaatccacttagaattcttggcttgtgtcgcatactgaggtgtcacggcacacatttactctgcattgtccccgtctttcccatcgcctagcgtttggggaggaacagggagagagcttcggggcgtctgtctccgtgctctcctgcctccaccgccttggttttgcttcctgctggaggcaggtcacctgctgcgacccagattcttctgcaggatgtgtctgtctttgtcacggtggacagagggtgacatcataggagcagctcgctggccagaaggggatgggggcatcctgtgcctcactcagctcctgctgctcttagggaaaggaggcctgggtcaagccagcatccccttggtaaagacccccgcaggcca

SEQ ID NO: 5049 - DNA, 472 bp, Homo sapien
atgcagacaggtctcacccagcatagtggctgggtgagagctgggactcaaatccgagctgcgtgcccaggtccccagctgccccactcgtgggcagcgaattccacacccacatgcaacgctcccacaaggtcagccaaacagagcactccgcagcctggagatggcaggccagggtgtggcactgcaccaggcaggaggtgcgggcaggcagctggcaggaggtggggcaggcacctcatctcatcaggcctgtactggcagaggcagagcatcgacctgaccctggtgctgggctgccggctccctcctgctggctcgcagatggcatcacccaggtggtaacgcaaaggctcttgggtgtgtgagagggggagatgttgtctgtgctagagtttgcagagatggcagcctctgctgtgatcttgtgcttctccccagatcctgaggaggatgaaggggctggcctgga

SEQ ID NO: 5050 - DNA, 480 bp, Homo sapien
ggcaccagggtccggcctgcgccttcccgccagcctggacactggttcaacacctgtgacttcatgtgtgcgcgccggccacacctgcagtcacacctgtagccccctctgccaagagatccataccgaggcagcgtcggtggctacaagccctcagtccacacctgtggacacctgtgacacctggccacacgacctgtggccgcgggctggcgtctgctgcgacaggagcccttacctcccctgttataacacctgaccgccacctaactgcccctgcagaaggagcaatggccttggctcctgaagagggcagccccacgcgtgctgttcggagagtggctccttggagagatcagcagcggctgctatgaggggctgcagtggctggacgaggcccgcacctgtttccgcgtgccctggaagcacttcgcgcgcaaggacctgagcgaggccgacgcgcgcatcttcacggcctgg

SEQ ID NO: 5051 - DNA, 262 bp, Homo sapien
ttttgtctgattcatagaccgaatatctgggctcatcttgtacgtgatcataatctagagggatgatacagtggcgaatctcgactttgtcaaagtttgcgtacgtgtccagaatccgggattcgttgaaatggtaccgatctgatgaaacccagtctggatcagggccatactccttaaagggaaacaatttcgcaatatgcccaacctggtgcagcaatccatacccgttacttttcattgtcctcaagggttcaaaaag

SEQ ID NO: 5052 - DNA, 450 bp, Homo sapien
catcccagctccaagcttcccactccgggacttgtgtttgggtggggagacctgacctgggcatgttcctgtttcttcatcgttgagcttttctggcccggtctgaagctcaagtgaggagggggaggctgggtttttatcacttttaatgaatttggtgtgatttgttgtagatttttaaatttcccttttggagagaaaaaccaaaaaaactcgccccactggtaaaacatgggtcttggtcccagcccctgctcagcccctcccagtttttagcttgaatgagggtggggtctctgggaccctgcccctcatgccagaagcatcttgtgttgtatatgtgtgcgcgcgtgtgccctgagacccaggacagaagccacggtcctaagagccggttttatcctcgtcattctgcgtgtcctcccccacgccacctgtgtcggggctcag

SEQ ID NO: 5053 - DNA, 283 bp, Homo sapien
caactgcttgcaattagatcctaaggcaataaaagaataaggagatttggaaaaccattgtctgtaatctctgaagaaaagtggacattaggggagtcagttgaaaagcaaagctatcaccattttctaaagaggaaaaaggtgaacctcacaaactatagaccaaaaaaataggacatcgagagaaagaatatgaagctagcataggttcacaaagaatgagtcaaatcaaacaacatgcattttttatttataaagcatgacttgttcattgtcaattcat

SEQ ID NO: 5054 - DNA, 419 bp, Homo sapien
catggtgtgccggcacctaggccgagattggaggtggacacaaaggaagaggcagccagacagctacttcagcgtcctcaacgcattcatcgacaggaaggacagttactactccattcaccagatagcgcaaatgggagttggcgaagcaagtccataggccagtggtacgggcccaacactgtcgcccaggtcctgaagaagcttgctgtcttcgatacgtggagctccttggcggtccacattgcaatggacaacactgttgtgatggaggaaatcagaaggttgtgcaggaccagcattccctgtgcaggcgccactgcgtttcctgcagattccgaacggcactgcaacggattccctgccggagctgaggtcacaacaggccgtcgcatggagaccctggtacttctcattcc

SEQ ID NO: 5055 - DNA, 266 bp, Homo sapien
gtgggaggggaataaagttctgttatagttccttgctcgagtttcataccagatgcgttggtccataaaggattgtatcaagtagatgggacaacattctgctctgaacgaaaagtaattttagagacataacctgcttaccaatgcctgtctttgattcatattctactttcaataaagcatgaaagtgaagaacttgaaaaaaaaaaaaaaaaaaaaaaaaaaaaaaaaaaaaaaaaaaaaaaaaaaaaaaaaaaaaaaaaaaa

SEQ ID NO: 5056 - DNA, 473 bp, Homo sapien
cattccaataggaaaggaaggaaaaggttaatttgtcatatactctgtgaagagtgtgggtaaatgagtagttgagtcataataaactctgttatctgtgcagattatcagtctttgagcctcatggctgctttcctgccttaccccacctgagcttgagggtagcatacttaggatttgtctatttgcagaattgttttgagagcctaaggccccataactgggaggctgtatgtgcttcatgtcagctccattagtgtctgttttatttagtgctgttttccattatctcgaacagagtcagtcatatagtaagtactcaataaatatgtcttgaatgaaaaaataatttgtattttccaaagccatatggaatgggttttgtcattcattattttggattctcagggtggtattcccctcacacactcctcactcccacccctgggataatcaagagtctaatattgact

SEQ ID NO: 5057 - DNA, 405 bp, Homo sapien
atagtgctgtggggagcacagtattacccagtgggtagggcttctgtcttccctgggagcagggatggtatcttagtcaatttttttcccttgagatgaggtctgtgcctgatgtacaacggatactccataaatgtttgacaaaccaacgaagaatgaaaaaaagcctagtcagactcccatccaaagtaggaactatctctttaacattcttgactcactatcactttacctcaaattgaacagattccatgacggaacttcattcttcacaaactagccagtgacatgtgggacagctctggccagggctctgggactgcagtgtacttgcgctctgcacggtccaggagctgtgatgtggctgtggtctaggggaatcctgcctgccccatggagttgcgc

SEQ ID NO: 5058 - DNA, 429 bp, Homo sapien
cccgcagcttcttcacaaaataattgatggcatttgtggtcgagcttatcctgtgtaccaagattatcacactgtttgggaatcagaagaatggatgcacgttttagaagatattgccaaatttttcaaagccatagttggtaaaaacttacctgatgaagagatatttcagcagttgaatcagttgaattcacttcatcaagaaactatcatgaaatgcgtgaaaagtaggaaagatgaaatcaaacaggctctgtcaagagaaatagttgctatttcctctgcacagctacaggattttgattggcaggtaaagcttgcactttccagtgacaagattgctgcattacgaatgccacttttaagcctgcatctagatgtaaaagaaaatggtgaagtaaaaccttattctattgaaatgagtagaga

SEQ ID NO: 5059 - DNA, 349 bp, Homo sapien
tggaccttccattgtcacacccactatcctcacagcaggaaggggtgtttagagtctagtttttaacaatatttttgcctctcctaatgttttcttcagtcgtttaaaattaagagaaaaataaaaagaaaaaccccctcccccagtctgtaaagtgcctcgtggtgggtgagttaaggtgcatcgtgtgtttgtaacaagtgctggggaccccgcccctgcctcttcctgtgctctctgcggggagcctgcaggctgggaccctcggtctaggccgctgtggctgccctggcctacagcccaggggctgggggtccgggctggtcagtagtcatccacgctctcgatc

SEQ ID NO: 5060 - DNA, 493 bp, Homo sapien
aaaatgtaacaattccctcacctgtgactggtacctgacagccaccacaccggggcagcaatggctaacggttgacaaagacaatttctttctctctccaaaaccaaacagccttcatcaactccctagccaagactccctatcaggcccttacaggtgccgctctggctggcagttacccaatttgggaaaacgaaaataccctatcatggctacctaccttcacctacaacttctgcctgtccacccccagtctcttctttttgtgtgatacaaactgatatctttgcctaccagccaactggtcaggaacttgcaccctggtctttcaggctccaaccatcaacatcctaccccctaaccaaactattctaatttctgtagaagcctctatctcctcttcacccataagaaataaatgggctctacatctcatcaccctgctaacaggattaggcatcactgctgcacttggcactggaatagcaggcat

SEQ ID NO: 5061 - DNA, 447 bp, Homo sapien
tcaaggaacccaagagagtggaagaactgcaaaacaagattgtaaattgtctcaaagaccacgtgactttcaacaatggggggttgaaccgccccaattatttgtccaaactgttggggaagctcccagaacttcgtaccctttgcacacaggggctacagcgcattttctacctgaaattggaagacttggtgccaccgccagcaataattgacaaacttttcctggacactttacctttctaagacctcctcccaagcacttcaaaggaactggaatgataatggaaactgtcaagagggggcaagtcacatgggcagagatagccgtgtgagcagtctcagctcaagctgccccccatttctgtaaccctcctagcccccttgatccctaaagaaaacaaacaaacaaacaaaaactgttgctatttcctaacctgcaggcaga

SEQ ID NO: 5062 - DNA, 398 bp, Homo sapien
ggtgggagctgagctgaaagatagatatgtgggagtcatcagaatagactagtagacgacaatgcccagggcagggcgtagagtcagggtgtggaacgaaggaaatcctcgttttcgagtttcaccccctcagggaggcccagcccaagccctgcccggcccgaccccacctcgcccacacgggcttgatcccgcacaaggggctgcgcgtggcagacaacggttcttccggcgcccggctcactgggcacgctgggaacggaagcccgctccgaacgccgagcacttcgggagctgtagtttggggcaggctcagctgggcgggtcgagggctccctgcgagtcccggcgttggatcatttgaaggacaggtccagaaagcggtgatgctcccgggg

SEQ ID NO: 5063 - DNA, 432 bp, Homo sapien
aatcctgtctttcccatcttcgatgttgctaatattaaggcttcagggctacttttatcaacatgcctgtcttcaagatcccagtttatgttctgtgtccttcctcatgatttccaaccttaatactattagtaaccacaagttcaagggtcaaagggacctctgtgccttcttctttgttttgtgataaacataacttgccaacagtctctatgcttatttacatcttctactgttcaaactaagagatttttaaattctgaaaaactgcttacaattcatgttttctagccactccacaaaccactaaaattttagttttagcctatcactcatgtcaatcatatctatgagacaaatgtctccgatgctcttctgcgtaaattaaattgtgtactgaaggggaaagtttgatcataccaaacatttcct

SEQ ID NO: 5064 - DNA, 433 bp, Homo sapien
  misc_feature (1)...(433): n = A,T,C or G
ngggccgtcctggagccagtgctcgagcgccatctgtgcgcacctcagcctcagcctggctgactcgggccacctgccggacgtgcatgggttcaacagctacggtagccaccgaaccctgcagagactcagcagcggttttgatgacattgacctgccctcagcagtcaagtacctcatggcttcagaccccaacctgcaggtgctgggagcggcctacatccagcacaagtgctacagcgatgcagccgccaagaagcaggcccgcagccttcaggccgtgcctaggctggtgaagctcttcaaccacgccaaccaggaagtgcagcgccatgccacaggtgccatgcgcaacctcatctacgacaacgctgacaacaagctggccctggtggaggagaacgggatcttcgagctgctgcggacactgcgg

SEQ ID NO: 5065 - DNA, 308 bp, Homo sapien
taagcctcgagtttatggtgttttgtgatagcaggctgcatagattaacacagggaccttggacaaagcagagtggtctttccaactatggatacgattgtgtccctccccagctcacacaccctccttggctccccaatgccctcagtgtggagctcatactcctcaggtcagcattcagggcagtcagcccctgcgtttacttcgtggctcaccttagcattgcctcagctcactgagctagactctgcacaaacacgaggcaccgagacatggacgccatctcagagcagaccagggcccctggg

SEQ ID NO: 5066 - DNA, 428 bp, Homo sapien
  misc_feature (1)...(428): n = A,T,C or G
cgtctgttcctcgcgctggcggggtcagcagacgtctggccgcagtgaggtccactgttctctgcagggctgtgggctgcatactggccgagctgctggcgcacaggcctcttctccccggcacttccgagatccaccagatcgacttgatcgtgcagctgctgggcacgcccangtgagaacatctggccggtgggcgtcctgggcagacccgcagcccccgcccgtgcccacgccctctgcgcccgcagcccccgcccgtgcccacgccctctgcgcctcagctcctgcctcccatagggcttttccaagctgccactggtcggccagtacagcctccggaagcagccctacaacaacctgaagcacaagttcccatggctgtcggaggccgggctgcgctgctgcacttcctgttcatgtacgac

SEQ ID NO: 5067 - DNA, 598 bp, Homo sapien
gaattcggccgagggagatcatcctgatgttcacagatacagtgtggagactgtacagtggtatcctcatgacactggcatgttcacatcaagctcatttgataaaactctgaaagtatgggatacaaatacattacaaactgcagatgtatttaattttgaggaaacagtttatagtcatcatatgtctccagtctccaccaagcactgtttggtagcagttggtactagaggacccaaagtacaactttgtgacttgaagtctggatcctgttctcacattctacagggtcacagacaagaaatattagcagtttcctggtctccacgttatgactatatcttggcaacagcaagtgctgacagtagagtaaaattatgggatgtgagaagagcatcaggatgtttgattactcttgatcaacataatgggaaaaagtcaccagctgttgaatcagcaaacactgctcataatgggaaagttaatggcctaatgtttacaagtgatggacttcacctcctcaactgtggtacagataatcgaatgaggctctgggatagttccaatgggggaaacacacttgtggaccatggaaaa

SEQ ID NO: 5068 - DNA, 393 bp, Homo sapien
ggcggagctgggggctcaggggccaggacccctccactgtcccggagaaagctgtagacatgcggctgcggatggagttgggtgctccagaagagatggggcaggtgcccacttgactctcgccccagctccccagccctctacttcacccacgatgccagcctggttcacaaatctccagaccccttcggagcagtagcagctcagaagttcagcctggcccactccatgttggccatcagtggtcacctagacagcgacgatgatagtggctccggaagcctggttggcattgacaacaaaatcgagcaagccatggacttggtgaagtcccacctcatgtttgcggtccgggaggaggtggaggtgctgaaggagcagatccgggaactg

SEQ ID NO: 5069 - DNA, 416 bp, Homo sapien
taacttatttaagctgaactggtgatatctattataagcagaagtagtcttttcttggtaaataatccagttagcaaacctgaatagtatttatgtcttatgaatcctgccagttgtttcccaagttatggtaaagtaacatagattagatatcaaaaggactagaccagaatcagttgttttcttcttttcctgtagagtacctaacagaaatagtgagaatatatggcaacaagattagacacaaatgtgtggaagtctcccagaaaaatggtagcaccagatcagcaccaggaggccagtgttgagtaatagaaccagaaggccaacatccagacaggcagattagtctgaggctattttaagtgctagaaggtgtgacttcctttcatcttcctggttctatcttaagtgac

SEQ ID NO: 5070 - DNA, 366 bp, Homo sapien
ttgaacaacttgaacaatcacgacaggaaacatgcagttggggatgatgctcagttcgagatggacatctgactctcctgcaaggattagaagaaaagcagcaacactgatacttgtgtgcacctgatttggccaataggatcaacagtgaaaagacagaagaggcaataccagcagtccccattacagtctccacctccccgtcttcctctgggtgccaaatgatgggaagatgagcttcatctgaccatttcttctccctgtctcctgttccccttcccagttaaacaggttagattgaaggcccttgctgtatttctgtagagctaagcagcccttagaggaaaacagttcaactctgacttt

SEQ ID NO: 5071 - DNA, 303 bp, Homo sapien
gcatgttcaattaatgctgtagctatcatagctttgctcttacctgaagccttgtccccaccacacaggacagccttcctcctgaagagaatgtctttgtgtgtccgaagttgagatggcctgccctactgccaaagaggtgacaggaaggctgggagcagctttgttaaattgtgttcagttctgttacacagtgcattgccctttgttgggggtatgcatgtatgaacacacatgcttgtcggaacgctttctcggcgtttgtcccttggctctcatctcccccattcctgtgcctacttt

SEQ ID NO: 5072 - DNA, 455 bp, Homo sapien
agaatatttaagaaagagttaaatatgaaatagaaaccaattccttaagagaacacgcgctgaaaatatagccatcaaaatccacatacttgtgtctcaaattggcagcttcccttttctcttcagctatagctctttctgcagcacgagctttgagctattgaagaaaaatatccaaattcagttgtgggagactatgcacaaaataagggaaagaaaaaaagagatcttacccagttttcatgagctttcttctcatgggtagcgatctgaaaaagataatacatcacaaaatatgcatacagattcattataatagcctctattagttatcaaagaattccgggcactatatagtagggcactagaattattacctggtttttaaatgaccgctctgtcttctgtaattcatcctccatttcttcaattctccgcctaagaattacacttgg

SEQ ID NO: 5073 - DNA, 437 bp, Homo sapien
tcataaaaaaatatttattagtttgaacatcgatttaaaaaaaaatcagtcacataaaaaaaacccttcatgacatgtcttttccctccacgcctcctgagatggacgtgctcacctgggcctcggaaatcccacactcttcagtcggcaaactgcgaacaagaacaggaaatctgccacgcagcaaacacttggggaggtcagtgggacactgttggttttagggaagaaaatgcccctgtagctccggcggggaaccccaaaacggtcagcaaaggcaggccacacggagtgagccggccagatggagcaggacatcctgagtgtggagggggaggcgggcctgggtcctgggcagggtggcctgagagcagggactggtacaaaacccagagacattggtgggtagcaaaggtctggtttccaaatgcattttg

SEQ ID NO: 5074 - DNA, 422 bp, Homo sapien
atccacgacgagctgagccgcgccgcccgcgcctccggacgggccccgccacgccgccggcccgccaacgcgggacccgcagccggcccgcgtcgtcctgtcaacctcgactcagcgctggccgcgctgcgcaaggagatgttgtctgcaggtggggctgcggcagttggacatgtccttgttgtgccagctgtggggcctgtacgagtcaatccaggactacaaacacctgtgccaagacctgagcttctgccaggacctgtcatcctccctccattcggacagctcctacccaccggatgcgggcctgtctgacgacgaggagcctcccgatgccagcctgcctcctgacccgccaccccttactgtgccccagacgcacaatgcccgtgaccagtggctgcaggatgcttccacatcag

SEQ ID NO: 5075 - DNA, 133 bp, Homo sapien
cgcttccaccacagcccaggctctgccgcacggagtcgcccttcatgcctgtcctgcggtcccagccgctgctcaggccatccaggccactgctgctcacacccgacctcccacacgtacccgccgtcccatc

SEQ ID NO: 5076 - DNA, 393 bp, Homo sapien
tcgtatggctaatggtgacacactttattaatttaaaaacacgcccttcccacatagtgcgtgaggcatgtgcacattttcctagaaggacatgaatagtgatgtggaggtacggtggaggtcaggcatctacagggtcattcgaggaggaacagattcaagctttcggacgatcagtgttttgtaaatagcagcatcatcagatctaagacaacattggacctggcagggccttttctttgggtggcattaattactccagattcagaccaggccatcctctcccggcccaggatctgcctctccctcctctgtccccacacctagacatgaaagccataacccttgggcccctcagagggaaaacacaaggggtgcgaggggtgggggggc

SEQ ID NO: 5077 - DNA, 442 bp, Homo sapien
gcggccgcaaggaggccaactactacggctcgctgactcaggcgggcaccgtgagcctgggcctggacgccgagggcaggaggtgttcgtacccttcagcgcggtgctgcccatggtggcgcccaacgacctcgtgttcgatggctgggacatctcgtcgctgaacctggccgaggcgatgcggcgcgcgaaggtgctggactgggggctgcaggagcaactgtggccgcacatggaggccctgcggccccggccttctgtttacatccccgaattcatcgcggccaaccagagcgcgcccggagcaacctcatcccaggctcgcgtgcgcacgagctggagcagatccgcagggacatccgagacttccggtctagcgcggggctggacaaagtcatagtgctgtggacggcgaacacggagcgcttctgtgaggtgattc

SEQ ID NO: 5078 - DNA, 407 bp, Homo sapien
aatgtcctgcttttttatttatttatttatttatttatttatttatttattttgtaatcaactgaaagaaggcagaaggagtcgatgggcctcttaggccggaaaccttacaagcataggaccaaggcagaaaaggtccagagggttcatggtcctccgttccacctgaatccagctagagagcgagccagggggataggtgtgcccctcgtcgcccgtgcgctgaggcactgtcacgcaaagagacattcaccttccacgtcaacgcacctttaagggcgagacggtccgccgtgcccaagaggaacgggatgacattcaactgggacttgcctcaccttggcttgggggacctcgagagcggtcccgtgggggcggtgttactcgtggtggtagaagtggagggc

SEQ ID NO: 5079 - DNA, 401 bp, Homo sapien
agtcccagagccagtgtttattagcaagatggaacccaaaggcggctgtggcctgggcagcagaaggccaccaggagcccccacccatctacccaactgccccccagagctaattacatccacacccatcccctgaagtggtggacataagggagccctggggagcctctaccggccccaggcctctaccacggaccccctcccctcagagctggggcctcccgtcagctctgcctgggcctggccctctgctatgctcccagcctctgagtcaaagtggcacagggaaagctaaggaggtagagtggggtggccctgcctggccaggcggggaggggagaaggggctgaaggggctgtcccacccaggcaggatgctcttctcctatccccaataaatag

SEQ ID NO: 5080 - DNA, 420 bp, Homo sapien
tgactgaaggaacccatcacatcaggtttttttattttttaagggaaaagaatctttttaagacaatagacttaaaaacataaatgaaaatttactttcttctggtcctttctctggaagtaaattaaattttgttgtcagatgcaattctcttcagtaatagccttcaggttcagattgtgagcatgaaaagatttctttactgagtgatttaaccagagtaatctgtaccgagaagtaaatagtcacagcccaaggtgtgaaacaatgtcgtgtcctgctcataatggtctcatgggatacttttattgtgctgttaaggcctaaaagaaccaaaaatcatttcttaggaagttctccctccaggtatttcctaacccccagacttccacacagcatataatacactgcagtggactt

SEQ ID NO: 5081 - DNA, 124 bp, Homo sapien
ggtctcacagtacggttgccgtcactgccgcggactgcagccactgtgcgcctaggagcatcagctgccggcggtgctaccctgtccggtggctgcgctgtctactgccacggtcacgaatctg

SEQ ID NO: 5082 - DNA, 407 bp, Homo sapien
catcttttaaattttatttagcaaagttaaacatacatatattttaaaagagaaaaagaggaactcacccaaccctcatatccaagagcttaaaatcacaggaactcaagacccatcctcaacttcaaatgccagtcattattttagaggtaactcagatttctaagtaatgcttctgtttctcgatttatcaaatagacattatgtattttgttttcctacatgagaattgagtagttaacagaatacccatctcttatcagtaacaaagatttacaaaataacttttgtttttcataattacaaaagcaatacattattattgaagaacatgttttaaaaaaagacaaaaagtaacaaaactctccattatcccaacaggcagaggaagttattaccattttaat

SEQ ID NO: 5083 - DNA, 404 bp, Homo sapien
gggtttgcacagtttattaagataatcaatcaatttcttaagttattcctttgttaaccagacagcatctctggagagaaaatgcactctctgtgtagatacataaaaatacatcagtcattttgcccctcctggatgtgaacggaatctcccctcctcacctccacagagggagctcaagccccagggaaccttcccctccccttttatgcattaccaggggagtggcaggggcagcccccaactgtggagtgcattcaggtctgaggggggaggaaggctcagaggggcatctccccagcaccctgccacagtgctggcttctggggtgtttgttcagcggcctgctgggctgccccaggctgggggctcccccagctccccgtgcatcctggcttgttcca

SEQ ID NO: 5084 - DNA, 413 bp, Homo sapien
ttttttttaactgatgaattctggtgatattttatttagaaaaagataatcactgattttaagatcttaatttttctttcttgtaaatgctacactaattagacgtaagatagtattagataataaaagtatttacacattgaatacaaaataaatataaagtaactgaaaaacaaatcaggtttccattgacttattttgttttcccactgtccatcctctgtttcatttttctttgccttttgtaaatccgtttctttcttgctttcaaatcaacttttggctctggttttacccactgtatttctattggtttctcctcagctggtgttacaaaaacatctgcagtgggatcatgtggaagaagagtcttcggctctttctttctcagtttttgcacatctttcacttgc

SEQ ID NO: 5085 - DNA, 430 bp, Homo sapien
agatttttaaaaattttatttttaaaaacttttcattgtaaataactttcatgaaaaaggttaaattgccccacggggacagaagggtggatgtgggacgcagcccagggagtccgggtggagcaaagcacgccccacgcccccgaggagtgcaggcaggggcgtggggtaccccgcttcttggtcccagtagttccagcaagctcggcatccctcccagttaagcctcagctacagctacactcactacattagtctgtctgtcctgccccatacagcttggctgccccggcccccaaaccaccaaacccaaacttccagctgctctcagcctcaagtcgggcttaaagattagggatttacgtcccctccccgccccctagtggatggggccaggcaaagaccccagaggccttagagaggatctcct

SEQ ID NO: 5086 - DNA, 439 bp, Homo sapien
tctcttttgagacagagtctcactctctcacacaggctggagtgcagtggcacaatcttggctcactgcagcctcagcctcctgggttcaagcaattctcgtgcctcagcctcccaagtagctgggattacaggcacgtgccaccatgcccggctaatttttgatagagacggggtttcaccatgttggccaggctggtcttgaactcctgaccttaagtgatccgcccgcctcagcctcccaaagtgttgggattacaggcgtgacacacgcgcctggcctgaaggttacttttcttttcagtggtttggggcagggagttacacagcttaatagattaagaagaataaaatgctgaatgctatcatttctttctaacatatttagcattaataaaaagtgagtatttctgaggtcatcacaactgcctcccctcgtg

SEQ ID NO: 5087 - DNA, 264 bp, Homo sapien
acgttaaaattaatctctttactgatataattaaattttaaatcctgagaagaaaagagagaagggagaatggtgccgggtgtctagcacccccagccactggcccagcacaggccatggcatctgtgcatccagacacggggcgtggcatgcacaccccaccagggagacccaggccagtgttcccaaagcctgctcacggcaccttctactgcaggacagcagaggggccaacagccagcctgcaggagggaggacttctgg

SEQ ID NO: 5088 - DNA, 441 bp, Homo sapien
tattatttaagctcttgggtttttaattatataggccaatacatcccatttagaatcagttttaattatattttgttacctgcacccaagagtcctgatagtttcttttctctgtgaggcccttatccatcctttcccctttccacaattgtccctgcctcctctatgctttctgtgatctgtttttgtactattattgtatgcaccatagtatagcctacatcactggtaaatgtctgtactatatacaatatactaaagtggggctccatttgatttatgtttatgaccgtcacagcatttttcagtagtagctctgcatgatttgcactgtattactgagtctccctgaccactggatggtaagctacactccatgagggaagggaccatgtctattcctggtcacaactgatccctagcatctagcacagtacctgg

SEQ ID NO: 5089 - DNA, 168 bp, Homo sapien
  misc_feature (1)...(168): n = A,T,C or G
atgtntttaattggcttaatacaaagggtccccaggaggccctgggaggagggggacagcctgggagaggcagagattcatggccagcagccacccccacctgccacccactccccaacaatggtcccagactctttcaataatcctaaaaaaaccgacgagagcgca

SEQ ID NO: 5090 - DNA, 786 bp, Homo sapien
  misc_feature (1)...(786): n = A,T,C or G
ctctgactcatttattccagtgtatccaacccagacaggaagagagtcagccaccccctcctagaaggaagtgggctgtctcatgctcaggtagaagtcaggcgggcaggaaggagcaatcacttttattttttcagttatattaccaggttatgtatttgagatatgatttctcaaaagggaagtaactcaggcagaatccatgcttttaacaatgggtccttggtctagaaggatctgcgtggggtttaagccctcctgtgactctctgatgagaaggcaggcaggcaggcatgtcacagaggaaaaggcagataagaacaacgtcatgggtcatgggaggagactcgacttcctatgccacatgcgcagaggcatgactagggnccccgcacgactagaactgtttattcatactagcatggctcaacaaggcagaagctgatagtacctgcacacattgcacatttttctcccagctagttcaactcacaggcatttgacacgatttggaagcancatcccctgatgaaaagttttagaagtagtcatatctanggaaggctcaacgagaaaaaaaggtgatgcacagtgagttgtggctgctcgggcatcatggcgcgtgacgtgctagagcatgtcactgtatggcgacagcgagtcacatcgtccgactacgtcggaggaatagtagctcaacgatgcctgttctcgagtctaggtcaaatgtcttgagtgtgctaggcgcagttcaattagtcctggtggctcagttcagtatcatta

SEQ ID NO: 5091 - DNA, 251 bp, Homo sapien
ttaactcaagagaaatcagtgtaatcaccacgaaattgtgtcggaaacaaatttagcaaatgtggtcccgtttagggtgtgacgcagcctgttctcatggctcagtccccttcagcttttttccggcacaatcagcccatcctcaattaccctcattaggcctccaagggctccagccgatcagcctggaagctaagccatctctgagccgcaatcagcgctcgctgtgcgatgtatcgggcgcaattaca

SEQ ID NO: 5092 - DNA, 233 bp, Homo sapien
ccatcactgagagcagcagcctcctcctgtcgcagctcaccagcctggacccccatggtccccccggaggcatccccctcacatcctggatcaagtgaaaagcctcaaccagtccctccgcctcgagacctcttgtgcgcagccgaaaccctgactttctcctccacatcatccagcggcaggcctcctcgcagtccatgccctggctggcggacctggtacagtccagcgag

SEQ ID NO: 5093 - DNA, 127 bp, Homo sapien
  misc_feature (1)...(127): n = A,T,C or G
ctacgatggctatgtggctgagtgaagagtatgcaatgacngatgttangtctgtgtgtagtaagcatgatgaggtagttataatagtcatcagtaggataggtctatgtagtgtgtaggctatgtg

SEQ ID NO: 5094 - DNA, 155 bp, Homo sapien
  misc_feature (1)...(155): n = A,T,C or G
ctattgacttgggttaactgtgtgactgtggtggcttgcacgaaagtgacgagccgtgtggttagtagagcttaggtagactgtcgntgtantgctaaatggtaancacnntgctgttccggtgggggtgttgctaggcgtagcggttntgagct

SEQ ID NO: 5095 - DNA, 121 bp, Homo sapien
acttaaatagattcaatagaaagaacaaacacacacaaacacaaacacgtcttaaaataaactctttagagactaagtgcgtgtttcttttccacagtacggtgcagagaggggagggcag

SEQ ID NO: 5096 - DNA, 121 bp, Homo sapien
gtgagggtgagtgttgctgaggacactgagtgagggtgggacaggtgaaactggagagcctagagactagagaacaagtaagggccaggcagagtcggcttaatggacaacacccagtgcc

SEQ ID NO: 5097 - DNA, 148 bp, Homo sapien
gaaccaattttttttttacttagatagattcaataaaaagaacaaacacacacaaacacaaacacgtcttaaaataaactctttagagactaagtgcgtgtttcttttccacagtacggtgcagagaggggagggcagggggcggggg

SEQ ID NO: 5098 - DNA, 244 bp, Homo sapien
ccacaggcccagcgcgctgtccccactgccccctcaggccgaccttgatgggcctccgggagctggcaagcagggcatcgcgcagccgctgtcgggtccgtgccggcgaggatggctccggggcgccgcgcctcgccgccgcctgcagcagcgacgcgggtcccaaccagaaacccgcacaggcgacgacgacccgcaccggcttctgcagcagctagtgctctctggaaacctcatcaaggag

SEQ ID NO: 5099 - DNA, 361 bp, Homo sapien
atgttccccaggctggtcttggactcctggcctcaagtgatcctctatctcagcctcccaaagtgctggaattacaggcatgagctatgatgcctggctgcaaattcagtttgatcccaatgcagtgtgttggggaacagaagactcagaggactaatgaggagtccagtatgtaggatattggacccccaggccctttatggcgaccattccatgtgtgcataaaatgacaacttaccatgttgaaatgttttaccgttactgccaagtgaagtcttcacttttcaagatctcgagggaaagggaccggatgtatttatgtagcagggagttctgggaagcattggtcctgggagctatg

SEQ ID NO: 5100 - DNA, 461 bp, Homo sapien
catcgcatacttgccatttttattggtccaaagagcaaccacaatgagcaactcagaacctacgatgataaataacagtagcagaaaaccaggctaaggtggtaactaaaaccgcccaagcagccaattttattgatagtacattacaaacaatctaacacaatgatgtttttacagaaagccagtatctgaacaaccttccatcgttcaaattgtattttgtaagattaaaaggcttttagtttctaacctattatttacatcaaaaagctttcaaaaagttagagcataactgttaagacataggattttgttcattttctcagtggagagtacagagtacagctgacattctagtgggtctatggaagtacagtaatcctgcaaacatttaaactccaattcacaaacatgaatcaccggaaatcctttgatagtcatacccaacaatacaggtagtc

SEQ ID NO: 5101 - DNA, 519 bp, Homo sapien
gtataacatattcttatacaattaagtctatttgagatgacactagtacaaaaacatttcaatagtataaccaatatttcaactgtactcaagaacacatacgccctgtgacaggcatgtcactgtgacaaaattagtacaccatagcagcaaccttggaatttgcattttttaggtttcacaagaaaaggacttgacctctatgactctgtggtggggatgaaggagaaaattgaggaagcccctactgatttttccctgataaaggagagattgtccttcctgggaaaggacatcatggttagcctcatattagagaaaaaaattggaatctgtggcaaatctaataatgatatgtcctcaaatcgcatttcatccaaaagtcaaggcaattgatgaaacacagtcagattgtaacaccctggtcttttgctaacattcacacaactcctactggaatagtggaaacaactagaatttaatgaccaacccccacctgttccagcaatcattgacact

SEQ ID NO: 5102 - DNA, 136 bp, Homo sapien
ttccgtaaatttgttcggggatggttcctttgaccaaaatgtcttgttcccccagggggcacccgattgggtctaaaggccaaatgaggggttaaaaggttttcgggcccaacccggaaatgcccctctggccaaa

SEQ ID NO: 5103 - DNA, 611 bp, Homo sapien
catatgaaattctaataaatccattttatttgtggcaccacaatattatcattaagctctctttttacacagtctgcaatttgtatcagctgccccagtgtgactctgcccttattttaggaacaaccttttgctgggtggcgtcctagaaggtctgggcctgggcagcagcgactgggaagcccacctgtgctttcccccatctgggtggggcggcacagagaccctgagaatcagcggttatgggagctgtgtgttagctgtgtgttattggctttggcttcagcatgtcctgcctaggagtctccagcagctgtggtttccttggactggaggctttttctcctgatgacaatcgtgacaggtccatcaggcagtgcgttgatgatgttccaggcttcaaaccgtgtgaggccctgcatggcagtgccacccagctgcaagatttcatctccaggctggactgtctcactttgttctgaggctgctcctttgaaaatcctgttaatggtgagaagcttgtctccgtgtagggagcccttccctccttccaggctgtagcccagccctgccgacatcttctccatggtcaccgtgaagactgtggcctc

SEQ ID NO: 5104 - DNA, 352 bp, Homo sapien
actttttaaaagttgtatatacttttatttattttacaaaaggaaaaaaaaagacatactttacccatagaattccaggtcgtactatgtagaataaccatgcactacttcatgttataatcataattttagactatttccagtaggtaagtgtcataaaggaggaagagatatggcttccacagcttcaatgaggtgtaaggctagaccatattgcccatgtttttctggtaaaagctcaattactttatttactagtttagctgttgttgcaattggcacttcagtgttttgaaggtcctgggggtccattgctttcagccaagtacacagtgtgggtggaagtctggca

SEQ ID NO: 5105 - DNA, 196 bp, Homo sapien
atgcttgaactttaggcatttattgaaaacttatacatgccatataaacaaactaaactcttttagctgctataccaagtttccataaaactgtctgctggttggggaggctacagctgaaccacattctttgccattgcctacaaggggtaagaaatggcacatggaaacatggcaggccgactcacgaacacag

SEQ ID NO: 5106 - DNA, 448 bp, Homo sapien
gtgcagtggtgcaatctgagctgactgcagcctcaacctcctggactcaagcaatcctcccaccacagcctcccgagtagctgggaccacaggtgcgcaccaccacacctagctaatttgtaaaaaatttgtagtgatggggtcttgctatatagcccaggctggtcccaaactcctgcctcagccattttttgtttttaatataagcaaattatctcctccatccctccctggggcaggagacagctaaggtggggaaggctccccagagggttgcagagcatggtgagggagaggcacctggagaaggcgcttcccagcctgggctgaaggcggttttttctctatcagctcaacccactcctaagaagcagattcccctcaggtgacagcagcgtgggtgggtggagcgaggacaccaggctcgtccctgcccggaagcaggcga

SEQ ID NO: 5107 - DNA, 245 bp, Homo sapien
tcaattaactgtattttgtttttctgaaatacatgcttgttgttttaaaaattagccttctcttgtcttatttttcaaaattttcctagcctcacctctttttgttttgtttttttcttttagatgaacgaactttctattcatcttattgattttctaaatatatcttgttgggattgtaattgagattgcatttgatttctaaaatatttcaggaagaaataataattatataatactgagtc

SEQ ID NO: 5108 - DNA, 274 bp, Homo sapien
tttgttttttttttttcatttttctaaacttttgtttatttttatagcaatcgtcatgtttagagaagtaaataacacatttaaaaaccttctcagggccaaaggatgccagagtatttacaaacacatggaggaagggcggcaagacatgaggggctggggctctggggctaggactctacccaggaccccgccccaggccctgagccaagcatggacgctgatgtcagccaccaggactgtcccactggccacagtgtgggctcagggaaca

SEQ ID NO: 5109 - DNA, 278 bp, Homo sapien
ctttctatgaatgggggccaaatcggtggagtgatttatatattactctgtccgatcttgatacataaatacccagccccatccctgccctagaaaagatagacgtatattaattcggaaaatagctctgttcacctgcccctgccacccacctggagctcctgccccacaaagctggcccctgctccggatgagcccctgctcccgatgagcccttgcccagcatcctggggcggggagggcatcagcttcttttggaagacaatctgggccctgtc

SEQ ID NO: 5110 - DNA, 202 bp, Homo sapien
gcagggatacccacttgtttattcagcacgtgttgactgaatgtgagctgtgtggcaggcccagctctaatcacgatgatactcgcagcgtcattatgcacttctcagattccgagcagcaacattcattcgtttctaaaaatcttgctgagcgaccatgacataccaggcagtccacagaatgcgaggcaggggtaagaga

SEQ ID NO: 5111 - DNA, 298 bp, Homo sapien
gtcgtacagccttcaccaccactctgagaagagagacagttgcatagagagcgcagggtaactcctattcaaccccaaaggtcccttcatggcaccgcatgtttgatattagcagcacctccaaagacacaagatggttttttaagtctggcagattgggctgcaccctgaaattatctactcatgttctcctcccccaatagtggatcaggagccagccctgaaaaggtaaagcaagtaactggcatcatcctccgtggttccggcgcaccggattcctggagaagcgtggattgtg

SEQ ID NO: 5112 - DNA, 299 bp, Homo sapien
ctgaaacagctgggacacatccgcgagtacgaacagcgcctgaaagtgctggagcgggaggtcacgagtgtagccgcgtcctggggtgggtggccgaggccctgagcgcatctgccttgctgcccccaggtgggccgccacccctgacctgcctgggtccaaagactgagccctgctggcggacttcaaggagaagccccacagggattttgctcctagagtaaggctcatctgggcctcggccccgcaccgtggtggccttgtccttgaggtgagccccatgtccatctgggccactg

SEQ ID NO: 5113 - DNA, 408 bp, Homo sapien
tcggcacaggcagacaccacgtgtgtcattgctggtcctgccatagctcccaggaccaatgcttcccagaactccctgctacataaatacatccggtccctttccctcgagatcttgaaaagtgaagacttcacttggcagtaacggtaaaacatttcaacatggtaagttgtcattttatgcacacatggaatggtggcccataaaggcgtgggggtccaatatcctacatactggactcctcattagtcctctgagtcttctgttccccaacacactgcattgggatcaaactgaatttgcagccaggcatcatagctcatgcctgtaattccagcactttgggaggctgagatagaggatcacttgaggccaggagtccaagaccagcctggggaacataacgag

SEQ ID NO: 5114 - DNA, 298 bp, Homo sapien
  misc_feature (1)...(298): n = A,T,C or G
agttttagtcggaaaaaggtgaagataatttatgctgagttatgttaagcagattattttgagaccttttgctggtagacaaaaactgaggaaatgtttcactanatatattatggtcaatgaaaaaaccagactttagagtaaatgtgataccaagtagatttgtgaactttatttctttagtaattatttttatcttatgtgaaatgattcaacctttaatttttgcctagattatagcaatgttttgttttaccttatagggcattttaatgcttggagaaagactataagtgaa

SEQ ID NO: 5115 - DNA, 301 bp, Homo sapien
attcaggatgacctggacttagcagatagcgggccaggcgggttggaattgacaccacctggtgtctcactaaccccaaaactgcgctcgacccggctgcgtccagggtctctagtccccccactagagactgagaagttgcctcgcaaacgagcaggggccccagttggtgggagtcctgggctggcaaagcggggccgcctacagcccccaagtcccctgtggcctgagggttcagtagaggagtctgaggctgaagcctcaggtgaggaggaggaaggggatgggacccacgccgacg

SEQ ID NO: 5116 - DNA, 444 bp, Homo sapien
gtaggaagtatatgggtagggtcagataatatttctgaaaggaaacacccaggagtatcccaagttaatgacattttagaccctccaacaaccacacaagtcagctccttggaaagactctggttacttttacaaagcaaaccaggagaattttcataatacctgataactatgtaagacttggaatatttgaatttctaggacatgggattgtgcaaccattcattttatcccataatattgaaatctccctcagataagcctctcggacctaatagagttttcttagtgaagggctacctttctgtgggtaacagggaagggcaaaataaacaaccaaataatatcataatcacgagtgtcaatgattgctggaacaggtgggggttggtcattaaattctagttgtttccactattccagtaggagttgtgtgaatgttag

SEQ ID NO: 5117 - DNA, 502 bp, Homo sapien
gcacagggctggctctgtgcaggctccaatctaggacacaattatctttaatctttgttggcctaaaaatcctctagcattgactaaccggttcaatcctcctccagcaagtatgtggactggacttgtgtgatttctggtcctgacttcctttggtttgctcaggttcacagagtgtttccaaatgggctggcctcccaggaagggactattcagaagggcaatgaggttctttccatcaacggcaagtctctcaaggggaccacgcaccatgatgccttggcatcctccgccaagctcgagagcccaggcaagctgtgattgtcacaaggaagctgactccagaggccatgccgacctcaactcctccactgactctgcagcctcagcctctgcagccagtgatgtttctgtagaatctacagaggccacagtctgcacggtgacactggagaagatgtcggcagggctgggcttcagcatggaaggagggaagggctcc

SEQ ID NO: 5118 - DNA, 300 bp, Homo sapien
cggcacgaggaataactcaccatggacgccaaggcagaaaccaagaactgtctgcaggcaaataagcacccagcacccatcctggctgccggtgccccgtaccctgtatttattcttttacaataacaaaagccatttatttattccatctagaaaggaaaccctgtttcagtcccctctctctggctgttctgttactttccttccacctgtgccctccctgggatatgtatgcctcgcccgccctccctgggcacatgtgacacgtgccagcacaagtatgttctgggtccttgcctg

SEQ ID NO: 5119 - DNA, 273 bp, Homo sapien
gtttctctgaagaccgtgaagccactttcactttttgacagtaagggaagaaatgcatttttcaaagacctaacttcaattcagttattacctagtggggaaatggatccagattttatttctgtacgacaacagttcttattgaaagttgtcagtgcagctgtccaggcccaacattcagccacaaaggtcaaagatcccacagaagaggccacacccacatccttttgggaaagaccaagattggccagctctagctgtggatttagccca

SEQ ID NO: 5120 - DNA, 303 bp, Homo sapien
caacagcttgtgcccgggcactctctgcctcatcctgctgccaggaaccaagagcactcatggttcactctctggtctaggactgatgggaataaaagaggaagaagaaagcgctggcccaggcctgtgttcgtgagtcggcctgccatgtttccatgtgccatttcttaccccttgtaggcaatggcaaagaatgtggtcaggctgtagctccccaaccagcagacagttttatggaaacttggtatagcagctaaaagagtttagtttgtttatatggcatgtataagttttcaataaatg

SEQ ID NO: 5121 - DNA, 134 bp, Homo sapien
aagtcaactcttctgggtcacagttacccagcaacaaaaataaagaatttccccatggactccagatcctttactactgaactcacagggctgtaacactgttactgtacagagaggaccaggacgatgccagc

SEQ ID NO: 5122 - DNA, 352 bp, Homo sapien
tgtcaataaattgttccttaaatatccccaattcacaaacaaaaccccacaagtagcaccgatttacaacaggatgtggcccagaaagcacgccaggggccaagagcgctccagcaggaagcttaataggtggtccatggagaaaaacacgatgggtgcatcacaaataggtgtaaacagtacacttttgtaatgtgtagacaccagtttctgcaacccccatgccacgcaaagtttcagggaaagtctttgaaagtacaatccggaaaactcagcaattcttaaaaaaaaatggctttccgctgttataagcctccttcctaagactcagggtccgcagcagaataccctg

SEQ ID NO: 5123 - DNA, 419 bp, Homo sapien
agctggtcaaagtacttttaatgcttattttacaaatatgtacctgtggtgctaatactaggcaaagaaacaggacgattcaagagcagcctatgtaactaccaactcaagcactaacactagctagatcaccttcatgctttaaaatttaaagttatggagtagctgtgcccaccccccccccaaaaaaaagctttaataaaggcactgcagcgttaactaagttttagggtaaatttaggcaattaacaattcgaagagacttgtggtttatgtattagtaattcaaattactgttttagagatctcaggtagttaaccaattcttgctcaaagcactaatgttcagtcctcaccatttatgctgggtatgagtcccaatgcatgggtattgcaacctattgtcaggccttaacatg

SEQ ID NO: 5124 - DNA, 394 bp, Homo sapien
gtagcaaaggaaggtctttattcaggaggcgggggctctgggctggcagtcggggatgcagggggaccctggcggtaggcacccagcaggatggcattgatgtgctccagggtcaggttgctgaagaccatgttgaaatgctgtatcccgtgcaggggcagcaagtgcacaggctgtggctggcggccctgccacaggccacagagctcggtgctgcgggtcgccaccgtgtcatcaccatcctcatagagcacacccacaggtgccgtgtaggggaagccgtggtcgtaaatgtaggtgcggggcgtgggcaggcccctggataagacagtatacttccacaccaagtgctgggagtcctgccggaggtaacgtgactgcagccacatgtacc

SEQ ID NO: 5125 - DNA, 100 bp, Homo sapien
gttttttcagcaaaatgaatggaaggtcctttacagcgtactcactccaccattgtacagatggcagcactgaggcccggagaggctctggaacttggga

SEQ ID NO: 5126 - DNA, 390 bp, Homo sapien
ttgttttgttttttgagacacagtcttgttctatctcacccaggctggagcgcagtggcgaatctcggttcactgcaacctccgcctcccgggtccaagcgattcttcatctcaaagaaaaaaaaaaaaaagatccttcactcaatcacacctgacgagtcccttctgccacgtgaggcagcgtggtcacaggttctggggattaggacacagctgtcttgggggctgttatcctgccacagctcccaatctggagagttcataagtgggatcctgcagaccacgccagcacagtgccagacacgatggcacagactactgtactgcctcctccatctgagggattctaaagaggaaggggagccgcccacagtctggagaaggggtggg

SEQ ID NO: 5127 - DNA, 406 bp, Homo sapien
gggagaagtgggggcctttattaaggtctggcagatgtggtggaggtggaagtacaaacccaggcctgggcctaggaaagggcagaagaaaggcaaagggtcccttggagcaggaacccatccctctctgcttatacccagcacccctcatcccaggttcctttcttcaacctccgcctgcctctgggaacacagagcaccaagaactgacaaaccgggaccctccagggccacagcgtggggcagagtccaggcttctgtctccccgcagtgggagatctggggagctcagtgaacctcctcaccctcctgccagtatgaagttgggaagcgccttctctgtcccccagaacgaacaaactcttgttctctgtggttggggaaaaggtgtggggggcttggacct

SEQ ID NO: 5128 - DNA, 124 bp, Homo sapien
gttgggtatggtgagggggggtcatattataagagcgatggttgaagctaaagtctgggcggtgatgtagagggtgatggtagatatggcgggttttaagggctctttgatgaaaaattttatg

SEQ ID NO: 5129 - DNA, 419 bp, Homo sapien
caaggaaaatatactatttaataatcttagagttcatttaatctcagcacaggggaagggtttcacaatgaagatgtgtagcaggcgttatcccattgttatcactgggcagaacaaagaccaatgagtagacactataagaaggcacattggctggtcacggtggctcacacctgtaatcccagcagtttgggaggctgaggtgggagttcgagaccagcctgtcgaacatggagaaacctcgtctctactaaaaatacaaaattagctgggtgtgttagcgcatgcctgtaatcccagctactcgggaggctgaggcaggagaatcacttgaacctgggaggcagtggctgcagtgagctgagatcgcgccattgcactccagcctgggcaacaagagtgaaactccatctcaaaaa

SEQ ID NO: 5130 - DNA, 389 bp, Homo sapien
aaatttttagtaatattttaattattatattttaattaaaaatttaggtatagaaagaaggttgtatagctttacattaaaaataaattagtatgtgacttggatacttgacaccaaatagcttgtgtcagattcaccctcccaccataaaaaactatacaatctggccaaaatatagaaaaaattcttggcaggtgtattagtctgttctcatgctgctaataaagacatacccaagactgggtaatttataaaagaaagaggtttagtgaactcacggttccacatggctggggagaactcacaatcatgatagaaggcaaaggaaaagcaaaggcacatcttacatggcagacaagagagagggcatgtgcaggggagctcccttt

SEQ ID NO: 5131 - DNA, 408 bp, Homo sapien
ttttttttacacatgaactaatgcaatgtttattaagcaggtactatgtgctcaatagtatgttgcagagcactgtgctgggaataacacattatgtgttattatttgttattatgtcctactaacaccttgaaagttcatactaagtgttcaataattctcaggatttagaatgtagtttagagaaatttttttgtgtttatgtttacttgtttatgacttgtagagcagctactggatctgcaggaacagaaaatctgctaaatggaacgtttctgtaagcactggttttactacaaaatttaaaaattaagatcttaaaatgtatagtttatttttcttatgtatctgcttttgggtttcaggatactgtgagcagcagctctagaaagtcagcaggatttaccc

SEQ ID NO: 5132 - DNA, 431 bp, Homo sapien
aaagcgtatcaaatatttatttatctgggcaacaaaggactatgatacattgacaggcatggaaactactgccagcacaactcaatacaatgcaactagaactgcttccaatatggccagtgaaaatacagaataccaggtggtcccaaatgtttgaagttctttgaacagaaagagagaggagagagagagagagaggaaaattccctaacccttggtttaaagacaatattcatttattgctcaaatgatgcttttaagggaggacagtggaataaaataaacttttttttttctccctacaatacatagaagggttatcaaaccactcaagtttcaaaatctttccagggtccaatatcactttttttctttcggttcaatgaaaagctaaatgtaataatactaattatagataaaattttatttta

SEQ ID NO: 5133 - DNA, 304 bp, Homo sapien
ccagggaaaaaaaaccccggggggggccaatgcccccgaaaacccccagttggcggattccatggggtttttaaccccgagaattgaacgcaaaaaggggggcaccatccccggaaccctgaaaggggccgggtccacccggaaaaggtttttgaaagggtcccccctttccaaagggaaaaaccggcggtttttttcccctcccccggtaataacccagcttggattggaaaaaaaggaccccccgggtgtccccatggaaccgggagtaaaaggggggggaaaaaaaaccccctcttgggaa

SEQ ID NO: 5134 - DNA, 444 bp, Homo sapien
taaccatataacaaacatttattaataagttttcagtatatgtatgatttctatttctttttttcttgagattgagtctgttgcccaggctggagtgaagtggtgcaatctcagctcagtgcaacctccagctcccagttacaagtgaatctcctgcctcagcctccaaacatgcaccacaatgcccaactatattttgtatttttagtagacgaggtttcaccacgttggccaggccagtcttgaactcctgacctcaggcaatccacctgccttgtcctcccaaagtattgggattacaggcatgagccactgggcctggctgtattttatttatatttctgtataatttttattatgatcataaaaataaccctgtagtcaataacaatttattgtacattttaaaataactaaaagtatataattacactgtttttaata

SEQ ID NO: 5135 - DNA, 425 bp, Homo sapien
tgtatagatgcagatttccattttcttcctgcctaactttttaaaatatatcttgtggtgtgactttccccgtttaaacccttcttcagacattaggaagtgggagagcagggatcaaaagacaccctgtttctcactgctcacccccctgttccccaaggacttcttcctcttggctgaggctgccacctcctggcttggaatttcacagcacagagcggactccccgagtactgcgggtttgtctcaccccagggctgtgctccttgcaggcaggaccagcccgacccaaatcacagcctcccccacctcacactgctaggcactaatcagaactcaatgtgtgcatattttaggtaatattaggcactatattaccgggggatttaattgacactttacttccctaagtgactgtaaatcca

SEQ ID NO: 5136 - DNA, 524 bp, Homo sapien
gctccacaagtcctgtggttcctgccagcctgcacggcctgctctctgctgccctgcaggcctgggcattgctgctcaccatctgccctagcacccaaatcagccacatccttgacaggcagctgccccggctgccccagctcttgtccagtgaaagtgtgaacctgcggatcgctgccggtgaaaccattgcactgctctttgagcttgcccgggaccttgaggaggagtttgtttacgaggacatggaggccctctgcagtgtcctgcgcactctggccactgacagtaacaagtaccgtgccaaggctgatcgtcggcgccacgctcgtactttccgcgccgtgctgcactccgtggagggcggtgaatgcgaagaagagatagtgcgcttcggctttgaggtgctctacatggacagctgggctcggcaccggatctacgctgccttcaaggaagtgctgggttcgggcatgcaccaccacctccagaacaatgagctactccgtgacatctttgggctg

SEQ ID NO: 5137 - DNA, 480 bp, Homo sapien
gtcttaaaaataaagactgaacctagatgttctgagcactagcaacaaggtattttaacaagtttaaaggaattctctgaaaaagttataaaattattctaggaaacataaccataatagtgttttaagggactttcacctggggattttatattcatgaacagagtgtattctgtatttaaaatgtctcatttgtgggaattggatgacatgttttttgataaatttattcacaatataaattgactttttattctaggaccatgtgaataatgggttccattgcacaaatacaaatattttaatagcttcttaggcagtggtgtagacatcttggatataaataattgtagatcttgtatatttgatttttaaaaaactagaataaacagagaggcataaacatatcttagagtccaagtggtagtgtttagcattggatataataaatggatgttttacaaagtgtttccataattc

SEQ ID NO: 5138 - DNA, 454 bp, Homo sapien
cagctgctgccaacgagagccgttgggcgtgttcccacctcatggacaatgcagactaggatgtttttagacccaaagacagagtgctgtttctatcccggtgctgtctctaatttgctatgtaactttggacaagtccccttccctctaggattcagggtcctgaagtagaaggtcaaagggccaccctgcctggggcctcagtttctgcatcagattcatagaaggcaccttacatgctatctccaactcctagctgatgcttaaacccctctaagacatctccaacaaacggtaaaccccatttctacttgagaactcccagtaacaggaagcttagacttaccaaggtgcccattgcttttctctagaatcagaatcgcaagtgcaattccaaactgtaatggtgtttttttgtttgattgtttgtttttgagatagagtctggctctgt

SEQ ID NO: 5139 - DNA, 527 bp, Homo sapien
  misc_feature (1)...(527): n = A,T,C or G
gtagccaggcctggctccctgtcccaccttgctccatatccacaggtgacaaccagggcatccccatcatgtccagcatcaagctgaaagaggagcagcgcataaccaccacctccccctggatgtttccctctcgcatggcgtggcctgaggaccacgtgttcatttccacacccagcttcaactacacaggccgtgacttccaacgcttctttgcagacctgcactttgaggaaggctggtacatgtggctgcagtcacgtgacctcctggcaggactcccagcacctggtgtggaagtatactgtctttacggcgtgggccatgccacngncgcacctacatctacgaccacggcttcccctacacggaccctgtgggtgtgctctatgaggatggtgatgacacggtggcgacccgaagcaccgagctctgtggcctgtggaggggcgccagccacagcctgtggacttgctgggccttgacgggatacagcatctcaaaatggtccttagcaaactgagcct

SEQ ID NO: 5140 - DNA, 141 bp, Homo sapien
attcggaacgaggaggagtccctggcttctcttagcctgagcctttctcccaagttccagagcctctccgggcctcagtgctgccatctgtacaatggtggagtgagtacgctgtaaaggaccttccattcattttgctga

SEQ ID NO: 5141 - DNA, 456 bp, Homo sapien
ctgaggtcttggtgaggccacagggccaggtccacgcaaggactgtccgtgtcctgtcctgtggtctctggccccacgtgacacccacacgtgtggtaggcagcctggcctgggttgtggctatggccaggcccccaagctgtccccgatgcccagggctggtgaccacccaggcaggtgggggccccacttggtaacagagtcatagggcagaacccacctgggctgccacagaaggtctggctgcccctgtgcccactgctccccaccatggccaatcagaagagtcaggggctcctggtctttccgggagggacgtggcccagccagctctaggtgttctgagcagctctgggacccagcgattgaggggtcaggctgggggtgtcagagccagggtcctccttaagtacctcccacactacacagacagtggcccttttgtgggcagcaaat

SEQ ID NO: 5142 - DNA, 124 bp, Homo sapien
gttaccaatctgaggcgggagaatcgcttggacccgggaggcggaggttgcagtgaaccgagattgcgccactgcctccagcctgggtgagatagaacaagactgtgtctcaaaaaacaaaaca

SEQ ID NO: 5143 - DNA, 456 bp, Homo sapien
agcgttacgtgtacaagtttgtgtgtgagcccgaggcctcttctctttggccttcccggacaatcagcgtccagctctcaaggctgagtttgaccggcctgtcagtgaggaggacacagtccctttgtcccacttggatgagagccccgcctacctcccagagctggctggccccgcccagccatttggccccaagggtggctactcttactagcccccagcggctgttccccctgccgcaggtgggtgctgccctgtgtacatataaatgaatctggtgttggggaaaccttcatctgaaacccacagatgtctctggggcagatccccactgtcctaccagttgccctagcccagactctgagctgctcaccggagtcattgggaaggaaaagtggagaaatggcaagtctagagtctcagaaactcccctggggggtttcacctggggccctg

SEQ ID NO: 5144 - DNA, 388 bp, Homo sapien
cccagctgcacacgacctgttccatgctgtcatgggccgtacactcagcatgaccctgaaacacctggattcttatctagctgactgctacgatgccattgctgtttttctctgtatccacattgttctccggttccgtaacattgcagcaaagagggatgttcctgccctggacaggtactgggaacaggtgcttgccttgctatggccacggtttgaactgatcctggagatgaatgttcagagcgtccgaagcactgacccccagcgcctaggggggttggatactcggccccactatatcacacgccgctatgcagagttctcctccgctcttgtcagtatcaaccagacaattcctaatgaacggaccatgcaattgctggga

SEQ ID NO: 5145 - DNA, 406 bp, Homo sapien
atagtggtgtggggagcacagtattacccagtgggtagggcttctgtcttccctgggagcagggatggtatcttagtcaatttttttcccttgagatgaggtctgtgcctgatgtacaacggatactccataaatgtttgacaaaccaacgaagaatgaaaaaaagcctagtcagactcccatccaaagtaggaactatctctttaacattcttgactcactatcactttacctcaaattgaacagattccatgacggaacttcattcttcacaaactagccagtgacatgtgggacagctctggccagggctctgggactgcagtgtacttgcgctctgcacggtccaggagctgtgatgtggctgtggtctaggggaatcctgcctgccccatggagttgcgca

SEQ ID NO: 5146 - DNA, 404 bp, Homo sapien
gtggttatatcattttaatgggtacataatccaatttcttttgtttgcacaaacagataatttaaattaatctagattatatcagtcttatatgatttaccaattcagacaattgggcatacttataacacattcacaaaaactaattggtactgtgtcttcatgaggggtaaaaaagaaaacaaaataggttgttgcttttaagactattcattgcatatgcaccatcttttttttcagtagtttttaacaggaaaagagtattagaagataagccagataagaacagtgaagaattattctataaaaatatgtttgaaaggttcttttcctttattaacatgcttgagctgacaaagtctttaaaactgaagcagccaggcatggtggcctgcgcctgtatt

SEQ ID NO: 5147 - DNA, 161 bp, Homo sapien
accggaggagccctcgtaagcagacaagagtgcgcgtcgagcttgcgcacgcgcagtagaagccgcacgctcttcggcaggctgcgcaaccgcagctggaggcctcgtgtgcccggggtggggcacgaaactgggcggactaggccccctcgcgcgctgac

SEQ ID NO: 5148 - DNA, 373 bp, Homo sapien
tcaaattcagagcatttttattaaaagaacaaaatattaaggcacaaaatacatcaatttttcaaatgaaaacccttcaaacggttatgtcctacattcaacgaaacttcttccaaattacggaataatttaactttttaaaatagaaaaatacaagttcttaaatgcctaaaatttctccccaaataaatgttttcttagttttaatgaagtctcttcatgcagtactgagctccaatattataatgtacacttccttaaaaatctagttttgccacttatatacattcaatatgtttaaccagtatattaaccagtatattaaccaatatgttaaacttcttttaagtataaggcttggtattttgtattg

SEQ ID NO: 5149 - DNA, 142 bp, Homo sapien
catttctcatttgtctgaatatcttttatcaagaagatgaaagataagtgttaccaaggatgtggagaaaagggaacccttgcacaccattggtaggaatgtaaattggtacagccattatggaaaacagtatagaggttcc

SEQ ID NO: 5150 - DNA, 116 bp, Homo sapien
ttttggcatttaaagtttaattactaactgtataatgcctgagaacaaaattcagagcaattctcaaaagggttaagagtcagactctgggcattttcgttttttagctgcaggtc

SEQ ID NO: 5151 - DNA, 468 bp, Homo sapien
ttgggattttcaaaagaactttttactaaaacatcatcagaaaacaaacaacaaatgaacaaagaaaagactaaaagcacgaaagccatcttcaaagcacggatacggagtcctgcggaatctccctgcctcaccatggttgtgggctggctcagcagtgcaccctggaacctggctgtcagacccccacctttgcaccccctgcccatctttgccacctcctttctggggagaaattcttgctacatgagagagaaatgatatgagacacatgggctggtgtcacagctggaaaagtgcaggccttgccctccagaggttgccaggtgcagagaaagaaaccagcagatctgtgattgctctccacttccagggagtatggtgggtagagaccgggatgtgggagggagacagagacacccacgacagcaccccagatctgccataattcagcagcacgactctggc

SEQ ID NO: 5152 - DNA, 308 bp, Homo sapien
gaggtacaccaacactggtagctgtttaatatattcatcttacaactggatgctaaaaatgcaatcactgtaattaataaagttgaggaaaacacaaagattagctaacaggggtaaaagatcatttagagtaaaataaatgtgtacattctctatgttctcaatcacctgggaaggcagtctatggaatatcaggaagtaagagttttcttgttttcaggaacatggaggtatatacacttcagaattcagaaggtaactggggctataaatagtaattaaaagaacaaaatagaagcaggggggtt

SEQ ID NO: 5153 - DNA, 114 bp, Homo sapien
agaacaccaggcggtaggcgtgtcgggcacacagcagtcaggcgagatcatgggagagacgaagtgagggtaggtagtcctgggcagagtggttgaatgtgagtgtctgagcgg

SEQ ID NO: 5154 - DNA, 465 bp, Homo sapien
ttttttttttttttttcagactttcaagtgtttattttcaaaacctcacttagagggtggtagtcacatagtcccaggcccgcctgcattccgggtagttgggtagagctcctttctgttccaagtgcttatttctccacatgcaagaagagaaaaggtcattaacccccagcctctgacagtttatcctcacataccctattgcccattttctagtcaataaattagtgtttcttttaacacctacacacttgtcggccttgtcccacagaggtgttttcaaagcctaaactttacagtgagtcatttcctgaacacttcaaaagcattttggtagatggactgcccttctttgtagctaagtgcattgcagcaaaatttaccaaaagtcaaattctgtagcatcctgttgacttgtattattgtcatatggatggtacagctccctggcaaaaacaggccact

SEQ ID NO: 5155 - DNA, 458 bp, Homo sapien
actgttctaatttactgtattttcacagcttgttgttatatctgttacaatacatctcacaccactgtatttttttcacaatttttttggctatgaattttaaaaatcaacttgtcaaagcccattcttaaacatcttgcagcctggtgcgtggctgatgcctgtaatcccagcactttgggagggtgaggtgggcagaacagcctggccaacatggcgaaacctcatctctactaaaaatacaaaaattagctgggcatggtggggcgcacctgtaatcccagctactcgggaggctgaggcaggagaatcacttgaacccgggaggcagaggttgcagtgacccgagatcacgccactgcactccagcattgttcttggtgctttgtgtgtattagctcatttaatcttcacaacaactctagaacccccattttacagttgatagaaacagggac

SEQ ID NO: 5156 - DNA, 276 bp, Homo sapien
tttttgttctccaaatatttattgaggtcttactatatacaagactatataacaagttatgcttgttatatatgttatatatgtgatgttatatatatatatgttatatatgtaatataactatattacaagttatgcttgaaataatgctgttaccaagataaagaagctccttcacccaaggaaccctggtgttaaaggcaaagattaaccaaataatcccacaagtaaactatcatggactatgtaaatgctgtgaaagaaatgtatgggaag

SEQ ID NO: 5157 - DNA, 274 bp, Homo sapien
ggtgccgcagctgctccaggcagattttacaggccaggaagtcgctgctcagggcctccaggagggagggcgaggacccgtgggaaaccatgctgaatggccaggaacttccttctagtcttctgaggccttggcccccttgctcttgagctaaggagctgccctcctccttcaacacctcctcctccacttccgtgtgtacatccagcaaacgtaaaaatgtcagtgctacttgttgggtcagacctgtgagaactgacaagaccaggagtcc

SEQ ID NO: 5158 - DNA, 203 bp, Homo sapien
tttctttccatagtgtgattgagcctaggcgtatacatttaagtatagcaggtgcaattacaagcaagtcctggctctgcaccctggactatcccacgcataggaggtacaaaataaattaaaccctttcatttaggcaaacaagcccaagatgaaggagcataaccctgcttgtgagtatccagtggcatcgagggtattat

SEQ ID NO: 5159 - DNA, 227 bp, Homo sapien
ttatgttcacttacatggaaaaaaaatccaattatacaacatgtagatatatgtttctcagaaaattcatctctatgaacctgtttgtttcagtcgcagttataattcaacaattgccaaatggaagtcataaaattgtggggtggaggttggggaggagagccgccaaggggaaggtagtaattatgtgctatttcttttctagtttcagattatttggagtttca

SEQ ID NO: 5160 - DNA, 388 bp, Homo sapien
gtgaataagtctcatgagatctgatggttttacaaaggggagctcccctgcacatgccctctctcttgtctgccatgtaagatgtgcctttgcttttcctttgccttctatcatgattgtgagttatccccagccatgtggaaccgtgagttcactaaacctctttcttttataaattacccagtcttgggtatgtctttattagcagcatgagaacagactaatacacctgccaagaattttttctatattttggccagattgtatagttttttatggtgggagggtgaatctgacacaagctatttggtgtcaagtatccaagtcacatactaatttatttttaatgtaaagctatacaaccttctttctatacctaaatttttaa

SEQ ID NO: 5161 - DNA, 450 bp, Homo sapien
cctcgtggacccaggtaaaagatgggaaatagcctagaatatcaactgtgatggtccctggtggggctaatggtggcaaacttttctgcttttttgtaaagaaataacacagggtcctaaaagcccgtgtatcctggaagcagagggtctgcgtcggaacagccgactctggaagggcgttggctatgtccctggacgtctcctgcagctcctcccatctcccctgagtctggcccagctggaaaggatgtgggggccacaggttaagtggcaccctggggcctgctgttcccagactgcctggctgtgctgggagttctgtcccgggagagacacagcttcgtctcggctgcggcgtggtccccaaggctctgttccctgtgtgcaaaggtggatatgtcttcctttagtctcctcatggccacaatttaatttttttgaaaagttttt

SEQ ID NO: 5162 - DNA, 141 bp, Homo sapien
atcatggaaactgaatttgctgaacaccagaactctgttaatatggtgttgtggaaaccatgacatgtgagttgtaggccgtctgtggatattaggccgactggtagactgggtagtaggtgcctgcctcagtgagctctt

SEQ ID NO: 5163 - DNA, 404 bp, Homo sapien
gagacctggactatcggggatgaccagggcacagacctgctgcaggtggcacccatgaatttggccacgtgctggggctgcagcacacaacagcagccaaggccctgatgtccgccttctacacctttcgctacccactgagtctcagcccagatgactgcaggggcgttcaacacctatatggccagccctggcccactgtcacctccaggaccccagccctgggcccccaggctgggatagacaccaatgagattgcaccgctggagccagacgccccgccagatgcctgtgaggcctcctttgacgcggtctccaccatccgaggcgagctctttttcttcaaagcgggctttgtgtggcgcctccgtgggggccagctgcagcccggctacccagcattg

SEQ ID NO: 5164 - DNA, 156 bp, Homo sapien
taaacaaaacaacaaatcaacaacagcaacaacaacaacaaaaattaaaaacttttttctaaaaaaaaagtgaaaataaaaaaaattatatgcgcttcatgggactgagtcaccaccttcccttacatacttcagttcagattgtagccatactta

SEQ ID NO: 5165 - DNA, 160 bp, Homo sapien
ggtatcaggagaaaccagcgataaccacctaagtcgctgatctatgcggcatccagtttgcagagtgaggtcgcatcaaaattcaatggcagtgcatctgggacatactgcactctctccatcagtagactgcagcgtgaagatttaggaacttgttact

SEQ ID NO: 5166 - DNA, 231 bp, Homo sapien
ttttttttttttctctgtccaaccatgagcatgaggggcttcttggtgtcatttccactccccttgccaatatttatttggaaacatttcaaactacagaaaagttatgcaaattacatcaggaacacacacatcccctgtgcggagatctgtgctttatgtctttgaaagtaagttgtcgagatcacagcactccacccctccacaccgaagcccgcagcttctcaggaa

SEQ ID NO: 5167 - DNA, 484 bp, Homo sapien
taagggagacatgactttattagaaaaataaaaaacaactgaggtgatgggttggtcttcagcggatgccttggtggatgaggctgcttttggctgcactggccttctcccgctcccgccgccgcgcagggtccaactcaaaacagcgccatagcctcagggtctcatctgctgctgcggatgccactgtggccccatctgggctcatggtcagactcaggacccgggatgtgtgacctttgagttcagccaccttggccatggttgggtacttccaaataactagctggttctgtgcaaagccatggcctgagatgagctccttgtaatggggagaccagaggatggagcacacctgggaatgggcatccacggcactcagacaggccccagagcacacattccagatgcgaatgtgtcgatcactggttgcccctcctgttggcaggacattggactgccagtgacaccatgctacggcctt

SEQ ID NO: 5168 - DNA, 393 bp, Homo sapien
ctatcccattttttcatttatttttatgaggagcctcaaaaaatagaagtggccttggtagggaaggaatgtcgtgattctgagtacagtatggcaaattcttttgcctcagtttccctaactccatccagtgcatatgaaaatgtctatgtgcgtacaaggtaggtctggactaagctctggccctccggttgttttcccattgcgggacctaagccagggtgcccaggactcctgtgtggctggtgggcctgatgccacagctgatgattcaggaaggaggggcctggagtctgctgcagactctcccgccccctacagcccaaaccgggcactgcagcaatgaggtggtcagtccagggagaggtccgacaagttctcggcacaatgctg

SEQ ID NO: 5169 - DNA, 330 bp, Homo sapien
attattttttaaaatcacaaataatttattcttccgttagagttgatacagttttaaatagcaacaaagtacacagtggtggaaaattggcacagaacctacaagcatttcaatcacaataaggctgtccatgatttatctgttcaaacttgatgtccattttctactgatcaagttgaaagaaaaaacctattctggccaggcacggtggctcacgcctgtaatcccagcccaattaaacatattctaagatgactcaaggttcaaagatgaacattaacaaaaaagtagtaaatactcatattattttataactttgtatataggtca

SEQ ID NO: 5170 - DNA, 396 bp, Homo sapien
caattcagtaaatctttattgagctcccacggggtgcgtgaatttaggatctataatttacataagtaggaaagtgttactttagcccccttttttaaaaaaaagcaaattacaatttctgtatatatttcaagtgaatcatttaatgtgagtgaggctcagttaggtgttaccataagtattaacagaagaaaaagggaaagcacaaacattttccctctaccagaaaagggtctgatgtaagataaactagcctgttggtttaacaatagctcattaaaaaggccagagaatctgggagaagatgtacttggaagcactgtcctctgagggcccattcccaagggacagcaaaatactgaaaaaaattaactggctcaaaaattatattgagag

SEQ ID NO: 5171 - DNA, 407 bp, Homo sapien
tccatactagcaaaatactttatttttataatgataaaacaaggaaagtaaagatttctttttggtgtataccagagttaagggcagtagaagaatatggggattaataggacttttatgaacttttgatgacaataaaaagttaacaataccaaccgtttgccataaaacttatcatagctcccccaaaacacacatataaaggatcatagttttaaaatctataaaagtaaaaaatatacagttggaagctctagcgcttattccatctttcatataaaattgtaaacatttatttacacaaagcaaatgtgtataacaaaagtctgagcacccttttcttctgagtcgtggctcctggaagacggggctgtgcacagaagcaaagtcatctcctcccctgactc

SEQ ID NO: 5172 - DNA, 429 bp, Homo sapien
tttttaaatgggaacaccatgcatttatttacttgtctttactccacaggtgattggaggaggcttttggtgacaaacccaaaagaaatgaatacatatgaattcttattaaatcaaaatcaaataaaattataaattttaaaatgttaagagtgaggcaagactagaacatcactagacaggctgaaacatgctgaaatggagggtttactgctttccttgctttaaattttgctggctcacaatggcttatgtttattgcataagggggccacagggagggttgcttgctcacataaggagcccctggttttcttcagaaacaagttcaaattctccacttagagccaaaaaaaattaattgcaagatgttcaaactgaagttggcttctataaagtcaaagaataagcagtaagtgtaaaataaac

SEQ ID NO: 5173 - DNA, 450 bp, Homo sapien
tgcggccgcctggcatccgcgcccggagcgcacagtacctgcgcggcggcgctcgggcctgctgcgggccgatgccgacgccccggccgggaccgcgctttgggagtactgaggccgcccgagaccagcctgagcgcgcattaaaaccgtgtctctcccgcagctgtgggtgggccccgggcgccgcttgggggtcctgcagctggaggtggaggaggcccacaattctccccaaaccagagagagcccagaacttcccagtgcccagggactcccgtctgggaggtggtcttgtggatgggccgggtgacccaggccgctggaggggaggtctcaaggacatggggaggacggggactgggggtgggtgggggactgagcctgcgcgggttgaggccaccaacaccgaccacagatgacctcactggacaccgcccctccccaacctag

SEQ ID NO: 5174 - DNA, 395 bp, Homo sapien
ttttttttttttttttttttttacactttgatatttattaacaaaaatggtccagaaaaggattgagtcaaaattacaaagtgattaagagttaaaacaaaagttgttctttattgtagtttctgggggactttaaccagtccccaaagctgtttttatctcctaaaataggacttaaatgacatcactcaagtgacagattttaatagaaactcctcctctttccttctgtcaaagcaaaatatagtgaaagtctctgttgttacctcaaacctcctttcctaataagtgtgcatgcctgtagatggattgggatgcagtgaagagagaagttaaacaaaaaggttaaaaaaaaaaaaaaaaggccaggcacagtggctcacaactgtaatccc

SEQ ID NO: 5175 - DNA, 399 bp, Homo sapien
ttttacgacaacaggtaacctttagtcagaactcaccacccactgtgttaagccttacatgacaatcaccatgaagatttacatacacatgttatatcatagtctcctcacaacatgtctaagaggtaggcacgtcattgttcccattttgcagatgaggaaactgaggttcagagagggcacttggcttgcccaaagtcacacagcagggagtggcagaggaagtcaggttgggtgaccccagtaactgctctcagaggctgggtgatgaccggcttcctggcttctctggaataaacctttgccaccacttcctgcatttcagcttcagtacaggcagagaatggggataggtgggggaatgaggtgagaggggagatgtttagaggtgtggagggc

SEQ ID NO: 5176 - DNA, 403 bp, Homo sapien
  misc_feature (1)...(403): n = A,T,C or G
tgcggccgccgctgcccactcgcccactggcgtgggtagaagagaggagcggcggnncagcgggaaggggcgcgctccgctggccgccgagccgcacttgtccaacgtggaaaacccaaataccagtttcaaacacttgggaaacattcagccccgctgcgcacggcatgccgcccggccccctcccccggcaacggccccgccccccgccgcattcacgcccctcaccgtcccaggccctggggcgtgcgggctcgaggccggccctcgcgggggcgtggccttgcctgtcactttttccagaggcgagggtcgcggaggggacagcgtcagggccgatgggttgtcgcaaggcgtgcgacgcgcaaactttactaggagtttttggcacttggaggcagag

SEQ ID NO: 5177 - DNA, 217 bp, Homo sapien
ccaagttaaagagtgagtcaggcttgtctgggggtgggtggggggcattctaggcctgcttcctctgcggatcccatggggttttgctcgccctgagggggtgcgccggatcttgctttcctttctgagggtggcgtcatgtgcccattcactcagcagctacttggcaaggcccgttggtgccagactctggatgggcactgccctcacctctgct

SEQ ID NO: 5178 - DNA, 157 bp, Homo sapien
ggggccgcagtggagccgagcagctgccgcgccggtcgccggtttaagcgcagtgcaggcacgcgcgagggcgcggttagtgagccagcgctgcctccagcccccttttccctccatggtttctctccgctcccgtgagtaacttggctccgggggc

SEQ ID NO: 5179 - DNA, 368 bp, Homo sapien
ttcggcacaggggtttcttccctccttgtcttttaagttgaaactgaagtttatttgcattcaggcaagtactctactgtttccattttgctggccttaaaaacattcgggacatagcgtaagtataatagcataaaaatcatactactataatgatgatcctaatgccacaaaacaggctagattttgcctgaaaatttagacaaaacatgataacccatactttacacaaccaatgggttagccatgcagctgtagttattcatcatccaaagtactgcctcgtgcattttgctaaattgtctaaatcctggtacagtattgatttcccctctatgaactcacacccacccaaaaagccacaggag

SEQ ID NO: 5180 - DNA, 341 bp, Homo sapien
gtccagggcatcacctcctaccagcagcgtttacaagcattgagaaaggagaaatcccgagatgctgctcgctcccgccgggagaaagaaaactttgagttctatgaattggccaagttgttgcctcttcctgcagccattaccagccagctcgacaaggcatccatcattcgacttacaattagctatctgaaaatgagggactttgctaaccagggggaccctccgtggaacttgcgaatggaaggccctccacctaacacatcagtaaaagttataggtgcacagcgaggagaagccccagtgcactagccattgaagtatttgaagcacatttggga

SEQ ID NO: 5181 - DNA, 369 bp, Homo sapien
gggtacaaggaaagcttcagcagcatcatgtgcttcgggtgtcacgacgtctactcacaggccagcctcggcatggacatccatgcatcagacctgaacctcctcactcggaggaaactgagtcgcctgctggacccgcccgacccccatgggaaggactggtgccttctcgccatgaacttaggcctccctgacctcgtggcaaagtacaacaccaataacggggctcccaaggatttcctccccagccccctccacgccctgctgcgggaatggaccacctaccctgagagcacagtgggcaccctcatgtccaaactgagggagctgggtcgccgggatgccgcagactttttgctgaaggatcct

SEQ ID NO: 5182 - DNA, 405 bp, Homo sapien
aatgcaacgagcaacagtttatttataaaaaaagaaaaaaacaaacaactttttaacgacattttatagattaagtaaaaataccagtattaatatatatgtatatacatagtgcatatatatatatacatatgatataacattaacattacatgcttctcaggacagaagaattaggacatgttccctcctatcaatttaaaactcgatcacaatttaaaatcatggaagaaaacttgcttcctttattttctgcttttagacttcaagtacaggaagttatgaaaccaggatctaaatgtggaaaccatctgctatgcaccaattataagggactgccacaaatgatgagtcaggggtcttctgaattcttacataggtctctgtaaccctacaactgtgtca

SEQ ID NO: 5183 - DNA, 204 bp, Homo sapien
gggggaaaaagtctaactggcggaactcctgggaactggggcgatgggctcttagtatcggaggattggagccatctgatttttacctgaaattccttagtctctcctgtgttggggaaatggtcaccttgccttcatggacctgggctttcagctgtccatacctggccctggttgatggcggcatgctgggcagtgcacgtg

SEQ ID NO: 5184 - DNA, 483 bp, Homo sapien
tttgaccttggaaaatcattcatttatgttaagaagtagatggcccattattatttacaaaataacttgaagagccattttggttttggaaagagagctggcagacagagctcagaaaggagatgaaacaatgagagataagttgttttacataatgaaagaatacagactttccccgattataccaaacagaaccaagataaagtaagattttccacaacaaggcactcagggatggcgatggaggcgctgtggatcaagtcagccagagagaaatttctgggggttggaatggttacaaaataatgttaagaatatagccagctgtgatgccacaaccctgtgatcccagctacttgggaggctgaggcaggaagatggcttgaggcaggctttcaaggccagcctgggcaacatacgagatgctgtctcatgtgcgtcttcacgtgcactgcccagcatgccgccatcaaccagggccag

SEQ ID NO: 5185 - DNA, 238 bp, Homo sapien
atgttagagcagcctcgtggagctcgcccctcccctcagcctgcccacctctccctgcatcctgacgccagtgcgcccgggcatgcagcagatacctcatcatccacccgctgcccctccccgtccctgtcccccagcatcggaggcctgcaaatctagtgccgaatgactatgtccagattggtgacgatgggtgttgctgtttttcttgtcgtttgtgaacgctgtgatgctgtgt

SEQ ID NO: 5186 - DNA, 483 bp, Homo sapien
ctgaggcattatgtaaagggctcatactagatgttcagttaaatatactttagcacaaagtcaaactagagaatgtgttaaggagggaatgtatatgtcttggtagaccaggaggcctttgcagcaatttaagcaacagatgtgaatacttcacaaagctgtaaagaccattgtcttaaatactacaacaacttaacacccttttgtgaagatcacagcatttatctaagaaactgtgaggctttctggtttacatatatcttacaggtgtttttttgtattttttttttttttttagtttgaaatgtgtaagctttgatttaaaccaagtttacttcagtatgttaatgatgtagtaaaaatatttattgaaaggtgaattcgagtattttaatgttatacctgccattttttttcttaaagcatattctttgcatctaactgccagtgccattgtcaaaacttattttttaaatcgttgta

SEQ ID NO: 5187 - DNA, 198 bp, Homo sapien
gacagaccaatggtttattccaaaggggaaagcccaagctggatgtctccctccccaacccctgcaagctggcccatccttccagagcccccataggcctggggctgttgagacgggagatgtccccactgtgctgctcctggttttgtctcctctccaatccttgagcaccctgatatgcaacatggggggtaatca

SEQ ID NO: 5188 - DNA, 189 bp, Homo sapien
ttttgtttttttttttttgcttcccgtccaacaactttattaatgaacattttaaataaagaaaaactcttacaaataaaaatattttttcaaataacaatagtgaaaaattgggggcacatgaagtctccttttttttgagatggagtctcgctctgttgcccaggctggaatgcagtggcaccatct

SEQ ID NO: 5189 - DNA, 342 bp, Homo sapien
tgaatgttttatacaattttatttttaaaaatcttgttaatgtacaggcattggcacattttaaaaacaaactacataaacagatctttcctataacctaggaaagtggaatgtcagaagtcaacaaaatgtgataaacttaaagtgctaaaacagaaggcacttcacaaaatctgttcactgaaacagttatatatcctcgtttacatccttcactttacaagtggcagtgaacgtctgtttggatagaaggacatacagaaatacaggcagtttagtggcagtaaaaatataagacaagtaatgagtccttggccaacttgtttttgatgacctgtagtg

SEQ ID NO: 5190 - DNA, 352 bp, Homo sapien
ttttgttttttttttttaacaaaaaagagcatgtgctggtaatttatgtgctggtaaacatttcacagctggatctcaggaacaaaaatgcatgcatgcatatacatggataagtgtattataaatttcagtgaaataaagcatctgcagtgtacagtttacaaatatagtatacagtactcatttttgtaaattgtatatgaccaattgattctcgcagaaaacatcggctcatttctggaaaactcgtatctgcagggagactgtagctgtatttgaccagggagggtaggcccgacacagatgctagtgaatgttcttatttgcattaatgagtaagacaaaaccaaaa

SEQ ID NO: 5191 - DNA, 122 bp, Homo sapien
actgccacacatactgggcagtgagcgaggactgctcccaacagcgggattggctgatgggaggtcccaaggacaaggaaggaggcgtgttttgactgggggccttcattgtagatctgatt

SEQ ID NO: 5192 - DNA, 326 bp, Homo sapien
cttccatccagggtctgggacacccaaaccttaggcttgccctcccgggaggcctccccctcagagctatgtgggatgcagttgcctttttacctgtgatgagaaactggtgaattgccaggattctggctctggcttcagtctgcccctttccggggattagagggcattaaccctacttcctacagccaagcagctcttcctcatgactctactttctaactccgggggttgactgattgatttgaagaccgccttgttgatgaatgtgttgaacttgctatcataatgtaaatgctccttaataaaataacaggacctggtgg

SEQ ID NO: 5193 - DNA, 236 bp, Homo sapien
ccaggaagtactggccacttcttcaaccctctttagcagaggtgaggcagtgcatccagagtctggcacaacgggccttgcaagtagctgctgagtgaatgggcacatgacgccaccctcagaaaggaaagcaagatccggcgcaccccctcagggcgagcaaaaccccatgggatccgcagaggaagcaggcctagaatgccccccacccacccccagacaagcctgactcactc

SEQ ID NO: 5194 - DNA, 106 bp, Homo sapien
ggagacgcactaccgagtccatacaggagagaagcccttctcctgtagcctttgtcctcagcgctcccgggacttctcggccatgaccaagcaccttcggacacat

SEQ ID NO: 5195 - DNA, 393 bp, Homo sapien
ccagccctccgagatgccacaattccttggatgggggagaagttcaaggaatttctgctcggccacgcggtgggaaccccgcgtccccgccatgtggcagaggggtctcagtcgtgctaggcatcgggcggcacgccgacagcccttccctcgacagtgcccctcggccactcctgggttggagcccgattttatttgtaaagttgacagtcgagcaaatgttcctattttcgtgggatctgcacacgtctttgtcagttgtggtcatgatcttagtcacctgctaattatttttacaatgattacaacatttcatcactgcgggatatttctgacccgctttagaacttaagacctgattctagcaataaacgtgtccgagatgagcggtga

SEQ ID NO: 5196 - DNA, 370 bp, Homo sapien
caaagaaattagcttttatttgagactacttttccccacatgtatcttttaagaattctatgctatgtgataacctgcttatccactgtcccaataccaaaatttctaacagcgaattatacaactgctctaggtaataaataagggttgtccttcactgattaagggaataaacttcaataaacttaacaacaacaaaaaaaatcacactttagtttttaagttttaacagatgtatttcaaatacagcatgttttacaggagttcacaagcttttcatctctaaaaaaaaactttcaactacctgactgttccattccaccccagacaaacctgacatgactgaactacttcatgtgttactttccca

SEQ ID NO: 5197 - DNA, 282 bp, Homo sapien
caaaaacaaaaatggttaaatctccaagtatacatttagttctaaagctatataatatttttccacacaaaggaaaatattggcacacctttaatataataaagcttaacagttattaagtttttcagcaatatcaatagaaaaacttactgccagtaactggaaacagatttatggactgtcttgcatataactagagctaagaacctaggttcaagtaaattattaaagcagccatctgtattatgttcaccaagttatagcattaactgagtggaaatg

SEQ ID NO: 5198 - DNA, 258 bp, Homo sapien
cgcactcgctgaggggcttcgaaggggccgggggggggagggggcgccgcagacggggctgacacagggctgactccgatttaggaatggctggcacttctccatcaacaaatctcccatcactgcagtcccacggcctcgctcgcgcccacagacccactcacaattccttgatcagcaccatcttcccggaaccccctcacagctgccgccgataccaccgccgccgccgccgctaccgcctctcacaggcgcctg

SEQ ID NO: 5199 - DNA, 302 bp, Homo sapien
  misc_feature (1)...(302): n = A,T,C or G
attcggcacgcaggggaacttctccattcccagtgggatcccagacttgccccaggacacctttatccagtttcctggatggaccaagggccaggtctggattaatggctttaaccttggccgctattggccagcccggggccctcagttgaccttgtttgtgccccagcacatcctgatgacctcggccccaaacaccatcaccgtgctggaactnggagtgggcaccctgcagcagtgatgnatccagaactagtgtgctgatgacgttcgtggacaggccagttatnntggctcatctg

SEQ ID NO: 5200 - DNA, 350 bp, Homo sapien
gggctactgagcagctcatcatccctgtttctgcacagtttcctgaaactggccatcagggctctgaggcactcaaatcagtttacttttagcatgcccccatcagggtgggtctcactgttagtgaggatacgggtctggtttgatgtttttctaggcaaaatgcttaagtgttctggttatgccattcattcatacgatgtgtgaaatttgcttaaaagggaattttcatgatttgatttagattagtatttaaatatctgctttagatagcaattaattttattgtaaaaataaggaaaaatatgtgaatatgtgaattttttaagcctgagagatgatagaatgtt

SEQ ID NO: 5201 - DNA, 215 bp, Homo sapien
aattcggcactgaggtgggctgtaactgccacctgacaccgctgactggctaaatgctttgcagaaagtgatgaccttacaccacaaccagcttctccaggtcatatgagccatacctccagagagtgtttttttttttttttctgagatggagtttcactcttgttgcccaggctggaggtgcaatagcatgatctcggctcactgcaacctcc

SEQ ID NO: 5202 - DNA, 323 bp, Homo sapien
  misc_feature (1)...(323): n = A,T,C or G
acgaggccgtccgttccccgcggcgccccgcgttgtcccgggtcccgctcggctcacgggaccctccaggcccccggggctgtggcagcacgcgggtcccgagcgtgggcttccttggggccgagagcttggagcgccccagctggccccccgcctccctgcaggacgccgccctcgcgtctccgctgcagagaagcccttgctgcccgcctctcgcggcgtctgggctctttctcaccagggaccgagctctcattcngttcagccttccccnngggcaagatgcacctcgctgnnnccaagtcctctcgccnncttccgcc

SEQ ID NO: 5203 - DNA, 359 bp, Homo sapien
  misc_feature (1)...(359): n = A,T,C or G
ggaccaccaccgttcgaaagaggagctgcttcccagcctcgctgactgccagccggggtcccatcgctgccccccaagtgcccttggatggagcggacacatcagtcttccccaacaatgttgtcttcgtcacgggtaattatgtgctggatcgagatgacctggtggaggcccaaacacctgagtatgatgtggtgctctgcctcagcctcaccaagtgggtgcatctgaactggggagacgagggcctgaagcgcatgtttcgccggatctaccggcacctaacgccctgggggcatncctgggtccgtagagccccaagcccttggtgcgttcgtatgggcaaggaagaaaggact

SEQ ID NO: 5204 - DNA, 348 bp, Homo sapien
ctcctccagcagcagacgggcgagttctccttcttgaaagacctcaaaggccggcagcccctgaggtccggacccacgcacgtttccacccggaatgcagatatttttaacagtgatgtcgtcatcgtggagcgtgggaagggcgacggtgttcccgagaggaggaagtttggcaggatgaagctcctgcagttctgtgagaaccaccggcctgcctactggggtacctggaataagaagacggcactcatccgcgcgcgagacccctgggcccaggacacgaagctcctggactatgaggtggacagtgatgaggagtgggaagaagaggagcctggggagtccctg

SEQ ID NO: 5205 - DNA, 349 bp, Homo sapien
  misc_feature (1)...(349): n = A,T,C or G
tccacatgtaagtgagaacatatggtatttgtctttctggtccttacttatttcacttagcataatgttctaaaattccatccaatttttcacaaatgtcagaatctcttttgtttttaaggctgaatagtattctattgtgtatatataccacattttctttattcatctgttaaacgcttaggttgatttcataacttagctattgtgaataatgctgcaatgaacatgagactacagacatcccttcaacaaactgatttcagatgtttgngggtaaatacccanngaagtgggattgnnctggatcatatnggcannattatatttgggtagttttttttgaagg

SEQ ID NO: 5206 - DNA, 366 bp, Homo sapien
  misc_feature (1)...(366): n = A,T,C or G
tttggggataatttattatgcagcaagagataatacacaggacttctcagagcacttaatatgttaatataaatctccaagaaaaaagatatacaatgaaacattcctcttagttatctggccaaggagactttctttttttgagaatattcttcagaaagctgatctaatgatatggctctggtcctacaattccatgtaacttctaaccttgattttgtctcatgagcaaatcatttatccttccagaacctcaacttttcccttttacaaagtagaaataaaccatctgcctttacataaatcattaatacagccctggatgggnagattctgagctatttttggctggggggtgggaaatag

SEQ ID NO: 5207 - DNA, 298 bp, Homo sapien
  misc_feature (1)...(298): n = A,T,C or G
ttcttcgacatctttgtcctggccttcttccgcttctctggactgctcctaggctatgcgtngctgcgcgtccggcactggtgggtgattgcggtccgacgctggtgtccagtgcattcctcattgtcaaggtcatcctctctgagctgctcacaaaggggcatttggctacctgctccccatcgtctcttttgtcctcgcctggttggagacctggttccttgacttcaaagtcctaccccaggaagctgaagaggacgatggtacttgccgccagttgtgttgccgtgacccctgc

SEQ ID NO: 5208 - DNA, 294 bp, Homo sapien
gtgagctctacgggcaggaggggcgcccggctctgcatgcacgcctgcgtaacaccccgggctcttaccgttgcacctgccccggtggataccgaactctggctgacgggaagagctgtgaggatgtggatgaatgtgtgggcctgcagcaggtgtgcccccagggaccacatgcatcaacaccggtggaagcttccagtgtgtcagccctgagtgccccgagcgagcggcaatgtgagctacgtgaagacgtctccattccagtgtgagcgaacccctgccccatggacagca

SEQ ID NO: 5209 - DNA, 652 bp, Homo sapien
  misc_feature (1)...(652): n = A,T,C or G
cctttgcacggccagggctttgcgaccgcagtgtcttccttctgtccccggtcgtgcgccgtgcccctcagcgcgctcacgtttcggaacacgtctgcctttcatgcctcccgaagagcctccccgcatcccgtgccccctgctcgctgctgccgctgacccttgggcgctgcgctggtccagagcgtgttgtccgtctgacgccgtcagaacctgagctccctgcgagctgggactccgccgtgtcttcattgcctccagtgcataacaacatgcttgcatagagaacaaaaagtgtgttcaggtgcacagagtagaaaattcaaggagcctgaataggtatttggtgaagacttgatgtgtttttcccagtctaacctccaaggcccagttctcccctggggcagagggaaacccgtttcttacgggtctgcaaagaaagtctatgcaggaacatctacgtgcgtntctgcagaaggtcagttactttacttggggctcttatacttaacgtagctcggacggnncccaatgcattcagatacaggtgggagtcctcggagacgagttttatagcacagacttatccctttctgtagaatttagggtttgctgcgttatacgacatgcagctgacattgctgtcaacggt

SEQ ID NO: 5210 - DNA, 451 bp, Homo sapien
  misc_feature (1)...(451): n = A,T,C or G
gaaataatttggataaaatgttaataattaaagaatttctgggtaaagtggctcacacctgtaatgccaacactttgggaggccaaggtagaagtattgcttgagctcaggggttcaaaagcaggccctggcaacataggcccctatctctaaacaaattttcttaaaatttaaaaaatatttttagctgagcatgttggctcacaactgtgtccccagatattcaggaaatttaggtggaagaatcacttgagtctgggagattgaagctacagcangccatgagcatgccacttcactccagcctgggcaatagaacaaaaccctgtctcaaaaataaataaataaataagtacatgtaaatgggatacatgctcacttataaattttgtaatttaaaatcttaaaattattttgaattgaatagtagatgcttgttggatgtctgggt

SEQ ID NO: 5211 - DNA, 239 bp, Homo sapien
gctgattgcgctcagagatggcttagcttccaggctgatgggctggagcattggaggcctaatgagggtaattgaggatgggctgattgtgccggaaaaaagctgaaggggactgagccatgagaacaggctgcgtcacaccctaaacgggaccacatttgctaaatttgtttccgacacaatttcgtggtgattacactgatttctcttgagttaaaaaaaaaaaaaaaaaaaaaacc

SEQ ID NO: 5212 - DNA, 494 bp, Homo sapien
ttcttattgagcccaactgctttttttttttttttttttgcttctctgccccttttccatttcttttgtatttgttttctgtgagagcactgaaatggcggccctggaatctacaatttggctctccactgagcaccttatcttgccaccttagccttaagaatgaatatgaagaaaaatacacagccacctctgtccagggcagtaagaagggctgcaaggaaggggaggatggggacaaggaaaggatcagatacctgctccagtagttgtgaggccactgtgtctcaggggactccaggaagagcagaagagggatcccacgaagttatttttatgcagctggggccaggagggtcagagtggtgccaggtgcaagttaggctaaagaagccaccactattcctctctcttgcccattgtggggggcaaaggcattggtcaccaggagtcttgcagggggaccacagatatgccatgtccttcacacgtgc

SEQ ID NO: 5213 - DNA, 490 bp, Homo sapien
ctgcagaggtcccggccttgagtgacagggtgcttcttagattctattggtccttctctcattctccgaacttactcctttttatgggtaagtcaactaggtttacagtcccttatttttaatgcctaagttttgacagcaggaagaaaacaattttttaaaaattctcattacatagacgcacaagaatatgtcacataaagaaaatgtgtttagaatactggttttctatttacgcatgatattttcctaagtaaaattgccaagtggacttggaagtccagaaaggaaaataatttaaattaatgctggtgatcttaacaatattttgtaaaatgatgcttcccccttctccatggtctagtcaattttgtacaattaggtatctgactttacaagtttgttatcctttctaatttttactgaactgatagcacaaagaagactacacagaaaatctggaaacagttgcaggtgttgggaggaagat

SEQ ID NO: 5214 - DNA, 684 bp, Homo sapien
  misc_feature (1)...(684): n = A,T,C or G
ggacagtctgcggcccaagctgtctgaggagcacacgcatcattgccatactgctggacgcccaccataagacctacgaccccacctactccgacttctgccagttccggcctccagttcgtgtgaatgatggtggagggagccatccttccaggcccaactccagacacactcccagcttctctggggactcctcctcctcctgctcagatcactgtatcacctcttcagacatgatggactcgtcagcttctccaatctggatctgagtgaagaagattcagatgacccttctgtgaccctagagctgtcccagtctccatgctgccccacctggctgacctggtcagttacagcatccaaaaggtcattggctttgctaagatgataccaggattcagagacctcacctctgacgaccagatcgtactgctgaagtcaagtgccattgaggtcatcatgttgcgctccaatgagtccttcaccatggacgacatgtcgntggacctgtgcaaccaagactacaagtaccgcgtcagtgacgtgaccanagctggacacagccctggagctgattgagccctcatcaagttccgaggtggactngagaagctgacttgcatgangangagcatgtcctgctcatgggcatctgcatcntctcccagttcgtctggggtgagg

SEQ ID NO: 5215 - DNA, 194 bp, Homo sapien
gagggtgagagtgtgaaggccagccaggagccatcccccaagccaggcacagaagtcatcccggcagcccccaggaagcccagaaagttctccaaactggtcctgctcacagcctccaaagacagcaccaaggtggcgggggcaagcgcaagggtgtgcactgtgtcatgtccctgggggtgcccggccccgcc

SEQ ID NO: 5216 - DNA, 449 bp, Homo sapien
  misc_feature (1)...(449): n = A,T,C or G
gcacagggtagagtttgatgagaaggtgactggaggccctgggaccaaaggcaagggaagaaggaatgagaagtacgatatggtgacagactgtggctacacaantctctcaagtgagatcaatgaagattctgaagcgatttggtggcccagctggtctatggacaaggatccactggggcaaacagagaagatctacgtgttagatgggacacagaatgacacagcctttgtcttcccaaggctgcgtgacttcacccttgccatggctgcccggaaagcttcccgagtccgggtgcccttcccctgggtaggcacagggcagctggtatatggtggctttctttattttgctcggaggcctcctggaagacctggtggaggtggtgagatggagaacactttgcagctaatcaaattccacctggcaaaccgaacagtggtggaca

SEQ ID NO: 5217 - DNA, 382 bp, Homo sapien
ttcggcacagggaagtaatgagctttcagtcacacatgactttaaaacccacatgtgaaatctttcataagcagaattccaagttaaattcggggatttccctgatcctacattaccacaggaatctatttctgcctcattgaatagcttgcttttacctaaaaatactccatgtttgaatgcacaagaacagttcatgtcttctctaagacctttggctatacagcaaattaaagctgtcagtaagtctctaatttcagaatctagtcaacccaatacctcatctcataatatatccgtgattgctgatctacacttgagcactattgactgggaaggtacttcttttagtaattctccagctattcaaaggaatactttt

SEQ ID NO: 5218 - DNA, 410 bp, Homo sapien
ggccatctgtgaaggagcacagcgccctgaggacacagcctggggcgccttccttgcacttacccgggcacccgctctgtccattcgtaaacggcctacaaagttaccagcaactgacaggttaggcaccacaagctgtttagtgtttaaaaatcaagccacacatcagggccaggggagtcagctgagtggttaggagcagcacaggaggcccaggcccaaactctcagtgctttacctttgggaagctggaacacccccaccctgccagctgccccaggctgattccaggccacgcttcatgagaaccgggaaagggctatgggcacacaggcgccgctccccctgaggagatggggcccgctctgctggcattggtgtggctgatgctaggacggaggctgccccag

SEQ ID NO: 5219 - DNA, 394 bp, Homo sapien
  misc_feature (1)...(394): n = A,T,C or G
cacaccagccctgcgcccaccctcgcctgggccggtgctgtcccaggcccctgaggacgagggtggctgcccgagaaaggctccccttccctcgcctgggcccccagtgccgagggttccatctggagcttggagctgcagggcaatctcatcgtggtggggcggacagcggccggctggaggtgtgggacgccattgaaggggtgctgtctgcacagcgaggaggtctcctcaggcattaccgctctggtgttcttggacaaaaggattgtggctgcacggctcaacggttcccttgatttcttctccttggagacccacactgccctcaagcccctgcagtttagagggacccangggcgggcagttccccctgctctcagtgtacagcagc

SEQ ID NO: 5220 - DNA, 208 bp, Homo sapien
catcatgctggacgaggtccagtgcacgggaagcgaggcgtcactgggcgactgcaagtccctgggctggctgaagagcaactgcaggcactagagagacgctggtgtggtctgcagcagtggaaccagtagcacccacacccttgacctctccagggagctctcggaggccctttgcaggatctttggaggccagcggggctgcgac

SEQ ID NO: 5221 - DNA, 442 bp, Homo sapien
  misc_feature (1)...(442): n = A,T,C or G
ctgagatggaggcctgaggctttgggtccagggtgggctcttccccttcccacatcagggacccggggatggatgtcggaagggtcaccagcctccagcctttggaggatggagcttgggtctgcagggctttgcagccacacagcgaggtcagtccggggccagccgcgccatcatggtaatggtggcctcgccccatccatgtcatccatgtcacatgaggacgtgcagtcttccttgtcctctcctagtggaatttgcctgggagaacctccactgaatactgaaattgttgcatgcctgtggattccttacgacaatggggaacgcggtgtttcccacctcttgtgggtagaaagcagtctgctttgaggaggcgagaaggcaaagcangggcagggcgttgctgtgggaagcgttcggtgaaagcgggtttcgacgc

SEQ ID NO: 5222 - DNA, 468 bp, Homo sapien
  misc_feature (1)...(468): n = A,T,C or G
gttctccccatcgttgttgcccaggtggttgtaactcacgatggacatggtcttgaggccggagcaatgaggaagtccacaagcacggacttgactttggtctggcctgacttgaagtcatctccgcccacaaaaacccggtgctgccacgcgagctcaagagctccgggcaccagggtgttctgcggagacccattgaggaaggcacagcctccaggatgctggccacggcgaagagcgtggagggcgacacctccagaccgagctcaatggtgcgcaagngttctcggctgtgtcgttgaggcctggaatcacctcacagaagcgctccgtgttcgccgtccacagcactatgactttgtccagccccgcgctagaccggaagtctcggatgtccctgcggatctgctccagctgctgcgcacgcgagcctgggatgaggttgtccgcgcgcggctctggttgggc

SEQ ID NO: 5223 - DNA, 530 bp, Homo sapien
tcggggacggtagatggcccagccccaagtgttccgatcttcctgcccaaacatattctgtgacggaaagcctatgttgacctcgtccggcactcaaggcgtgggcagcggcctaacgtctgctgcgggaacacagtcgcgttgaatgctattctcaagacagacaaaacagtgggaagacactacgccaagctgctaactccctggccattgccggactctttcacccccatggactttccgctggcattttaaacaacatagtttcttttctctgtctctttctctttctctctctctttctctttctctctctctctctctctctctgtcaatctcataatttctctctctcgtgccacgttcccacccaacgctctctcgcccacttctactggggcccacttcctctcccgctctctctgtctcaacgtgattgactttcttgtgctgcccaggacttcttgcccacgtgcgccttcaaaacggtaagagctgcaactgaacgtgtgagacatggtgcagatagg

SEQ ID NO: 5224 - DNA, 407 bp, Homo sapien
cgtgagcgccgcgaagacccccgacattaagaagtggtgtccaccgcagccccctctaatgccggataccctcccccaccccgaggagcaagcctgccttccgccacgcgccgcccgtcttccgcgcccgccagcaacctcgcggctgtgccgcgtaaagccacgcccatcctctcttggccacgccctcagagactcctcccctgtcgcccagatcccacccgcaggaccccaaaacccaatgatcctgcagcagcccttgcagcgaggcccccagtgaggggccacgcgcctcccgcgggccgccttgggggtgacttggggcctggacgccagctcccctctccgaggagctgtgcccatgagcaccaagcggcgcctggaggaggagcaggagcctctgcgca

SEQ ID NO: 5225 - DNA, 489 bp, Homo sapien
gtgatctgttgctctaagtctgaattacagcatacaagtgaattgtattatccgtgtcttagtgtataaatgttgggtcacttacctaagaaattgagctattgttctttacatttgcatgtgtcttttgcatgggcaaaatgttgcctagactttgctcttaaatgttgttctaataatctcagctgcattgtaaaccgttcctacacatagtgccttaaatatttgaggttgttaatgttattacctatatataaatgttgaggactgcagcacttaaaattcagacctactatttagtttccttttgatagcgtaatgttcatttttgtttttgtgtggtatgatttcaggtagtagctgtttttttccttattaagagggcagcatgtttgctatagctgaattctgctgtctgatttttcagaatgatctagcttcaagaaaagcaagcagttagtagtgcttaagaaaaattgattcagtatc

SEQ ID NO: 5226 - DNA, 425 bp, Homo sapien
tcgaggtggatgtgtggtccattgggtgtatcatgtataccttgttagtgggcaaaccaccttttgagacttcttgcctaaaagagacctacctccggatcaagaagaatgaatacagtattcccaagcgcatcaaccccgtggccgcctccctcatccagaagatgcttcagacagatcccactgcccgcccaaccattaacgagctgcttaatgacgagttctttacttctggctatatccctgcccgtctccccatcaactgcctgaccattccaccaaggttttcgattgctcccagcagcctggaccccagcaaccggaagcccctcacagtcctcaataaaggcttggagaaccccctgcctgagcgttcccgggaaaaagaagaaccagtggttcgagagacaggtgaggtggtcgag

SEQ ID NO: 5227 - DNA, 456 bp, Homo sapien
gcaggaactactgcctcatgatagcatcttgtatactttatactcgcttcttatttctctgccccttatcccctcccttcccactaagatggggagtttccatctcaaaaatcccatacaagaaatgagagaggagagagagggagaaattatctgatagacgagacagtatttttcacggttaattgaggatgattttcataactggcaaatgtcattttgatctttgctattagaacatctgcaccatctcacaacaggaagcacagctatattccttgggatttacctattcttagaactaagagcacacattccaccagctgtctcgtgttgaaaatgttagctttccaaatccacgcaattggattgagcgtttataaatagattcaataaaaggaggttccattaggtctatacactaaaactggaattttttaaagatcctccaaggcc

SEQ ID NO: 5228 - DNA, 257 bp, Homo sapien
gccgtccatgctgccctcttcccaccactgtccatgagcgtccccgccacccccaggcgcaggcccccaacgcctccttaccaggagttagcccagcatgctggcccagccagcaagtgggcctcatccaccagtactgccagggttactggcgccatgtgccccccagccccagggaggctccaggggcaccccggtctcctgagccccaggaccagaaaaagccccggaaccgccggcaccaccctccggacaca

SEQ ID NO: 5229 - DNA, 337 bp, Homo sapien
gttctcttgccccagtccctttcctgtgctataaataagccccatgtttattttcttatgttattgaaatgagcacttgtgatttgggcctcttttgaggagtccagagagcgtccatccggtgcctggtgagggccctgcatggctggctgctgtctgaagctatttggagtcctctccctgtgttttctatgtggcttaatttcaatagaaagggttatatgcaaccctgtatctgctgattttcaggtttcaactttctgccagcgtcactgcctgcttagaagtaaagttatgtttctcattaaggggataacagccacaattgaggtaatta

SEQ ID NO: 5230 - DNA, 474 bp, Homo sapien
ctgacgacggcgacagtccaaggaacccccacgacagcacgggggcaccggagacccgccccgacggacggtgacaggcgaagagccgaactcgctcgatggcgtggtggagccaggaggtcgcctgactgcatggggggactggggaacccgcctaaggtgagaggtcttaagagactagcttgacgaattggggatgtcagagactcctccttggcgacgcagggggcctagagagccccgtgatggacggcaagggaggcccgccttttccgatgcttggagacaggtcggtgctcctcccccatgagggcttggggcggcctgggacgctggcgggctggacagtgtcaagccaagagctacttgcccgaagtacggggagccaggacgacccccggtggacagggagagcctgagacgcccttctcttgacccctgagaacatacccacttctggctcctcaaggagtc

SEQ ID NO: 5231 - DNA, 501 bp, Homo sapien
aagtggggagcggaccagtgatttgctccccctcgtgcagcaacccccacacccagcaccaggcccccagaactctccttccagctgaactccctgggaacaagtcagttgggctgatcactgaactcacatttctggacctgaggagcctgttcctctcacgccctcacctggctgagcgcagtagttcttcagtggcaagctttatgtcctgacccagctaaagctgccagttgaagaactgttgccctctgcccctggcttcgaggaggaggaggagctgctttccccatcatctggaaggctttctgcctccgagatgtggcaccatagtgcggtgccctgtggcttcaccgccctacttccacctccgcccagcctgtaatgtttatataagcagcctcaaggaccaagaaccatctgcgaaaggacacacacaggaaattcataaaagaaatctgaatggataaaaccatgaaaaaaagtatgcttcattagtaa

SEQ ID NO: 5232 - DNA, 419 bp, Homo sapien
gatgttaactttggaactcgcagtcctctagaacagcttcagattatggctttttcttttgaggaagaaattattcactccagatgcatgccctgagccagacctcactgctgcactttccaaggtgctaagattgctgctctccaatgctaactttctgacacagtgctctagaaccctgcctgtggtcctgagcactgatcagcttagctagaccatggttgactcttcttggagattttcacttggtcctagaatgtggcaacgtagttgtgctcgccagaacgtgggaccaaattggcctcaggtgttgagtccagacttctgcttttgagagagggctgcactttttcatggtatttctaggggaggtggtaggctgcatgtgccacttggtcttgttgtgagtatgctgacac

SEQ ID NO: 5233 - DNA, 376 bp, Homo sapien
ttttttaggcctgccatgtggaaatggcggtctctattcattctatttacacggaaacatttaacaagcagctcttgaggaggccagagaggtgcaggcctagccctgtcagcaccaccctccacagatgcccaaacagccccagcgcatttctttaccttgatttctttcctactcatttcctccagctgtgcaagggtaaaggcaaaagcacaaagacctgggttggaccctgcctccatttgccgcaccatgatcttaccacatggattcttagagcgtaactgctgccccatggaccaggttagctaagagaggttccatgaaactgctgttgcagaaatgcttctaactataaaatgccaaacctgggaaa

SEQ ID NO: 5234 - DNA, 148 bp, Homo sapien
tttagcaaaggtcagtttcccatttattaaacaagttcttccgtggaaaatcttcccagggctcagcagcccttgaagtgatcagggatgctggggaggttgggggaggagaaaatgggagatggcaggtggtatctgtcggtgtgga

SEQ ID NO: 5235 - DNA, 349 bp, Homo sapien
tttttttttttttttttttcttcaacttactttattgtcagaatacagtatatatttgacacagcaggcatgtgaaaaaaacaaatatagtatataatatgtacaacatacaaaatatgtgttaatcaactgtttatattattggtaaggcttccactcaacagtaggctattagtagttaagtttgggggagccaaaagttatggatttcttactgcatgaggggtcagcaccccaacccccatgttgttcaaggggcaactgtatttgctctatgaatgaatcgcaatataacgtttctgagaaggataagaaatattggaaaatacaacggggcataatgtttaaa

SEQ ID NO: 5236 - DNA, 312 bp, Homo sapien
tgggcaaggcaactgaacccaccaggtcctgttattttattaaggagcatttacattatgatagcaagtttcaacacattcatcaacaaggcggtcttcaaatcaatcagtcaacccccggagttagaaagtagagtcatgaggaagagctgcttggctgtaggaagtagggttaatgccctctaatccccggaaagggcaagactgaagccagagccagaatcctggcaattcaccagtttctcatcacaggtaaaaaggcaactgcatcccacatagctctgagggggaggcctcccgggagggcaaagc

SEQ ID NO: 5237 - DNA, 218 bp, Homo sapien
ccaagttaaagagtgagtcaggcttgtctgggggtgggtggggggcattctaggcctgcttcctctgcggatcccatggggttttgctcgccctgagggggtgcgccggatcttgctttcctttctgagggtggcgtcatgtgcccattcactcagcagctacttggcaaggcccgttggtgccagactctggatgggcactgccgctcacctctgct

SEQ ID NO: 5238 - DNA, 339 bp, Homo sapien
ttttttttacacatgaactaatgcaatgtttattaagcaggtactatgtgctcaatagtatgttgcagagactgtgctgggaataacacattatgtgttattatttgttattatgtcctactaacaccttgaaagttcatactaagtgttcaataattctcaggatttagaatgtagtttagagaaatttttttgtgtttatgtttacttgtttatgacttgtagagcagctactggatctgcaggaacagaaaatctgctaaatggaacgtttctgtaagcactggttttactacaaaatttaaaaattaagatcttaaaatgtatagtttatttttc

SEQ ID NO: 5239 - DNA, 437 bp, Homo sapien
tgagggcacaggaaactctttattatggtgatgagatcgacaatctcccctactgttaaccttcgctcctgcacacttcagtgtcctcactctgtagggctcgctggcctgggcttctgcgacccgcgatcgtccaggagagggcactcggcgcccttcctggggcgttactggggcggaatttgctaggccgccgtagcagcggtgccaggtcagaagccgagccggcccgcttttcgttctttaattggactcttggctaagacgctaccgacaccccgtcaggtggtggaggaagaaggacaacagggagaggtcgagggccgagacggctcgagggaggagtagaggaaggtggagcggatggtccatccgggcgggagttggctgggcgagtgaccgcgcatgtgccgctgcatggagggcaagctgttaca

SEQ ID NO: 5240 - DNA, 328 bp, Homo sapien
ttcaccgctcatctcggacacgtttattgctagaatcaggtcttaagttctaaagcgggtcagaaatatcccgcagtgatgaaatgttgtaatcattgtaaaaataattagcaggtgactaagatcatgaccacaactgacaaagacgtgtgcagatcccacgaaaataggaacatttgctcgactgtcaactttacaaataaaatcgggctccaacccaggagtggccgaggggcactggcgagggaagggctgtcggcgctgcgccacgatgcctagcacgactgagacccctctgccacatggcggggacgcggggttcccaccg

SEQ ID NO: 5241 - DNA, 205 bp, Homo sapien
cgacgggtcctgagtctccagagctcggttcttacatccccgcgtccccaggtttagcctgagcagggttggtgaaggccgggacccattgacagcacgatgggtgacggagcaggaggtggatgccatcgggcagacgctggtggaccccaagcagcccctgcaggcccgcttccggggcttgttcacgctgcttgggctcggc

SEQ ID NO: 5242 - DNA, 394 bp, Homo sapien
acacctgtagccccctctgccaagagatccataccgaggcagcgtcggtggctacaagccctcagtccacacctgtggacacctgtgacacctggccacacgacctgtggccgcggctggcgtctgctgcgacaggagcccttacctcccctgttataacacctgaccgccacctaactgcccctgcagaaggagcaatggccttggctcctgagagggcagccccacgcgtgctgttcggagagtggctccttggagagatcagcagcggctgctgatgaggggctgcagtggctggacgaggcccgcacctgtttccgcgtgccctggaagcacttcgcgcgcaaggacctgagcgaggccgacgcgcgcatcttcaaggcctgggctgtgg

SEQ ID NO: 5243 - DNA, 467 bp, Homo sapien
cccaagtcggaggaagtgtcaccctggggtgatccagagggctttttgcagcaccagcactggatgccttggggagcagaggacactttctgaatctcgaaccttcaaaactttgaaacttaaccgatattttcctgaagtttcctttaacagtgcattatggatttaacatacatgagtatgtctaagccttttttgaacctgtttacattttcaactcggagagcttctgagagtaatcagttacatctgttaaattacccactgaatgaagaagtattccccttcaattatccccgaaactacaatagtaaaatgtaattcagaaaataaatattcatagtctcaactacttaaagggggtctggggaccacaacatgttaccggttttcattttgctggggctcgcatttgaagcaagggctctagtgaggaggtggtgtagactcagcgggttatttaggtc

SEQ ID NO: 5244 - DNA, 476 bp, Homo sapien
tctaaatttagttttcagtaattacagctttacctaaagaattccatttctggcaaaattgtattaaatttgtttttgcattgtgagaggttctaaatatgttttacacaagtaaaagtcctaaatgagagccaggtgcagtggtgtatgcctgtggtcccagctacttgggaggctggggcaggaggagtgcttgagcccgggagttgagagctgtagtgcctgtgaatagccactgccctccagcctgggcaacatagcaagaccttgtctcttttacaaaaaaaagttccaaaacaacatgaggagggtgcaaacaatcagctgttgcaggtagaatttttttacataccatctctgtttctctgctctgtatcgtatcacatcactattgaagctagtagtaaaatgtaataaatagacccagtgtggtgtaattttatattaatcattgtcccgtatgtaatcttcatcaa

SEQ ID NO: 5245 - DNA, 504 bp, Homo sapien
  misc_feature (1)...(504): n = A,T,C or G
ccaagagctcagagcctcctgactcctgtgccctctgtcccaggtggagatgtttggggtgacaggccctgggctggagcagactcacagctgctggaggagttcctgtcccttcagatggagatcttgacagagctgggcttgcacttccgggtcctggatatgcccacccaagaactgggcctccccgcctaccgcaagtttgacattgaggcctggatgccaggcaanggcgcntttggagaggtcaccagtgcttccaactgcacagacttccagagccgccgcctccacatcatgttccagaccgaggctggggagctgcagtttgcccacacggtgaacgccaccgcctgtgctgtcccccgccttctcatcgcgctcctggagagtaaccagcagaaggacggctcagtgctcgtgccccctgccctccagtcctacctcggcactgatcggatcacagcccctacccacgtgcctctccagtacatcggccccaac

SEQ ID NO: 5246 - DNA, 460 bp, Homo sapien
cacccccacgggaagtttgttaccactgccctaataaccgtgccctgacctccagctgctagagagaggatgtccccctagtaaagccaagcaggaattgaaggtttttctaaatctgctcggtcctcactcctaaaggatggctcccctcctgtcatcagaggccaccaaggcttcatatgggccagtgtttcccactgctggggctgtcgacatgagtgatgagggagccactgtattgctagaggtgacacttctccaataatcactgcgaccaggaaaaaagccccttcctaaaagcctttctaaacatcctaggcattgttgctaaggaatgccttttccttagcaacaaagatcatggggaccccactggcgcctggaacatctccctagcaaccgtgaagcaccttgttattagggatgataaccacaacttccctggcaactgcagtgtccg

SEQ ID NO: 5247 - DNA, 475 bp, Homo sapien
atctgtagctcatccagtaccagtgatggaaaggacagatggcaaggaaaccctttcgcggggaaaaagaaagtcatattgtgttggacctacagattactagaaacatagctttagtaaaccaaggctttttttcttgaacacaatctgtgtagactgtgtagttcttgattggtggctttaatccattatcattaggtatctccttgaacgttctcaaacactgaaagtcttaagctttcattaaaaaaaaaagagtaaatgcagctttcagaaaatccaggattctgtacagtcttcgagtgtttcacttcagcctccctgtcctgttattaccaacagcaggtacccgggtggtagacaagaagcctcatgggatagataaggaaatgaagataaacaaacatatcacactgtatcgtaaacatactttataagtacatttcttattagcttcttatccaggtagagatta

SEQ ID NO: 5248 - DNA, 474 bp, Homo sapien
tgtagctacaaatattaaaggaggagaaaaggtaatataattttaggtttaccaaatatggtgtgtattcaaataatacttgaccagcttatctaaaatgtacataattttgaggtagcttatgaatttgattttaattattatgttcacaagcttggaatattagatattattttgcatctgtaactaaccgtgatcatcatttcttgtaatttcttgtacatgtatattacttgttcttaatagatttttggaaacaagactttattgagatcagtttggttttcctgttaatttacctgtttgactttataatgtgttttagttttgcagaagaacactgttgtagtttagaaggcttttcataaatcccctcataggcaaagatgaaaacttcccactatttttttcccctcttaggaagacatactggaaagaaaatgtttagcatcttagtgtagtatagctattgta

SEQ ID NO: 5249 - DNA, 460 bp, Homo sapien
cagtatttaatgccattttattcacatgctcccatgttctccctccctcccattgtagccttgctgcccgggggagggatatgtcttcctttatgcatctgggaaaccaggaacagaccctgcgcaggagagtcagagggggaagagttagaatgggtcagtggctggaacaaagttctggttaaggaggaaattagtgccacccacggtgagaagcagagaaggcacttgcatcctatgcagccctgaagaccaggctcctttgggcaaaaggcaagactctggcaggtgggtcaatgctctctccttggagcaagaagccagcttttggggaaggcaggtcctgaggcaggcactgccttgtggtcttccccaggttgaggagaaaagtggaagccccatggaagacagtgctcccagctgaggtaggaggcggaggttggggtgggggtagtttaag

SEQ ID NO: 5250 - DNA, 300 bp, Homo sapien
ttttttttttttttttttttttttttttttatccatctcgtttatttgccaatagctgtaattttggatatagcggacatcccttcttcagttaagttgccactaaagaagggtcagggagacaacttcagaatttgggctgtgagaggagtaagtatggagaggctagtgggagggatggtgttcagcccctcaggagtaactgcctggccctcccagggggattgacgaagacagagatgtcatccccggaacccagcttgttgttggggagacgccagccacggtctcggggggtac

SEQ ID NO: 5251 - DNA, 283 bp, Homo sapien
tcattttaatttactttattacacttcgcagatattgtgcttttctaaaattcaaggtttgtagcaactctgcatcaagcaagtctcttggtgccattttccaacagcatatgctcactttgtgtcacattttagtaattcaatatttcaaacattctcattattatcatatctgtcatggtgatctgtcataagtaacctttgatactactattgtaattgttttggggcatcatgaaccattcccacataagacagcaaacttaataaatgttgtgtgtgt

SEQ ID NO: 5252 - DNA, 205 bp, Homo sapien
ttgtggatagtggctggagtagtgaactggtgagatgtggatcagtcgcaggcactccttcgactgacgaatggggtccagatggaataagctttcaggagtcccaggacccgcagtgactggcagaagctcagggaatatctgaccataggttcccccaaagttctatccctatgaccagggcgactagataatgccatccagt

SEQ ID NO: 5253 - DNA, 437 bp, Homo sapien
aacgttttaacttcttttattttattttaataaaaatatgaaaaagatgttttcttcctaacatgaacagtcctactgcagaacttcttttattttattttattgagacagggtctcaccctgtcatcccaggctggagtacagtgggacaatcattactcactgcaacctcgaactccccagctcaaacaaacctcccatctgggcctcccaattagctgggacaactcctgggctcaagtgatcctcccgcttcagcctcccaaagagctaggagtagacacatgagcaacaatgactggcaaaagccaaagtcttcctgttggtcctcaaggccctcaaggtctgacctgtcacccgttcaccctgcttcagccacactgagctccttgtggctcctggaattctgcacactctcctgctcgaaggcttttatg

SEQ ID NO: 5254 - DNA, 432 bp, Homo sapien
ttctttattttaacatttcagcattaacgtgagactatatcacaagaaaatttaattggaaaactcatcatttaaattttgaaagaaatgcatggaaattcttgacttctgtctcatttctctcattttgccaagtgataaaatccagcatattgtaccccaaatcatgcattattacatagtgcaggtttacaaaaccactaaatcacttgctatgttattcagggaaatatcattatagtggaatagaaatgaaacaagccacaaagtagaagatgttttactgaaataaatcaaatctaagtctgcctgttgaaagattttccaaggcagaatcacaatatatctaaatgaatatgaagcctaatttgagctaaggatctgacagaatgtccacaatgcatgagatgataggcaatttgactgtttgta

SEQ ID NO: 5255 - DNA, 400 bp, Homo sapien
gaccttcccacccaaatttatttgaaaaggccaaaaggaccccctaagaaacaaggggggggtgcaggctaaaccagggccccaaaacccagggacatttaggcaacacgagcaggcaaaacggggccaccattgtccaaacccccaaaaaagccaggcccccgcttcggaagaacctcaccaggttacattcaggcaaatggcccttttcccacccaaacccccaaacccccaaaaaaggcatcccccggaaaaacccgggaaccccaaatcccagttgaaccggggaccaaaaacccttggcccccctgatgtcccaagccaccagcagtggtttccaaaaaccccaggcaattaacgggggaattcccccttttaaaaaccccgatttttcccggct

SEQ ID NO: 5256 - DNA, 347 bp, Homo sapien
tcttagaaaaagaactttatttggaatgtaagattttattgggataatggttcttatgccttaaattcccttagttcaaataaactaatgttaaagaattatggctgttttttaccaaaattctctacaattgtatgattactctccaacataacttcaagatgttgaggaaaataaaacaggtagtctctgaagtttttccacaggaacagcacgctaagtgcttctttctggagttattttgtgacactgaatcgccaaagaaaagcttcctatagagttaacagagacttctcttgggctgaaggctgcttgtggttccacatgcagtttctgtgagaatggat

SEQ ID NO: 5257 - DNA, 403 bp, Homo sapien
cgttaaaaggcaagtacatatattttatgtgttcaagtacatatatttatgtatatttatgtatgtatctgtgtatgtatccacatgcagaaagataatataccctgatacaaaatatacatgttaagtctaagaagtcctgttactcaaagaaatattttcaaatattattagataattcacttgtcgatcatcctttttcagcatctaaagaaatttcagacacaaaatatgcaactgcatttagaataaacagatggaaaagctattgtagaaaaaaatataggtttttagaaaagttggaaagattacaggcaaaaaataagaacatatattaaattacatttgcaagtttcaaatatttgtaactcaacacaaaaacctctaaaagtatgttgggtgc

SEQ ID NO: 5258 - DNA, 387 bp, Homo sapien
aagttgtaaaaaaaattttgttatttataaatcaattacacaataaaataattatttttaaaagtcacaaatacaatcgttgtataaagtcattttggcatcaagtatctcttaaatatgttgcaaactattttccaaagagatgtggtccaaaccctctgaaggctttataattttgtattagataacaagtgaacaaaactgacaataaatactccaacaattattttttaaaatactaagtggcaaatgctattctaagtggcaaaacaatctattactcagactacctgaaaatttcactgaagtcatcaaaagttatacaaaatttgtatttacatgtttaaaatcctgattgcatttttctttaataataatacatacaaa

SEQ ID NO: 5259 - DNA, 165 bp, Homo sapien
caaatcaatattcctggtttcaaggaagtcactggcacagggcctgtgaagtcctgggtagcttcctgtaagggagcattccactattacctcagccccaaaagaaagaactgattccatttgcattccttgccaatagataaggaatggctagacattagcaac

SEQ ID NO: 5260 - DNA, 185 bp, Homo sapien
ggaccgcaagaaggtgagtgcggcagctccgtagccagagtcgacctgggccttgctattccgcgccgccgaccccgtcgcgttggcccggcctgacgtggcggcggaaccaaggggtagcaggccggggagggggcgggcagtgctacgtggcgggcggagggaccgagggaccgacagcggac

SEQ ID NO: 5261 - DNA, 257 bp, Homo sapien
gcgaccgctcggacaccggcttgccgtcccgagcggcagcccggggtggcgatggggtccgccgaggcagcggaggttctgcgggcgactggaggttggcagtgggcgggagaaagaggaaggcaggcgcggctgggcctcggctctgggccgcggtaccctttgtctcggcagcctgacggcccgcggctctccggagaggggaacgggcggcgagggtggcgggtcctgggcgccctgtgctgcggggccgagac

SEQ ID NO: 5262 - DNA, 334 bp, Homo sapien
ctttctatgaatgggggccaaatcggtggagtgatttatatattactctgtccgatcttgatacataaatacccagccccatccctgccctagaaaagatagacgtatattaattcggaaaatagctctgttcacctgcccctgccacccacctggagctcctgccccacaaagctggcccctgctccggatgagcccctgctcccgatgagcccttgcccagcatcctggggcggggagggcatcagcttcttttggaagacaatctgggccctgtcgctccattggcctgaagaggaaagtgagcccctaagtgggcaagggcagccctctg

SEQ ID NO: 5263 - DNA, 435 bp, Homo sapien
tttggcaataaccctgatttatgttctcttatcttttagtttttcagtgaatatgagaagttacttcattcagaaaattatgtgacaaaaagacagtcactgaagcttctcggtgaactactactagatagacacaacttcacaattatgacaaaatacatcagtaaacctgagaacctcaaattaatgatgaacctgctgcgagacaaaagtcgcaacatccagtttgaggcctttcacgtttttaaggtgtttgtagccaatcctaacaagacgcagcccatcctagacatcctcctcaagaaccaggccaaactcatagagttcctcagcaagtttcagaacgacaggacggaggatgagcagtttaacgacgagaagacctatttagttaaacagatccgggatttgaagagacccgctcagcaggaggct

SEQ ID NO: 5264 - DNA, 331 bp, Homo sapien
aagcgcccatcaatgatagactcgataaagaaaacgcggtacatatacaccatggaatactatgcagacacagaaaggaatgagatcatgtcctttgcagggacatgggtggagctggaggccattatccttagcaaactaatgctaaggataattgggtggaggacacaatcccacaaggcgctgtcccttgcacggccacggcagagggaatgaagaggctcctctttgcattggagccctgggactcctcctgttttccacatccctcctcggtgtgtaaataggtcaggagccagctccacacctcccagctccggagacggcaggg

SEQ ID NO: 5265 - DNA, 389 bp, Homo sapien
atccgtcctccaggatctggggagaaagagccccatcccttctctctctgccaccatttcggacaccccgcaggactcgttttgggattcgcactgacttcaaggaaggacgcgaacccttctctgaccccagctcgggcggccacctgtctttgccgcggtgacccttctctcatgaccctgcggtgccttgagccctccgggaatggcggggaagggacgcggaccaagtgggggaccgcggggtcggcggaggagccatccccgcaggcggcgcgtctggcgaaggcctgcggaagctcggtcagacaggatggtactggggaagtatgactgttaatgaagccaaagagaaattaaaagaggcaccagaaggaactttcttatta

SEQ ID NO: 5266 - DNA, 389 bp, Homo sapien
ggcagggcgggctccgcagtgcaggtcgtaatctgaaggagtggctgagggagcaattttgtgatcatccgctggagcactgtgaggacacgaggctccatgatgcagcttacgtcggggacctccagaccctcaggagcctattgcaagaggagagctaccggagccgcatcaacgagaagtctgtctggtgctgtggctggctcccctgcacaccgttgcgaatcgcggccactgcaggccatgggagctgtgtggacttcctcatccggaagggggccgaggtggatctggtggacgtaaaaggacagacggccctgtatgtggctgtggtgaacgggcacctagagagtacccagatccttctcgaagctggcgcggaccccaac

SEQ ID NO: 5267 - DNA, 296 bp, Homo sapien
tttaaaagcagggccccagaggcatttattgaaaacacagcatccaaaacacgacatctaggccaggcgcgatggttacagtgatgagagggtcactagacaattatccacaattctacgacatgagacagagactcagcaacagtcacagacagaagggtcatgtgttccttcctgggcagggctgaatgtggcaggtgcggcgtggaggctgcgtcctggcggtttgctcccaggcaaggggtacggggggccggcttggcctgggtggggacctcaagtctgagggtgaggat

SEQ ID NO: 5268 - DNA, 369 bp, Homo sapien
ttttttttttttttttgctttggtgagcttctgattttactagaaatacactctaagaacagtcgagacgccgcgcctggtggaggcgatgggtcatgttactggttctgcgatgatcttccagagctccaaggagagtagttagacaacacgtcagccacggagcaggcaaggagagtagttagacaacacgtcagccacggagcaggcaaggagagtagttagacaacacgtcagccacggagcaggcgagctggggcaggagcggacgagcggcttcctcctttctttgttgctctgggctgttctgttttactgtggcagagaggcagctgctggaggcgctcgtaaaccaggagctgtgggaag

SEQ ID NO: 5269 - DNA, 381 bp, Homo sapien
acagagatggggaagaggaagaggaagaggaggagccattggatgaaagctcagtgaagaaaatgatcctcacatttgaaaagagatcatataaaaaccaagaattgcggattaagtttccagacaatccagagaagttcatggaatccgagctggacctaaatgacatcattcaggagatgcacgtggtggccaccatgccagacctgtaccaccttctggtggagctgaatgctgtacagtcgcttctcggcttgctcggacacgataatacagatgtgtccatagctgtggtcgatttgcttcaggaattaacagatatagacaccctccatgagagtgaagagggagcagaagtgctcatcgatgctctggtggatg

SEQ ID NO: 5270 - DNA, 354 bp, Homo sapien
aaaaatatataatttaattccacattaaagccaagctatcgtggtgggaagaaggtgtaaaaatcggtggaaaccctgaaggccgagtacacacacgaagagagagggagttagctgagaagcagcatccagggaaagaaaggtctccacaagctgagatgatggccctctgccctctgaactgttcattaacaagtcaccagtcccagttctttgttcaaatcctcaaacttggagaggcactgctccaatgagacagctacagcaaccacagggaggaagtgctttgggctgcaggagagacagtcaaagccaaatcacgtccaggcgggatgaagtaaacctggaccgagg

SEQ ID NO: 5271 - DNA, 364 bp, Homo sapien
agaaggaagatattcagggtttttatttttattttttgagtctgggtctcgctctgtcacccaggctggagtacagtggtgagatcatagcttactgtagcctcgacctcccgggctcaaagatcctcacacctcagccttccaagtagttgggactacaggcatatatcatcatgcctggctaaattaactattttattttaagagatgtggtctagctatgttacccaggctggtctcgaactcctggcttctagcaatcctcccacctcagtctcctgaatcactgggattacaggctggggccatcatgcccagctctaggtttttaaaatgtaggcaaggaggtcagcatttacacaaa

SEQ ID NO: 5272 - DNA, 342 bp, Homo sapien
attgttataactgttcaattttattattatttttgtaaatatcttactatgcctaatttataaattaaactttatcatagatacatatatgtaggaaaaaacagtacatatagggttcagcgctatctgtgatttcaggtatccactggggggcttgatacatatcccccttggataagggggactcctgtaccaaaatatattccagatagttaaacgtaaaattaacacaaaataaaactagtaaaaaataaatattagaaatgtgccacccgcagatgtttgcatcgctagttctttcttgtcattcaggtctcagatttcacaccaacctttgcagag

SEQ ID NO: 5273 - DNA, 350 bp, Homo sapien
agattacaaaggtttatttagaaaatagtttggttgttttggctgttgtttttggcaaacatttaaatactttcagtaatcaaagattgtcggtgctttctccttgccccctggcagccaccccccgactaggtcctggagaagtcagcccttggtcagacggggatggggagtggtagtgtctttggggggctccttgcttgcccatttagggggctacctctgccactgctctctaaaaccctgacctcacagccacacctcggaagggctcccagagctggatccaggcagggagccccagaagcagccccttgctgaggggggaatgcaaaggggtctccccctct

SEQ ID NO: 5274 - DNA, 294 bp, Homo sapien
ggccttccaatattatgaggttattttgaggatccagggaggtaacggatgtgaagagcgtgtggtgaactgtaaataatgactatcacatttagttctcctacaatccagtgaggagtagtcacttgctcgaggtcacccagcgctggcaactgctggagctgggatttgaacccagctagcagtgtccatgctacaagagtggggccagccttggcaacaggaggttgattgctgcagccagtgtttctagagttccagatatgaagtggtctcatgttctccttgggagga

SEQ ID NO: 5275 - DNA, 283 bp, Homo sapien
cagctggagcgtatgactttattgatccaggacatgtatttgcagatctgggtgtagacagctggatgctgggcagagcacaggggtaaacaccccacgagaggatgccttggagggtctcgtcacagaccagggggcctccagagtcactctggcaagggtcctggccccggtccagtccagcacatatcatgttgttggtgaccacgccagggtagaagacctcacactctttagggctcaggatagtgatgctggagcaggtcaggcccttgtggaactt

SEQ ID NO: 5276 - DNA, 331 bp, Homo sapien
cttttggttcccaggtttattgacaattactcatctatttttgactccccgagtcccagctcccaaactcgctctccctactccaggcttcacggtagtcccagaatgtaggaagtgggacaggatagactttaacatcacccaggcctctggtttccaaagcattttttttctttaatgcagtaaaaccattcctttaaaacccaaaatctctcatggaacccctacgtatcaaatatataaagcaggagctgcccttgttcagggataatatgtggggcttatggctctaagaaacacagtttgacattcactgctctccttacttcag

SEQ ID NO: 5277 - DNA, 299 bp, Homo sapien
agagatggggggtttcaccatgttagccaggatggtctcgaactcctgacctcgtgatccacccacctcagcctcccaaagtgctgggattacaggcgtgacgaccgtgccccagcctcctttttctattactagagaaactccaggacattaagaatttcaaaaccgattttttaaccaacggtttcacggtgacagagtatggtgttcctgtagggaaacaaagccaagtttttttgctcctttcactaaagctgcttcatccggggaggaagcctggtagattataatatttccag

SEQ ID NO: 5278 - DNA, 274 bp, Homo sapien
gctcacaagacagttttattgaattagttgcatgcaggagcaattctgttcttcccaaggggaagcaggttcgggtttaaaagggcgggatccaaagggggaaaaggctgggggggtttggggccctggagcgtgggccctgttaattggggaacttgaaaagcccccccgggggggttgaacccaactctggggggaaccgggactcaaaagtgcccccgtaggtgacaaaagccaacatccaaattctcactccctccccggtggctttttg

SEQ ID NO: 5279 - DNA, 351 bp, Homo sapien
ggctggttgttttcgttgttgttaacaaaggaatgagaatatgtaatacttaaataaacatgaccacaaagaatgctgttctgatttactagagaatgttcccaatttgaatttagggtgattttaaagaacagtgagaaagggcatacatccacagattcactttgtttatgcatatgtagatacaaggatgcacatatacacattttcaaggactattttagatatctagacaatttcttctaataaagtcatttgtgaaagggtactacagcttattgacatcagtaaggtagcattcattacctgtttattctctgctgcatcttacagaagagtaaactggtgaga

SEQ ID NO: 5280 - DNA, 458 bp, Homo sapien
aaccacaggagttgtctgaggtgaacccagccgctcagccacacatggaagccattgcctttgcacatagttcttgggttctttttcctaaaaaggtaaggagctgaggtgtgtggttttttaatattaagaatatataatggaaaacacacgactgacgctcaggcatcttcccctactccccaacagatccccagaagacagcgtggaaggcagtgtagacagtaaatcgggcttcagttctatagccaagaagagatcagctgctgaaaccaccagtgggtaccccaggccacctgcctttgaacttggggatttgccatgtttgatcttgtcacatacttgcttttttacaagatgaactctttgtatttatgatttggggggcaatgaaaggtgcaatgcaggaactgctgctgccgagctcgctggtcacatgggggtgccaggcgggattc

SEQ ID NO: 5281 - DNA, 456 bp, Homo sapien
atgggaggtgtctgaaaaacagcaagtgagaaatgctagttttgttgttttaagttgcactgatgactccagtagttatctgtgctgcttgtgataatttataaggcaatgataacgaattaaacatacaaaagattattatcttccacaggaaaaaaaaactgcaaacttgtgacaccatttatgatccacttagtcttgagatactgagtaatagaactttctccttttaggctgagttatgaacttcggtttggtttctttctgcaatccctgcagggccataaattcttggcccttaagactgggtggcccataacagactcagtgataccatcagtaaccacaattcacactggagtcaagttatctgattcccacaccagttggagaactggagattccttagaacttttaactgtcatgttttcaaagttgacatggaaaattttacat

SEQ ID NO: 5282 - DNA, 494 bp, Homo sapien
  misc_feature (1)...(494): n = A,T,C or G
aattcggaacgaggcctcgcgcgcccccgggtcctgcccaacctggtggccgtgtgcctggctgccatctactcctgctatgaagagttcatcaacagccgcgacaattccccaagcctgaaggaaatccggaacggctgccagcagcgtnngcgaccggaagcccactttacctctgcgccttctgcaccccagcccggacctggtgtctcaggaagccacgctgtctgaggcccggctcaagtcggtggtcgtggcctccagtgagatccacgtggaggtggaacgcaccagcactgccaagccggcgctgacggccagcgcaggcaacgacagcgagcccaacctcatcgactgcctcatggtcagccccgcctgcagcaccatgagcatcgagctgggcccccaggccgaccgcacgctcggctgctacgtggaaatcctcaagctgctgtcagactatgatgactggagaccgtctctgggccagtttg

SEQ ID NO: 5283 - DNA, 482 bp, Homo sapien
ccgatttagaaataacaataataatgaagattctaggaatggcatgagggattgacgggggactgggagggagggacaagtggtgccctgtcccctgctcccctggccaaagaaagctgtccttgaggctgagccctcagccctggcctggtggggggacagcaaggtccgttgttataagaggggcagagaggacaactccgctttggccaacctagccaaggctgcagcatatagaccaggaaatcaggtagcccagactggtgatggagcagagtctgggggaagggtcgtgggtggggaatttatcaccaacatccattgtagggggaatctatgattctgcttccccagcggattcccactctgtccaccaagtggggggtagcacagcctcacagcaaccgccctgaccttgggcagtctagtgttcctgcattctagtccctgctgtgctgcaggactttgggcaagtgacctgc

SEQ ID NO: 5284 - DNA, 470 bp, Homo sapien
attcctgtgcgcaatcgattccgcaatgacagcaccttactccttcctgcggcaggctcacccctgcctgtgggatgttgtgagaggaacatgagccagacaaagacttggctcagggctccgtggaacaagccaggatgcacggggagctgggggagccccagcctggggcagcccagcaggccgctgaacaaacaccccagaagccagcactgtggcagggtgctggggagatgcccctctgagccttcctcccccctcagacctgaatgcactccacagttgggggctgcccctgccactcccctggtaatgcataagaggggaggggaaggttccctggggcttgagctccctctgtggaggtgaggaggggagattccgttcacatccaggaggggcaaaatgactgatgtatttttatgtatctacacagagagtgcattttctctccagagatgctgtctggt

SEQ ID NO: 5285 - DNA, 438 bp, Homo sapien
cagacaccccaccacctaggcaggggctgggccagggctccaaggcttgccccagaggccacatggcaccagccccagctgccatcagattcaagcccaggaggctgaaaacgagggcccaggaccagaatcgctgcctcctctccccagccccaccttgtacacacagtgtttcattgctccgcgtcttcccagccccagaaaccggctaaaggaccctgcaccatgagagccgaggcctggaggagcccgggtcagcctggggaggaacagaactgggccctcccagagcacctccgcttcccccctgcttccccaggtctctatccagagagagtccccaggtacaacaaatgctaattagatgacagcaaattaaccccctggaggcttctcctggcagagctccctggggccggggcaggctgtggatggggc

SEQ ID NO: 5286 - DNA, 386 bp, Homo sapien
taatgctaaatatgttagaaagaaatgatagcattcagcattttattcttcttaatctattaagctgtgtaactccctgccccaaaccactgaaaagaaaagtaaccttcaggccaggcgcggtggctcacgcctgtaatcccaacactttgggaggctgaggcgggcggatcacttaaggtcaggagttcaagaccagcctggccaacatggtgaaaccccgtctctatcaaaaattagccgggcatggtggcacgtgcctgtaatcccagctacttgggaggctgaggcacgagaattgcttgaacccaggaggctgaggctgcagtgagccaagattgtgccactgcactccagcctgtgtgagagagtgagactctgtctca

SEQ ID NO: 5287 - DNA, 273 bp, Homo sapien
caggttgcagctgctcttgcatctgggccagaagtcctccctcctgcaggctggctgttggcccctctgctgtcctgcagtagaaggtgccgtgagcaggctttgggaacactggcctgggtctccctggtggggtgtgcatgccacgccccgtgtctggatgcacagatgccatggcctgtgctgggccagtggctgggggtgctagacacccggcaccattctcccttctctcttttcttctcaggatttaaaatttaattatatcagtaa

SEQ ID NO: 5288 - DNA, 449 bp, Homo sapien
attcggcactagggagacagctgtgatttcatttgaaactgtgaaaccgtgtgccataatagaattttgagaattttgcttttacctaaattcaagaaaatgaaattacacttttaagttagtggtgcttaagcataatttttcctatattaaccagtattaaaatctcaagtaagattttccagtgccagaacatgttaggtggaattttaaaagtgcctcggcatcctgtattacatgtcatagaattgtaaagtcaacatcaattactagtaatcattctgcactcactgggtgcatagcatggttagaggggctagagatggacagtcatcaactggcggatatagcggtacatatgatccttagccaccagggcacaagcttaccagtagacaatacagacagagcttttgttgagctgtaactgagctatggaatagcttctt

SEQ ID NO: 5289 - DNA, 490 bp, Homo sapien
  misc_feature (1)...(490): n = A,T,C or G
tgttaccaatccgaagtgggagtaggtggggcagcagttcctcccggaagacattggcgaggacgtccagtgcagccgctgagcacttcctcaaattccagtcggacagagcatcatcatcatcgtcatcctccgcgtcctcggagccatcaggccgctcagcctcgtggggcagtgtgaccgtgcgtgacttgtggaagcgtggcttgatgtcctgctcactgtcggggacagcctcatcctcctccacatcccccttgagcaggatgatgtcaatttccgagtacttcatcccattcaccaagatggggatcaactggaccagatgggaggccaggacttccttgcagatgggctgctcggccagcgtcagcnagaactcacaggcctcaagggcaacgttctcatcatggtcctgggtcctctgcagcatgtactggatgatgctgtgcatgtgggggatgagcctgtcaatccgcacttccagaag

SEQ ID NO: 5290 - DNA, 467 bp, Homo sapien
tttcaagcaaaaaatgtttttccttgtgttttgtacaaaaagggggtgggaggtagttccgtgtgctggtggtgacggcatccacggggctagaagtgggcggtgaccgcgtccgtctccagcaagtcgtccaggattatgtctggtgtggtgccgatcttcttggctagctcgctgcgctccatggtgctcaggtacaggtagcggttgagcagctccccatccagcacgttgcgcacggcattctggagggtgcggcggtccacgtgcagcatccggaaggcgcgggggttgaggccggcgtggtgtggcagcatggtggtcagcgcgttctgcagcatcagcagccgccggtaggtcttctcctgcatgggcagcagcagcccgatgccgccgtccagggtggcaaaccacgtgatgtgcttattctcccacacgaccgactttttgctgagcccttcagtggc

SEQ ID NO: 5291 - DNA, 435 bp, Homo sapien
tcgatatagtagcatttatttctttttatttttatttatttacatatttttagtataaatagagagttcatctgggccaagcttgaagactgcagcccgggaacatagattcaggtttcccagaatctacactcccaagtagcctttatgtaatattactggaagaagaatggatttgaggtaagataagttatggacacgctgagtctgatatgtggtaggtttcctaggtgaagaggttctcaggatataacatcggtctggacagagaaagtgctacatgtaagagaaaaagttcataagctggacttcaccaaaataaaagattcctcatcttcaaaaactcaattaatggctgggaaaaatacttgaatttgcaagtgacgaaggaatgatgaaaaactacagtacagagtcaaggtaagagtcacgtaa

SEQ ID NO: 5292 - DNA, 326 bp, Homo sapien
ttttcacagaaaaagaacatccaactttattcttaaatgtgtctcaagttaaaaatggcagaatgaatagcccttagttagcacacactatttttaaaagggacacttgtagaatttcactggttttttgttgttgtccttgttgttgttttccccgcttcttttcataggtgttgacgtatttgttttctaatgataatcttaagagttgactcttctaaaatggtgctcagatgttctgatatattcaggcctttcttaaacaacttactctgcattaaaaagtcatcaataagaactgtaattcagtgtttttaaaaatgaaa

SEQ ID NO: 5293 - DNA, 189 bp, Homo sapien
atcaacagacaaaaaaagtttattgaatacaaaactcaaaggcatcaacagtcctgggcccaagagatccatggcaggaagtcaagagttctgcttcagggtcggtctgggcagccctggaagaggtcattgcacatgacagtgatgagtgccaggaaaacagcatactcctggaagtccacctgctgg

SEQ ID NO: 5294 - DNA, 393 bp, Homo sapien
taagtataaagcacagtttaatacattttgataaagcttactcttataatcaaaatccctatcaagacacagaagtgttttgttgatataaacagaaaatgaattagtaaaattagactgtcatggcttagctagcaagaacgtatctcatttaacaatctacttggccatactcgataaacaggaaaaaaaacaaacatttacagtgaggactaaaaacttaaatgccttacaagggcagcagtaagtaaaatggtcaaaactgaactgatctaaatagatagatatacactgacttagagaaatgaagaacccatatttgtcaaatggtatgatgctcagcctgatattcagctctgattattgccatgtagaaataaaggctcagctttc

SEQ ID NO: 5295 - DNA, 533 bp, Homo sapien
gcgccgttgtgacctaaccgcagcgcctgtgtgcaacgtggtggggctcccggcaatgctcggctctgcccaagtaggcccgccctgggctgcgcgagccgctttgccaaggggtttccttctcactcagacgcatgatggccccaggtgtggccgcgggaccgagggatggacgggctggacctggctcgccgtaggagacgccccccacccctgggctggagtccagcaggccgctgatcctgcatccccagaccatggggcctccaaacaccttcccagctcctgtcccacgtgtccggccaggctcaggaaccgggctcagctgcactttcctcttccccgcaggctgtgaagctacgggaacaggagcagaaggaggagaagctgaggctccagcagcaggaggagcggcggcggctgcaggaggccgagctgcggcgcgtggaggaggagaaggagcgcgcctgggcctgcagcggaaagagcgtgactgccgcaagcgctgctgagcatcctgctgagcaagaagc

SEQ ID NO: 5296 - DNA, 512 bp, Homo sapien
tcgggccgtggggggtctctcaagctggttccaacgctgaggccccacagcctcccaattccgggcagacccctgacacctgctgtctggccccttccggcctgaagctgcagccgcgccatgtccacccctccgttggccgcgtcggggatggcgcccgggcccttcgccgggcccaggctcagcaggccgcccgggaagtcaacacggcgtcgctgtgccgcatcgggcaggagacagtgcaggacatcgtgtaccgcaccatggagatcttccagctcctgaggaacatgcagctgccaaatggtgtcacttaccacactggaacatatcaagaccggttaacaaagctacaggataatcttcgccaactttcagttctcttcaggaagctgagattggtatatgacaaatgcaatgaaaactgtggtgggatggatcccattccagtcgagcaacttattccatatgtggaagaagatggctcaagaatgatgatcgggctggccacc

SEQ ID NO: 5297 - DNA, 411 bp, Homo sapien
ttgcggccgctgcccgtgaaaaccagctgctgcagccgcagaggagccggctgtagtgggcggcgggcaggaccagacagggctgggcagggggctggccgagcgccgtgcgcgcttgggagaaggccggaagcttaccagccgagaaggaattcctagctagcttcagagccgggtaggtttgcctgggaccttgtaggccggctgtgggggactccccgggtcgcacagccccattgtttgcatattgcccgagcaggccacggtggctcgcagccccaggactcgcaagcagctccgatcggttggaactcggggcggcggcacagcgctgagccggcctggatgaggagatgcagcttcctgcaggggccaagtaaggatctggggacaaactgtccggaactctgg

SEQ ID NO: 5298 - DNA, 380 bp, Homo sapien
ctttctatgaatgggggccaaatcggtggagtgatttatatattactctgtccgatcttgatacataaatacccagccccatccctgccctagaaaagatagacgtatattaattcggaaaatagctctgttcacctgcccctgccacccacctggagctcctgccccacaaagctggcccctgctccggatgagcccctgctcccgatgcgcccttgcccagcatcctggggcggggagggcatcagcttcttttggaagacaatctgggccctgtcgctccattggcctgaagaggaaagtgagcccctaagtgggcaagggcagccctctggcgccagccgtcaggtccttcggaagaggttactgagaaagccacc

SEQ ID NO: 5299 - DNA, 136 bp, Homo sapien
ggggaggagccctcgtaagcagacaagagtgcgcgtcgatcttgcgcagcgcagtagaagccgcacgctcttcggcaggctgcgcaaccgcagtggaggcctcgtgtgcccggggtggggcacgagactgggcgga

SEQ ID NO: 5300 - DNA, 217 bp, Homo sapien
gggggcggcgggcaggaccagacagggctgggcagggggctggccgagcgccgtgcgcgcttgggagaaggccggaagcttaccagccgagaaggaattcctagctagcttcagagccgggtaggtttgcctgggaccttgtaggccggctgtgggggactccccgggtcgcacagccccattgtttgcatattgcccgagcaggccacggtggctg

SEQ ID NO: 5301 - DNA, 347 bp, Homo sapien
tgagcagacaaatctttattcctgaggctaaaatatgcaccagttccctccctgtaccgcgccactgccagcctgactgcatgcaggccctgtcccagacctggagcgctgaacttggagtcccaggacctccttccctgagttgtgtgtgtgtacatggaggggactcctgggtagcacctggaggcggcctaggggtgaggggcttctcaagggtgccctgcactgccagaggtgcagtcttgggcaggatgtagcatgttcagagtctggtgaccgaaacagggctgtcggggacaggcctcgggtgttggagggcaaaggtgacagcatcatggacagaggca

SEQ ID NO: 5302 - DNA, 245 bp, Homo sapien
gggaggggcaagcccccaaactgctgtggggacattttgtaatctatatgctgcacccacttaatctactgtggtgtttgggttattagtttggcataatttcagcttctatatattgtatgtatatattttgtaaaaatctatgttttgggaaaaaaacgtgcacaatgtggctttctggttggacatgtacctttctgaaagagaaaacacttaaaatgagcattaggacataacagactagg

SEQ ID NO: 5303 - DNA, 333 bp, Homo sapien
agctgaagcaagagaacacacagctggtgcacagggtgatgagctggaggagatggtgaaggatcaggagaccacggccgagcaggtctggaggaggaggcgcggcgccaccggaggcctacggaagctggagagggagaaggctaccgaggtggagctgctcaatgccagggtgcagcagttggaggaagaaaatacagagcttagaacaacagtgactcggctcaagtctcatacagagaaactggatgaggagcggccgcgcatgtctgaccgtctggaggacaccagcctgcggctcaaagatgagatggacctgtacaagcgcatgat

SEQ ID NO: 5304 - DNA, 359 bp, Homo sapien
tttccctgatgactaatgatattgagcaccttctcatgtgcttattagccatttacttatttttgtgaattttatgttcaagtcttttgtccattctttaataatttttaatatttcatgatgaaaattccaaatatgcacaaccgaagagagtacgacagagccttacgtgactcttaccttgactctgtactgtagtttttcatcattccttcgtcacttgcaaattcaagtatttttcccagccattaattgagtttttgaagatgaggaattttgtattttggtgaagtccagcttatgaactttttctcttacatgtagcactttctctgtccagaccgatgttatatcctgag

SEQ ID NO: 5305 - DNA, 478 bp, Homo sapien
ggaaaacctccaaacacaagaggaatttggctatcactggaggagtgactttgtcggtcattgcatccccagttattgctgcagttagtgttggtattggtgtccccattatgctggcatatgtttatggggttgtgcccatttctctttgtcgtggaggcggctgtggagttagcacagccaacggaaaaggagtgaaaattgaatttgatgaagatgatggtccaatcacagtggcagatgcctggagagccctcaagaatcccagcattggggaaagcagcattgaaggcctgactagtgtattgagcactagtggaagccctacagatggacttagtgttatgcaaggtccttacagcgaaacggccagctttgcagccctctcagggggcacgctgagtggcggcattctctccagtggcaagggaaaatatagcaggttagaagttcaagccgatgtccaaaaggaaatttt

SEQ ID NO: 5306 - DNA, 354 bp, Homo sapien
cctcgtgcgtgctccagttatgggaacgtcttcccttgggagaaaaaaacacaactgattgacactcagaactcttagctgtggaagaacatcatgcctatttataaccactgaatgcactgactttcaaaaactgaggtggggtgtgtgttacgaatgggctttttaacacttttagagtgttgctttagaactaccatcttcatatacaggagaaaggaagcatttaaatttttatagtgattatagagaatgattatatgatgtttgtaatgaataaaatagtagtttcattatttggcacaatagcagtttattttaaacaaacaatttgaagttaaacatttcattttt

SEQ ID NO: 5307 - DNA, 263 bp, Homo sapien
aagtccagctcacctttgccttcaatatgtaaccaaaggaaaactcaatactgtttccaccactgtctgcccacccgagcaccttcttactccctggacctagaaggggagaagaggctggaggtggggtggatggggccagagtgaacggttctacagctgtatccccagaacctcctccagggtcttggaaggagtcctgagaggtgggattggggccgggctggcagggctgagtttgcgcactgtgtatcttatgcaca

SEQ ID NO: 5308 - DNA, 224 bp, Homo sapien
agaagctgatgggcagcctggatgagaacagtgaccagcaggtggacttccaggagtatgctgttttcctggcactcatcactgtcatgtgcaatgacttcttccagggctgcccagaccgaccctgaagcagaactcttgacttcctgccatggatctcttgggcccaggactgttgatgcctttgagttttgtattcaataaactttttttgtctgttgata

SEQ ID NO: 5309 - DNA, 369 bp, Homo sapien
tgtggcttttacgtattgtgccaaaacatccatcctgagcctggagaagctctcactcaacattgccactgactgggaggtccgcatcatatgacaaagaactgcccctggtgatgtgagcagggacctgcctgcccctttcaacctttcccctcaccttttttgagatttttgctgcaatctgtttgccttccctgaatcaaaataatctttcattcgtcaccattatactaatgaacaatagatttcatgtttcaaaatttcagattttacatgttaagatgtactaacaatattccttgtatcaaacatctccttttctccctgatacatagccctgagacatttatagcgttcaggagtcttcta

SEQ ID NO: 5310 - DNA, 429 bp, Homo sapien
attcggcacgatggggcagtcccggctttgaggccaccttcttccagctgcctaggatgagcagctgtggaggccgcttacgtaaagcccaggggacattcaacagcccctactacccaggccactacccacccaacattgactgcacatggaacattgaggtgcccaacaaccagcatgtgaaggtgcgcttcaaattcttctacctgctggagcccggcgtgcctgcgggcacgtgccccaaggactacgtggagatcaatggggagaaatactgcggagagaggtcccagttcgtcgtcaccagcaacagcaacaagatcacagttcgcttccactcagatcagtcctacaccgacaccggcttcttagctgaatacctctcctacgactccagtgacccatgcccggggcagttcacgtgccgca

SEQ ID NO: 5311 - DNA, 325 bp, Homo sapien
ggcgcaggaattcaataaagaaaatggcagctcttacatccaaggaagaggaagcaggattctttgaagtgtgacagccttttacacttcactgaaaatctgtttccatcacctaataaaaagcactgtttttatcaaaacagtgataaaaatgaagaaaacctgcattgctctcaacaagagcattttgttttaagtgcgctcaaaacaactgaaataaatagactgccatcagcaaatcaaggctcaccatttaaatctgcgctctccactgtatctttttacaaccaaaataagtggtacctcaatccactggagagaaagc

SEQ ID NO: 5312 - DNA, 413 bp, Homo sapien
ctgccctgtccagacgcagctgcaggaaccaacactatcatcctggtagatgcggacggccacgtgaccttcactgagcgtacatgatggacaaggacctctcccactgggagaccagaacctatgagttcacactgcagagctaaccccacctctgggcctggccagtgggctcctggggggccctgccttgaggggcactgtggacaggaaaccttcctttgccatactgcattgcactgcccgtggcttggccagcatcccccggatcagggccctgtggtttgcgtgttacccatctgtgtccccatgcccagttcagggtctgcctttatgccagtgaggagcagcagagtctgatactaggtctaggaccggccgaggtataccatgaacatgtggatacacctgag

SEQ ID NO: 5313 - DNA, 439 bp, Homo sapien
ttacaatctgaagagggaggaagaaaggagggagcccaggaagggaagactggaaatgccctaaaaggtgccactctaatcagactccacctccagtgcggataggaggcaggctgtcggcttcctcagggttttggctaagggctttttcacccattccctcaatcctgcccagagttacataagcagcagctaagtcaggggatgagaatgacgcagtgatgccactcaccatggcctgttcgatctagttgtctatggccaccacgctggctccggaagcactgccaagacaaaaagcaaagcgacccattacccactcggttctactcttgagtacatggcagttgtggccaaagtcctccatctgcctcggctcttcctctctctctacttctcgcctccctggcccagagttccggacagtttgtccccagat

SEQ ID NO: 5314 - DNA, 409 bp, Homo sapien
cagaccacccacgaggagttgctgctgctgaggcgggacggcgggacacagcctggagctggaacgcgcacggtcagaggctggggaggcgctgagtgcctgcggaggctgcagcggcgcgtctccgagctggaggaggagtcacgcctccaggacgccgacgtgtcgcgtgcctcgttgcagtcagaactggcccacagcctcgacgacggcgaccagggccagggcgccgacgcacccggagacaccccgaccacccggtccccaaagacccgaaaggcgtccagcccccagccttcacccccggaagagatcttagagccccccaagaagcgaacatccctcagtccagcggagatactggaggagaaggaggtggaagtggccaagctgcaagatgagatctcgc

SEQ ID NO: 5315 - DNA, 336 bp, Homo sapien
tagggagaatctcgctctgtcacccaggctggagtacagcggtgcaatcacagctcactgcaacctctgccaccacgcctggttaattttttattttttgtagagacgaattcactatattgcccaggatggcctcaaattcctggactcaagtgatcctcccgcctcggcctcccaaagtgctgggattacaggtctgagccactgcgcctggcctagatctacatttttaatgaacacagaaccaaaatgactctgaagcaacctttaccaggacacagttcaaagatctggatcctgcgaaacaagtttgtttgtttcttttctttttttctt

SEQ ID NO: 5316 - DNA, 410 bp, Homo sapien
ctgagcgccggcgacgcgcctggcgcggaggaggactttctgcggcagtcggcagcctgctcgggactgcactgcccggatcgcgcgctctgcggcggggatggcgcggctgcgttcgggaacccggtgccggactgcgcctgctgcgctttctctgctcagagctccaagccacccgcctcctgtgcctccgctctctgctggatccgagtcctaggccaccccttggtgaaggggtagtggagggagccggcatggtccaagaactggaccttaccctccaagccctggggctgcccagacctgcaccagggacccccgccagccagctgctgcaggagttgcatgctaagatctcagagctgcagccttctctgcccccagggtccctgcagcccctcctcagctgc

SEQ ID NO: 5317 - DNA, 394 bp, Homo sapien
ggacacgggcagctcaggtcagcctgttggtagatgctgggacacattagaagagggtctttttgatctgggagatgagacgggatccttcatgagaaaagccagccaggtagagcctgaagctgtgatcactccagtggtgaagggtgcagctctggttcttccagagagactgcccccttccctccagtggcactccaagtcccccccatgttggaaagaggaacagggcttggattgatgtttataccctctgaattggagggcagtgcagggcatttgcagaagctgggaaggaccaagcctcagcaccccagggctgcggggctcttgttggccgcacgtggcagtgcagctggagaggaagcctggggcacgtcctgtgcggtgccac

SEQ ID NO: 5318 - DNA, 376 bp, Homo sapien
gctcggggctgcagtgcgctctaatggtgcctgtgaataaccactgcattcagcctgggcaatgaagcgagaccccgtctctaaaaaaaaaattgaggggtcaaagaggatgccaaacttaattagagactgagacagggcagggtgccgaggtgtctgcatgcgtttcatgtggatgcccgtgtctattctggcctgctcctgggccccctccccactcagccctggctggtgagaatgggacagggactcccttctcgtgtccctgtgcagcgtcggcccaggaggtagcagagcagtatatgcacatctgggtgtgccctcctgcatgtccccacacatctgtcattcctgtctttgcacacctatgtgactc

SEQ ID NO: 5319 - DNA, 125 bp, Homo sapien
agcggcctcaacatctcctggagtctagaagctgtttcctttcccctccttcctcctcttgctctagccttaatactggccttttccctccctgccccaagtgaagacagggcactctgcgccca

SEQ ID NO: 5320 - DNA, 428 bp, Homo sapien
agctggccgacgtggacaaggacgggctgctggacgacgaggagttcgcgctggccaaccacctcatcaaggtcaagctggagggccacgagctgcccgccgacctgcccccgcacctggtgccgccctccaagcgcagacatgagtgatggcgcccggcccgcacctgccatttgcacgcccggcggacagagacggggggaggggaagcctcaccatttctcaaggtccataaagactgagcgatcatcccctcgcctctcgaaaaggaaaaccaccatctttcttttaaggctgttcctgggcctggcgggggaggcaggggtgagaggatggaattgtgtgcacaagaactgtggctattttaatatataacgttagaggctgcgttctttgtcgccgcctcccctgtgtgccagccctgtgtg

SEQ ID NO: 5321 - DNA, 454 bp, Homo sapien
taattttcagtatcatttaattctttaatactttggggacatttccttttcctttaacaaaaagaatagaagtgatactatatactgctagtagaaaattaagagcttttctataaaatcctatgaaattaaaattaaatcgtcttatttttaaaaatgcaaaagaagccagacagtagacttaacaaccatgaagcagacccacttccctctgaaccaaggatttcctatgctttctagatatcccttcagaaaaggccttctctaaattaactgaacaattcggaataccaagaagtaggtagagagcaggaatgtgagcagatcatcgaatatatgtttttactccatggtgactaaaatgaagtccatagataggagcaggtgaagaagaaaacaacacaatctcctgatgtacagttgtcactgacccagagcagtctgctgctgtgat

SEQ ID NO: 5322 - DNA, 168 bp, Homo sapien
tttttttttttttttttctgcagggggcatgttcccgtttactgagcgcgagttctcttggggtggaacggggaccacccgtgcctgctcctggccaggcggggatccccagcagggctgggccaagcccagggagtggggccctcaggcacgggtggaggctaggag

SEQ ID NO: 5323 - DNA, 137 bp, Homo sapien
cttaaacccccagggactgcacagagcccccccggggccaaaacccagggaaggcagcccaaacccacctttcttccccctttttccaccccccacccaattcccaaccctggccaaaaaaaaatacggaaaagcaa

SEQ ID NO: 5324 - DNA, 459 bp, Homo sapien
ataatatttattttaaatagtggagatagggtctcactctgttgtccacgctggtcttgcctcaagtagtcctcctgcctcagcctcccagagtgctgggattacagatgtcaaccacttcacccagcctgtgctgtctttattgaaaatagcaagcgatgattttccaaaccagaaggccaagcaggaaagcccagcgcgtcccttgccctcaaactcagctcttggggaggtgtccagtgacgtcctctctgctgtacaggatgatcccaccccgatcgttaggaagatgtgccccaggaactcgggatttccttagtgtggtgattaggggtgaaatggatcctttgatagggagtttcttgatggaacgaagggcgagagtgtctctgagaagtgctgcagaccaaggagggccagcctgtcctggagcacctggggctgttcttggagtaaggc

SEQ ID NO: 5325 - DNA, 430 bp, Homo sapien
gcggccgccgcgccctggcacagagagagccctgcccagccgcccaggagccggccccgagtgaggacagaaaccccttccccgtcaagctccggtccacctccctctcgctcaaatacagggatggcgccactcaggaggtgaagggtgtgaagaggtacagtgccgaggtccggttagaaaggtcgctgaccgtgctcccgaagaggagaagtgtcccctcggacggcccccgcccttcgaggcaccagggcccccagcgaccaaggaaaggggaaggcccggccccccgagccgctcagctccaagccgcacctgccccggaagccgcttctgcagagcttcacgctcccgcaccagcccgcgccccccgacgccggcccgggagagcgggaacccaggaaggagcccaggacggcggagaaaaggc

SEQ ID NO: 5326 - DNA, 353 bp, Homo sapien
agtaaagacggggtttcaccgtgttagccaggatggtctcgctctcctgacctcgtgatccacccgcctcggcctcccaaagtgctgggattacaggcgtgacacccgcgctcggccaatttcgaagtgttttcaaactactgcagccctctcccattgctgtggtaactggatggaaatgcatctagcaagagaaaatgtacataaagattacctccctccctgctctaggtttctgcaggtgagaaggtgtcgtgatagaataatgaacatttcctgtggggctggcactgtgttctacatagaactcatttaatacaacaaccgtataacgaggtaagtaccattatggt

SEQ ID NO: 5327 - DNA, 308 bp, Homo sapien
tattttccccttgtctccatatttttattccggtacctggactggactatatactctcaattaaaaaaaaaaaaaactaaataaaaataattctcaatgcagagttcttcaaagaattcctaataattcacacgttccagcttcagttatcaccgagaactggttaggttccttccacaccgggaaactgcatcaaggaaaagagctgggcaaagtcagattttcatgccagccggactccttcgcacccactttcagggagcctcccgccagcctccagacctggtcagatgatatgaccttagctc

SEQ ID NO: 5328 - DNA, 395 bp, Homo sapien
tgcggccgcccctccccgattcccgccacctgccgcctggccaggtggaaggggcgctgccgcgagcctccgggcctcagggtgttccggggagcggcgccccgggtctctgggcccacccgccccggggtcctccgagagtgggggctgcgcgcggggtcagacacctgttcggcccggcccggcgtggtcggcggccaggatgaaagtgaccgtgtgcttcggcaggacgggcatcgtggtgccctgcaaggagggccagctgcgcgtcggcgagctcacccagcaggcgctgcagcggtacctgaagacccgggagaaggtgagcgcggcgcgaggagtggggcgcggctgcagcaaggcacctgccagggtcctggttactgggtgaagat

SEQ ID NO: 5329 - DNA, 258 bp, Homo sapien
tttttttttttttttttttttttgaggctccttggcggtgccatctttattattcccagccacaagttatagccacaacctctcttccatttaaagtgtgcgtcacccgcagaagacaacaggtgccggagttcactcctatgattcaattctaccctcccctggcctttgcacggatcccagtggtcctggctcggatcaggcctacagcttacttcccaggcatgcttccaggaaggcagttggggtagggggtac

SEQ ID NO: 5330 - DNA, 359 bp, Homo sapien
tttcacgacaacaggtaacctttagtcagaactcaccacccactgtgttaagccttacatgacaatcaccatgaagatttacatacacatgttatatcatagtctcctcacaacatgtctaagaggtaggcacgtcattgttcccattttgcagatgaggaaactgaggttcagagagggcacttggcttgcccaaagtcacacagcagggagtggcagaggaagtcaggttgggtgaccccagtaactgctctcagaggctgggtgatgaccggcttcctggcttctctggaataaacctttgccaccacttcctgcatttcagcttcagtacaggcagagaatggggataggtgggg

SEQ ID NO: 5331 - DNA, 342 bp, Homo sapien
tttcctgttttaatgttactttgtttattaacatgtcgttctaaatattacataaatacagcttacatactagagtatcaaacattgttccagtaagaagttcaagagtacatttagggctatcttaagaaatatgaatactttggcttccattattacattagatgaaaaaatcaattcaaataagagttgtcatatcctgctatgattaacaaaaaaacaagtagaaaaataagagagtgtatttaaaaaaaataatcaaatgctttttgaaagacctgttctcttcactgccacacatattcatacaaatgacttagtaatctaatatgagaagtggtc

SEQ ID NO: 5332 - DNA, 325 bp, Homo sapien
aacatttgaaatttttattgatttttaaatttaaaatccagttttaaccacaaaattgtttgaatcacaagtggtaatacaatgtcttcaatatttttctaaagttatttttctatataataataagacaacagcatagcatataggaagttttcattccagtggcttttttatatatttatccttcttaggaaggacaaattaaattttttaaattaaacttttaaaatataacaacatctaacagaactgtacaaaacaaagagacattttttaaacaacttgccaaacttacttatgagtgtgttttaaaaacaactttgta

SEQ ID NO: 5333 - DNA, 366 bp, Homo sapien
aacaatgtaaatgatttaatggtcacctgagtggtgtatttgaggagtacaggtttccttgtaggattttttttttaaggcatccattgagaaaaaagaaatgaacactatcagagaagaatcctgatggagatactgttttgggctagaggtattgaagaccccttaagataaaaaatgcatgacttggctcttccctcagagagctcatactaggtgttcaattcacattggtttctgaatggcttgaaaacaatgatatccattctcagagggctgagactggatctagaattggcacttcaatgcttggcagtacttttgatcttctaatatgccctcttgttttccagagcaatattgaca

SEQ ID NO: 5334 - DNA, 358 bp, Homo sapien
ttttttttttttttttttttggtgacagggtatgtatcaggcagcatccccacaacaaccctgtgaggtaggttgcgttgtcccattttacacatggggaatgagggctcagcagaggtgaagtttcttgcccaggtcctgcagcaagaacacgagccgggattcaagcccaggtctgtcgggctccaaagcccatgtgtgttctctaggcaagaaatagggagtagtcctatccaataaagaccctcacgttaaaagctcaggggctcttcagcccaccctgaatgggccacagggtcagagatggaacccctccaggggagcagccacagccccagcatccactcgtggccccggg

SEQ ID NO: 5335 - DNA, 411 bp, Homo sapien
ctcccatctattttaagaaagccataatggaatctgatgaagagtggtccatgaacaagaagttgatagatctctcttcaaaagatatcagaaagtctgtacccagaggttaccttacttctctgtggattttggccttcacggagggtttgcccatgtcattgaagatcagcacaaattccctcattactttggaaaggaaatcataggtgggatgctggatatagaaccaagactttggaggaaaggcatccgagaaagctttgaggatcagaggaaaaaaagcactgcagtttgctcagtggtggaaaccatatgacttcaccaaaagtaaaaactattgaggtgtaccttccattttaaaatttttcttgagatcccgttcagttttatttccattgcatctaatga

SEQ ID NO: 5336 - DNA, 180 bp, Homo sapien
  misc_feature (1)...(180): n = A,T,C or G
ggacctggacctgttctcaccgtcctggcactgctcctagcctccaccctggcctgagggcccactcccttgctggccccagccctgctgnantccccgcctggccaggagcaggcacgggtggtccccgttccaccccaagagaactcgcgctcagtaaacgggaacatgccccctgca

SEQ ID NO: 5337 - DNA, 380 bp, Homo sapien
gtgggagggtcagatcattaaatcagatttaaaaaactccaacaggactgggaatctagcctcctcagacctgcgatgatgttccttgctcttgagatctgttcacctatcccagagaactaagacattcaactaagaaaaacagactccacaactttggcaatctgggagggggagcccagtgggtgggcctgaaatactgacatgaaacacgtcataaacaacagtacagctttggtcccaccaacatggccctgtcaggctgggtaccagagggggactggtgccgtgaatctctggaaacaagaagtgaagcagcccggccgacctgtgccaggaagcactggtggacacaccccgtcaaacagccagggctttct

SEQ ID NO: 5338 - DNA, 419 bp, Homo sapien
  misc_feature (1)...(419): n = A,T,C or G
ggcttcggcgccacggcagcgctagtcggtctggtaaggcaaagcggacgganngatcctcaaacggcctagtgcttcgcgcttccggagaaaatcagcggtctaattaattcctctggatttacaaaaggtgcaggtatgagcaggtctgaagactaacattttgtgaagttgtaaaacagaaaacctgttagaaatgtggtggtttcagcaaggcctcagtttccttccttcagcccttgtaatttggacatctgctgctttcatattttcatacattactgcagtaacactcttattatatggagccggctttaccttatatcagtgacactggtacagtagctccagaaaaatgcttatttggggcaatgctaaatattgcgggagttttatgcattgctaccattgatgttcgt

SEQ ID NO: 5339 - DNA, 348 bp, Homo sapien
ggaattctgactccttccaattcccctgcaacaaagtttgtaccaggagcatttggcgagtgtccagcaagatgtgcccgtggatgtggatctccccaggccctgcccttcccgcaccctaggcgggctcttaccagctcccctgcgcacggccgttttctccgccgtcctgggctccttcctgggttcccgctctcccgggccggcgtcggggggcgcgggctggtgcgggacgtgaagtctgcagaagcggcttccggggcagggcggcttggagctgagcgctcggggggccgggccttcccctttccttggtcgctgggggccctggtgcctcgaagggcgggg

SEQ ID NO: 5340 - DNA, 416 bp, Homo sapien
gtgaagcagaccatcgcgcaccagcagcagcagctcaccaacctgcagatggcagcagtgacaatgggctttggagatcctctctcacctttgcaatcgatggcggctcagcggcaggggcgctggccatcatgtgccgcgtctacgtgggctctatctactatgagctgggggaggacaccatccgccaggcctttgccccctttggccccatcaagagcatcgacatgtcctgggactccgtcaccatgaagcacaagggctttgcttcgtggagtatgaggtccccgaagctgcacagctggccttggagcagatgaactcggtgatgctggggggcaggaacatcaaggtgggcagacccagcaacatagggcaggccagcccatcatagaccagttggctgaggaggcacg

SEQ ID NO: 5341 - DNA, 465 bp, Homo sapien
  misc_feature (1)...(465): n = A,T,C or G
ggcatcaaggccctgggcaagtatgtggacctcaagcggctgaacacgacaggcgtgacgccggnctgcaccgccgacctgctggtggggcgcgccatgactttccatggccacggcttccttcgcctggcgctctcgaacgtggcaccgctcactggcaacgtctactccggcttcggcttccacagcgcccaggacagtgccctgctctactaccgggcgtccccggatgggctatgccaggtgtccctgcagcagggccgtgtgagcctacagctcctgaggactgaagtgaaaactcaagcgggcttcgcgagtggtgccccccattacgtcgccttctacagcaatgccacgggagtctggctgtatgtcgatgaccagctccagcagatgaagccccaccggggaccaacccccgagcttcagccgaagcctgaaggggcccccaggcttcttcttggg

SEQ ID NO: 5342 - DNA, 444 bp, Homo sapien
aggtttggtaactttgggttttgtaaaatcagcaaaggcagtgtttcaaaaagtgcaaaaaaaaagattctgttataaagtgattttctaagtatttcctaactttatttttcaaaatgatgttatgaacaccaaatttaaagatttttaacatgtcagagagaagagagttaaaatttaaaaatgcatcttgggagagaaatttgtctatgtttctagtgcctttcttgtcttgattgtatggtcagtaggcaatcttaaatgtttttatttaaaataaagtattccttgaaaatataaatatatgtatacactactaaattttgcatttatagctaaattgaatcagaagactgcttatggttttaaaattgcaatgacttaaataatgaggttgttaattagagtcagagcctgttcacatattgtgatcaggtagcaatg

SEQ ID NO: 5343 - DNA, 429 bp, Homo sapien
ctcaggaacctccaatcatggcagaaggcaaagggggagtgagctgtctcacatggccagagcaggaggtagagaggggaaggtgccacacacttacaaacaaccagatctcaggacaactcactcagtatcaggagaacagcaccacaaaattgtggttaatcattcatgagaagcctcccacgacccaatcacctcccaccaggccttacctccaacatctgggattacaattcaacatgagatttggtgggaacacagatccaaaccatatcacgcacaaattgcaattacttcacactcacgataacccattaatctgtgaaggattaatctgttcatgaaggcagggcctcatgatggaatcacatcttaaagcccctacgtctgagtactgttacattggggatttagttttaatatgatttt

SEQ ID NO: 5344 - DNA, 400 bp, Homo sapien
gattacgggtctcgaacaggaagcatctccagcagagtgtctgtgcctgcaaagcatgaaaggagaccttctcttccaccttctaaacaagctaacaagaatctgattttgaaggctatatctgaagctcaagaatccgtaacaaaaacaactaactactctacagaaacagacacttccagttgctcccagaactcgaacttctcaagaagaattgctagcagaagtggtccagggacaaagtaggacccccagaataagtccccccattaaagaagaggaaacaaaaggagattctgtagaaaaaaatcaagattactatgacatggaatccatggtccatgcagacacaagatcatttattctgaagaagccaaagctgtctgaggaagtagtagtg

SEQ ID NO: 5345 - DNA, 444 bp, Homo sapien
ttcggaacgaggcgggcagtgacacagacccggacatggccttctgtaagagctttcgagacaagggcatcttcctccatctgagcaatcagcatgaatttggccggctcctggccacttccagatacgacacggagcacctgcaccccgacctctggcagatcttcgacaaccccgtcgactggaaggagcagtacatccacgagaactacagccgggccctggaaggggaaggaatcgtggagcagccatgcccggacgtgtactggttcccactgctgtcagaacaaatgtgtgatgagctggtggcagagatggagcactacggccagtggtcaggcggccggcatgaggcgcgggcggtgatgaactttgtggttcgctaccggccagacgagcagccgtctctgcggccacaccacgactcatccaccttcaccctca

SEQ ID NO: 5346 - DNA, 466 bp, Homo sapien
ggctttgtaaattgtttgtatcacttcacccgggattaaaacggggtgtttgtttggggtcccagttggattaaagcgttcctgataattgatgcacatggcttgcttcctgcaaaaaaaaaaaaaaaaaaaagaaaaaaaagaaaaaaaaagaagaagaaacccgcagctctgggcagagaactgaagctccctacagactagtgattgttgttcttgggggagggggaaacctgtcagtgttcattccacaagcatcaccgctcttgagtttcagcccgagaaagcagtgtttgccatgtgacccatgagatgccaacccccaccttcctccctcctgcctccattagtgaagcactgttctgcagcagccagtgggtcaaatggttgtcactaaatgtctctttttggtgacatttgctttttaagaaagaggcagtatagtatagtggttaagagcaaggtc

SEQ ID NO: 5347 - DNA, 438 bp, Homo sapien
  misc_feature (1)...(438): n = A,T,C or G
attcggaacgaggtggtgccgaggggagcggctggagcccttcagcatgaagcccgaccgcgagctcaggctgtagctgccgcccggcctgcctggggctgggagcccangacaccgacaccctgaggacgtgtggagctaaggtcatatcatctgaccaggtctggaggctggcgggaggctccctgaaagtgggtgcgaaggagtccggctggcatgaaaatctgactttgcccagctcttttccttgatgcagtttcccggtgtggaaggaacctaaccagttctcggtgataactgaagctggaacgtgtgaattattaggaattctttgaagaactctgcattgagaattatttttatttagttttttttttttttaattgagagtatatagtccagtccaggtaccggaataaaaatatggagacaagggga

SEQ ID NO: 5348 - DNA, 424 bp, Homo sapien
tgcgttatagacagtgagacttaaagtgagaaagagtcttgcttttagggaatttttaatatggctatgttatcgaagattacctattgcaatggtatatagtcattagccaaaattgaattctcaggctatctgagaggattattcacaattacagctcttcaaagcaactgaggatttagcaggaagatcccacagtcctatatggaaggagaatatcatctcttcaggaaattattctccacttaacctattagttataagtatatctggttataagcacttttggtcaatgattttgtttttcttcaatctgaatgctgagttctacacatccaatcctggcaccacattttcgtgatattgggagcttgaaaatgtacaccactcacatggtatggttttgaaaagcattgggttaaca

SEQ ID NO: 5349 - DNA, 420 bp, Homo sapien
ctgaatttgcctgtatactctcgttctgcgacttataaaggaccagacaaatcaaattagtggttttggtttccgccagctgtggatgcctttgacattatgaccgcagaggattccaccgcagccatgagcagtgactcggccgccgggtcctccgccaaggtgcccgaggcgtggcgggcgccccaacgaggcagcactgctggcgctgatggagcgcacgggctacagcatggtgcaagagaacgggcagccaagtacggcggcccaccgccggctgggagggcccgcacccgcagcgtggctgcaggtcttcgtgggcaagatcccgcgcgacgtgtacgaggacgagctggtgcccgtgttcgaggccgtgggcgcatctacgagctgcgcctcatgatggactttgacggcaag

SEQ ID NO: 5350 - DNA, 392 bp, Homo sapien
ctgggtgcgtggggctgcctcgccgcgtctcgccacgggtctgccagcagacagccttggacacaggcacaagggctggagccagagatgagagtgcccaagggagatgtgagcctggcgggctgcccgctaacctgtcgctgaagccccagaagcgggccctcaggcaggcctaccctgcctccggcccagcatgcgcctgtcggtgcggagggtgctgctggcagccggctgcgccctggtcctggtgctggcggttcagctgggacagcaggtgctagagtgccgggcggtgctggcgggcctgcggacccccgggggccaatgtcggcgtgagcaggaggagctggtgatggtgggcaccaaccacgtggaataccgctatggcaagg

SEQ ID NO: 5351 - DNA, 478 bp, Homo sapien
aaaaaaattaagcgtaaaaaaaaattagtttttataaaaaattatagtttgaccttttgatttccctgcatctacaaggtagacctattaacttctcttggggtatcagtgatgtggaaaaaaaatgccatttttcttaatgtttaacccccctttatctttgaattgagctagagcctggtttaggacaaaggattaagtttgttaatgaacactaattcagggcttctacttgagaccccaccgagatcaccagttctcatgtaacctgggaagagccataaaggggtacccccaccccaactgccttcctggaagcatgcctgggaagtaagctgtaggcctgatccgagccaggaccactgggatccgtgcaaaggccaggggagggtagaattgaatcataggagtgaactccggcacctgttgtcttctgcgggtgacgcacactttaaatggaagagaggttgtggctata

SEQ ID NO: 5352 - DNA, 449 bp, Homo sapien
cccttgccagagtgactctggaggccccctggtctgtgacgagaccctccaaggcatcctctcgtggggtgtttacccctgtggctctgcccagcatccagctgtctacacccagatctgcaaatacacgtcctggatcaataaagtcatacgctccaactgatccagatgctacgctccagctgatccagatgttatgctcctgctgatccagatgcccagaggctccatcgtccatcctcttcctccccagtcggctgaactctccccttgtctgcactgttcaaacctctgccgccctccacacctctaaacatctcccctctcacctcattcccccacctatccccattctctgcctgtactgaagctgaaatgcaggaagtggtggcaaaggtttattccagagaagccaggaagccggtcatcacccagcctctgagagcagt

SEQ ID NO: 5353 - DNA, 474 bp, Homo sapien
gtcatttgatagaaagatgagatcggagacaatgttgatagttatagggcacacattgaaggtatatgccaaatctctcaccagataagtccttttctccctgtgccgttttcttgctcaaagggaacagtgaattagccagctagaatcttcctggtccctttttgaggcagtagcaggtaaggaaagggctgattttcatcaaaaccaagacctttctgcagggatgatagtggaataataatgtgggattagcccgctagcattaggagcagttgggaagttacctggtagatcaagcattacacacaaaaaatcaagttgatcagagtatgggttctccatatagcaatacttcagtgagattaagtataaacagtttttggcaaaaaacaacacagtctactctttctgcttacaaagacaaagccttacaaactcactatgaaggtaaagggaggacagcttgcttct

SEQ ID NO: 5354 - DNA, 441 bp, Homo sapien
agaatcttcaaattaggctcagaatccatttgggtcaatgaatttactgttattaagatcttagttgtgttcaaccatgatttgacataccttagagtgagaagatattcttcctggcctcagactagttgaaggtagagagagagacaggcccttgggtgtggggagacctctcctgggataatacacacaaaaaaccaagagctgctcactgtggtgcaggagacagcagggcctgaagccagaggtcgtgtgtccttgaatacaatgttttactcctctgacccctgttactgtgatttggagaggcagacaatataggatgggctttgcaggcagggaggtccagttataatcccagctcttactaagttgggtaagactcactctgagacttagtttcttctgtcatctctcaatagaatcataaaggtactttcc

(The sequence listing continues in the following parts.)

What is claimed:

1. A method for detecting the presence of ovarian cancer in a patient, comprising the steps of:
(a) obtaining a biological sample from a patient;
(b) contacting the biological sample with an oligonucleotide that hybridizes to a sequence set forth in any one of SEQ ID NO: 1-10,912 under highly stringent conditions;
(c) detecting in the sample an amount of a polynucleotide that hybridizes to the oligonucleotide; and
(d) comparing the amount of polynucleotide that hybridizes to the oligonucleotide to a predetermined cut-off value, and therefrom detecting the presence of ovarian cancer in the patient.

2. The method of claim 1, wherein said sequence is selected from a sequence set forth in any one of SEQ ID NO: 10863-10912.

3. The method of claim 1, wherein said sequence is selected from a sequence set forth in any one of SEQ ID NO: 10864-10869, 10872-10878, 10880-10884 and 10894-10895.

4. The method of claim 1, wherein said detecting in the sample an amount of a polynucleotide that hybridizes to the oligonucleotide is performed by a polymerase chain reaction.

5. The method of claim 1, wherein the biological sample is selected from the group consisting of serum and ovarian tissue.

6. An oligonucleotide useful in the detection of ovarian cancer in a patient, wherein said oligonucleotide hybridizes to a sequence set forth in any one of SEQ ID NO: 1-10,912 under highly stringent conditions.

7. A diagnostic kit comprising at least one oligonucleotide according to claim 6.

8. A method for detecting the presence of a cancer in a patient, comprising the steps of:
(a) obtaining a biological sample from a patient;
(b) contacting the biological sample with a binding agent that binds to a polypeptide selected from the group consisting of:
(i) a polypeptide encoded by a polynucleotide sequence set forth in any one of SEQ ID NO: 1-10,912;
(ii) a sequence having at least 90% identity to said polypeptide;
(iii) a sequence having at least 95% identity to said polypeptide;
(c) detecting in the sample an amount of polypeptide that binds to the binding agent; and
(d) comparing the amount of polypeptide to a predetermined cut-off value and therefrom detecting the presence of a cancer in the patient.

9. A method for stimulating and/or expanding T cells specific for an ovarian tumor protein, comprising contacting T cells with at least one component selected from the group consisting of:
(a) a polypeptide sequence selected from the group consisting of:
(i) a polypeptide encoded by a polynucleotide sequence set forth in any one of SEQ ID NO: 1-10,912;
(ii) a sequence having at least 90% identity to said polypeptide;
(iii) a sequence having at least 95% identity to said polypeptide;
(b) a polynucleotide selected from the group consisting of:
(i) a sequence set forth in any one of SEQ ID NO: 1-10,912;
(ii) a complement of a sequence set forth in any one of SEQ ID NO: 1-10,912;
(iii) a sequence consisting of at least 20 contiguous residues of a sequence set forth in any one of SEQ ID NO: 1-10,912;
(iv) a sequence that hybridizes to a sequence set forth in any one of SEQ ID NO: 1-10,912, under highly stringent conditions;
(v) a sequence having at least 90% identity to a sequence set forth in any one of SEQ ID NO: 1-10,912; and
(vi) a sequence having at least 95% identity to a sequence set forth in any one of SEQ ID NO: 1-10,912.

10. An isolated T cell population, comprising T cells prepared according to the method of claim 9.

11. A composition comprising a first component selected from the group consisting of physiologically acceptable carriers and immunostimulants, and a second component selected from the group consisting of:
(a) a polypeptide sequence selected from the group consisting of:
(i) a polypeptide encoded by a polynucleotide sequence set forth in any one of SEQ ID NO: 1-10,912;
(ii) a sequence having at least 90% identity to said polypeptide;
(iii) a sequence having at least 95% identity to said polypeptide;
(b) a polynucleotide sequence selected from the group consisting of:
(i) a sequence set forth in any one of SEQ ID NO: 1-10,912;
(ii) a complement of a sequence set forth in any one of SEQ ID NO: 1-10,912;
(iii) a sequence consisting of at least 20 contiguous residues of a sequence set forth in any one of SEQ ID NO: 1-10,912;
(iv) a sequence that hybridizes to a sequence set forth in any one of SEQ ID NO: 1-10,912 under highly stringent conditions;
(v) a sequence having at least 95% identity to a sequence set forth in any one of SEQ ID NO: 1-10,912;
(vi) a degenerate variant of a sequence set forth in any one of SEQ ID NO: 1-10,912;
(c) a T cell population according to claim 10; and
(d) antigen presenting cells that express a polypeptide selected from the group consisting of:
(i) a polypeptide encoded by a polynucleotide sequence set forth in any one of SEQ ID NO: 1-10,912.
(ii) a sequence having at least 90% identity to said polypeptide; and
(iii) a sequence having at least 95% identity to said polypeptide.
